United States Patent Application Publication US 2022/0096574 A1 - sequence listing, part 17

SEQ ID NO: 77204 - protein, 374 aa, Halomonas korlensis
  misc_feature (1)..(374): tr|A0A1I7HUF9|A0A1I7HUF9_9GAMM Epoxyqueuosine reductase OS=Halomonas korlensis OX=463301 GN=queG PE=3 SV=1
MSATMSHTQPDTLADAQPDLHALAARIKTWGRELGFQQLGITDIDLSADEARLERWLAAGHHGEMGFMAKHGTRRTRPEELIPGTVRVISVRLDYLPAEVETTKVLGQPRKAYVSRYATGRDYHKLMRKRLATLAKWIEAETGPFGYRAFVDSAPVMERALARKAGLGWFGKNAMLLHPKAGSLFFLGELYTDLPLPVDAPFEGEHCGSCSACRSACPTGAIVEDHVVDARACISYLTIELFGAIPERYREAMGNRVFGCDDCQLVCPFTRFTRASDEADFAPRHDLDRASLVSLFAWGEQEFLDKTAGSPIHRIGYERWLRNLAVGLGNAPWSETVEAALRARLPYPSDLVREHVRWALARQRDKREALIASA

SEQ ID NO: 77205 - protein, 350 aa, Halomonas meridiana
  misc_feature (1)..(350): tr|A0A0D7V1R7|A0A0D7V1R7_9GAMM Epoxyqueuosine reductase OS=Halomonas meridiana OX=29570 GN=queG PE=3 SV=1
MIKQWGRELGFQQVGITDTDLNDHESHLTNWLDKGYHGEMGFMAKHGTKRTRPDELEPGTRRVISVRMDYLPAEVESAKVLGQPNRAYVSRYALGRDYHKLMRKRLAQLAKHIEQEVGKFGFRAFVDSAPVMERALAQKAGLGWFGKNAMLLNPKAGSLFFLGELYTDLPLPVDAPFAQEHCGSCSACRTACPTGAIVDDKVVDSRKCISYLTIELHGAIPVEYRRAMGNRVYGCDDCQLVCPFTRFTKITQEEDFSPRHDLDRASLIALFSWGEEEFLDKTAGSPIRRIGYERWLRNLAVGLGNAPWSDAVEAALWARRAYPSALVREHVAWALDEQRHKRDARIATRA

SEQ ID NO: 77206 - protein, 384 aa, Halomonas meridiana
  misc_feature (1)..(384): tr|A0A1N6G4A1|A0A1N6G4A1_9GAMM Epoxyqueuosine reductase OS=Halomonas meridiana OX=29570 GN=queG PE=3 SV=1
MPSSTTFSLSRNQPSREHPTHERLSAEQLRQLAALIKQWGRELGFQQVGITDTDLNDHESHLTNWLDKGYHGEMGFMAKHGTKRTRPDELEPGTRRVISVRMDYLPAEVESAKVLGQPNRAYVSRYALGRDYHKLMRKRLAQLAKHIEQEVGKFGFRAFVDSAPVMERALAQKAGLGWFGKNAMLLNPKAGSLFFLGELYTDLPLPVDAPFAQEHCGSCSACRTACPTGAIVDDKVVDSRKCISYLTIELHGAIPVEYRRAMGNRVYGCDDCQLVCPFTRFTKITQEEDFSPRHDLDRASLIALFSWGEEEFLDKTAGSPIRRIGYERWLRNLAVGLGNAPWSDAVEAALWARRAYPSALVREHVAWALDEQRHKRDARIATRA

SEQ ID NO: 77207 - protein, 370 aa, Halomonas muralis
  misc_feature (1)..(370): tr|A0A1G9PQH6|A0A1G9PQH6_9GAMM Epoxyqueuosine reductase OS=Halomonas muralis OX=119000 GN=queG PE=3 SV=1
MPTTVADIQDYSPRELTELAERIKQWGRELGFAQVGITDTDLEAHERYLERWLAAGRHGEMGFMAKHGSKRTRPHELIPGTLRVISVRMDYLPPEVETTKLLAKPDKAYVSRYALGRDYHKLIRKRLAALVKHIEDEVGAFGYRAFVDSAPVMERALAQKAGLGWFGKNSMLLNPQAGSLFFLGELYTDLPLPVDAPFENEHCGNCSQCRTACPTGAIVDDKVVDSRRCISYLTIELHGSIPEQYREAMGNRVYGCDDCQLVCPFTRFTRASHERDFAPRHDLDRASLVRLFAWSEEEFLAKTEGSAIRRIGYIRWLRNLAVGLGNAPWSETLEAALRARLSYPSELVREHVRWALARQYEKRQRLIARS

SEQ ID NO: 77208 - protein, 382 aa, Halomonas nigrificans
  misc_feature (1)..(382): tr|A0A2A4HRY4|A0A2A4HRY4_9GAMM Epoxyqueuosine reductase OS=Halomonas nigrificans OX=2042704 GN=queG PE=3 SV=1
MPSSTTFPLSSEQLTSEQLSQLAELIKRWGRELGFQQVGITDTQLAAHETHLNAWLEKGYHGEMGFMAKHGTKRTRPEELEPGTQRVISVRMDYLPAEVESAKVLGQPQRAYVSRYALGRDYHKLIRKRLALLAKKIEQEVGKIGYRAFVDSAPVMERALAQKAGLGWFGKNAMLLNPKAGSLFFLGELYTDLPLPIDPPFEHEHCGSCSACRTACPTGAIVDDKVVDSRKCISYLTIELHGAIPIEFRRPMGNRVYGCDDCQLVCPFTRFTRTTQEDDFTPRHDLDRASLISLFAWGEAEFLDKTAGSPIRRIGYERWLRNIAIGLGNAPWSEAVEAALFARRAYPSALVREHVAWALEEQRLKRGERISTKTLYSSSSPA

SEQ ID NO: 77209 - protein, 370 aa, Halomonas nitroreducens
  misc_feature (1)..(370): tr|A0A3S0I6F2|A0A3S0I6F2_9GAMM Epoxyqueuosine reductase OS=Halomonas nitroreducens OX=447425 GN=queG PE=3 SV=1
MTQPSPAGDAPDLDRLAELIKTWGRELGFQQVGITDVDLAEDEARLQRWLDAGHHGEMGFMAKHGTRRTRPEELVPGTVRVISVRLDYLPAEVETTRMLARPDKAYVSRYAVGRDYHKLMRKRLAHLAKRIEDTVGAFGYRAFVDSAPVMERALARKAGLGWVGKNAMLLNPRAGSLFFLGELYTDLPLPVDAPFEAEHCGRCSACRSACPTDAIVEDKVVDARRCISYHTIELHGPIPEEFRAAMGNRVFGCDDCQLVCPFTRFTRTTREDDFSPRHALDRADLTTLFAWSEAEFLDKTAGSPIRRIGYERWLRNLAVGLGNAPWSEAVEAVLRARLPYPSDLVREHVRWALDRQHEKRQQLIAVSRKA

SEQ ID NO: 77210 - protein, 340 aa, Halomonas olivaria
  misc_feature (1)..(340): tr|A0A3T1DNH8|A0A3T1DNH8_9GAMM Epoxyqueuosine reductase OS=Halomonas olivaria OX=390919 GN=queG PE=3 SV=1
MGITDTELSAHEAHLDAWLEEGYHGEMGFMAKHGTKRTRPAELEPGTQRIISVRMDYLPAEVESTKVLGQPNRAYVSRYALGRDYHKLIRKRLALLAKKIEQEVGEFGYRAFVDSAPVMERALAQKAGLGWFGKNAMLLNPKAGSLFFLGELYTDLPLPIDAPFEHEHCGSCSACQTACPTGAIVDDKVVDSRKCISYLTIELHGAIPVEYRRAMGNRIYGCDDCQLVCPFTRFTRTTQENDFAPRHDLDRASLISLFAWGEAEFLDKTAGSPIRRIGYERWLRNIAIGLGNAPWSVAVESALWARRAYPSELVREHVDWALEEQRLKRGKRIATDIHSS

SEQ ID NO: 77211 - protein, 369 aa, Halomonas pacifica
  misc_feature (1)..(369): tr|A0A510XBL6|A0A510XBL6_9GAMM Epoxyqueuosine reductase OS=Halomonas pacifica OX=77098 GN=queG PE=3 SV=1
MPAPDDLAPDALDPAALAATIKTWGRELGFQQVGITDTDLATHERYLARWLAAGHHGEMGFMAKHGTKRTRPEELVPGTLRVISVRMDYLPPEVETTRLLGRPEKAYVSRYALGRDYHKLIRKRLAQLAKRIEGEVGAFGYRAFVDSAPVMERALAQKAGLGWFGKNAMLLNPRAGSLFFLGELYTDLPLPVDPPFESEHCGKCSACRSACPTDAIVDDKVVDSRRCISYLTIELHGAIPEEFREAMGNRVYGCDDCQLVCPFTRFTRLSDEADFAPRHDLDRTDLLRLFAWSEEEFLSKTEGSPIRRIGYERWLRNLAVGLGNAPWSEATEAALEARLAYPSDLVREHVRWALARQRDKRERRIATEG

SEQ ID NO: 77212 - protein, 367 aa, Halomonas pantelleriensis
  misc_feature (1)..(367): tr|A0A1G9H079|A0A1G9H079_9GAMM Epoxyqueuosine reductase OS=Halomonas pantelleriensis OX=48727 GN=queG PE=3 SV= 1
MSETTSSLAPADLQALADDIKTWGRELGFQQVGITDTDLEHHERYLERWLAAGHHGEMSFMAKHGTKRTRPAELVPGTLRVISARMDYLPPEVETTKTLGQPQIAYVSRYALGRDYHKLIRKRLAQLAKQIEQRVGAFGYRAFVDSAPVMERALAQKAGLGWFGKNSMLLNPQAGSLFFIGELYTDLPLPVDEPFASEHCGKCDACQVACPTGAIVDDKVVDSRRCISYLTIELHGAIPEQYRRAMGNRVYGCDDCQLVCPFTRFTRLSREDDFAPRHDLDRASLLRLFSWSEEEFLSNTEGSAIRRIGYPRWLRNLAVGLGNAPPSEAVRAALRARLAYPSDLVREHVRWALAEQAQKQAALIAAE

SEQ ID NO: 77213 - protein, 368 aa, Halomonas saccharevitans
  misc_feature (1)..(368): tr|A0A1I6Y3Q5|A0A1I6Y3Q5_9GAMM Epoxyqueuosine reductase OS=Halomonas saccharevitans OX=416872 GN=queG PE=3 SV= 1
MSPVSPTGDDPDMAALAERIKTWGRELGFQQLGITDVDLAEDEAHLEAWLDAGYHGEMGFMAKHGTKRTRPEELVPGTRRVISVRLDYLPAEVETTKVLGRPSLAYVSRYATGRDYHKLMRKRLATLAKWIEAEVGDFGYRAFVDSAPVMERGLARKAGLGWFGKNAMLLNPKAGSLFFLGELYTDLPLPVDAPFETDHCGSCSACRTACPTGAIVEDKVVDARACISYLTIELFGAIPERYREAMGNRVFGCDDCQLVCPFTRFTRVSQEPDFAPRHDLDRASLVSLFAWGEEEFLEKTAGNPIRRIGYERWLRNLAVGLGNAPWSQAVEAALLARLPYPSDLVREHVRWALDRQREKRRARIASTG

SEQ ID NO: 77214 - protein, 367 aa, Halomonas shengliensis
  misc_feature (1)..(367): tr|A0A1H0HP54|A0A1H0HP54_9GAMM Epoxyqueuosine reductase OS=Halomonas shengliensis OX=419597 GN=queG PE=3 SV=1
MSSPSALDDAPDPHALAERLRGWAHELGFQQLGITDVDLAEDEARLARWLAAGHHGEMGFMAKHGSKRTRPQELVPGTIRVISVRLDYLPAEVETLETLARPQTAFVSRYATGRDYHKLMRKRLAALAKRLEAEVGPFGYRAFVDSAPVMERALARKAGLGWVGKNAMLLHPRAGSWFFLGELYTDLPLPVDPPFEGEHCGSCSACRTACPTDAIVADRVVDARACISYLTIELHGAIPERYREAMGNRVFGCDDCQLVCPFTRFASPTGEADFTPRHALDRASLLALFAWGEEEFLEKTAGSPIRRIGYERWLRNLAVGLGNAPWSEAVEAALRARLAYPSELVREHVRWALDRQREKRQNIITSA

SEQ ID NO: 77215 - protein, 362 aa, Halomonas songnenensis
  misc_feature (1)..(362): tr|A0A2T0V7N4|A0A2T0V7N4_9GAMM Epoxyqueuosine reductase OS=Halomonas songnenensis OX=1176243 GN=queG PE=3 SV=1
MPHDELARLADLVKTWGRELGFQQVGITDVQLDAHEQHLATWLDKGYHGEMGFMAKHGTKRTRPAELEPGTQRVISVRMDYLPPEVETTKVLGQPGNAYVSRYALGRDYHKLMRKRLAQLARQIEQEVGTFGYRAFVDSAPVMERALAQKAGLGWFGKNAMLLNPKAGSLFFLGELYTDLPLPVDPPFEQEHCGSCSACRTACPTGAIVDDKVIDSRKCISYLTIELQGAIPVEFRRAMGNRVYGCDDCQLVCPFTRFTRISREQDFAPRHDLDRASLISLFAWGEEEFLDKTAGSPIRRIGYERWLRNLAVGLGNAPWSEAVEAALWARRAYPSPLVREHVAWALDEQRHKRGARIATAAP

SEQ ID NO: 77216 - protein, 384 aa, Halomonas sp.
  misc_feature (1)..(384): tr|A0A2D6PMY7|A0A2D6PMY7_HALSX Epoxyqueuosine reductase OS=Halomonas sp. OX=1486246 GN=queG PE=3 SV=1
  misc_feature (18)..(18): Xaa can be any naturally occurring amino acid
  misc_feature (60)..(60): Xaa can be any naturally occurring amino acid
  misc_feature (185)..(185): Xaa can be any naturally occurring amino acid
  misc_feature (248)..(248): Xaa can be any naturally occurring amino acid
  misc_feature (270)..(270): Xaa can be any naturally occurring amino acid
  misc_feature (294)..(294): Xaa can be any naturally occurring amino acid
MPSSTTFSLSRNQPSREXPTHERLSAEQLRQLAALIKQWGRELGFQQVGITDTDLNDHEXHLTNWLDKGYHGEMGFMAKHGTKRTRPDELEPGTRRVISVRMDYLPAEVESAKVLGQPSRAYVSRYALGRDYHKLMRKRLAQLAKHIEQEVGKFGFRAFVDSAPVMERALAQKAGLGWFGKNAMXLNPKAGSLFFLGELYTDLPLPVDAPFAQEHCGSCSACRTACPTGAIVDDKVVDSRKCISYLTXELHGAIPVEYRRAMGNRVYGCXDCQLVCPFTRFTKITQEEDFSPRXDLDRASLIALFSWGEEEFLDKTAGSPIRRIGYERWLRNLAVGLGNAPWSDAVEAALWARRAYPSALVREHVAWALDEQRHKRDARIATRA

SEQ ID NO: 77217 - protein, 366 aa, Halomonas sp.
  misc_feature (1)..(366): tr|A0A3N9U834|A0A3N9U834_9GAMM Epoxyqueuosine reductase OS=Halomonas sp. YLB-10 OX=2483111 GN=queG PE=3 SV=1
MSASSPSTDVDFNDLAARIRTWGRELGFQQVGITDVDLSDDEAHLERWLEAGFHGEMGFMAKHGTKRTRPAELEPGTIRVISVRLDYLPPEVETTKVLGQPSRAYVSRYATGRDYHKLMRKRLQRLAKTIEAEVGDFGYRAFVDSAPVMERGLARKAGIGWFGKNAMLLNPRAGSMFFLGELYTDLPLPVDEPFEQEHCGSCSACRTACPTGAIVEDKVVDARACISYLTIELFGAIPERYREAMGNRVFGCDDCQLVCPFTRFTRASSEPDFAPRHDLDRVELLTLFGWSEEEFLERTAGSPIRRIGYERWLRNLAVGLGNAPWSAAIERALLTRLAYPSELVREHVRWALARQRQRRAELITSA

SEQ ID NO: 77218 - protein, 375 aa, Halomonas subglaciescola
  misc_feature (1)..(375): tr|A0A1M7F682|A0A1M7F682_9GAMM Epoxyqueuosine reductase OS=Halomonas subglaciescola OX=29571 GN=queG PE=3 SV=1
MSATVPPSSSRTASLSAAELASLADDIKAWGDELGFQQVGITDTQLEDHEAHLNDWLDKGYHGEMGFMTKHGTKRTRPAELEPGTIRVISVRMDYLPADMESVAVLNQPERAYVSRYALGRDYHKLMRKRLAALAKRIEAQVGSFGYRAFVDSAPVMERALAQKAGLGWFGKNAMMLNPQAGSLFFLGELYTDLPLPVDAPFARDHCGSCNACQTVCPTGAIVADKVVDARKCISYLTIELHGAIPEQYRRAMGNRIYGCDDCQLFCPFTRFTQTTREADFAPRHDLDRAELLTLFGWGEEEFLDKTAGSAIRRIGYERWLRNIAVALGNAPFSHAVEAALMARRSYPSALVREHVAWALTEQRHRRNNRIATAE

SEQ ID NO: 77219 - protein, 363 aa, Halomonas subterranea
  misc_feature (1)..(363): tr|A0A1H9R3H6|A0A1H9R3H6_9GAMM Epoxyqueuosine reductase OS=Halomonas subterranea OX=416874 GN=queG PE=3 SV=1
MLSDDTLAGLADLIKTWGRELGFQQVGITDTQLEAHEAHLHAWLDKGYHGEMGFMAKHGTKRTRPAELEPGTQRVISVRMDYLPAEVESTKVLGQPNRAYVSRYALGRDYHKLMRKRLAQLAKQIEHEVGAFGYRAFVDSAPVMERALAQKAGLGWFGKNAMLLNPKAGSLFFLGELYTDLPLPVDAPFEEEHCGSCSACRTACPTGAIVDDKVIDSRKCISYLTIELHGSIPVEYRRAMGNRIYGCDDCQLVCPFTRFTRATQEDDFAPRHDLDRASLVRLFAWGEEEFLAKTAGSPIRRIGYERWLRNIAVGLGNAPWSEAVETALWSRRAYPSALVREHVAWALEEQRFKRATCIATAAS

SEQ ID NO: 77220 - protein, 179 aa, Halomonas sulfidaeris
  misc_feature (1)..(179): tr|A0A455U8G4|A0A455U8G4_9GAMM 4Fe-4S ferredoxin-type d omain-containing protein OS=Halomonas sulfidaeris OX=11 5553 GN=HSBAA_23450 PE=4 SV=1
MPIDAPFEQEHCGSCSACRTACPTGAIVDDKVVDSRKCISYLTIELHDAIPVELRRAMGNRIYGCDDCQLVCPFTRFTRITQEDDFAPRHDLDRTTLISLFAWGEAEFLDKTAGSPIRRIGYERWLRNIAIGLGNAPWSQAVEAALWARRAYQAHWCVNTSPGRLKNNSSSAVIALPLI

SEQ ID NO: 77221 - protein, 107 aa, Halomonas sulfidaeris
  misc_feature (1)..(107): tr|A0A455U4K8|A0A455U4K8_9GAMM DUF1730 domain-containin g protein OS=Halomonas sulfidaeris OX=115553 GN=HSBAA_2 3460 PE=4 SV=1
MGFMAKHGTKRTRPAELEPGTQRIISVRMDYLPAEVESTKVLGQPSRAYVSRYALGRDYHKLMRKRLALLAKKIEQAVGRFGYRAFVDSAPVMERALAQKSRARLVR

SEQ ID NO: 77222 - protein, 373 aa, Halomonas taeanensis
  misc_feature (1)..(373): tr|A0A1G7NAA8|A0A1G7NAA8_9GAMM Epoxyqueuosine reductase OS=Halomonas taeanensis OX=284577 GN=queG PE=3 SV=1
MSTTASPQAPSAPQALSDTDLAALAAKIKVWGRELGFQELGITDTDLSNHERYLERWLAAGYHGEMGFMEKHGTKRTRPAELVPGTLRVISARMDYLPPEVETTKVLGQPDTAYVSRYALGRDYHKLIRKRLATLAKRIEAEVGTFGYRAFVDSAPVMERALARKAGLGWFGKNAMLLNPKAGSLFFLGELYTDLPLPADEPFESEHCGKCSSCRTACPTGAIVEDKVVDSRRCISYLTIELHGAIPEQYREAMGNRVYGCDDCQLVCPFTRFTRISQEEDFAPRHDLDRIELTRLFAWSEEEFLDKTTGSAIRRIGYERWLRNLAVGLGNAPWSETVEAALKARLAYPSDLVREHVRWALERQRDKRAQRII

SEQ ID NO: 77223 - protein, 379 aa, Halomonas taeanensis
  misc_feature (1)..(379): tr|A0A328XQM9|A0A328XQM9_9GAMM Epoxyqueuosine reductase OS=Halomonas taeanensis OX=284577 GN=queG PE=3 SV=1
MSTTASQQAPSAQQASSGAKALSDADLAALAAKIKVWGRELGFQELGITDTDLSSHERYLERWLAAGYHGEMGFMEKHGTKRTRPEELVPGTLRVISARMDYLPPEVETTKVLGKPDIAYVSRYALGRDYHKLIRKRLATLAKRIEAEVGAFGYRAFVDSAPVMERALAQKAGLGWFGKNAMLLNPQAGSLFFLGELYTDLPLPVDAPFETEHCGKCSSCRTACPTGAIVDDKVVDSRRCISYLTIELHGAIPEQYREAMGNRVYGCDDCQLVCPFTRFTRASQEEDFAPRHDLDRIALTRLFAWSEEEFLDKTAGSAIRRIGYERWLRNLAVGLGNAPWSETVEAALKARLAYPSDLVREHVRWALERQRDKRAQRIL

SEQ ID NO: 77224 - protein, 363 aa, Halomonas titanicae
  misc_feature (1)..(363): tr|A0A558J2P6|A0A558J2P6_9GAMM Epoxyqueuosine reductase OS=Halomonas titanicae OX=664683 GN=queG PE=3 SV=1
MLSENTLTDLADLIKTWGRELGFQQVGITDTELSAHEAHLDAWLENGHHGEMGFMAKHGTKRTRPAELEPGTQRIISVRMDYLPAEVESTKVLGQPSRAYVSRYALGRDYHKLIRKRLALLAKKIEQEVGDFGYRAFVDSAPVMERALAQKAGLGWFGKNAMLLNPKAGSLFFLGELYTDLPLPIDAPFEHEHCGSCSACRTACPTGAIVDDKVVDSRKCISYLTIELHGAIPVEYRRAMGNRIYGCDDCQLVCPFTRFTHITQEDDFAPRHDLDRATLISLFCWGEAEFLDKTAGSPIRRIGYERWLRNIAVGLGNAPWSEAVEAALWARRAYPSALVREHVAWALEEQRLKRSERIATDAS

SEQ ID NO: 77225 - protein, 386 aa, Halomonas urumqiensis
  misc_feature (1)..(386): tr|A0A2N7UCX0|A0A2N7UCX0_9GAMM Epoxyqueuosine reductase OS=Halomonas urumqiensis OX=1684789 GN=queG PE=3 SV=1
MTVHSPFTDSADANEIGADVTRPGNAPDLTALAQRIKTWGRELGFQQVGITDVDLREDEAHLQRWLDAGHHGEMGFMAKHGTKRTRPAELEPGTLRVISVRLDYLPAEVETTKVLGQPERAYVSRYATGRDYHKLMRKRLARLARQIEAEVGPIGYRAFVDSAPVMERALARKAGLGWFGKNAMLLNPKAGSLFFLGELYTDLPLPVDPPFEGDHCGSCSACRSACPTDAIVEDRVVDARRCISYLTIELHGSIPEEFREAMGNRVFGCDDCQLVCPFTRFTRISAEADFAPRHDLDRASLLSLFAWSEEEFLAKTAGSPIRRIGYARWLRNLAVGLGNAPWSEAVEAALMARLPYPSALVREHVRWALARQRDKRQRMIAVSRES

SEQ ID NO: 77226 - protein, 368 aa, Halomonas ventosae
  misc_feature (1)..(368): tr|A0A4R6ZFD7|A0A4R6ZFD7_9GAMM Epoxyqueuosine reductase OS=Halomonas ventosae OX=229007 GN=queG PE=3 SV=1
MSAPAPIPDTPSDLQALADRIRTWGRELGFQQLGITDVDLAEDEQRLARWLGAGHHGEMAFMAKHGTKRTRPAELVPGTVRVISVRLDYLPAEVETAKVLGRPQTAYVSRYATGRDYHKLMRKRLATLAKWIEAEVGSFGYRAFVDSAPVMERALARKAGLGWFGKNAMLLNPRAGSLFFLGELYTDLPLPVDAPFEGDHCGSCSACRTACPTGAIVEDRVVDARACISYLTIELHGAIPERFRAAMGNRVFGCDDCQLVCPFTRFTRVSREADFAPRHDLDRASLVSLFAWGEEEFLEKTAGSPIRRIGYERWLRNLAVGLGNAPWSEAVEAALWARLPYPSALVREHVRWALARQREKRQRLIAAG

SEQ ID NO: 77227 - protein, 368 aa, Halomonas ventosae
  misc_feature (1)..(368): tr|A0A4R6HJM5|A0A4R6HJM5_9GAMM Epoxyqueuosine reductase OS=Halomonas ventosae OX=229007 GN=queG PE=3 SV=1
MSMPATTCDTSPDLHALAERIRAWGRELGFQQLGITDTDLTEDEHHLQRWLEAGHHGEMEFMAKHGTRRTRPAELVPGTLRVISVRLDYLPAEVDTAKVLGQPTTAYVSRYATGRDYHKLMRKRLATLAKWIEAEVGPIGYRAFVDSAPVMERALARKAGLGWFGKNAMLLNPRAGSLFFLGELYTDLPLPVDEPFAGDHCGSCSACRTACPTGAIVEDRVVDARACISYLTIELHGAIPERYRAAMGNRVFGCDDCQLVCPFTRFTRLSREADFAPRHELDRASLLSLFAWGEEEFLDKTAGSPIRRIGYARWLRNLAVGLGNAPWSEAVEAALWARLPYPSELVREHVRWALARQREKRQRLIAAG

SEQ ID NO: 77228 - protein, 370 aa, Halomonas venusta
  misc_feature (1)..(370): tr|A0A3Q8WEC0|A0A3Q8WEC0_9GAMM Epoxyqueuosine reductase OS=Halomonas venusta OX=44935 GN=queG PE=3 SV=1
MQNSTTFSLSDDDLTHLAALIKTWGRELGFQQVGITDTQLAVHEKHLATWLEKGYHGDMSFMAKHGTKRTRPEELEPGTQRVISVRMDYLPAEVESTKVLGQPSRAYVSRYALGRDYHKLIRKRLAQLAKKIEQQVGAFGYRAFVDSAPVMERALAQKAGLGWFGKNAMLLNPKAGSLFFLGELYTDLPLPIDTPFTQQHCGSCSACRTACPTGAIVDDKVVDSRKCISYLTIELHGAIPTEFRRAMGNRIYGCDDCQLVCPFTRFTRVTQEDDFAPRHDLDRADLLNLFAWGEDEFLDKTAGSPIRRIGYERWLRNIAIGLGNAPWSRAVEAALWARRAYPSSLVREHVAWALEEQRLKRGAKIATDGV

SEQ ID NO: 77229 - protein, 370 aa, Halomonas xianhensis
  misc_feature (1)..(370): tr|A0A1I2Y761|A0A1I2Y761_9GAMM Epoxyqueuosine reductase OS=Halomonas xianhensis OX=442341 GN=queG PE=3 SV=1
MMTRQSVHDGDALDLTGLAERIRQWGRELGFQQIGITDTDLATHERYLERWLAAGHHGEMAFMAKHGSKRTRPEELVPGTLRVISARMDYLPPEIETTKVLGQADKAYVSRYALGRDYHKLIRKRLATLAKHIENEVGSFGYRAFVDSAPVMERALAQKAGLGWFGKNSMLLHPQAGSLFFLGELYTDLPLPVDAPFDSEHCGKCNQCRTACPTGAIIDDKVVDSRRCISYLTIELHGSIPEAYREAMGNRIYGCDDCQLVCPFTRFTRASHEEDFAPRHDLDRAALVRLFAWSEEEFLLRTEGSAIRRIGYERWLRNLAVGLGNAPWSETVEAALRARLAYPSDLVREHVRWALDRQSDKRGRLIATID

SEQ ID NO: 77230 - protein, 370 aa, Halomonas xianhensis
  misc_feature (1)..(370): tr|A0A4R8G425|A0A4R8G425_9GAMM Epoxyqueuosine reductase OS=Halomonas xianhensis OX=442341 GN=queG PE=3 SV=1
MMTRQSVHDGDALDLTGLAERIRQWGRELGFQQIGITDTDLATHERYLERWLAAGHHGEMAFMAKHGSKRTRPEELVPGTLRVISARMDYLPPDVETTKVLAQADKAYVSRYALGRDYHKLIRKRLATLAKHIENEVGSFGYRAFVDSAPVMERALAQKAGLGWFGKNSMLLHPQAGSLFFLGELYTDLPLPVDAPFDSEHCGKCNQCRTACPTGAIIDDKVVDSRRCISYLTIELHGSIPEEYREAMGNRVYGCDDCQLVCPFTRFTRASHEEDFAPRHDLDRAALVRLFAWSEEEFLLRTEGSAIRRIGYERWLRNLAVGLGNAPWSETVEAALRARLAYPSDLVREHVRWALERQSDKRRRLIATTD

SEQ ID NO: 77231 - protein, 377 aa, Halopeptonella vilamensis
  misc_feature (1)..(377): tr|A0A4Q8D0Y1|A0A4Q8D0Y1_9GAMM Epoxyqueuosine reductase OS=Halopeptonella vilamensis OX=531306 GN=queG PE=3 SV =1
MAQTHDNSRILPEIREWAGELGFDELGVARPALARDEQHLLRWLQDGRHGTMRWMARHGVKRARPERLVPGTIRVISVRMDYLPPDLEADDAILADGRRAFIARYALGRDYHKLMRKRLQALAQRIESAVGSFGYRVFVDSAPVLEKALGRDAGLGWIGKNTLLLNRHAGSYFFLGEIFTDLPLPTSEPVADLCGSCRACIDVCPTGAITGPGQLDARRCVSYLTIEHEGSIPEELRPAIGNRVFGCDDCQAVCPWNRYAQPTDEADFHPRHGLESASLVALFRWDEATFLKRTEGSAIRRLGHERWLRNLAVALGNGPADPEAIEALRERLDHPSALVTEHVQWALARLLNPASRDSAQSVQRWSYPVPSARDRRQ

SEQ ID NO: 77232 - protein, 342 aa, Haloplasma contractile
  misc_feature (1)..(342): tr|U2EDD8|U2EDD8_9BACT 2-oxoglutarate ferredoxin oxidor eductase subunit delta protein OS=Haloplasma contractil e SSD-17B OX=1033810 GN=HLPCO_000602 PE=4 SV=1
MDKRKNLANFIESLGNYKVGFVQCDILHELEEILTRNIEQNFDSNMIKVAVEDRINPFRYMENAKTILVLAVPYYYDDDSLKKERYVFSRSSWGRDYHHVVKELLQKVSKYIKDTFNHNSVILSDNHDLDERFLAYKSGIGHYGKNASIINDEYGTYFYLGLLITDLPLEEESYTNQDELVDLCKDCNLCVNACPTDALTGDKRLDAKKCMSYLTQAKEEIDEPFIKKFQKYIYGCDICQIVCPHNKKIEKTDIHELFTPTGNEKVNPDELFNLSNRQFKSKYGDLSGSWRGKKVLLRNAILIAANNNHEAVIQLAREMDLEKEPEWFKHTVKQILNKRKEQ

SEQ ID NO: 77233 - protein, 354 aa, Halorhodospira halochloris
  misc_feature (1)..(354): tr|A0A0X8X7X7|A0A0X8X7X7_HALHR Epoxyqueuosine reductase OS=Halorhodospira halochloris OX=1052 GN=queG PE=3 SV= 1
MSTEPIDPAPIRSWAKELGFSDCRIAAPHLPIEDEERLLDWLRQQRHGEMHFMARHGRKRARPKQLFPDAQAIIVVRMDHFPATSAAQQAVLAEPSRGYVARYALGRDYHKVLRQRLALLGQRIAQEYSSHGPISHRTFVDSAPVLERALARQAGIGWVGKNTQLICKDAGSYCLLGELFVSLPLAPDSPVSNHCGSCRACLHNCPSQALLSPYQLDARRCVSYLTIEHPGSIPEELRPAIGNRIFGCDSCQQVCPWNHQTAQTALDDFQPRHGLDNALLAHLFEWDEATFLDRTAGMVIRRAGYERWRRNLAVALGNCAPSAESVSALNSGLSDPSAVVREHVRWALERLGHG

SEQ ID NO: 77234 - protein, 355 aa, Halorhodospira halophila
  misc_feature (1)..(355): tr|A1WUU2|A1WUU2_HALHL Epoxyqueuosine reductase OS=Halo rhodospira halophila (strain DSM 244 / SL1) OX=349124 G N=queG PE=3 SV=1
MDPSDLTPSIRTWAAELGFSACGIASTELPGDEAHLIRWLQAGHQGAMGFMGRHGRKRARPRQLVPGTRSVVVVRMDYTPDQAADPRAVLDDPQRAFITRYSLGRDYHKLVRRRLQKLAERIQAAIGPFGYRAFVDSAPVLERALARDAGLGWIGKNTMLLNRHAGSYFFLGELFTDLPLPTDTPVRTHCGSCRRCLHACPTDAFVGPYQLDARRCISYLTIEHPGPIPEALRPAMGNRIFGCDDCQLVCPWNRYAHPTAEADFQPRHGLDDAALVALFGWDEATYLERTAGSAIRRIGHERWLRNLAVALGNAASTREVVAALGERLDHPSALVREHVRWALARHGAAPERTGD

SEQ ID NO: 77235 - protein, 351 aa, Halospina denitrificans
  misc_feature (1)..(351): tr|A0A4R7JXT1|A0A4R7JXT1_9GAMM Epoxyqueuosine reductase OS=Halospina denitrificans OX=332522 GN=queG PE=3 SV=1
MTDSLQATADKIRDWAHELGFQAVGITDTQLEETGQRLNQWLDRELNADLGYMAQHGEKRYRPAQLVEGTERIIAVRLDYRPDPDDPDAVLADDEKAYITRYSLGRDYHKLMRKRLAKLAKWIDEALPGYYHRAFVDSAPVMEKPIAVKAGLGWQGKHTLLLHPKAGSWFFLGEIYTSAPLPMDAPYPTDHCGSCTACLDVCPTNAFPEPYVLDAARCISYLTIENNGPIPEELRPLMGNRVFGCDDCQLVCPFNKFSESTEEPDFQPRHGLDNSTLAELFLWDEETFLKRTEGSAIRRAGYEGWLRNLAVGLGNAPSTIPVIEALRARKEYPSEMVREHVEWALRRHEVA

SEQ ID NO: 77236 - protein, 353 aa, Halospina sp.
  misc_feature (1)..(353): tr|A0A5J5FHM4|A0A5J5FHM4_9GAMM tRNA epoxyqueuosine(34) reductase QueG OS=Halospina sp. K52047b OX=2614160 GN=q ueG PE=4 SV=1
MTNDLTATAEQIRDWAHELGFQAVGITDTELEETGQRLNQWLDRGLNADLSYMAQHGEKRYRPAQLVEGTERIIAVRLDYRPEPDAPDAVLADDEKAYITRYSLGRDYHKLMRKRLAKLAKWIDEALPGYYHRAFVDSAPVMEKPIAVKAGLGWQGKHTLLLHPQAGSWFFLGEIYTSAPLPVDEPWTTDHCGSCTACLDVCPTNAFPEPYVLDAARCISYLTIENNGPIPEELRPLMGNRVFGCDDCQLVCPFNKFSESTEEPDFQPRHGLDNSTLAELFLWDEATFLKRTEGSAIRRAGYEGWLRNLAVGLGNAPSTIPVIEALRAREDCPSELVREHVQWALRRHGIVQV

SEQ ID NO: 77237 - protein, 366 aa, Halotalea alkalilenta
  misc_feature (1)..(366): tr|A0A172YDV3|A0A172YDV3_9GAMM Epoxyqueuosine reductase OS=Halotalea alkalilenta OX=376489 GN=queG PE=3 SV=1
MTDDALRQEPDLTALKAKLLVWGRELGFQQLGVADVELGEHREHLARWLDAGMHGEMGYMAEHGDKRWRPDQLVPGTRRVITARMDYLPPEVETTKLLGQPDKAYISRYALGRDYHKLIRKRLTTLAKWLEAEIGPFGYRAFVDSAPVLERALAQRSGLGWFGKNSMLLSPKAGSLFFLGELYTDLPLPVDPPFEREHCGSCERCKSACPTGAIVDDKVIDARRCISYLTIELKGAIPLEFRRAIGNRVYGCDDCQLVCPFTRFTRASPEPDFAPRHALDRAELIELFAWSEEEFLERTEGSAIRRIGHQRWLRNIAVGLGNAPWSPRVVDALEARRNDPSALVREHVEWALAEQRRRAPTLLAHG

SEQ ID NO: 77238 - protein, 310 aa, Halothece sp.
  misc_feature (1)..(310): tr|K9Y860|K9Y860_HALP7 Epoxyqueuosine reductase OS=Halo thece sp. (strain PCC 7418) OX=65093 GN=queG PE=3 SV=1
MSLNSTQIKAKAKSLGFHKVGIAAANNQEQIEAQTRLKNWLTLGYQADMKWMDNPKRFDLEKCLPNVQSVIAVALNYYTSHSQPENSEQGKVSRYAWGRDYHKVMQKKLKALARWLDEQAPEARSRYYSDTGPVQDKFWAQQAGLGWIAKNSNVITRDYGSWVFLGEVLTTLTLTPDSPHTEHCGTCTRCLEACPTDAFPQPFVVDANRCIAYHTIENRAEKLPENIDLKGWVAGCDICQEVCPWNQRFAQETDCEDFQLRSDHLAPNLAELAQLSAETWDQKTRGSALRRIKPEMWRRNARANLGKDGT

SEQ ID NO: 77239 - protein, 367 aa, Halothermothrix orenii
  misc_feature (1)..(367): tr|B8CX11|B8CX11_HALOH Iron-sulfur cluster binding prot ein, putative OS=Halothermothrix orenii (strain H 168 / OCM 544 / DSM 9562) OX=373903 GN=Hore_10760 PE=4 SV=1
MDLTTMIKAKARDIGFDIVGITSAAPLLKAREVLEKRKEAGQLPGFTDEDILLSTTPRMHLEDARSIIALAMSYASKVEFDEEVYIALYARGKDYHTIMRNKMNELIDFIKNINPESNCKSFVDTGPLLDKEIAARAGLGWIGKNNLLINPEYGSFLVLGEILTSLELKYDNPIENGCKNCQACIQMCPTGALKPYYLDLSRCRSNITQKTGILSEEEKKAIGENLWGCDSCQMVCPYNENLPLDLHPEYRPVLPGKIEEVLGLTKKNMGDQWKNSPMMWRGTNIIKRNALINLVNLYNKGVNITDVLEIIKKGLKSPSPVVRITAAWAAGKIKARELKDFILKLLKSEKDKVVENYFKKVIKRLNQ

SEQ ID NO: 77240 - protein, 357 aa, Halothiobacillaceae bacterium
  misc_feature (1)..(357): tr|A0A545SJJ2|A0A545SJJ2_9GAMM Epoxyqueuosine reductase OS=Halothiobacillaceae bacterium OX=2268194 GN=queG PE =3 SV=1
MSMDPVELAAMIKAMGAELGFQHVGITGIDLSRHEAGFLRWLDAGMHGEMDYMARHGLKRLRPAELQPGTRSVISVRMDYMPEGLADAPGVLMDGRKGYVSRYALGRDYHKVLRSRLQRLAERIQAHIGPFGHRVFVDSAPVYETGLAEQAGLGWKGKHSLVLHRGAGSWFFLGELFVDLALPPDEPAAQGHCGRCTACIDICPTGAIVADGVVDARRCISYLTIEHAGAIPVELRPMLGNRIYGCDDCQLACPWNRFARPTGETDFAPRNGLEAADLLALWAWDERAFLSRTEGSPIRRIGFERWRRNLAVALGNAPADKATLRALETALEGSDGVVAEHVRWAIGRQRAMLRGRD

SEQ ID NO: 77241 - protein, 373 aa, Halothiobacillus neapolitanus
  misc_feature (1)..(373): tr|D0KZJ3|D0KZJ3_HALNC Epoxyqueuosine reductase OS=Halo thiobacillus neapolitanus (strain ATCC 23641 / c2) OX=5 55778 GN=queG PE=3 SV=1
MFNPDELKAQIKVWAIELGFDELRVTDTDLSHYEAGYLDWIAQKHQGTMDYLVTHGLKRFRPAELVPGTLRVLAVRKNYLPPDSSGPRDVLHNPELGYVSRYALGRDYHKVMRSNLQKLAERITQEIGAFGFRAFVDSAPVYETGLAEKAGIGWKGKHSLILNRQGGSWFFLGELFIDFDLPVDEPVESHCGSCTACITVCPTQAIVADGVVDARRCISYLTIESKDDIPPEFREAMGNRIYGCDDCQLVCPWNRFARVAADADFRARHGLDAPGLIELFLWDEPTFLHKTEGMAIRRIGWQRWLRNVAVALGNLLRNQPDNTSAVAALQARCGQVGDQLDRHIQWALAQREGLPNGESKTAKMFEDALSMPE

SEQ ID NO: 77242 - protein, 351 aa, Halothiobacillus sp.
  misc_feature (1)..(351): tr|A0A259RVL5|A0A259RVL5_9GAMM Epoxyqueuosine reductase OS=Halothiobacillus sp. 13-55-115 OX=1970378 GN=queG P E=3 SV=1
MFDPVELKAQIKDWAIEFDFDDLRVTDTDLSRYEAGFIQWIEQNYHGTMDYMAKYGLTRLRPHELVPKTLRILCVRKNYLPPDARGPRDVLHDSELGYVSRYALGRDYHKVLRSNLQKLAERITDAIGPFGFRAFVDSAPVYETGLAEKAGIGWKGKHSLILNRQAGSWFFLGELFIDFDLPLDEPVESHCGSCTACITVCPTQAIVADGVVDARRCISYLTIESKDDIPQELRPAMGNRIYGCDDCQLVCPWNRFARVAADADFRARHGLDAPGLIELFLWDERTFLHKTEGMAIRRIGWQLWLRNVAVALGNLLRNQPDNTPAIEALQARYGQVSDQLDRHIQWALAQR

SEQ ID NO: 77243 - protein, 355 aa, Halothiobacillus sp.
  misc_feature (1)..(355): tr|A0A0W1RW93|A0A0W1RW93_9GAMM Epoxyqueuosine reductase OS=Halothiobacillus sp. XI15 OX=1766620 GN=queG PE=3 S V=1
MSVEAEDLKRRILAWAEELGFTDARVTDTDLSAYEQGFRDWLADGNAGSMTFLERHGLLRFRPEELVPGTRRVLMVSRDYLPPETTGPRHVLGNPALGYVSRYALGRDYHKLVRKRLAQLARRISDEIGPFTHRAFVDSAPVYETGLAEKAGLGWKGKHSLVLNRSGGSWFFLGALFLDLDLPVDEPVDDHCGTCTACIDVCPTGAIVADGVVDARRCISYLTIEADEDIPESLRPMIGNRIYGCDDCQLVCPWNRFARQTEDADFHARNGLDAPELVTLFRWDEATFLQRTEGSAIRRIGWRRWRRNLAVALGNIPTDTPGVAEAVAALEAGLGEAGDQVDRHIRWALARLRAA

SEQ ID NO: 77244 - protein, 361 aa, Halovibrio sp.
  misc_feature (1)..(361): tr|A0A2A2F1F1|A0A2A2F1F1_9GAMM Epoxyqueuosine reductase OS=Halovibrio sp. YL5-2 OX=2032626 GN=queG PE=3 SV=1
MTDDLTATAQRIRDWAHDLGFQAVGITDTHLEETGQQLNQWLERGLNADLSYMSAHGEKRYRPAQLVEGTERIIAVRLDYRPEPDDPDTVLADDEKAYITRYSLGRDYHKLMRKRLAKLAKWIDEALPGYYHRAFVDSAPVMEKPIAVKAGLGWQGKHTLLLHPQAGSWFFLGEIYTSAPLPVDEPWATDHCGTCTACLDVCPTNAFPEPYVLDAGRCISYLTIENNGPIPEELRPLMGNRVFGCDDCQLVCPFNKFSESTEEPDFQPRHGLDNSTLAELFLWDEETFLKRTEGSAIRRAGYEGWLRNLAVGLGNAPSTIPVIEALKARTDYPSEMVREHVQWALRQHDPISPRADASAGQ

SEQ ID NO: 77245 - protein, 381 aa, Halovibrio variabilis
  misc_feature (1)..(381): tr|A0A511UPL5|A0A511UPL5_9GAMM Epoxyqueuosine reductase OS=Halovibrio variabilis OX=31910 GN=queG PE=3 SV=1
MPDSTALARSRDAFSDQALARLADLIKTWGRELGFQQVGITDTELSNHEAHLDAWLEKGYHGEMGFMAKHGTKRTRPAELEPGTQRIICVRMDYLPAEVESTKVLGQPSRAYVSRYALGRDYHKLMRKRLAQLAKKIEHEVGDFGYRAFVDSAPVMERALAQKAGLGWFGKNAMLLNPKAGSLFFLGELYTDLPLPVDTPFSEEHCGSCSACRTACPTGAIVDDKVIDSRKCISYLTIELDGAIPVEFRRAMGNRVYGCDDCQLVCPFTRFTRITKENDFAPRHDLDRASLISLFAWGEAEFLDKTAGSPIRRIGYERWLRNIAVGLGNAPWSEAVEAALWSRRAYPSELVREHVAWALEEQRGKRVKRIATDTYSSSSLC

SEQ ID NO: 77246 - protein, 243 aa, Handelsmanbacteria sp.
  misc_feature (1)..(243): tr|A0A1F6CBG9|A0A1F6CBG9_HANXR tRNA epoxyqueuosine(34) reductase QueG (Fragment) OS=Handelsmanbacteria sp. (st rain RIFCSPLOWO2_12_FULL_64_10) OX=1817868 GN=A3F84_271 30 PE=4 SV=1
DTGPVLEREAAVRAGLGWFGKHTGLIHKRAGSWLLLGEILLTAELDYDTPGPDHCGTCTRCIDACPTGAILEPYVLDSRKCISYLTIEVKGAIPADMRAQVGDWVFGCDVCQEVCPWNRKAPATAEPAFAPHEGPEAPDLIELLRMDQAAFSARFKGSPIKRTKRRGLLRNAAVSLGNSGDRRAVPALAEALNDPEALVRGHAAWALGRLGGDEARAVLKAALGREEDAEARGEIERALGAIA

SEQ ID NO: 77247 - protein, 376 aa, Hansschlegelia sp.
  misc_feature (1)..(376): tr|A0A4Q9GGP6|A0A4Q9GGP6_9RHIZ Epoxyqueuosine reductase OS=Hansschlegelia sp. Dub OX=2528245 GN=queG PE=3 SV=1
MTPVALRSALEARARSLGFDAFGVTTPGGIPQAAPRLAQALADGHHGTMRWLSDRAEWRGDPSALWPEARSVVMLGMNYGPDEDPRAVLQRRERGAISVYARGDDYHEVIKGRLKQVAGALASMGAQAKVFVDTAPVMEKPLAEAAGLGWQGKHTNLLSREFGSWLFLGAIFTTAELPIDEPAVGSCGSCRACLDACPTDAFPAPYRLDARRCISYLTIEHAGPIPQEFREAIGSRIYGCDDCLAACPWNKFAQEGREMRLSAREALRAPALAELAGLNDADFRALFAKSPIKRIGRDRFLRNVALAIGNSGVPAMAVHAERLTRDSSALVRGAAVWALSRLAPATVSALAEDAASTETEASVRDEWRAATALEPA

SEQ ID NO: 77248 - protein, 377 aa, Hansschlegelia zhihuaiae
  misc_feature (1)..(377): tr|A0A4Q0MPQ4|A0A4Q0MPQ4_9RHIZ Epoxyqueuosine reductase OS=Hansschlegelia zhihuaiae OX=405005 GN=queG PE=3 SV= 1
MTPEALKADIVRRAAALGFDVVRVTRPDAIPQAASRLARALADGHHGTMGWLAERAEWRGDPQALWPEARSVVTLAMNYAPDRDPRVALQTPDRAAISVYAQGDDYHEVIKGRLKQVAGALAAAGAPAKVFVDTAPVMEKPLAEAAGVGWQGKHTNLVSRDFGSWLFLGAIFTTAELPVDPPAEDACGSCRACLDACPTDAFPAPYRLDARRCVSYLTIEHAGPIPREFRAGIGNRIYGCDDCLAACPWNKFAHEGREMRLAAREALKSPPLEELAALDDAGFRALFAKSAVKRIGRDRFARNVLVAIGNSGRPDLAEAAAARLDDASAVVRGAAVWALSRLVPAATTRALFEARRTRETDADVLGEWDRALDREAA

SEQ ID NO: 77249 - protein, 308 aa, Hanstruepera neustonica
  misc_feature (1)..(308): tr|A0A2K1E184|A0A2K1E184_9FLAO Epoxyqueuosine reductase OS=Hanstruepera neustonica OX=1445657 GN=queG PE=3 SV= 1
MSLKEKYSQLIKTEAKRLGFLSCGISKAQFLEEEAPRLEKWLKDNRHGEMRYMENHFDKRLDPTKLVEGSKSVISLLLNYYNPEKQNDESAPKISQYAYGIDYHFVIKDKLKALLQFIQEEIGQISGRAFVDSAPVLDKAWAAKSGLGWIGKHSNLLTQQVGSFYFIAELIVDLELDYDSPTTDHCGTCTACIDACPTEAIIQPYVVDGSKCISYLTIELKDNIPTTFKGQMDNWMFGCDVCQDVCPWNRFSKPHQEPLFDPHPDLLDMTKQDWEEITEETFKKVFKKSAVKRTKFSGLKRNINFLKQ

SEQ ID NO: 77250 - protein, 318 aa, Hapalosiphon sp.
  misc_feature (1)..(318): tr|A0A0M0SFW5|A0A0M0SFW5_9CYAN Epoxyqueuosine reductase OS=Hapalosiphon sp. MRB220 OX=1704290 GN=queG PE=3 SV= 1
MNQLSGTNSTEVKQKAIELGFHKVGIAAVDGKEDIQMQQLRAWIKLGYHADMEWMTSPKRQDIRLVMSEVRSLICVALNYYTPDQRPGGKEYGKISRYAWGRDYHKVMHKKLKALSNWLQEQGENIQARYYADTGPVQDKVWAQKAGIGWIAKNGNVITREYGSWVFLGEVLTNLELDPDKGHTQHCGNCTRCLEACPTNAITSPFVVDANRCIAYHTIENRQEKLPEAIASNLQGWVAGCDICQDVCPWNQRFATPTDVEEFQPYPGNIAPKLVELAQISDQEWDQRFPASALRRIKPEMLRRNARANLNAFQQAQE

SEQ ID NO: 77251 - protein, 318 aa, Hapalosiphonaceae cyanobacterium
  misc_feature (1)..(318): tr|A0A328ICE8|A0A328ICE8_9CYAN Epoxyqueuosine reductase OS=Hapalosiphonaceae cyanobacterium JJU2 OX=2109628 GN =queG PE=3 SV=1
MNQFPGTNSAEVKQKAVELGFHKVGIAAVDGTDEQQMERLQAWIELGYHADMKWMTSLKRQDIKLVMSEVRSLICVALNYYTPHQRPRGEEYAKISRYAWGRDYHKVMHKKLKALSGWLQGQGENIQARYYADTGPVQDKVWAQKAGIGWIAKNGNVITREYGSWVFLGEVLTNLELEPDKPHTQHCGNCTRCLEACPTDAITSPFVVDANRCIAYHTIENRQEKLPEAIASNLQGWIAGCDICQDVCPWNQRFASPTDVEEFQPYPGNIAPKLVELAQISDHEWDERFPASALRRIKPEMLRRNARANLNAFQQAQE

SEQ ID NO: 77252 - protein, 275 aa, Harryflintia acetispora
  misc_feature (1)..(275): tr|A0A3E2T416|A0A3E2T416_9FIRM Epoxyqueuosine reductase OS=Harryflintia acetispora OX=1849041 GN=DW086_04495 P E=4 SV=1
MEPTEELLRALFQEAGLSEYGTCDFDPALCRLPSRKRLPPGARSLVMAAVPYYVGRFPHRNVSRYAMVQDYHTVSGALLERVSLRLRKAFPGEQFLALVDASPIDEVEAGRRAGLGVRGLHGQLINETYGSYIFIGAIVSTVRFPPSRPKEGGCLRCGRCLAACPTGALNDQGLVRGRCRSHLTQKKKLTDPEERAQIAAGGMAWGCDICTDCCPMNRGKAYSGIPDFYRNICAVVRDTNLDAMIADRAYAYKGQAVLRRNLGLIEHSAAPDAHR

SEQ ID NO: 77253 - protein, 251 aa, Harryflintia acetispora
  misc_feature (1)..(251): tr|A0A3E2T368|A0A3E2T368_9FIRM Epoxyqueuosine reductase OS=Harryflintia acetispora OX=1849041 GN=DW086_03410 P E=4 SV=1
MSKTELKDEVSALAQSLGANLCGVADLGARKDFIAETYGEKWAAYPRAVSLAVFFPREVVLEQLDGPTRSYSYFYAAINRQLDTIGLAVSNLLQTKGCRAYPVPTSDYRLAGEAKGLHERLAAGESPEPFHTERVGMFSHRLAAVLAGLGWVGKNCSLITPQAGPRLRLTTVLTDAPLPPGKPIENRCGSCTRCRDICPPRALKGVAFREEDPVDVRLDRERCNAYLDRVASVFGRHTCARCLAVCPWGRK

SEQ ID NO: 77254 - protein, 381 aa, Hartmannibacter diazotrophicus
  misc_feature (1)..(381): tr|A0A2C9D0C5|A0A2C9D0C5_9RHIZ Epoxyqueuosine reductase OS=Hartmannibacter diazotrophicus OX=1482074 GN=queG P E=3 SV=1
MAEDILKAARERALRLGFAAFRVTAPERVPDAGARLRQAIADGHHATMDWLPETADRRSDPRALWPEVRSVVMLGFNYGPETDPLALLERKDRASISVYSRNRDYHDILKGRLKEVAGLIARDTGAEVKVFVDTAPVMEKPLAASAGLGWQGKHTNLVSRDYGSWLFLGAVFSAADLPLDEPERDHCGSCRACLDICPTKAFPAPYRLDARRCISYLTIEHDGPIPHEFRKAMGNRIYGCDDCLAVCPWNKFAEVAAEQKLRARADLEAPDIADLLALNETAFRVRFCGSPVKRIGRDRFIRNVLIAAGNSAMEELAEQVRQHLADPSPMVRGAAVWALARLGGPDRIEDLAGRLPPDEKDEGVRDEWRRVTGRESADEIG

SEQ ID NO: 77255 - protein, 348 aa, Hasllibacter halocynthiae
  misc_feature (1)..(348): tr|A0A2T0X231|A0A2T0X231_9RHOB Epoxyqueuosine reductase OS=Hasllibacter halocynthiae OX=595589 GN=queG PE=3 SV =1
MTSCEASLTERLRARAREEGFAACGITGPDAIPDAPKRLGVFLEAGHHGEMRWMGERTAWRGDPRALWPECRSVVMLAESYAPEADPLAQLADPSRGAISVYAQGRDYHDVVKKRLKRLGRWLLEEVPGEAIKVFVDTAPVMEKPLAQAAGIGWQGKHTNVLSRDWGNWAFLGAIFATVALDRDPPEAEHCGTCRRCLDVCPTDAFPAPFRLDATRCVSYLTIEHSGPVPEDLRPGLGNRIYGCDDCLAVCPWNKFAVAASDARLVARDSPTPLAELAMLDDAAFRQRFRGTAVKRIGRARFVRNVAYAIGNSGDPALAEPARHLAADADPVVAEAGRWALRRLATVS

SEQ ID NO: 77256 - protein, 332 aa, Hathewaya histolytica
  misc_feature (1)..(332): tr|A0A4V6KET7|A0A4V6KET7_HATHI Iron-sulfur cluster-bind ing protein OS=Hathewaya histolytica OX=1498 GN=queG PE =4 SV=1
MELKDKIKKFCNSLGLNNIGFIECKRFDDLEKFLKYKKEKGILNEFEEEDIEKRIDPKLLMKEGKTIISIAFPYFYEDVKKDLIYFSKYTLGMDYHIIVKEYLNKIGEYIVELGGNYKCFVDNNPLPERYIAMKSGVGFIGKNNCLITEEYGSYIFLGEIITDLYIEEDKPIKNKCGECNKCTKACPTKAILNWDTKNNASGINNNSNVCLSYINQKKQLEDVWIKKIGGRIWGCDTCQDVCPFNQNIKKSNLEAFKPIEYMKKPNLEELSTLDKRTFNEKYKSIACSWRGKNILTRNTFIALKNIKKEIPHIDKFNSPYVEEYYNKIKNLK

SEQ ID NO: 77257 - protein, 333 aa, Hathewaya proteolytica
  misc_feature (1)..(333): tr|A0A1M6RNG5|A0A1M6RNG5_9CLOT Epoxyqueuosine reductase OS=Hathewaya proteolytica DSM 3090 OX=1121331 GN=SAMN0 2745248_02338 PE=4 SV=1
MVYKDLIKEFCKSHGLDIVRFLPCQSCNDVENYFQYRKENGLINEFEEKDIIVRSNANYSMENAKTIISIAFPYRYKIDKSSNKFCVSKYTLGEDYHKVVKKYLTCISDFIKVKLGGDAKVFVDSNSLPERYIAMKCGVGFIGKNNCIITEKYGSYVFLGEILTDLDIEGDKPIENLCGACRNCIEACPTKAINGSENNKDNNSNICISYTSQKKDLESFWFPYLKNSLWGCDICQDVCPFNEKAHYSNIVEFSPKPYMLDLNIENIISMNNEEFNRNYRNLACGWRGKNLIIRNAIICEKNVYGVVKNRNNIASPYVKSYYDRLLKGKKFII

SEQ ID NO: 77258 - protein, 382 aa, Hazenella coriacea
  misc_feature (1)..(382): tr|A0A4R3L9R4|A0A4R3L9R4_9BACL Epoxyqueuosine reductase OS=Hazenella coriacea OX=1179467 GN=EDD58_101473 PE=4 SV=1
MQLIELKNKIITKAKELGIDKIGFASADPFIELRERLIESQEKGYASGFEEPDIEKRVQPSLSLPEAKTIIAIALAYPSKLKNPPRSEAGAYRGIFCRASWGQDYHHVLRQKLHALETAIHQWVPDVRTQVMVDTGALSDRAVAERAGIGFTGKNTSLITDEFGSWVYLGEMILDVYIPPDEPVTESCGECTRCMDACPTGALVQPGQLNAQACIAYLTQTKGFLAEIYREKLGNRLYGCDTCQTVCPKNRRLHFDHHVEFTPDPERVKPLLKPLLSMSNREFKEHFGEMSGSWRGKKPIQRNAIIALAHFKDQSAIPDLVSLLQQDVRPVIRGTAAWALGKIGGDDAKEALRKALEKETKQEVIQEIHHAFELIEESTVKP

SEQ ID NO: 77259 - protein, 376 aa, Henriciella algicola
  misc_feature (1)..(376): tr|A0A399RN58|A0A399RN58_9RHOB Epoxyqueuosine reductase OS=Henriciella algicola OX=1608422 GN=queG PE=3 SV=1
MAGAATTLEAWLKDEALALGFSDCRICRADEDWPVGDRLAEWVEDGRHGDMAWMEATLERRKHPTNMWENARSGIMLSVNYGPETDPMKALEQTSNGNISVYARGGDYHDLIKKRLKQLARAFVEKAGAEVKVFVDTAPLMEKPLAARAGLGWQGKHTNLLSREFGNWLFLGSILTDADLTPDAPEADHCGSCRSCIDVCPTQAITAPYQLDARRCISYLTIENAGHIPVEFRAAMGNRIYGCDDCLAICPWNKFASRSAETKLWARPELKLPELSDLAALDDAAFREVFSGSPIKRIGRNRMLRNVLIAIGNSNDAALVEPSVIPHLDDEAAIVRGAAIWALACLDTARFAAEKAAREATEMDEEVSAEWQKTPA

SEQ ID NO: 77260 - protein, 376 aa, Henriciella barbarensis
  misc_feature (1)..(376): tr|A0A399R499|A0A399R499_9RHOB Epoxyqueuosine reductase OS=Henriciella barbarensis OX=86342 GN=queG PE=3 SV=1
MADAAETLEAWLKEAALELGFSDCRICRADEAWPVGERLAEWVEEGRHGDMAWMEATLERRKHPTNMWENARSAIMLAVNYGPETDPLEALEQTSHGNISVYARGGDYHDLIKKRLKQLARAFVEKAGAEVKVFVDTAPLMEKPLAARAGLGWQGKHTNLLSREFGNWLFLGSILTDAELTPDAPEADHCGSCTSCIEICPTQAITAPYQLDARRCISYLTIENAGHIPVEFRAAMGNRIYGCDDCLAICPWNKFASRSAETKLWARPELKLPELSDLAALDDAAFREVFSGSPIKRIGRNRMLRNVLIAIANSGDASLVEPSVIPHLDDEAAIVRGAAIWALACLDTARFAVEKAARKATETDEEVSAEWQKTPA

SEQ ID NO: 77261 - protein, 376 aa, Henriciella sp.
  misc_feature (1)..(376): tr|A0A2G2HTF7|A0A2G2HTF7_9RHOB Epoxyqueuosine reductase OS=Henriciella sp. OX=1968823 GN=queG PE=3 SV=1
MTQETGTLEARLKRDALALGFADCAICRADEPWQAGERLEAFVEEGRHGEMDWMEATLKRRKTPQAMWEGARSAIMLAVNYGPDTNPLETLEHKTLGNISVYARGGDYHDLIKKRLKQLARAFAEESGAEVKVFVDTAPLMEKPLAAKAGLGWQGKHTNLLSRTFGNWLFLGAILTDAELTPDEAETDHCGSCTACLDVCPTKAFPAPYQLDARRCISYLTIEYPGHIPHEFRAAMGNRIYGCDDCLAICPWNKFASRSAEQKLWARAELKLPELSDLAALDDASFREVFAGSPVKRTGRNRMLRNVLIAIGNSGEPSLVDQSVIPHLGDEAAIVRAAAIWALGRLDKTRFAAEKADRLELEHDEDVRGEWQAVNQ

SEQ ID NO: 77262 - protein, 376 aa, Henriciella sp.
  misc_feature (1)..(376): tr|A0A399RHJ3|A0A399RHJ3_9RHOB Epoxyqueuosine reductase OS=Henriciella sp. JN25 OX=2305466 GN=queG PE=3 SV=1
MSTSDNSPEARLKQMAADIGFADCRICRADEPWAAGARLETFVAQGRHGGMDWMETTLERRKAPTAMWPEAKSAIMLAMNYGPPASPLPLLEMREHGNISVYARGADYHELIKKKLKQLARVFAEETGEAVKVFVDTAPLMEKPLAEKAGLGWQGKHTNLVSREHGSWLFLGAILTAAALEPDAPEADHCGSCTACLDICPTDAFPAPYQLDARRCISYLTIEHAGPIPAEFREPMGNRIYGCDDCLAVCPWNKFAHTSAEQKLWARAELKLPELEELAALDDAAFREVFSGSPVKRTGRNRMLRNVLIAIGNSGQPDLVDGSVVPHLDDDEPIVRGAAVWALSRLDMARFESERAQREASETDPGVKAEWALTPL

SEQ ID NO: 77263 - protein, 380 aa, Hephaestia caeni
  misc_feature (1)..(380): tr|A0A397NSL9|A0A397NSL9_9SPHN Epoxyqueuosine reductase OS=Hephaestia caeni OX=645617 GN=queG PE=3 SV=1
MSQDNPFESRLKEHARAEGFVACGIARADAAPAAGERLRQWLDDGRHGDMIWMEERAHHRAAPEGLWPEVRSVIALGMSYAPATDPLALAGAPDIGRISVYAQGGDYHDLIKRKLKALARWMVAEAPGTDLKVFVDTAPVMEKPLSEAAGLGWQGKHTNLVSREHGSWLFLGAIYTTLALTPDAPGHDTCGSCDACQRACPTDAFPAPYQLDARRCISYLTIELKGPIPPEFRENIGNRIYGCDDCLAVCPWNKFAAAAHANLAFAPRAELTAPRLADLLALDDAAFRQVFAGSPIKRIGRDRMVRNALIAAGNSGDAAFVARIAALLDDDAPVVRGAAVWALARLDRARSLTERAAHAAETDPDVIAEWAAISPDRAFP

SEQ ID NO: 77264 - protein, 394 aa, Herbaspirillum aquaticum
  misc_feature (1)..(394): tr|A0A225SZL3|A0A225SZL3_9BURK Epoxyqueuosine reductase OS=Herbaspirillum aquaticum OX=568783 GN=queG PE=3 SV= 1
MSIHPTPADPAGSTAIADPAGLAALAAAIKAWGRELGFAEVRIADVDLSHREAGFQAWLDKGYHGEMDYMASHGLKRARPAELVPGTVRVVSVRMPYLPAAADPDQPDQPDWRAREEARSADPAAAQVSIYARGRDYHKVLRARLQQLATRIEGRIGAFGYRVFTDSAPVMEVALAEKAGLGWRGKHTLLLHREAGSMFFLGEMLTDLPLPVDEPVSSHCGQCSACITACPTGAIVAPYELDARRCISYLTIELKGSIPEDLRPLIGNRIYGCDDCQLYCPWNKFAQRASLPDFDPRHGLDSASLVELFGWSEEVFLKNTEGSAIRRIGHERWLRNLAVGLGNAADTPSHRGDAAIVAALRGRLDHPSALVAEHVAWALARHGVHGVAGADGVE

SEQ ID NO: 77265 - protein, 357 aa, Herbaspirillum hiltneri
  misc_feature (1)..(357): tr|A0A561JV08|A0A561JV08_9BURK Epoxyqueuosine reductase OS=Herbaspirillum hiltneri OX=341045 GN=queG PE=3 SV=1
MTDLVALADTIKAWGRDLGFADLRIADVDLSHREAGFQAWLDKGYHGEMDYMASHGMKRVRPAELVPGTVRVITVRMPYLPRATAPGWREREEGRGADGSAAVVSLYARGRDYHKVLRARLQQLAGRIEKEIGAFGYRVFTDSAPVMEVALAEKSGLGWRGKHTLLLNREAGSMFFLGELFTDLALPVDAPVTPHCGQCSSCIDVCPTQAIVAPYELDARRCISYLTIELKGSIPVELRNLIGNRVYGCDDCQLYCPWNKFAQTSTLPDFDARHGLGSASLIELLNWSEDDFNRNTEGSAIRRIGHERWLRNMAVGLGNAAATHKGDAEIVSALQARLDHPSGLVREHVAWALAQHS

SEQ ID NO: 77266 - protein, 394 aa, Herbaspirillum huttiense
  misc_feature (1)..(394): tr|A0A561K9J2|A0A561K9J2_9BURK Epoxyqueuosine reductase OS=Herbaspirillum huttiense OX=863372 GN=queG PE=3 SV= 1
MSIHPTPADPAGSTAIADPAGLAALAAAIKAWGRELGFAEVRIADVDLSHREAGFQAWLDKGYHGEMDYMASHGLKRARPAELVPGTVRVVSVRMPYLPPAADPDQPDQPDWRAREEARSADPAAAQVSIYARGRDYHKVLRARLQQLATRIEGRIGPFGYRVFTDSAPVMEVALAEKAGLGWRGKHTLLLHREAGSMFFLGEMLTDLPLPVDEPVSSHCGQCSACITACPTGAIVAPYELDARRCISYLTIELKGSIPEDLRPLIGNRIYGCDDCQLYCPWNKFAQRASLPDFDPRHGLDRASLVDLFGWSEEVFLKNTEGSAIRRIGHERWLRNLAVGLGNAADVPSHRGDAAIVAALQARLDHPSALVAEHVAWALARHGVHGVAPADGVE

SEQ ID NO: 77267 - protein, 394 aa, Herbaspirillum huttiense
  misc_feature (1)..(394): tr|A0A4R8KIA2|A0A4R8KIA2_9BURK Epoxyqueuosine reductase OS=Herbaspirillum huttiense OX=863372 GN=queG PE=3 SV= 1
MSIHPTPADPIGSTAIADPAGLAALAAAIKAWGRELGFAEVRIADVDLSHREAGFQAWLDKGYHGEMDYMASHGLKRARPAELVPGTVRVVSVRMPYLPPAADPDQPEQPDWRAREEARSADPAAAQVSIYARGRDYHKVLRARLQQLATRIEGRIGPFGYRVFTDSAPVMEVALAEKAGLGWRGKHTLLLHREAGSMFFLGEMLTDLPLPVDEPVTSHCGQCSACITACPTGAIVAPYELDARRCISYLTIELKGSIPQDLRPLIGNRIYGCDDCQLYCPWNKFAQRASLPDFDPRHGLDRASLIELFGWSEEVFLKNTEGSAIRRIGHERWLRNLAVGLGNAADAPSHRGDAEIVAALRARLDHPSALVAEHVAWALARHGVHGVAGADGVE

SEQ ID NO: 77268 - protein, 370 aa, Herbaspirillum robiniae
  misc_feature (1)..(370): tr|A0A246WUX1|A0A246WUX1_9BURK Epoxyqueuosine reductase OS=Herbaspirillum robiniae OX=2014887 GN=queG PE=3 SV= 1
MTASVDPVDLSALAAAIKAWGKDLGFAEVRIADVDLSHREAGFQAWLDKGYHGEMDYMASHGMKRARPAELVPGTVRVVSVRMPYLPAPGDGQQADWRAREEARSADPAAAQVSVYARGRDYHKVLRSRLQQLAIRIEGQIGAFGYRVFTDSAPVMEVALAEKAGLGWKGKHTLLLHREAGSMFFLGEMLTDLPLPVDEPVTPHCGQCRSCIDVCPTQAIVAPYELDARRCISYLTIELKGSIPEELRPLIGNRIYGCDDCQLYCPWNKFAQRAALADFDVRNGLDDSSLVRLFGWSEEEFLTNTEGSAIRRIGHERWLRNLAVGLGNAAQSQAHRGDAGMVAALRARQAHPSALVREHVAWALEKHGVK

SEQ ID NO: 77269 - protein, 376 aa, Herbaspirillum rubrisubalbicans
  misc_feature (1)..(376): tr|A0A328J213|A0A328J213_9BURK Epoxyqueuosine reductase OS=Herbaspirillum rubrisubalbicans OX=80842 GN=queG PE =3 SV=1
MSAHTVPVDLADPAFLAALAATIKAWGRELGFAEVRIADVDLAHREAGFQAWLDKGYHGEMDYMASHGLKRARPAELVPGAVRVVSVRMPYLPAASDADTHDWRSREEARSADPAAAQVSIYARGRDYHKVLRARLQQLASRIEGRIGAFGYRVFTDSAPVMEVALAEKAGLGWRGKHTLLLHREAGSMFFLGEMLTDLPLPVDAPVTSHCGQCSACITACPTGAIVAPYELDARRCISYLTIELKGSIPQELRPLIGNRIYGCDDCQLYCPWNKFAQRASLPDFDPRHGLDSASLVDLFGWSEEQFLKNTEGSAIRRIGHERWLRNLAVGLGNAADAPDYRGDAAIVAALRARLDHPSPLVVEHVRWALARHGIA

SEQ ID NO: 77270 - protein, 376 aa, Herbaspirillum rubrisubalbicans
  misc_feature (1)..(376): tr|A0A0U3AN61|A0A0U3AN61_9BURK Epoxyqueuosine reductase OS=Herbaspirillum rubrisubalbicans M1 OX=1078773 GN=fd x PE=3 SV=1
MSAHTVPVDLADPAFLAALAATIKAWGRELGFAEVRIADVDLAHREAGFQAWLDKGYHGEMDYMASHGLKRVRPAELVPGTVRVVSVRMPYLPAASQVDAPDWRSREEARSADPAAAQVSIYARGRDYHKVLRARLQQLATRIEGRIGTFGYRVFTDSAPVMEVALAEKAGLGWRGKHTLLLHREAGSMFFLGEMLTDLPLPVDAPVSSHCGQCSACITACPTGAIVAPYELDARRCISYLTIELKGSIPQDLRPLIGNRIYGCDDCQLYCPWNKFAQRASLPDFDPRHGLDSASLVELFDWSEDQFLKNTEGSAIRRIGHERWLRNLAVGLGNAADASDYRGDVAIVAALRARLDHPSSLVVEHVRWALARHGIA

SEQ ID NO: 77271 - protein, 394 aa, Herbaspirillum seropedicae
  misc_feature (1)..(394): tr|A0A4R8NNJ9|A0A4R8NNJ9_HERSE Epoxyqueuosine reductase OS=Herbaspirillum seropedicae OX=964 GN=queG PE=3 SV=1
MSIHPTPADPIGSTAIADPAGLAALAAAIKAWGRELGFAEVRIADVDLSHREAGFQAWLDKGYHGEMDYMASHGLKRARPAELVPGTVRVVSVRMPYLPAAADPDQPEQPDWRAREEARSADPAAAQVSIYARGRDYHKVLRARLQQLATRIEGRIGPFGYRVFTDSAPVMEVALAEKAGLGWRGKHTLLLHREAGSMFFLGEMLTDLPLPVDEPVTSHCGQCSACITACPTGAIVAPYELDARRCISYLTIELKGSIPQDLRPLIGNRIYGCDDCQLYCPWNKFAQRASLPDFDPRHGLDRASLVELFGWSEEVFLKNTEGSAIRRIGHERWLRNLAVGLGNAADAPSHRGDAEIVAALRARLDHPSALVAEHVAWALARHGVHGVAGADGVE

SEQ ID NO: 77272 - protein, 347 aa, Herbaspirillum seropedicae
  misc_feature (1)..(347): tr|D8J021|D8J021_HERSS Epoxyqueuosine reductase OS=Herb aspirillum seropedicae (strain SmR1) OX=757424 GN=fdx P E=3 SV=1
MGFADVRIADVDLSHREAGFQAWLDKGYHGEMDYMASHGLKRARPAELVPGTVRVVSVRMPYLPKASGPAEPDWRAREEARSADPGGAQVSIYARGRDYHKVLRARLQQLATRIEGRIGPFGYRVFTDSAPVMEVALAEKAGLGWRGKHTLLLHREAGSMFFLGEMLTDLPLPVDDPVTPHCGQCSACITACPTGAIVAPYELDARRCISYLTIELKGSIPSELRPLIGNRIYGCDDCQLYCPWNKFAQRASLPDFDVRHGLDSASLVGLFGWSEEEFLKNTEGSAIRRIGHERWLRNLAVGLGNAADAASHRGDAAIVAALRARLAHPSALVVEHVQWALARHGVS

SEQ ID NO: 77273 - protein, 379 aa, Herbaspirillum sp.
  misc_feature (1)..(379): tr|A0A2E7P156|A0A2E7P156_9BURK Epoxyqueuosine reductase OS=Herbaspirillum sp. OX=1890675 GN=queG PE=3 SV=1
MADPAGLAALAAAIKAWGRELGFAEVRIADVDLSHREAGFQAWLDKGYHGEMDYMASHGLKRARPAELVPGTVRVVSVRMPYLPAAADPDQPEQPDWRAREEARSADPAAAQVSIYARGRDYHKVLRARLQQLATRIEGRIGPFGYRVFTDSAPVMEVALAEKAGLGWRGKHTLLLHREAGSMFFLGEMLTDLPLPVDDPVTSHCGQCSACITACPTGAIVAPHELDARRCISYLTIELKGSIPQDLRPLIGNRIYGCDDCQLYCPWNKFAQRASLPDFDPRHGLDRASLVELFGWSEEVFLKNTEGSAIRRIGHERWLRNLAVGLGNAADAPSHRGDAEIVAALRARLDHPSALVAEHVAWALARHGVHGVAGADGVE

SEQ ID NO: 77274 - protein, 360 aa, Herbaspirillum sp.
  misc_feature (1)..(360): tr|J3HL43|J3HL43_9BURK Epoxyqueuosine reductase OS=Herb aspirillum sp. YR522 OX=1144342 GN=queG PE=3 SV=1
MTDLAALAVDIKAWGQELGFAELRIADVDLSHREAGFQAWLDRGYHGEMDYMASHGMKRARPAELVPGTVRVITARMPYLPAASGDDWRARESARSADARMAQVSLYARGRDYHKVLRARLQQLASRIEARTGPFGYRVFTDSAPVMEVALAEKAGLGWRGKHTLLLHREAGSMFFLGEILTDLPLPVDAPVTPRCGQCTSCIEVCPTQAIVAPYELDARRCISYLTIELKGSIPPELRPLIGNRIYGCDDCQLYCPWNKFAQRSTLADFDARHGLDSASLLELFAWSEEQFLNNTEGSAIRRIGHERWLRNLAVGLGNAADDPAIRGSAPIVAALQDAGAHPSEMVREHAAWALARHQD

SEQ ID NO: 77275 - protein, 297 aa, Herbinix hemicellulosilytica
  misc_feature (1)..(297): tr|A0A3R9Q4J8|A0A3R9Q4J8_HERHM Epoxyqueuosine reductase OS=Herbinix hemicellulosilytica OX=1564487 GN=BJW19_18 11 PE=4 SV=1
MKEKLIAFCKSINIECVGIAPAEPFHDFEQIWKRQIERGYVSGFEETDINKRVHPELSLKGAKSFIVCLFPYYSGQASDANLSKSAYSRDYHIIVKDKLELIGKYLESNIKGFEYKAYVDTGPFSDRYLAYRAGLGFFGINNNLINDRYGSYFFIGSLLNNYPFEADKPQNKTCLQCFACVNNCPGQCILGDFTINPLKCRSYISQKKKDLSAEDEEILKKQPLIYGCDVCQDVCPHNRDVKKTIIEEFTQDLIYRLDYEDLKQMSNKEFMKKYNDRAFAWRGKSVLIRNHNIINDS

SEQ ID NO: 77276 - protein, 383 aa, Herpetosiphon aurantiacus
  misc_feature (1)..(383): tr|A9B4V7|A9B4V7_HERA2 Uncharacterized protein OS=Herpe tosiphon aurantiacus (strain ATCC 23779 / DSM 785 / 114 -95) OX=316274 GN=Haur_3042 PE=4 SV=1
MTNNLAEAVRAQAAQLGFNLVGITPAKPSPTLAAYQAWVEAGMYGEMGYLARPDRQARRQDLNVIVPNVRSLIIVALDYRTQPIPASLLNDPSRGRIAAYAWGIDYHDLMTPRLQELANWLQAQIAEPVQQRVYVDTGAILERSHAQQAGLGFIGKNTMLISPRRGSFFFLGEILTTYEFADYDQPAPPTMCGSCSRCLQACPTKAFPKPHVLDARRCISYLTIEYKGSIARELRPQMANWIVGCDVCQDVCPWQRFGVQSQESAFFPIDHDRAAPPLASLLTLDPAGFGERYGEAAISRLKRDRLVRNACVAAGNWRDPAILPLLAPLLHDASSLVREHAAWAIGRNFDDSSVMLLQQALQTETEPSVRNELQQSLHERSAC

SEQ ID NO: 77277 - protein, 380 aa, Herpetosiphon geysericola
  misc_feature (1)..(380): tr|A0A0P6YZB8|A0A0P6YZB8_9CHLR Uncharacterized protein OS=Herpetosiphon geysericola OX=70996 GN=SE18_05665 PE= 4 SV=1
MTINLAAAVRAQAASLGFNLVGITPARPSPTLAAYQQWVEAGMYGEMGYLARPDRQARRQDLNVIVPNVRSLIIVALDYRTLPIPASLLNDPSRGRIAAYAWGIDYHDLMTPRLQELANWLQAQIPDPVQQRVYVDTGAILERSHAQQAGLGFIGKNTMLISPRRGSFFFLGEILTSYEFTDYDQPAPTTMCGSCSRCLRACPTQAFPKPHVLDARRCISYLTIEYKGSIPRELRPQMANWIVGCDVCQDVCPWQRFGVQSQEAAFFPIDHDRAAPRLASLLTLDAASFSERYGEAAISRLKRDRLVRNACIAAGNWRDPGILPLLAPLLHDASGLVREHAAWAIGRNFDDSAITLLQQALQTESEPSVRSELLQSLHER

SEQ ID NO: 77278 - protein, 363 aa, Histidinibacterium lentulum
  misc_feature (1)..(363): tr|A0A3N2R6J2|A0A3N2R6J2_9RHOB Epoxyqueuosine reductase OS=Histidinibacterium lentulum OX=2480588 GN=queG PE=3 SV=1
MGDLKERLRERALAEGFSAMGVCRPDAIPEAAGRLRAFVEAGRHGQMGWMAERMGWRGDPAALWPEARSVVMLAEVYTPGHDPMAVLDRPERGAVSVYAHGRDYHDLVKKRLKRVGRWLLEEAGSGSGPGERVRLSAKPEVSPEIKVFVDTAPVMEKPLAQAAGLGWQGKHTNLLSRDLGNWFFLGAIFTTIALEPDAPEEEHCGSCRRCLDICPTDAFPAPFQLDARRCISYLTIEHEGPVDAALRPGIGNRIYGCDDCLAVCPWNKFAREARETRYLGDPEPPLLADLAALDDAAFRARYAGSAIKRIGIRRFLRNVLYAIGNSGEVGLAPAAAAHLDHEDATVRDAARWALGRLGNRGGD

SEQ ID NO: 77279 - protein, 344 aa, Histidinibacterium sp.
  misc_feature (1)..(344): tr|A0A5J5GHE5|A0A5J5GHE5_9RHOB tRNA epoxyqueuosine(34) reductase QueG OS=Histidinibacterium sp. 176SS1-4 OX=26 13962 GN=queG PE=4 SV=1
MESLKERLRQAALDAGFTKMGVCRPDAIPDAAGRLDRFLEEGRHGQMAWMEARKHWRGDPATLWPEARSVVMLAEAYTPEHDPLEVLDEADRGAISVYAQGRDYHDVVKKRLKRVGRWLLEQEPEHEIKVFVDTAPVMEKPLAEAAGLGWQGKHTNLLGRDLGNWIFLGAIFTTVELEPDARETEHCGSCTRCLDICPTEAFPAPFQLDARRCISYLTIEHDGPVPEELRGKMGNRIYGCDDCLAICPWNKFAQEASDMRYLRTEGPPPLAELAELDDASFRRRFSGSPIKRIGVNRFLRNVLYAIGNSGDPSLLPSAEGLMGSEDATVAEAAAWAAARLRNRP

SEQ ID NO: 77280 - protein, 411 aa, Hoeflea halophila
  misc_feature (1)..(411): tr|A0A286IAF3|A0A286IAF3_9RHIZ Epoxyqueuosine reductase OS=Hoeflea halophila OX=714899 GN=queG PE=3 SV=1
MTGASHTRSVPPAEANPVRTVQQGKRLRAFLAAEAERLGFCACAVAPAVAEPILRQRLSEFVSLGRHGSMEWLPETLGRRADPQVLWPEARSVVVLAMNYGPDDDPLENHARKDRATISVYARNRDYHDVIKGKMKELAAKFASRAGGDVKVFVDTAPVMEKPLAQAAGLGWIGKHTNLVSRSHGSWIFLSSIFTTVDLGIDKAEIDHCGSCRACLDACPTNAFPAPYQIDARRCISYLTIENKGPIPLEFRKPIGNRVYGCDDCLAVCPWNKYAKSANEAKLIAREDLRSPPLADFLAMDDAAFRAFFSGSPVKRIGRDRFLRNVLIAAGNSADQTLVPACEVLLQDASPLVRGAAIWALSQLAEPGHMQQLSGSLGDEPDDQVKAEWQLALTGSGTPEPAKQDNTGLTR

SEQ ID NO: 77281 - protein, 376 aa, Hoeflea marina
  misc_feature (1)..(376): tr|A0A317PN40|A0A317PN40_9RHIZ Epoxyqueuosine reductase OS=Hoeflea marina OX=274592 GN=DFR52_103674 PE=4 SV=1
MRAILAAEAEALGFVAFGVAAPDALGAAAQRLRSFVELGRHGSMTWMAETLDRRADPQTLWPEVRSVIMLAMNYGPDIDPRATLEQRDRATISVYARNRDYHDVVKGRLKQLAGRLASLGAAGVKVFVDTAPVMEKPLAALAGLGWQGKHTNLVSRQHGSWLFLGAIFTTAELEPDVAETDHCGSCRACLDVCPTDAFPAPYQIDGRRCISYLTIESKAPIPVEFRKPIGNRIYGCDDCLAACPWNKFATAASEARLSARHDLMAPPLQSFLALDDAGFRAVFSGSPVKRIGRDRFLRNVLIAAGNSGSRALLAPCEALLADPSPLVRGAAVWAVSMLADVRRLAALATEHAGESDLTVSDEWRLACAPAIAKEPE

SEQ ID NO: 77282 - protein, 397 aa, Hoeflea olei
  misc_feature (1)..(397): tr|A0A1C1YRM9|A0A1C1YRM9_9RHIZ Epoxyqueuosine reductase OS=Hoeflea olei OX=1480615 GN=queG PE=3 SV=1
MAGSRPDPTAAGRGTDRLKSFLAGEARALGFSALSVAAPDTDPLLRSRLEQFVALGRHGSMGWIAETSDRRSDPRTLWPEVRSVIMLAMNYGPETDPRAGLACRSNANVSVYARNRDYHDVIKGRLKELAGKFAARAGGDVKVFVDTAPVMEKPLAQAAGLGWIGKHTNLVSRDHGSWLFLGSIFTTVELEPDAQKTDHCGSCSACLASCPTEAFPAPYQIDARRCISYLTIENKGPIPQEFRRAIGNRVYGCDDCLAACPWNKYAVKASEAKLIARPDLQAPPLAQFLAMDDAGFRAFFSGSPVKRIGRDRFLRNVLVAAGNSGDAALVPACRDLIADASPLVRGAAVWALSNLTGLAYMSGLARQAEDETDGSVREEWRLALASGGDRTDGTRPT

SEQ ID NO: 77283 - protein, 403 aa, Hoeflea phototrophica
  misc_feature (1)..(403): tr|A9CV86|A9CV86_HOEPD Epoxyqueuosine reductase OS=Hoef lea phototrophica (strain DSM 17068 / NCIMB 14078 / DFL -43) OX=411684 GN=queG PE=3 SV=1
MASDGSPAQDSEGRSARTDAADHLKSFLKKEAAALGFSDLAIAPSDIGAEASDRLARFVELGRHGSMEWLADTRDRRANPKSLWPEVRSVIMLAMNYGPATSPLEGLAQKSRASISVYARNRDYHDIIKGRLKQLAGKFAARAGGDVKVFVDTAPVMEKPLAEAAGLGWIGKHTNLVSRSHGSWLFLGSIFTTVELMPDVAETDHCGSCRACLSACPTDAFPAPYQIDARRCISYLTIENKGPIPHEFRAPMGNRIYGCDDCLAVCPWNKYAQSASEMKLIAREDLQSPRLAEFLALDDAGFRAFFSGSPIKRIGRNRFLRNVLVAAGNSGDQTLVPACETLLSDPSPLVRGASVWALSQLTLPTRMRELAQSRIGVQDGVVLGETDPEVRAEWDLALNRPNA

SEQ ID NO: 77284 - protein, 427 aa, Hoeflea sp.
  misc_feature (1)..(427): tr|A0A2E2X9L6|A0A2E2X9L6_9RHIZ Epoxyqueuosine reductase OS=Hoeflea sp. OX=1940281 GN=queG PE=3 SV=1
MVPAHQVAPRLPSAAVRSRPRAGARRPLRGSRFLAVGAEADIPARPRTIDPARLNTFLAAEAARLGFSAHGVADPARLTQTGSRLREFLALGRHGSMAWLEDRADERSNPQNLWPEARSVVMLAMNYGPDSDPLELLERKDRAAISVYARNRDYHDIIKGRLKEFAGRLVARFGGDVKVFVDTAPVMEKPLAALAGLGWQGKHTNLVSRDSGSWLFLGAIFSTLDLPADTPEQDHCGSCRACLDICPTNAFPAAYQLDARRCISYLTIEAKEQVRREFREAMGNRIYGCDDCLAVCPWNKFAEKTSEAKLTARHDLQAPPLAELLALDDAAFRSFFSGSPIKRIGRDRFIRNVLIAAGNSGDHALVEPVRAHLADPALLVRGMAVWALSRLLPQAEFATLANAAVGETDPEVVAEWRAGLEYTGLSR

SEQ ID NO: 77285 - protein, 390 aa, Hoeflea sp.
  misc_feature (1)..(390): tr|A0A0F7PRZ3|A0A0F7PRZ3_9RHIZ Epoxyqueuosine reductase OS=Hoeflea sp. IMCC20628 OX=1620421 GN=queG PE=3 SV=1
MTGSGPESSMVITDARAARLKTFLRDEARALGFCDLAVTGADADPQLRERLDHFVDLDRHGSMAWIAETVERRSAPRNLWPEARSVIMLAMNYGPESEPLANLERKSSANISVYARNRDYHDLIKGKLKELAGKFASRSGGDVKVFVDTAPVMEKPLAQSAGLGWIGKHTNLVSRTQGSWLFLASIFTTVELPVDDGETDHCGSCRACLDACPTNAFPAPYQIDARRCISYLTIENKGPVPHEFRRAIGNRIYGCDDCLAACPWNKYAVASHEAKLMARNDLLSPPLGDFLKLDDATFRTFFSGSPVKRIGRDRFLRNVLIAAGNSEDQSLVPDCEVLLGDASGLVRGAAVWALSQLTGSDYMQGLQAQAGTETDDDVRAEWRIALTPDP

SEQ ID NO: 77286 - protein, 237 aa, Holophagaceae bacterium
  misc_feature (1)..(237): tr|A0A3D6EIT0|A0A3D6EIT0_9BACT Uncharacterized protein OS=Holophagaceae bacterium OX=2052165 GN=DHV93_04585 PE =4 SV=1
  misc_feature (40)..(40): Xaa can be any naturally occurring amino acid
  misc_feature (96)..(96): Xaa can be any naturally occurring amino acid
MNTWIHWRSRPGFAPRPFPPASPPRDSPPAAPSRQRQVAXPGAVPGSLKLSRYLWGPDYHMILKPRLARLLEAAQARWPGLEGRVCVDTAPLLERXLLLSLDLPPDEPFGVQQCGSCTACLEACPSAALEPFRLDPARCLTTYTIETEAEPPPDVAAALADSRWAAGCDACQEACPWNRAPVWGDPALWGGPSPLHVRRAEDLPRGAAQWRKLTRRTALRRVRDRHWRATLTRILGP

SEQ ID NO: 77287 - protein, 351 aa, Hormoscilla sp.
  misc_feature (1)..(351): tr|A0A533NB14|A0A533NB14_9CYAN Epoxyqueuosine reductase OS=Hormoscilla sp. GUM007 OX=2480854 GN=queG PE=3 SV=1
MDVSLSSSQVKQKALELGFHKVGIAAVDANIVSKSVERLQVWLGNGYQANMEWMANPKRQDIRQVMPSVQSIITVALNYYTAHQRPEGSQYGKISRYGWGRDYHRVMDKKLKLLANWLRSARGLSFPEHPPMLCAGCDTTGWVLPETTEKSHSCGVEVRYYADTGPVQDKVWAQAAGIGWIAKNGNVITREYGSWVFLGEVLTNIVLTPDGPHTEHCGTCTRCIDACPTGAIAQPFVVDANRCIAYHTIENRVSSLPEEIAGDLEGWVAGCDICQDVCPWNQRFASITDITEFNPYPENVAPKLSELAKISDAEWNRRFRASALRRIKPEMLRRNARANLEADKASAELDK

SEQ ID NO: 77288 - protein, 325 aa, Hormoscilla sp.
  misc_feature (1)..(325): tr|A0A533P1N1|A0A533P1N1_9CYAN Epoxyqueuosine reductase OS=Hormoscilla sp. GUM202 OX=2480853 GN=queG PE=3 SV=1
MDVSLSSSQVKQKALELGFHKVGIAAVDANIVSKSVERLQVWLGNGYQANMEWMANPKRQDIRQVMPSVQSIITVALNYYTAPKRPDFSGTVGSQYGKISRYGWGRDYHRVMDKKLKLLANWLRSHSCGVEVRYYADTGPVQDKVWAQAAGIGWIAKNGNVITREYGSWVFLGELLTNLVLTPDRPHTKHCGTCTRCLDACPTGAIVQPFVVDANRCIAYHTIENRADSLPKAIASHLSGWVAGCDICQDVCPWNQRFAKETDVTEFNPYPENVAPKLSELAEISDAEWNRRFRASALRRIKPEMLRRNARANLEADGTSAELDK

SEQ ID NO: 77289 - protein, 350 aa, Humitalea rosea
  misc_feature (1)..(350): tr|A0A2W7I5I5|A0A2W7I5I5_9PROT Epoxyqueuosine reductase OS=Humitalea rosea OX=990373 GN=queG PE=3 SV=1
MAAADPGGVAAQRDIIRAEAFRLGFDAVGFCRAALGPEVRARMADFLAAGMHGQMGWLEDRAEQRAHPQALWPEAVSVVSLGLNYGPEHDPLEVLQARDRAAISVYAQGRDYHDLLKRRLKALARWMIAAFPQDLKVFVDTAPVAEKPLAQTAGIGWQGKHTNLVSREHGSWLFLGEIFTTLDLGADAAEVDHCGSCSRCLDICPTHAFPAPYRLDARRCISYLTIEHRGPIPEEFRAAMGNRIYGCDDCLAVCPWNKFASAHSEPEFAPRAALTAPKLAEFATLDDAGFRALFSGSPIKRIGRDRFIRNLCIAIGNSDIAALLPQVQSLCEDADPVVAEAARWAVERLR

SEQ ID NO: 77290 - protein, 301 aa, Hungateiclostridium clariflavum
  misc_feature (1)..(301): tr|G8LSV6|G8LSV6_HUNCD Uncharacterized Fe-S protein OS= Hungateiclostridium clariflavum (strain DSM 19732 / NBR C 101661 / EBR45) OX=720554 GN=Clocl_4033 PE=4 SV=1
MKKQLIEFCRSIGIEYVGIVSSEKYNDLKDFLEIRLEKGFSNIFEKGSIEKAIDPKLALEDAESVIVCLFPYYCGNAEDANLSKYAYGLDYHKIIQNKLDAIGIYLKENILGFEYKVFADNGPLNERYLAYKAGLGFLGINGHFITDRYGSYVFIGYIINNYPFETDKPQNRTCYKCFSCVEKCPGQCIMGDFTINPLMCRSYITQKKGELSEKEIEILKKHTLIWGCDVCQDVCPHNKKIQETKLKEFRQNLKYKLEYEELKQISNKEFLRRYRDRAFSWRGKEVLMRNYKLINGLPADD

SEQ ID NO: 77291 - protein, 227 aa, Hungateiclostridium saccincola
  misc_feature (1)..(227): tr|A0A2K9ERR6|A0A2K9ERR6_9FIRM 4Fe-4S ferredoxin OS=Hun gateiclostridium saccincola OX=1677857 GN=queG PE=4 SV= 1
MEFHKELGNKLIEWGASFVGFSNVEKKLPENLKKLKYAITIGVRLSDFIIEQIEDKPTYTYFHHYRTVNTLIDQITLKGQLFIQDRGYKALGVPASQTVNDVEDAYSGIFPHKTAAVMAGLGWIGKSGLFISNQYGPRVRLGTILTDISVPAVNNIQKPLCGSCKECVVNCPAMAITGALWEEGCERSLIIDAKACSDYMKEKFKHIGRGSVCGICIKVCPKGLNYI

SEQ ID NO: 77292 - protein, 350 aa, Hwanghaeella grinnelliae
  misc_feature (1)..(350): tr|A0A3S2Z7Q0|A0A3S2Z7Q0_9PROT Epoxyqueuosine reductase OS=Hwanghaeella grinnelliae OX=2500179 GN=queG PE=3 SV =1
MTNLRQAIEDKAREIGFDAVGFAPVHLAEREGARLKQFVANGENGDMGWMAERLEHRSSPQGLWPEVKSVIVLGTNYGPAHDPLTDLENKDRAVISVYARNRDYHDLVKKRLKQLARWLVETNPQSDKTEVKVFVDTAPVMEKPVAAKTAVGWQGKHTNLVSSKYGSWLFLGEVFTTLDLTPDAPHKDQCGSCTACQDICPTNAFPAPYTLDARRCISYLTIEHKGHIPEEFREAIGNRIYGCDDCLAVCPWNKFAQRTEEHAFLPRAELTAPRLADFLDLDDAGFRALFTASPIKRIGRDRFLRNVLIGIGNSGDASVLPKVVPLLEDESELVRAMAVWAAGKLGSASQ

SEQ ID NO: 77293 - protein, 461 aa, Hwanghaeicola aestuarii
  misc_feature (1)..(461): tr|A0A2W7NKL7|A0A2W7NKL7_9RHOB Epoxyqueuosine reductase OS=Hwanghaeicola aestuarii OX=568105 GN=LX81_03811 PE= 4 SV=1
MEGAVPPGAALKAALAREAQAAGFAKMGVCRPDAIPQAAGRLDAFLAAGRHGQMGWMAERAAWRRDPAALWPAARSVVMLAESYTPDHDPLDDVGLAERGAVSVYAQGRDYHDVVKKRLKRLARWLAGVAEAGGFDGPEGWVAVTPVREASGEAPAGRGMGDMREGEAGSREAPARGPGRRGSGLAVSRPGLDPGPRGDMEPGEEGETGDREALPGETGNRVPLSKTQGASSSAHAAKPAVSPVKVFVDTAPVMEKPLAQAAGLGWQGKHTNLLGRDLGNWIFLGAIFTTFDLPPDRAETEHCGSCRKCLDICPTDAFPAPFELDARRCISYLTIEHRGPVDESLRPGIGNRIYGCDDCLAICPWNKFAVAGRDMRLAPAPGRRAPELAALAGLDDAGFRAAFSGSPIKRIGRDRFVRNVCYAIGNSGRPALGAALGPLVSDPDPGVADAARWAKIRLETG

SEQ ID NO: 77294 - protein, 339 aa, Hyalangium minutum
  misc_feature (1)..(339): tr|A0A085W5V6|A0A085W5V6_9DELT Epoxyqueuosine (OQ) redu ctase QueG OS=Hyalangium minutum OX=394096 GN=DB31_3128 PE=4 SV=1
MKLLPTAHLRQLSDAVGFDLVGFARAAPIPPEALTEWIAAGYAADMDWMKERAAERLDVTQLLPGAKTVVVFANNYYRDDAETEGSPIARYARGRDYHSTLRDRMKAFRKAVQGEYPGIGTYGSVDSGPLMEKVWAARAGLGYVGKNGCFITERFGSWVLLATVVLDAEVDAYGDGPAADRCGSCRKCLMSCPTGALVGNGRVNARACLSYQTIENRDHEVPESFRVEMNNLVFGCDICQDVCPLNRRPVFAEHPRFAPRAVAGLGVMELAGLTQEQYATFIPGTALARAQYDGLRRNAVYALGATRQENARLLLEKLSEDDSELVRSAAQWALRQLAQ

SEQ ID NO: 77295 - protein, 310 aa, Hydrobacter penzbergensis
  misc_feature (1)..(310): tr|A0A1H3DPT9|A0A1H3DPT9_9BACT Epoxyqueuosine reductase OS=Hydrobacter penzbergensis OX=1235997 GN=queG PE=3 S V=1
MSRIEAYSHTVKSVARQLGFDYCGIAKAEKLNDDARRLEQWLHQGMHGSMQYMENHFDMRTDPSLLVPGARSVITLLKNYYPSQQQSAHTPHISKYAFGKDYHEVIRAQLKELLQALNEKIGEIHGRGFVDSAPVLERSWATKSGAGWIGKNGNLITKHSGSFYFIATLIVDITLDYDDPFAKDYCGSCSRCIDACPTGAIEDNKVINGSKCISYYTIELKDALLPEQMKDQFKDWMFGCDICQDVCPWNRFSKPHHEINFTPIPEILNLSTKQWEEMTEESFKNIFRHSPLKRTKFSGIQRNLRFITRA

SEQ ID NO: 77296 - protein, 346 aa, Hydrocarboniclastica marina
  misc_feature (1)..(346): tr|A0A4P7XLA0|A0A4P7XLA0_9ALTE Epoxyqueuosine reductase OS=Hydrocarboniclastica marina OX=2259620 GN=queG PE=3 SV=1
MADAAKTIKEWAAELGFQGIGITDTELEQDGQHLQHWLDNDYHGDMDWMAKHGTKRFRPAELVTGTCRIISVRMDYAPAPDSPAAVLKNREKAYISRYTLGRDYHKLLRKRLAQLAQRIDEMLQGYDYRAFVDSAPVLERAVARKAGLGWTGKNTMLLNRKAGSFFFLGEIFTSAPLPLDEPYNGSHCGSCSKCLDLCPTDAFVGAGTLDARRCISYLTIENSGPIPLEFRKAMGNRVFGCDDCQLVCPWNRFSKPASEPDFQPRHSLDNSDLASLFRWDEQTFLERTAGSAIRRTGFEGWLRNLAVALGNAPSTIPVLEALRSREEDPSALVREHVQWALAQHEN

SEQ ID NO: 77297 - protein, 360 aa, Hydrocarboniphaga daqingensis
  misc_feature (1)..(360): tr|A0A1M5Q5N7|A0A1M5Q5N7_9GAMM Epoxyqueuosine reductase OS=Hydrocarboniphaga daqingensis OX=490188 GN=queG PE= 3 SV=1
MITATALPAGDALVADLRRWALELGFADLGVAHLDLGADLDHLQRWLARGDHGGMAYMARDPSQRAEPQRLRPGTLSVLSVRMDYRIGELDDARRQLADADGAYIARYALGRDYHRTMRSRLLKLGQRIEAAIGPHGYRVLTDSAPALEKALGRNARLGWIGKNTLLMNRHAGSLFFLGEIYTDLLLPPSAADPVPELCGSCSACLDVCPTQAFTAPYQLDARRCISYLTIEHHGAIPVELRAGIGNRIFGCDDCQLVCPWNRYARLSTEPDFAPRHALDSARLIDLFAWTEAQWLTMTEGMALRRAGYPRWRRNLAIALGNAPYSAAVIDALRAREDDDDDIVREHVSWALQQQQQRAV

SEQ ID NO: 77298 - protein, 358 aa, Hydrocarboniphaga effusa
  misc_feature (1)..(358): tr|I8HXT1|I8HXT1_9GAMM Epoxyqueuosine reductase OS=Hydr ocarboniphaga effusa AP103 OX=1172194 GN=queG PE=3 SV=1
MIAAAIPTDFVARIRQWALELGFADAEVAHLQLDEDLAHLQRWVAEGRNGGMAYMGRDPELRADPSKLRPGTLSVISLRMDYKPPGIDPRSVLEDGEAAYIARYALGRDYHRTLRARLLKLGRRIEAEVGPHGYRVLTDSAPAFEKALARNAGLGWIGKNTLVLNAEAGSLFFLGEIYTDLPLPLSTRGDAEDRCGRCSACLKICPTQAFIGPRQLDARRCISYLTIEHHGSIPEELRPLMGNRIFGCDDCQLVCPWNRYARISEEPDFAARNGLDAPKLIELFAWSEHEWLQKTEGMALRRAGYSRWKRNLAIALGNAPRSEAAVTSLRARIDDEDETVREHVRWALDRQLRHAGAS

SEQ ID NO: 77299 - protein, 309 aa, Hydrococcus rivularis
  misc_feature (1)..(309): tr|A0A1U7H9L7|A0A1U7H9L7_9CYAN Epoxyqueuosine reductase OS=Hydrococcus rivularis NIES-593 OX=1921803 GN=queG P E=3 SV=1
MTLDSLQIKEKALSLGFHQVGIAAIANDPDDSAAARLQAWLALGYHADMAWMANPKRFDIRACMSEVQSVICVALNYYTPHQRPEGKEYGKISRYGWGRDYHKVMHKKLKALSQWLEAQAEGIQTRYYADTGPVQDKVWAQRAGIGWIAKNGNVITREYGSWIFLGEILTNIALKADTPHAEHCGTCTRCLEACPTGAIAKPFIVDANRCIAYHTIENRAEELPTSIASHLSGWIAGCDICQDVCPWNQRFAKETNIADFQPYPWNIGPKLRELAEMSDEEWERRFPASALRRIKPAMLRRNARANLNK

SEQ ID NO: 77300 - protein, 308 aa, Hydrocoleum sp.
  misc_feature (1)..(308): tr|A0A261KQS0|A0A261KQS0_9CYAN Epoxyqueuosine reductase OS=Hydrocoleum sp. CS-953 OX=1671698 GN=queG PE=3 SV=1
MKSPIKSSQIKQKALELGFHKVGIASANEIGSEINRLQGWLNKGYQTDLEWMANPKRQDLKRVMPEVQSVICVALNYYTPHQHSENNKIGKISRYGWGRDYHKVVHKKLKALANWLQEQDKEILTRYYVDTGPIMEKALAEQAGLGWIAKNGNLITREYGSWVFLGEVLINLELTSDRSHTAHCGSCTRCLEACPTNAIVEPFVVDANLCIAYHTIENRNPELPAHIKSNLKGWVAGCDICQDVCPWNQRFAQETNIDDFQPYPDNLAPQLTELAEISEEDWNKQFPASALRRIKPEMLQRNARANLQ

SEQ ID NO: 77301 - protein, 448 aa, Hydrogenibacillus schlegelii
  misc_feature (1)..(448): tr|A0A2T5G7V8|A0A2T5G7V8_HYDSH Epoxyqueuosine reductase OS=Hydrogenibacillus schlegelii OX=1484 GN=queG PE=3 S V=1
MTAERRPNAPPSAPRPGAPKPFEPPPDDPDRSELRPDETPDRRGRSDRAPEDGAAFKAELKAAARAIGLDAVGVTTADPFHELRPILEEYYGRGYDSGFEKGTIDERVDPRRTMPWAQSIIAAAMAYPSKLKNAPKSVPGARRGFIARSAWGRDYHGVLRERLEALLAWIRERVPSVRGEILVDTGVLSDRAVAARAGIGWIGKNGLLITPDYGSFVYLGELVLDLPLPPDAPMADRCGTCTKCLDACPTSAFIRPGALDSKKCLSYHTQTKGMVPLPYREKLGSRLYGCDTCQVVCPYNRGVDADHHPEFRPDPEVVKPLLMPLIGLSKKAFADTFAKTAAGWRGKRTLERNAIIALAHHRAPEAVPVLAERLALDPRPVIRGTAAWALGKIGGEAAKAALETARARERDPMVREEIEAALARLSGVSGRSGAEEEGRPANDRSGVG

SEQ ID NO: 77302 - protein, 389 aa, Hydrogenibacillus schlegelii
  misc_feature (1)..(389): tr|A0A132N5J0|A0A132N5J0_HYDSH Epoxyqueuosine reductase OS=Hydrogenibacillus schlegelii OX=1484 GN=SA87_03785 PE=4 SV=1
MKAAARAIGLDAVGVTTADPFHELRPILEEYYGRGYDSGFEKGTIDERVDPRRTMPWAQSIIAAAMAYPSKLKNAPKSVPGARRGFIARSAWGRDYHGVLRERLEALLAWIRERVPSVRGEILVDTGVLSDRAVAARAGIGWIGKNGLLITPDYGSFVYLGELVLDLPLPPDAPMEDRCGSCTKCLDACPTSAFIRPGALDSKKCLSYHTQTKGMVPLPYREKLGSRLYGCDTCQVVCPYNRGVDADHHPEFRPDPEVVKPLIMPLIGLSKKAFVETFAKTAAGWRGKRTLERNAIIALAHHRAPEAVPVLAERLALDPRPVIRGTAAWALGKIGGEAAKSALEAARARERDPMVREEIEAALARLSGASGRSGAEEERRPANDRSGIG

SEQ ID NO: 77303 - protein, 305 aa, Hydrogenispora ethanolica
  misc_feature (1)..(305): tr|A0A4R1RX19|A0A4R1RX19_9FIRM Epoxyqueuosine reductase OS=Hydrogenispora ethanolica OX=1082276 GN=EDC14_10093 7 PE=4 SV=1
MNQDEERIVAMLAEEGYPGRMVAIEHLEELRQEIAARRAAGLLDETLIQRYLSDWQFDYTKQLPEARSILVVAAAQPLMQLEFEWRGSFHPVLVPPTYIAEDDGRVAATVAHALQSKGYHGVQARLPQKLLAVRSGLSRYGRNNISYIEGMGSFYTIMAFFTDLPLSEDSWQEASKMPECEACRVCLRNCPTGCIDPERFLIHAERCLTYLNENSGEFPDWVNAHDHHALVGCMKCQTVCPQNRERLRTVVMKETFHEAETAAILSGVALEQLPGVTQQTLKRLGMTDYCQDRILARNLGVLLAS

SEQ ID NO: 77304 - protein, 309 aa, Hydrogenispora ethanolica
  misc_feature (1)..(309): tr|A0A4R1R2U3|A0A4R1R2U3_9FIRM Epoxyqueuosine reductase OS=Hydrogenispora ethanolica OX=1082276 GN=EDC14_10389 PE=4 SV=1
MIELLSQEILSHGDKSRILPLERLADLQKDIAEFEERQDLNGFQKWIAGSLYQFDSPAADFGSRSLLIIASPNPAYAKVIFHWQGQKVPLICLARSEMGKKAAPARTKQYLTRFLKPLGYHIQAAPRLPLKRLAVRSGLAAYGRNNICYVEGMGSFFTLVAYFSDIPCDAGDWHELRVMEHCQSCNACLKNCPTGAILPERFLIDNERCLSYFNESPGDFPDWLPRSVHHCLYDCLMCQRICPQNRERIDHVTGPVEFDEAETALLLSGKTLPEFPPALRRKVRFLGMDEWLGAMPRNIRVLLENHQSA

SEQ ID NO: 77305 - protein, 244 aa, Hydrogenoanaerobacterium saccharovorans
  misc_feature (1)..(244): tr|A0A1H8AD79|A0A1H8AD79_9FIRM Epoxyqueuosine reductase QueG (Queuosine biosynthesis) OS=Hydrogenoanaerobacter ium saccharovorans OX=474960 GN=SAMN05216180_1214 PE=4 SV=1
MNCRAGQRLPAGAKSILVCLFPYYVGDYPNRNLSRYAIVDDYHTITRKLLNKAVDILRKEFPEHSFESFIDSSPVREVYAGYLAGLGFIGKNGQLITEDYGSYCFIGEIVSTLELPAAIPSVKTCGACSLCINACPNGAIGKKGRINTAECRSQITQKKGELSAFEQQSIVQGGFAWGCDICTDVCPFNRNPKSTPINDFYCNIVPILTLDNYSELYKTRAYGWRGASMLERNLRLISGHSQVR

SEQ ID NO: 77306 - protein, 364 aa, Hydrogenophaga crassostreae
  misc_feature (1)..(364): tr|A0A162N155|A0A162N155_9BURK Epoxyqueuosine reductase OS=Hydrogenophaga crassostreae OX=1763535 GN=queG PE=3 SV=1
MGTTKEPAAERAAAETLVAQIQQWGRALSFSEIGVAGVDLSSAEPGLQAWLAQGFHGDMGYMASHGLKRARPAELIPGTVSVITARMDYLPKDTPDDWQANELARLERPGEAIVSVYARGRDYHKVLRARLQKLADRIAEAVGPLGHRVFTDSAPVLEAELASRSGQGWRGKHTLILNREGGSMFFLGEIYLDLALPPSAPVSSHCGACTACIDICPTQAIVAPHKLDARRCISYLTIEHAGPIPEDLRPLLGNRIYGCDDCQLACPWNKFAQRSPLADFDPREGLAGASLIELFAWSEDAFLSRTEGSPIRRIGHERWLRNIAVAMGNALRNEDAADIRAALAQRAQHPSDLVRAHVEWALAQ

SEQ ID NO: 77307 - protein, 307 aa, Hydrogenophaga intermedia
  misc_feature (1)..(307): tr|A0A1L1PMC1|A0A1L1PMC1_HYDIT Putative iron-sulfur clu ster binding protein OS=Hydrogenophaga intermedia OX=65 786 GN=BN948_02529 PE=4 SV=1
MAYMAAHGLKRARPAELVPGTLSVITARMDYLPRDTPADWVDQEWARLQRPGEAIVSVYARGRDYHKVLRARLQQLSDRIAEAIGPFGHRVFTDSAPVLEVELASRSGIGWRGKHTLTLHREAGSMFFLGEIYVDLALPPSAPVSDHCGSCSACIDVCPTQAITGPQRVDARRCISYLTIEHAGPIPVELRPAMANRIYGCDDCQLVCPWNKFAQRATLPDFDARQGMSGATLVELFAWSEVEFLRRTEGSAIRRIGHERWLRNLAVGLGNALRATGDGAVRQALQARADDPSELVREHVAWALAQG

SEQ ID NO: 77308 - protein, 306 aa, Hydrogenophaga pseudoflava
  misc_feature (1)..(306): tr|A0A4V1ABF8|A0A4V1ABF8_HYDPS Epoxyqueuosine reductase OS=Hydrogenophaga pseudoflava OX=47421 GN=queG PE=4 SV =1
MDYMARHGMKRARPAELVPGTVSVITARMDYLPRYTPEDWTEQELARLQRPGEAIVSVYARGRDYHKVLRSRLQQLAERIGAAVGPLGHRVFTDSAPVLEAELARRSGQGWRGKHTLILSREGGSMAFLGEIYLDLALPPTAAVSDHCGSCSACMAVCPTQAIVAPYRLDARRCISYLTIEHDGPIPESLRPLIGNRIYGCDDCQLVCPWNKFAQRSPLPDFDPREGLTGATLVELFGWSEEEFLRRTEGSPIRRIGHARWLRNIAVAMGNALRQADEPVTRAALAAHTAHPDPVVREAVAWALSA

SEQ ID NO: 77309 - protein, 374 aa, Hydrogenophaga sp.
  misc_feature (1)..(374): tr|A0A358BBM7|A0A358BBM7_9BURK Epoxyqueuosine reductase OS=Hydrogenophaga sp. OX=1904254 GN=queG PE=3 SV=1
MKTGFVAAQLVSQIQAWGQELAFSQIGVTGVDLSAAEPGLNAWLQAGFHGDMGYMVSHGLKRARPAELVPGTVSVITARMDYLPRETPEGWQAIEFSRLQRPGEAVVSLYARGRDYHKVLRYRLQKLAERIAIEVGPLGHRVFTDSAPVLEAELASRSGQGWRGKHTLVLNREGGSMFFLGEIYVDLALPASEPVSEHCGACTACIDVCPTQAILGPQRLDARRCISYLTIEHAGPIPEDLRPLIGNRIYGCDDCQLVCPWNKFAQRSSLPDFDPREGLTGATLIELFSWSEEEFLRRTEGSPIRRIGHERWLRNIAVAMGNALSAVVGEEGDVLRQALVTRSAQPSALVREHVAWALERGGRENRFREGTAGS

SEQ ID NO: 77310 - protein, 365 aa, Hydrogenophaga sp.
  misc_feature (1)..(365): tr|A0A0T2YG79|A0A0T2YG79_9BURK Epoxyqueuosine reductase OS=Hydrogenophaga sp. Root209 OX=1736490 GN=queG PE=3 SV=1
MNVVLDAAQLVSRIQAWGQELAFSQIGVAGVDLSAAEPGLLAWLSAGCHGDMAYMAAHGLKRARPTELVPGTLSVITARMDYLPRATPEGWQSIEFERLDRPQEAVISMYARGRDYHKVLRNRLQTLSERIAATIGPFGHRVFTDSAPVLEVELASRSGIGWRGKHTLALHREAGSMFFLGEICVDLALPPTEATSEHCGNCTACIDVCPTQAITGAQRVDARRCISYLTIEHAGAIPLELRPLMGNRIYGCDDCQLICPWNKFAQRSPLPDFDERAGLSGAALVELFSWSEAEFLRRTEGNAIRRIGHERWLRNIAVALGNALRARHDERALRALQARADHPSKLVREHVAWALSQTHNPLRSP

SEQ ID NO: 77311 - protein, 352 aa, Hydrogenophilaceae bacterium
  misc_feature (1)..(352): tr|A0A1J4YS92|A0A1J4YS92_9PROT Epoxyqueuosine reductase OS=Hydrogenophilaceae bacterium CG1_02_62_390 OX=18052 18 GN=queG PE=3 SV=1
MHDGALQNTQQLKQAIRLWGREMGLSAIAFAAPELGAAGAGLADWLAQGLHGEMDYMARNTEKREHPTELVAGTQSIIVTRLDYLPPDLPDGGPDSARISRYAMGRDYHKTVRQRLQRLAERIESAVGPFGYRAFADSAPVMEVELARLAGLGWRGKHTLLLSRSGSWFFLGELFTTLPLPPDAPLEGHCGHCDACLKSCPTAAFIGPYLLDARRCISYLTIEHAGPIPKELRPMLGARIYGCDDCQLACPWNRFARPGELPDFLPRNGLDHSRLADLFAWTESEFNDRLAGSPIRRIGHERWLRNIAVALGNTPPNPQAVAALEARREHASAIVREHVAWAIERHRAAATA

SEQ ID NO: 77312 - protein, 357 aa, Hydrogenophilales bacterium
  misc_feature (1)..(357): tr|A0A257Y3J3|A0A257Y3J3_9PROT Epoxyqueuosine reductase OS=Hydrogenophilales bacterium 12-61-10 OX=1970515 GN= queG PE=3 SV=1
MHETDSAQPGLIQLAQHIKQWGRALGFAGVGITDCDLSAAETGLLAWLDQGFHGEMNYMAAHGVKRSRPADLVPGTLRIISVRLDYFPPAAADPHAVMADPHAAYLARYALGRDYHKVLRNRLQSLAEKISAEVGAHHFRVFTDSAPVLEVALAEKSGLGWRGKHTLLLNRQHGSWFFLGEIYTDLLLPVDAPESNHCGTCQACIDICPTQAIVAPYSLDARRCISYLTIELKGSIPPELRPLMGNRIYGCDDCQLVCPWNRFAQTAALADFEVRNGLDSAQLLDLFAWSEADFNERLAGSPIRRIGHERWLRNIAVALGNAPSSPAIQIALRTQMNHPSALVREHVAWALSRQTDI

SEQ ID NO: 77313 - protein, 358 aa, Hydrogenophilales bacterium
  misc_feature (1)..(358): tr|A0A5C7EWT0|A0A5C7EWT0_9PROT Epoxyqueuosine reductase OS=Hydrogenophilales bacterium SM250 OX=2602750 GN=que G PE=3 SV=1
MQGDSLCCARLEGAALVQAIKRWGRELGFQRVGVTHADLGDAEARLLDWLAHGYHGDMDYMARHGVKRSRPSALVPGTVSVICARMNYLPPQARASRSVLDDPERAFVSRYALGRDYHKVVRSRLAQLARRIARHVEGFAWRAFADSAPVMEVELASRAGVGWRGKHTLLLARDAGSWFFLGEIYTNLSLPADPPEADHCGTCTRCIDACPTQAIIAPYRIDARRCISYLTIEHKGEIPEALRPLMGNRIYGCDDCQLVCPWTRFAKTSREPDFAVRNGLDDASLVALFGWSEQQFLERFAGSPIRRLGYERWLRNIAVALGNAPSTPAVVAALEARRDHPSALVRVHVAWALARHGR

SEQ ID NO: 77314 - protein, 363 aa, Hydrogenophilus thermoluteolus
  misc_feature (1)..(363): tr|A0A2Z6DVY0|A0A2Z6DVY0_HYDTE Epoxyqueuosine reductase OS=Hydrogenophilus thermoluteolus OX=297 GN=queG PE=3 SV=1
MAGTVRDWAQIKAALWRAAESLGFAAMAVSDVDLSAEEPKLLAWLREGYHGEMDYMAKWGTLRARPAALVPGAQRVVSLRFPYWPEQAAPAEAVLSDPSRAYISRYALGRDYHKVVRARLAKLENVLKTLAPEHQGRVFVDSAPIWEVALAARAGLGWRGKHTLLLTREGSYFFLGELVTNLPLPVDAPQRAHCGRCVRCLTACPTQAIVAPYTVDARRCISYLTIEHPGSIPESLRPLVGNRIYGCDDCQLVCPWNRFATPSQCSDFQPRHGLDAPRLVELFAWREHEFLDRFAGSPIRRIGYPRWLRNLAVALGNAPTTPDVVAALRQRADDPSPLVREHVQWALARHRGQGGTVQSVPFA

SEQ ID NO: 77315 - protein, 403 aa, Hydrogenovibrio crunogenus
  misc_feature (1)..(403): tr|A0A4P7P1I3|A0A4P7P1I3_9GAMM Epoxyqueuosine reductase OS=Hydrogenovibrio crunogenus OX=39765 GN=queG PE=3 SV =1
MPKNAPTTLKNSTDSALYQLAEKIKQWGLSLGFADVGITDIDLGQYESSYFEWLEKRFHADMEYMVKHGTKRTRPEELEPGTRRVISVRMNYFDTEAYSPIPQLQASDHAYISRYALHKDYHKLMRKRLQQLAEKINQTIENDFHYRAFCDSAPVLERPLAEKAGLGFIGKNSLIIHPRAGSWFFLGELYTNLPLPIDPPFEKQGCGPCTACIQECPTQAIVADGVVDSRRCISYLTIENKGSIPASLREKMGNRIYGCDDCQLVCPWNKFTQDTNETAFKANSLLDASTLLELFNWSEKDFLKQLEGSPIRRIGFEQWQRNLCVAIGNALENSTLSEEIIHALESHQSDSDLVNEHKHWALQRQRHFLKAPEEITRPGHFSSPSKPHKAKKYYLPKTIAVRK

SEQ ID NO: 77316 - protein, 404 aa, Hydrogenovibrio crunogenus
  misc_feature (1)..(404): tr|Q31GP7|Q31GP7_HYDCU Epoxyqueuosine reductase OS=Hydr ogenovibrio crunogenus (strain XCL-2) OX=317025 GN=queG PE=3 SV=1
MQKSTPTTIKKPTDSELYQLADKIKQWGISLGFADVGITDIDLSQYESSYFEWLEKRFHADMDYMVKHGTKRTRPEELEPGTRRVISVRMNYFDTKAYSPITQLQASDHAYISRYALHKDYHKLMRKRLQQLAEKINQAVENDFHYRAFCDSAPVLERPLAEKAGLGFIGKNSLIIHPRAGSWFFLGELYTNLPLPIDPPFEKHGCGPCTACIQECPTQAIVADGVVDSRRCISYLTIENKGIIPESLREKMGNRIYGCDDCQLVCPWNKFTQDTNETAFKANSLLDASSLLELFNWPEKQFLNQLEGSPIRRIGFEQWQRNLCVALGNALETPELSQKIIHALENHQSDSDLVNEHKRWALQRQQHFMKAPEEMARPGHFSSPSKPHKAKKYYLPKTIAIRKQ

SEQ ID NO: 77317 - protein, 392 aa, Hydrogenovibrio marinus
  misc_feature (1)..(392): tr|A0A066ZMI5|A0A066ZMI5_HYDMR Epoxyqueuosine reductase OS=Hydrogenovibrio marinus OX=28885 GN=queG PE=3 SV=1
MQNTTHAQLVTKIKGWGKALGFADVGISSTDLSDYEAAYFNWLGESYHGEMQYMAAHGTKRTRPPELVPGTQSIISVRMNYYDADAHSPIEQLQTSDKAYVSRYALNKDYHKLMRKRLQQLASKIQQEVPDFTYRAFADSAPVLERPIAQQAGLGFIGKNSLIIHPRAGSWFFLGELYCNIDLPADPPFGKQGCGPCTACIDECPTQAILPNNQVDARRCISYLTIEHQGSIDEALRPLIGNRIYGCDDCQLVCPWNKFTDSTTEEAFKAKQIKAKHPLDATTLLALLSWSEEEFLNNFEGSPIRRIGFTLWQRNLCIAIGNDDYRPQNIEALTGLKTDSELVQEHREWAITQQTQKKQQQAQTQKSARLGGFTQLGKPAVAPKYYLPKKPR

SEQ ID NO: 77318 - protein, 405 aa, Hydrogenovibrio sp.
  misc_feature (1)..(405): tr|A0A2I2A6A2|A0A2I2A6A2_9GAMM Epoxyqueuosine reductase OS=Hydrogenovibrio sp. SC-1 OX=2065820 GN=queG PE=3 SV =1
MDEAVLYQLTQQIKQWGRSLGFADIGISDIDLSHYEPLFEDWLSHQYHGEMDYMAKHGRKRSRPEQLEPGTLSLISVRMNYFDGDAHSAVSQLQSPDKAYISRYALHKDYHKLMRKRLAQLAQKIETAVEEISPLATSPFHYRAFSDSAPVLERPVAEKAGLGFIGKNSLLIHPRAGSWFFLGELYTNLSLPADPPFTRQGCGPCTACMDECPTQAIVDNAVVDARRCISYLTIEYDGVIEEALRPLIGNRIYGCDDCQLVCPWNRFTESTQESAFKAKAPLDEIDLLTLLQWDEAQFLTEMAGSPIRRIGYLKWLRNLCIAIGNDEYRAENISALSELQTDSDLVNIHRLWALNVQKQKQKKPPKTTRPGHFSTPNRPAVAAKYYLPKSLKAIPIHQIRSKIEP

SEQ ID NO: 77319 - protein, 389 aa, Hydrogenovibrio thermophilus
  misc_feature (1)..(389): tr|A0A410H2U7|A0A410H2U7_9GAMM Epoxyqueuosine reductase OS=Hydrogenovibrio thermophilus OX=265883 GN=queG PE=3 SV=1
MPEAPLYQLAEKIKHWGQALGFADVGITDTDLSAYEADYFNWLGEHYHGDMEYMARHGTKRTRPAELEPGTVSVISVRLNYFDPDAHSPVEQLQANGQAYVSRYALHKDYHKLMRKRLQQLAAKIEAELVEKAESFHYRAFVDSAPVLERPLAEKAGLGFIGKNSLIIHPRAGSWFFLGELYTNLPLPSDPPFDKQGCGPCTACIDECPTQAIVDNAVVDARRCISYLTIEYKGVIAPELREKMGNRIYGCDDCQLVCPWNKFTEATEETAFKPKHALDAASLLELLDWNETDFLTQFEGSPIRRIGFEQWQRNLCIALGNALEDTDLSQRIVQVLENLSSDSELVLEHRDWALQRQTDALSLSGKTTRPGRFPKPLKPAVAKKYYLPK

SEQ ID NO: 77320 - protein, 368 aa, Hydromonas duriensis
  misc_feature (1)..(368): tr|A0A4R6Y7G1|A0A4R6Y7G1_9BURK Epoxyqueuosine reductase OS=Hydromonas duriensis OX=1527608 GN=queG PE=3 SV=1
MTTPKNSPHCNAAAELSAWIKAQALALGFAHVGISQPDLRSAKQAHLAWLEAQFQGEMDYMSRNIEARFQPDVLVPHTLSIISVALPYLATDLPDDWRADAWQNINNQNKAYVSRYALGRDYHKVVRNTLQKLASALAAHLANMTEQVLIYRAFADSAPVPEVEIAQQTALGWRGKHTLLLNRAHGSMFFLGELYVNLDLATDAPSSAHCGQCTACIDICPTRAIVAPYRVDARRCISYLTIEHKGEIPHEFRQAIGNRIYGCDDCQLVCPWNKFAQKSALSDFAVRHALDCSDLLALLQWDEATFKHNMAGSAAYRIGHAQWQRNVLLALGNAPTTPDVLTALQTFTTHHNPVVAEQARWSLAQHPK

SEQ ID NO: 77321 - protein, 385 aa, Hydromonas sp.
  misc_feature (1)..(385): tr|A0A345D935|A0A345D935_9BURK Epoxyqueuosine reductase OS=Hydromonas sp. F02 OX=2268024 GN=queG PE=3 SV=1
MPAQNHHCTAAADLSTWIKAEARTLGFAHVGISQPDLSTAKAGHLAWLADQFHGTMDYMTRNIDARFSPELLVPGTLSIISVAMPYLATGLSDEWQKEAWQTIDNGDQAYVSRYALGRDYHKVVRNTLQKLATAIEAKIAPTPLTYRAFSDSAPVPEVEIAQQTALGWRGKHTLLLNRTHGSMFFLGELYVNLDLAIDQPTTAHCGQCTACIDICPTQAIVAPYRVDARRCISYLTIEHKGEIPHEFRKAIGNRIYGCDDCQLACPWNKFAQKSALSDFAARHSLNDVDLLTLLHWDEATFKSNMAGSAAYRIGHAQWQRNILLALGNADPRPTHLAALQAFTSHDNPILAEQASWSLAQLTQIDFQCTQHVDFETDLFKNKLDE

SEQ ID NO: 77322 - protein, 315 aa, Hydrotalea sandarakina
  misc_feature (1)..(315): tr|A0A2W7RTL8|A0A2W7RTL8_9BACT Epoxyqueuosine reductase OS=Hydrotalea sandarakina OX=1004304 GN=queG PE=3 SV=1
MSTFSQKNTQIVKQTAKQLGFDYCGIAKAEFLADDAKKLENWLKKGMHGKMQYMENYFDLRTDPRKLFPGAKSVITLLKNYFPAQQQNIDAPKIARYAYGQDYHEVIKQQLNTFLNHLTSYIGHVAGRGFVDSAPVLERAWAQKSGLGWIGKNGNLIHPKAGSFYFIATLITDLTLEYDNPLAKDYCGTCTRCIDACPTQAILPNKTINGSQCIAYFTIELKDLLIPDEQKGKFKNWMFGCDICQEVCPWNRFSKPTNEPAFTPIPEILELSTKEWLQLNEESFKKIFKHSPLKRSKFKGIQRNLKFILHDEAIN

SEQ ID NO: 77323 - protein, 320 aa, Hydrotalea sp.
  misc_feature (1)..(320): tr|A0A4Q0B2G4|A0A4Q0B2G4_9BACT Epoxyqueuosine reductase OS=Hydrotalea sp. AMD OX=2501297 GN=queG PE=3 SV=1
MSHLTDRNTSIVKQTAQKLWFDYCGIAKAEQLEEDAKKLEAWLNKGMHGTMQYMENYFDMRTDPRKLVPGAKSVITLLKNYFPAQQQKNNTPKIARYAYGKDYHLVIKQQLNEFLASISNTIGAIAGRGFVDSAPVLERAWAQKSGLGWIGKNGNLIHPKAGSFYFIATLITDLELNYDNPLTKDYCGTCTKCLDACPTDAILPNKTINGSQCISYFTIELKEMMIPETQKGKFNNWMFGCDICQEVCPWNRFSQPHNEPAFSPIPEILELSTQEWMHLSEAAFNQIFKHSPLKRSKYKGIQRNLRFIQSDTVIDDTNIP

SEQ ID NO: 77324 - protein, 320 aa, Hyella patelloides
  misc_feature (1)..(320): tr|A0A563VQP5|A0A563VQP5_9CYAN Epoxyqueuosine reductase OS=Hyella patelloides LEGE 07179 OX=945734 GN=queG PE= 3 SV=1
MLRSKQIKTQAQAIGFHKVGIAKVDRSENHNQAVQHLQSWLALGYHADMAWMANPQRQDVRSLMPEARSLICVALNYYTPHQHSEHPEDGKISRYGWGRDYHKVMGQKLKALSSWLQEQQSDIRTRYYVDTAPIQDKVWAQQAGIGWIAKNGNVITTEYGSWVFLGEILTNLDLEPDRPHSQHCGTCTRCLDACPTQAIAKPFVVDANRCIAYHTIENRSSELPPEIAGKLSGWVAGCDICQDVCPWNQRFAQETNIADFQPYPPNIRPKLQYLAQIEETAWDRQFRASALRRIKPKMLRRNARANLIARENSTDEKGIS

SEQ ID NO: 77325 - protein, 403 aa, Hylemonella gracilis
  misc_feature (1)..(403): tr|A0A4P6ULA4|A0A4P6ULA4_9BURK Epoxyqueuosine reductase OS=Hylemonella gracilis OX=80880 GN=queG PE=3 SV=1
MQVNSHIDKGQFVSQVRVWARELGFSQIGVHNVDLSSAEAGLKAWLSHGFHGEMAYMAAHGMKRARPAELVPGTVSVVTARMDYLPRDTPEGWQAAELARVQSPDRPREGVISLYARGRDYHKVLRSRLKKLADRMEQHLREQGTAFADGRGDEASQVDQAAREAFQYRVFTDSAPVLEAELAAGSGLGWRGKHTLVLDREAGSMFFLGEIFLNLALPPTEPVSPHCGNCNACITACPTQAILGPGRLDARRCISYLTIEHPGAIPEALRPLMGQRIYGCDDCQLVCPWNKYAQRSTLPDFDAREGMANGDLLVLLAWDEAEFLRRTEGSAIRRIGHARWRRNILVALGNALRDGALGAMDSAAIRAALQPFADSEADPLLCEHARWALAASDVTGGRPSAVF

SEQ ID NO: 77326 - protein, 392 aa, Hylemonella gracilis
  misc_feature (1)..(392): tr|A0A016XKE2|A0A016XKE2_9BURK Epoxyqueuosine reductase OS=Hylemonella gracilis str. Niagara R OX=1458275 GN=q ueG PE=3 SV=1
MQVNSHIDKGQFISQVRVWARELGFSQIGVHNVDLSSAEAGLKAWLSHGFHGEMAYMAAHGMKRARPAELVPGTVSVVTARMDYLPRDTPEGWQAVELARVQSTQRPREGVISLYARGRDYHKVLRSRLQKLAERMEQHLRDQVLAPVDGSGRDTAFQYRVFTDSAPVLEAELAAGSGLGWRGKHTLVLDRDAGSMFFLGEIFLNLDLPPTEPVSPHCGSCSACITVCPTQAILGPGRLDARRCISYLTIEHPGAIPEELRPLMGQRIYGCDDCQLVCPWNKYARRSTLPDFDARADMARGDLLTLLAWDEAEFLRRTEGSAIRRIGHARWRRNILVALGNALRGGTVDAEDSAAIRAALQIYADPGADPLLREHALWALAAPAASGGSEVF

SEQ ID NO: 77327 - protein, 311 aa, Hymenobacter actinosclerus
  misc_feature (1)..(311): tr|A0A1I0H605|A0A1I0H605_9BACT Epoxyqueuosine reductase OS=Hymenobacter actinosclerus OX=82805 GN=queG PE=3 SV =1
MLPTAHYTAFIKRRAAELGFMYCGISEAGFLEEEAPRLENWLNKNMHGQMAYMANHFDKRLDPRLLVDGAKSVISLLLNYYPPEETQQPDDTLKVSKYAYGRDYHFVIKDKLKELLHDMQQEIGEVGGRCFVDSAPVMDKAWAKKSGLGWVGKNANLITPGTGSFYFIAELIVDVPLDYDGPIKDYCGTCTKCVDACPTQAITEPYVVDGSKCISYFTIELKDQIPREVAGQFGNWVFGCDICQDVCPWNRFAKPHQEPQFNPHPALKDLTRGDWQEITHELFSELFRQSAVKRTGYAGLQRNIRFVTGGE

SEQ ID NO: 77328 - protein, 313 aa, Hymenobacter amundsenii
  misc_feature (1)..(313): tr|A0A246FJH7|A0A246FJH7_9BACT Epoxyqueuosine reductase OS=Hymenobacter amundsenii OX=2006685 GN=queG PE=3 SV= 1
MLPTAQYTAFIKRRAAELGFMYCGISKAGFLEEEAPRLENWLNQNMHGQMAYMANHFDKRLDPRLLVDGAKSVISLLLNYYPPEETQQPEDTLKVSKYAYGRDYHFVIKDKLKELLHDMQAEIGEVGGRCFVDSAPVMDKAWAKKSGLGWVGKNSNLITPGVGSFYFIAELIVDVPLDYDGPIKDYCGTCTKCVDACPTQAITEPYVVDGSKCISYFTIELKDQIPREVDGQFGNWVFGCDICQDVCPWNRFAKPHQEPQFNPHPGLKDLSRGDWQEITHELFSELFRQSAVKRTGYAGLQRNIRFVTGEQDR

SEQ ID NO: 77329 - protein, 319 aa, Hymenobacter aquaticus
  misc_feature (1)..(319): tr|A0A4Z0PW72|A0A4Z0PW72_9BACT Epoxyqueuosine reductase OS=Hymenobacter aquaticus OX=1867101 GN=queG PE=3 SV=1
MLPTAQYTAFIKRRAAELGFMYCGISRAEFLEEEAPRLENWLNQQMNGKMAYMANHFDKRLDPRLLVDGAKSVISLLLNYYPAPEDQQPDDTLKISKYAYGRDYHFVIKDKLKTLLADMQQEIGEVGGRVFVDSAPVMDKVWAKKSGLGWVGKNSNLITPGVGSFYFIAELIVDLELDYDGPIKDYCGTCTKCVDACPTDAITNPYVVDGSKCISYFTIELKDQIPTEMAGKFGNWMFGCDICQDVCPWNRFARPHQEPQFRPHAQLPHLKANDWQEITHELFAELFRQSAVKRTGYEGLKRNIRFVTNEPDAIGNTEE

SEQ ID NO: 77330 - protein, 318 aa, Hymenobacter chitinivorans
  misc_feature (1)..(318): tr|A0A2M9BA32|A0A2M9BA32_9BACT Epoxyqueuosine reductase OS=Hymenobacter chitinivorans DSM 11115 OX=1121954 GN= queG PE=3 SV=1
MLPTAQYTAFIKRRAAELGFMYCGISKADFLEEEAPRLESWLNQNMNGKMSYMANHFDKRLDPRLLVDGAKSVISLLLNYYPAPEDQQAADEETLKISKYAYGRDYHFVIKDKLKELLADMQTEIGEVGGRVFVDSAPVMDKVWAKKSGLGWVGKNSNLITPGVGSFYFIAELIVDVELDYDGPIKDYCGTCTKCVDACPTDAITNPYVVDGSKCISYFTIELKDQIPQEVAGKFGNWVFGCDICQDVCPWNRFAKPHQEPQFRPHAQLPHLKANDWREITHELFTELFRQSAVKRTGYAGLTRNIRFVTNEPDALMG

SEQ ID NO: 77331 - protein, 311 aa, Hymenobacter coccineus
  misc_feature (1)..(311): tr|A0A1G1ST92|A0A1G1ST92_9BACT Epoxyqueuosine reductase OS=Hymenobacter coccineus OX=1908235 GN=queG PE=3 SV=1
MLLRAEWTPFIKRRAAELGFMACGISKAEFLEEEAPRLENWLKRSMNGRMGYMENHFDKRLDPRLLVDGARSVISLLLNYYPPKEEQQPDDTLKISKYAYGRDYHFVIKDKLKTLLADMQAEIGKIGGRCFVDSAPVLDKAWAKKSGLGWVGKNSNLITPGSGSFYFIAELIVDVDLDYDGAIRDYCGTCTKCLDACPTQAITEPYVVDGSKCISYFTIELKDQIPTEVGGKFGNWVFGCDICQDVCPWNRFAKPHQEPQFQAHPELKNLSASDWREITHELFTELFRQSAVKRTGYAGLVRNIQFVSPEA

SEQ ID NO: 77332 - protein, 314 aa, Hymenobacter daecheongensis
  misc_feature (1)..(314): tr|A0A1M6CZC0|A0A1M6CZC0_9BACT Epoxyqueuosine reductase OS=Hymenobacter daecheongensis DSM 21074 OX=1121955 GN =queG PE=3 SV=1
MLPTAAYTAFIKRRAAELGFMYCGISKADFLEEEAPRLENWLNRNMHGQMAYMANHFDKRLDPRLLVDGAKSVISLLLNYYPAEEDQQRDDTLKISKYAYGRDYHFVIKDKLKTLLQDIQQEIGEVGGRCFVDSAPVLDKAWAKKSGLGWVGKNANLITPGTGSFYFIAELIVDLELDYDGPIKDYCGTCTKCLDACPTGAITEPYVVDGSKCISYFTIELKDQIPTEVAGKFGNWVFGCDICQDVCPWNRFAKPHTESQFKPNPQLPHLSTTDWQEITHELFSELFRQSAVKRTGYAGLTRNIRFVTGEDAGK

SEQ ID NO: 77333 - protein, 319 aa, Hymenobacter elongatus
  misc_feature (1)..(319): tr|A0A4Z0PQ05|A0A4Z0PQ05_9BACT Epoxyqueuosine reductase OS=Hymenobacter elongatus OX=877208 GN=queG PE=3 SV=1
MLPTAQYTAFIKRRATELGFMYCGISKAGFLEEEAPRLEKWLSRQMNGQMGYMANHFDKRLDPRLLVDGAKSVISLLLNYYPAPEDQQPDDTLKISKYAYGRDYHFVIKDKLKILLADIQAEIGEVGGRAFVDSAPVLDKAWAKKSGLGWVGKNSNLITPGVGSFYFIAELIVDLELDYDGPIKDYCGTCTKCMDACPTDAITEPYVVDGSKCISYFTIELKDQIPRDVAGKFGNWVFGCDICQDVCPWNRFAKPHTEPQFQAHPQLPQLNAVDWQEITHELFTELFRQSALKRTGYAGLTRNIRFVSETEGPAGFEEE

SEQ ID NO: 77334 - protein, 317 aa, Hymenobacter gelipurpurascens
  misc_feature (1)..(317): tr|A0A212UB39|A0A212UB39_9BACT Epoxyqueuosine reductase OS=Hymenobacter gelipurpurascens OX=89968 GN=queG PE=3 SV=1
MLPTAHYTAFIKRRAAELGFMYCGISKADFLEEEAPRLENWLNGQMHGQMAYMANHFDKRLDPRLLVDGAKSVISLLLNYYPPEETQQPDDTLKVSKYAYGRDYHFVIKDKLKTLLHDMQEEIGEVGGRCFVDSAPVMDKAWAKKSGLGWVGKNSNLIRPGVGSFFFIAELIVDVELAYDGPIKDYCGTCTKCMDACPTQAITEPYVVDGSKCISYFTIELKDQIPREVEGKFGNWVFGCDICQDVCPWNRFSKPHQEPQFNAHPGLKDLTAGDWREITHELFSELFRQSAVKRTGYAGLTRNIKFVTGEDVPDRTL

SEQ ID NO: 77335 - protein, 311 aa, Hymenobacter glacialis
  misc_feature (1)..(311): tr|A0A1G1ST44|A0A1G1ST44_9BACT Epoxyqueuosine reductase OS=Hymenobacter glacialis OX=1908236 GN=queG PE=3 SV=1
MLLQSQWAPFIKRRAAELGFMACGISKAEFLEEEAPRLETWLTRRMNGKMGYMENHFDKRLDPRLLVDGAQSVISLLLNYYPAPEDQQPDDTLKISKYAYGRDYHFVIKDKLKVLLADMEAEIGQIGGRCFVDSAPVLDKAWAKKSGLGWVGKNSNLITPGTGSFYFIAELIVDVALPADGPIRDYCGTCTKCVDACPTQAITEPYVVDGSKCISYFTIELKDQIPTEVAGQFGNWVFGCDICQDVCPWNRFSKPHEEPQFQAHPSLKDLTPGDWREITHELFTELFRQSAVKRTGYEGLKRNIKFVLEGE

SEQ ID NO: 77336 - protein, 330 aa, Hymenobacter gummosus
  misc_feature (1)..(330): tr|A0A431U221|A0A431U221_9BACT Epoxyqueuosine reductase OS=Hymenobacter gummosus OX=1776032 GN=queG PE=3 SV=1
MLASDLTRAEWTAFIKRRAAELGFMACGISRAEFLEEEAPRLEQWLAKGMQGQMRWMENHFDKRLDPRRLVDGAKSVISLLLNYYPAPEDQQPDDTLKVSKYAYGRDYHHVIKDKLKHLMWDLQAHIGEVGGRAFVDSAPVLDKAWAKKSGLGWVGKNSNLITPGAGSFYFIAELIVDVELSCDGPIRDYCGSCTRCLDACPTQAITEPYVVDGSKCISYFTIELKDQLPASVQGQFGNWIFGCDICQDVCPWNRFAKPTQEAQFQAHPGLKDMRETDWEEITQEVFQTLFRHSAVKRTGYAGLRRNIAFVTGQPHTTETPAQGPASDTE

SEQ ID NO: 77337 - protein, 311 aa, Hymenobacter lapidarius
  misc_feature (1)..(311): tr|A0A1G1T6M1|A0A1G1T6M1_9BACT Epoxyqueuosine reductase OS=Hymenobacter lapidarius OX=1908237 GN=queG PE=3 SV= 1
MLLQSQWAPFIKRRAAELGFMACGISKAEFLEEEAPRLETWLTRRMNGKMGYMENHFDKRLDPRLLVDGAQSVISLLLNYYPAPEDQQADDTLKISKYAYGRDYHFVIKDKLKLLLADMEAEIGQIGGRCFVDSAPVLDKAWAKKSGLGWVGKNSNLITPGAGSFYFIAELIVDVVLPADGPIRDYCGTCTKCVDACPTQAITEPYVVDGSKCISYFTIELKDQIPTEVAGQFGNWVFGCDICQDVCPWNRFSKPHNEPQFQAHPILKDLTPGDWREITHELFTELFRQSAVKRTGYEGLKRNIKFVLEGE

SEQ ID NO: 77338 - protein, 327 aa, Hymenobacter mucosus
  misc_feature (1)..(327): tr|A0A238WCY4|A0A238WCY4_9BACT Epoxyqueuosine reductase OS=Hymenobacter mucosus OX=1411120 GN=queG PE=3 SV=1
MLPTAHYTAFIKRRAAELGFMYCGISKAEFLEEEAPRLENWLNRQMNGKMAYMANHFDKRLDPRLLVDGAKSVISLLLNYYPPEEAQQPDDTLKISKYAYGRDYHFVIKDKLKTLLQDMQEEIGEVGGRCFVDSAPVMDKAWAKKSGLGWVGKNTNLIRPGTGSFFFIAELIVDLELDYDGPIKDYCGTCTKCVDACPTQAITEPYVVDGSKCISYFTIELKDQIPREVNGQFGNWIFGCDICQDVCPWNRFSKPHQEPQFKAHPGLKDLTPGDWQEITHELFSELFRQSAVKRTGYVGLQRNIRFVLGEEPPPPAEAGGPTEEPRM

SEQ ID NO: 77339 - protein, 311 aa, Hymenobacter nivis
  misc_feature (1)..(311): tr|A0A2Z3GP47|A0A2Z3GP47_9BACT Epoxyqueuosine reductase OS=Hymenobacter nivis OX=1850093 GN=queG PE=3 SV=1
MLLRADWTSFIKRRAVELGFMACGISKAEFLEDEAPRLENWLKHGMNGRMAYMENHFDKRLDPRLLVDGAKSVISLLLNYYPPKEEQQPDDTLKISKYAYGRDYHFVIKDKLKMLLADMQAEIGEIGGRCFVDSAPVLDKAWAKKSGLGWVGKNSNLITPGSGSFYFIAELIVDVDLEYDGAIRDYCGTCTKCLDACPTQAITEPYVVDGSKCISYFTIELKDQIPTEVGGKFGNWVFGCDICQDVCPWNRFAKPHQEPQFQAHPDLKNLTPGDWREITHELFTELFRQSAVKRTGYAGLTRNIKFVLPEA

SEQ ID NO: 77340 - protein, 311 aa, Hymenobacter nivis
  misc_feature (1)..(311): tr|A0A502H1M4|A0A502H1M4_9BACT Epoxyqueuosine reductase OS=Hymenobacter nivis OX=1850093 GN=queG PE=3 SV=1
MLLRAEWTPFIKRRAAELGFMACGISKAEFLEEEAPRLENWLKRSMNGRMGYMENHFDKRLDPRLLVDGARSVISLLLNYYPPKEEQQPDDTLKISKYAYGRDYHFVIKDKLKKLLADMQAEIGEIGGRCFVDSAPVLDKAWAKKSGLGWVGKNSNLITPGSGSFYFIAELIVDVDLDYDGAIRDYCGTCTKCLDACPTQAITEPYVVDGSKCISYFTIELKDQIPTEVAGKFGNWVFGCDICQDVCPWNRFAKPHQEPHFQAHPELKNLSASDWREITHELFTELFRQSAVKRTGYAGLTRNIQFVSPEA

SEQ ID NO: 77341 - protein, 326 aa, Hymenobacter perfusus
  misc_feature (1)..(326): tr|A0A3R9P0H4|A0A3R9P0H4_9BACT Epoxyqueuosine reductase OS=Hymenobacter perfusus OX=1236770 GN=queG PE=3 SV=1
MLPTAHYTAFIKRRAAELGFMYCGISKAGFLEEEAPRLENWLNRNMHGQMAYMANHFDKRLDPRLLVDGAKSVISLLLNYYPPEEEQQPEDTLKVSKYAYGRDYHFVIKDKLKTLLQDMQQEIGEVGGRCFVDSAPVMDKAWAQKSGLGWMGKNTNIIRPGTGSFFFIAELIVDVELDYDGPIKDYCGTCTKCVDACPTQAITEPYVVDGSKCISYFTIELKDQIPREVEGKFGNWVFGCDICQDVCPWNRFSKPHQEPQFTAHPALKDLTRGDWQEITHELFSELFRQSAVKRTGYAGLQRNIRFVLGEEAPALPPAPDSNEPRM

SEQ ID NO: 77342 - protein, 313 aa, Hymenobacter psychrophilus
  misc_feature (1)..(313): tr|A0A1H3MCZ7|A0A1H3MCZ7_9BACT Epoxyqueuosine reductase OS=Hymenobacter psychrophilus OX=651662 GN=queG PE=3 S V=1
MLPTAHYTAFIKRRAAELGFMYCGISEAGFLEEEAPRLENWLNKNMHGQMAYMANHFDKRLDPRLLVDGARSVISLLLNYYPPAETQQPDDTLKVSKYAYGRDYHFVIKDKLKELLHDMQAEIGEVGGRCFVDSAPVMDKAWAKKSGLGWVGKNSNLITPGVGSFYFIAELIVDVPLDYDGPIKDYCGTCTKCVDACPTQAITEPYVVDGSKCISYFTIELKDQIPREVEGKFGNWVFGCDICQDVCPWNRFAKPHQEPQFSPHPALKDLTRGDWQEITHELFSELFRQSAVKRTGYAGLQRNIRFITDEPQT

SEQ ID NO: 77343 - protein, 310 aa, Hymenobacter psychrotolerans
  misc_feature (1)..(310): tr|A0A1M6RV05|A0A1M6RV05_9BACT Epoxyqueuosine reductase OS=Hymenobacter psychrotolerans DSM 18569 OX=1121959 G N=queG PE=3 SV=1
MLPTALYTAFIKQRAAELGFMYCGISRAEFLEEEAPRLENWLSRNMHGQMGYMANHFDKRLDPRLLVDGAKSVISLLLNYYPPQETQQPDDTLKVSKYAYGRDYHFVIKDKLKTLLAAMQEEIGEVGGRVFVDSAPVMDKAWAKRSGAGWMGKNTNLITPGAGSFYFIAELIVDVELDYDGPIKDYCGTCTKCLDACPTGAITEPYVVDGSKCISYFTIELKDQIPREVEGKFGNWVFGCDICQDVCPWNRFVKPHQEPQFNPHPGLKDLKASDWQEITHELFSELFRQSAVKRTGYVGLQRNIRFVTGE

SEQ ID NO: 77344 - protein, 326 aa, Hymenobacter rigui
  misc_feature (1)..(326): tr|A0A428KWX9|A0A428KWX9_9BACT Epoxyqueuosine reductase OS=Hymenobacter rigui OX=334424 GN=queG PE=3 SV=1
MLPTAHYTAFIKRRAAELGFMYCGISKAGFLEEEAPRLENWLNRNMNGQMAYMANHFDKRLDPRLLVDGAKSVISLLLNYYPPEDQQQPDDTLKVSKYAYGRDYHFVIKDKLKTLLQDMQQEIGEVGGRCFVDSAPVMDKAWASKSGLGWVGKNSNLIRPGTGSFFFIAELIVDLELDYDGPIKDYCGTCTKCVDACPTQAITEPYMVDGSKCISYFTIELKDQIPREVNGQFGNWVFGCDICQDVCPWNRFAKPHQEPQFTAHPALKNLTPGDWREITHELFSELFRQSAVKRTGYAGLQRNIRFVLGEETRAAPETGATEEPRM

SEQ ID NO: 77345 - protein, 348 aa, Hymenobacter roseosalivarius
  misc_feature (1)..(348): tr|A0A1W1VTH7|A0A1W1VTH7_9BACT Epoxyqueuosine reductase OS=Hymenobacter roseosalivarius DSM 11622 OX=645990 GN =queG PE=3 SV=1
MVAALSYHLTVSSGILANSVTVDESIQSRNAAFIKCRAAELGFMYCGISKAEFLEEEAYRLENWLNRQMHGQMGYMANHFDKRLDPRLLVEGAKSVISLLLNYFPAEEDQQPADTLHISKYAYGRDYHFVIKDKLKTLLADIQQEIGEVGGRVFVDSAPVMDKVWAKKSGLGWVGKNSNLITPGVGSFYFIAELIVDLDLAPDGPIKDYCGTCRKCMDACPTDAIAEPYVVDGSKCISYFTIELKDQIPSEVGGKLGNWVFGCDICQDVCPWNRFSKPHQEPQFRAHPQLKEMSPTDWQEITHELFTELFRQSAVKRTGYAGLTRTIQFVSEPQISVVYKEKAPREDA

SEQ ID NO: 77346 - protein, 312 aa, Hymenobacter rubripertinctus
  misc_feature (1)..(312): tr|A0A418QH35|A0A418QH35_9BACT Epoxyqueuosine reductase OS=Hymenobacter rubripertinctus OX=2029981 GN=queG PE= 3 SV=1
MLPTAHYTAFIKRRAAELGFMYCGISEAGFLEEEAPRLEKWLNQNMHGQMAYMANHFDKRLDPRLLVDGAKSVISLLLNYYPPAETQQPADTLQISKYAYGRDYHFVIKDKLKELLHDMQQEIGEVGGRCFVDSAPVMDKAWAKKSGLGWVGKNANLITPGVGSFYFIAELIVDVPLDYDGPIKDYCGTCTKCVDACPTQAITEPYVVDGSKCISYFTIELKDQIPREVDGQFGNWVFGCDICQDVCPWNRFAKPHQEPQFNPHPGLKDLSRTDWQEITHELFSELFRQSAVKRTGYAGLQRNIRFVTGEEE

SEQ ID NO: 77347 - protein, 311 aa, Hymenobacter sedentarius
  misc_feature (1)..(311): tr|A0A0U4A994|A0A0U4A994_9BACT Epoxyqueuosine reductase OS=Hymenobacter sedentarius OX=1411621 GN=queG PE=3 SV =1
MLPQSEWAPFIKRRAAELGFMACGISKAEFLEEEAPRLETWLTKRMNGKMGYMENHFDKRLDPRLLVDGAKSVISLLLNYYPAPEDQQPDETLKISKYAYGRDYHFVIKDKLKTLLADMEAEIGAIGGRCFVDSAPVLDKAWAKKSGLGWVGKNSNLITPGTGSFYFIAELIVDVELPADGPIRDYCGTCTKCLDACPTQAITEPYVVDGSKCISYFTIELKDQIPTEVAGQFGNWVFGCDICQDVCPWNRFSKPHQEPQFNPAPGLKDLTPGDWREITHELFTELFRQSAVKRTGYEGLKRNIKFVVDGE

SEQ ID NO: 77348 - protein, 318 aa, Hymenobacter sp.
  misc_feature (1)..(318): tr|A0A519T9D4|A0A519T9D4_9BACT Epoxyqueuosine reductase OS=Hymenobacter sp. OX=1898978 GN=queG PE=3 SV=1
MLLHAEWTPYIKRRAAELGFMACGISKAEFLEEEAPRLENWLKKGMNGKMAWMENHFDKRLDPRLLVDGAKSVISLLLNYYPPVEDQQPDDTLKISKYAYGRDYHFVIKDKLKTLLADMQANIGEVGGRCFVDSAPVMDKAWAKKSGLGWVGKNSNLISPKSGSFYFIAELIVDVELDYDGAIRDYCGTCTKCLDACPTQAITEPYVVDGSKCISYFTIELKDQLIPQDVAGQFGNWVFGCDICQDVCPWNRFSKPTQEAQFQPNAELNKLSVSDWQEITHEVFQALFKQSPLKRTGYEGLKRNIRFVTGQSQLVTGS

SEQ ID NO: 77349 - protein, 319 aa, Hymenobacter sp.
  misc_feature (1)..(319): tr|A0A495VFG5|A0A495VFG5_9BACT Epoxyqueuosine reductase OS=Hymenobacter sp. YR204 OX=2135668 GN=queG PE=3 SV=1
MLPTAHYTAFIKRRAAELGFMYCGISKAEFLEEEAPRLENWLNRQMNGQMGYMANHFDKRLDPRLLVDGAKSVISLLLNYYPAEEDQQPDDTLKVSKYAYGRDYHFVIKDKLKTLLQDMQEQIGEVGGRVFVDSAPVMDKVWAKKSGLGWVGKNSNLITSGVGSFYFIAELIVDVELDYDGPIKDYCGTCTKCVDACPTQAITEPYVVDGSKCISYFTIELKDQIPREVEGKFGNWVFGCDICQDVCPWNRFAKPHQEPQFNPHPGLKDLRATDWQEITHELFSELFRQSAMKRTGYAGLTRNIRFVTGEENNAAETAG

SEQ ID NO: 77350 - protein, 326 aa, Hymenobacter swuensis
  misc_feature (1)..(326): tr|W8F4W0|W8F4W0_9BACT Epoxyqueuosine reductase OS=Hyme nobacter swuensis DY53 OX=1227739 GN=queG PE=3 SV=1
MLPTAHYTAFIKRRAAELGFMYCGISKAGFLEEEAPRLENWLNRNMHGQMAYMANHFDKRLDPRLLVDGAKSVISLLLNYYPPEEQQQPEDTLKVSKYAYGRDYHFVIKDKLKTLLHDMQQEIGEVGGRCFVDSAPVMDKAWAQKSGLGWMGKNTNLIRPGTGSFFFIAELIVDVELDYDGPIKDYCGTCTKCVDACPTQAITEPYVVDGSRCISYFTIELKDQIPREVDGKFGNWVFGCDICQDVCPWNRFSKPHQEPQFTAHPALKDLTRGDWREITHELFSELFRQSAVKRTGYAGLQRNIRFVLGEEAPTGPVLPSSNEPRM

SEQ ID NO: 77351 - protein, 318 aa, Hymenobacter wooponensis
  misc_feature (1)..(318): tr|A0A4Z0MPG1|A0A4Z0MPG1_9BACT Epoxyqueuosine reductase OS=Hymenobacter wooponensis OX=1525360 GN=queG PE=3 SV =1
MLPTAHYTAFIKRRAAELGFMYCGISKADFLEEEAPRLENWLNRQMHGQMAYMANHFDKRLDPRLLVDGAKSVISLLLNYYPPEETQQPDDTLKVSKYAYGRDYHFVIKDKLKTLLQDMQAEIGEVGGRCFVDSAPVLDKAWAKKSGLGWVGKNSNLIRPGVGSFFFIAELIVDVELAYDGPIKDYCGTCTKCMDACPTGAITEPYVVDGSKCISYFTIELKDQIPREVEGKFGNWVFGCDICQDVCPWNRFSKPHQEPQFNAHPGLKDLTAGDWREITHELFSELFKQSAVKRTGYAGLTRNIRFVTGEDTPFIPEQ

SEQ ID NO: 77352 - protein, 380 aa, Hyphomicrobiaceae bacterium; identical to SEQ ID NO: 76731
  misc_feature (1)..(380): tr|A0A424M8M0|A0A424M8M0_9RHIZ Epoxyqueuosine reductase OS=Hyphomicrobiaceae bacterium TMED74 OX=1986774 GN=qu eG PE=3 SV=1

SEQ ID NO: 77353 - protein, 383 aa, Hyphomicrobium denitrificans
  misc_feature (1)..(383): tr|D8JRI5|D8JRI5_HYPDA Epoxyqueuosine reductase OS=Hyph omicrobium denitrificans (strain ATCC 51888 / DSM 1869 / NCIB 11706 / TK 0415) OX=582899 GN=queG PE=3 SV=1
MLDSVTAATDLNVMLRDEARKLGLDAIGIARLDASGELAERLDYFLKHGRHGDMDWMEENADRRGDPNRLWPEAKSAIMIGQSYAPPDNPLDALAERDRGVISVYAKGRDYHDVVKKKIKSLARTFAAKSGADVKVFVDTAPLMEKPLAMRAGLGWQGKHTVLVSREHGDWLFLGAILTTAALAPDAEEVSRCGSCTRCLDICPTKAFPAPYQLDARRCLAYLSIEHKGHIPLEFREPMGNRVFGCDDCLAVCPWNKFASAATEIRFAAQPATDNPPLTDLLALDDAAFRQRFAGTPVKRTGRNRIIRNTLIAAGNSGDRSLLRLITPLFEDESPLVRAMAIWSAKRLMREEEFAPFKSRYEAREADPDVAREWAQPLEGHSA

SEQ ID NO: 77354 - protein, 390 aa, Hyphomicrobium denitrificans
  misc_feature (1)..(390): tr|N0B959|N0B959_9RHIZ Epoxyqueuosine reductase OS=Hyph omicrobium denitrificans 1NES1 OX=670307 GN=queG PE=3 S V=1
MTLAPLTVLDTVTATADLNALLRDEARKLGLDAIGFARLGSSGELAERLDYFLKHGRHGDMDWMEENADRRGDPNRLWPEAKSAIMVGQSYAPPSNPLDALAERDRGIVSVYAKGRDYHDVVKKKIKALARTFAAKSGADVKVFVDTAPLMEKPLAMKAGLGWQGKHTVLVSREHGDWLFLGAILTTADLDPDAEEVDHCGSCSRCLDICPTKAFPAPYQLDARRCLAYLSVEHKGHIPPEFRVPMGNRVFGCDDCLAVCPWNKFAAAATEMRFAAQPATDNPPLAELLALDDAEFRVRFAGTPVKRTGRNRIVRNALIAAGNSGDKSLLRLITPLLEDASPLVRAMAIWSARRLTSDTELAPLKSRYEPGETDPEVAREWAMPVEGHSI

SEQ ID NO: 77355 - protein, 382 aa, Hyphomicrobium facile
  misc_feature (1)..(382): tr|A0A1I7MUA4|A0A1I7MUA4_9RHIZ Epoxyqueuosine reductase OS=Hyphomicrobium facile OX=51670 GN=queG PE=3 SV=1
MSEAQNSGSALGGMIRAEAAKLGLDAVGIARLADDAELTARLAHFLSENRHGDMDWMETHADRRAGPLRLWPDAKSAIIFGQSYAPPANPLDALRDRSNAAISVYAKGRDYHDVLKKKIKSLARSFSERSGAEVKVFVDTAPLMEKPLAAKAGLGWQGKHTILVSREHGNWLFLGAILTTAELEPDAGTEDHCGSCRRCLDVCPTNAFPAPYQLDARRCIAYLTIEHKGHIAPEFRGPIGNRVFGCDDCAAVCPWNKFASAATEIRYAARPETDNPPLAELLALDDAAFRLRFAGTPIKRTGRDRVVRNTLIASGNSGDRSLLPLIEPLMEDNSALVRAMAIWASRRLASDAEIDALRKRYEAREHDAEVAAEWNLPIEELR

SEQ ID NO: 77356 - protein, 395 aa, Hyphomicrobium nitrativorans
  misc_feature (1)..(395): tr|V5SAZ5|V5SAZ5_9RHIZ Epoxyqueuosine reductase OS=Hyph omicrobium nitrativorans NL23 OX=1029756 GN=queG PE=3 S V=1
MRANPTSETQDTRPAATARAGAPRDVKAVLAKRAHALGFEIVRVTRPDAIPLSGERLKTFLAEGRHGSMDWMETTVDRRADPNSLWPDARSVVMLAMSYAPETDPMEALAEPLNGVVSAYAKRRDYHDVMKGKLKELASYLAQQTDKPVKVFVDTAPLMEKPLAEAAGIGWQGKHTNLVSRHGGSWFFLGAILSAAEIAPDEPERNHCGTCSRCLDVCPTKAFPAPFQLDARRCIAYLTIEHKGHIAEEFRAAIGNRVYGCDDCLAVCPWNKYARETREVRLAQLDELDNPLLSELLALDDAAFRERFRGTPVKRTGRDRVVRNGLIAAGNSKDASLLPHVTPLLADPSPLVRAMAVWAFRRLASADEIAATRSRHLARETDGDVRSEWTSGRDA

SEQ ID NO: 77357 - protein, 371 aa, Hyphomicrobium sp.
  misc_feature (1)..(371): tr|A0A3S0TQ14|A0A3S0TQ14_HYPSQ tRNA epoxyqueuosine(34) reductase QueG OS=Hyphomicrobium sp. OX=82 GN=queG PE=4 SV=1
MIRAEASKLGLDAVGIARLADDTELTARLAHFLSEKRHGDMDWMETHADRRSGPLKLWPDAKSAIIFGQSYAPPSNPLDALRDRSNAAISVYAKGRDYHDVLKKKIKSLARSFAERSGADVKVFVDTAPLMEKPLAAKAGLGWQGKHTILVSRDHGNWLFLGAVLTTAELEPDAGTENHCGSCRRCLDICPTNAFPAPYQLDARRCIAYLTIEHKGHIAPEFRVPIGNRVFGCDDCAAVCPWNKFASAATEIRYAARPETDNPPLAELLALDDAAFRSRFAGTPIKRTGRDRVVRNALIASGNSGDRSLLRQIEPLMEDSSALVRAMAIWASRRLANPGEIEALQKQYQDRERDPEVAAEWTLPMEGTRGA

SEQ ID NO: 77358 - protein, 385 aa, Hyphomicrobium sp.
  misc_feature (1)..(385): tr|A0A218PSR4|A0A218PSR4_9RHIZ Epoxyqueuosine reductase OS=Hyphomicrobium sp. GJ21 OX=113574 GN=queG PE=3 SV=1
MTVLDSVTAATDLNVMLRDEARKLGLDAIGIARLDASGELAERLDYFLKHGRHGDMDWMEENADRRGDPNRLWPEAKSAIMIGQSYAPPDNPLDALAEHDRGVISVYAKGRDYHDVVKKKIKSLARAFAAKSGADVKVFVDTAPLMEKPLAMKAGLGWQGKHTVLVSREHGDWLFLGAILTTAALAPDAEEVSRCGSCTRCLDICPTKAFPAPYQLDARRCLAYLSIEHKGHIPLEFREPMGNRVFGCDDCLAVCPWNKFASAATEIRFAAQPATDNPPLADLLVLDDAAFRQRFAGTPVKRTGRNRILRNTLIAAGNSGDRSLLRLITPLFEDESPLVRAMAIWSAKRLMREEEFAPFKSRYEAREADPEVAREWAEPLEGHSA

SEQ ID NO: 77359 - protein, 379 aa, Hyphomicrobium sulfonivorans
  misc_feature (1)..(379): tr|A0A120CX89|A0A120CX89_HYPSL Epoxyqueuosine reductase OS=Hyphomicrobium sulfonivorans OX=121290 GN=queG PE=3 SV=1
MTDSAQKLKDKLFAHARELGFDAVRVTTPDAIAAAPERLAEYLRKGHHGDMGWMEAHADRRANPLQLWPDVQSIIMLGMSYAPDENPMDLLDEPDRGIISVYARGKDYHDILKGKLKQLAGAFAAQAGADVKVFVDTAPVMEKPLAAAAGLGWQGKNTMLVSRQHGSWLFLGSIFTSAPLPPDEPEPDHCGSCRRCVTACPTSAFPAPYQLDARRCLAYLSIEHKGHIPAEFRRPMANRIFGCDDCLAVCPWNKFAQSAREARFAARAETDNPPLDELLLLDDATFRLRFAGTPIKRTGRDRFIRNVLIAAGNSGDRNLIARVEPLLGDASPLVRAMAVWALRELTRDDVGETLRHRHLAREHDSDVRAEWRHMEEHAQ

SEQ ID NO: 77360 - protein, 365 aa, Hyphomonadaceae bacterium
  misc_feature (1)..(365): tr|A0A3D3Z5Z6|A0A3D3Z5Z6_9RHOB tRNA epoxyqueuosine(34) reductase QueG OS=Hyphomonadaceae bacterium OX=2026748 GN=queG PE=4 SV=1
MVKQLARAHGFDACGLADARAAWEADTRLREFVAAGFHGAMGWMEETLDRRSHPTAMWEDAKTAIMLGVNYGPDTDPMAKLAHPDLANISVYAGGDDYHDVIKKQLKAFAGLLHRQSGAQVKVFVDTAPLMEKPLAARAGLGWQGKHTNLVSTDFGSWLFLGCILIAQDFAADVPTRDHCGSCTACLDACPTKAFPAPYQLDARRCISYLTIEHAGPIPLEFRAAMGNRIYGCDDCLAVCPWNKFAQTARETKLHVRDALKQVSLLELAYFDDTHFRALFAKNPVKRIGVDRFLRNVAIGLGNRGAAEAVPAARHLSQHESPLVRGAGIWALKQLMPPEDFSALAETSMAYETDALVRAEWEQPL

SEQ ID NO: 77361 - protein, 371 aa, Hyphomonadaceae bacterium
  misc_feature (1)..(371): tr|A0A1Z9YC96|A0A1Z9YC96_9RHOB Epoxyqueuosine reductase OS=Hyphomonadaceae bacterium TMED5 OX=1986776 GN=queG PE=3 SV=1
MPIWTSEEARAHALSVGFDVCHVTSVEEGWAASDRLRSFVEAGFHGDMQWMEDTLERRVHPQAMWSGAKSAIVVGVNYGPDHNPLGILEQTDRAAISVYAKGKDYHDLLKKRLKQLARDFVAATGCEVKVFVDTAPLMEKPLAAKSGLGWQGKHTNLVSREFGSWLFLGVMLTEAELSPDEPGEDKCGSCRACLDICPTNAFPGPYQLDARKCISYLTIEHDGPIPLDLREPMGNRIYGCDDCLAVCPWNKFAQLSSEAKFAAGVMTDAPALSELLALDDEAFREAYRGSPIKRIKRRRFLRNVLIATGNSGDTSLIPTVKNLLSDEEPLVRGMAVWALSRLDLAGARAAKAEHLASEADAQVQSEWHLIN

SEQ ID NO: 77362 - protein, 377 aa, Hyphomonas adhaerens
  misc_feature (1)..(377): tr|A0A3B9H315|A0A3B9H315_9RHOB Epoxyqueuosine reductase OS=Hyphomonas adhaerens OX=81029 GN=queG PE=3 SV=1
MPTLISDPADRATFARQHALSLGFDAVGIARADEAWAASDRLEAFVAAGHHGTMEWMETTLERRRTPVSMWAGAKSAVTVALNYGPDHDPMETLQQREAGNISVYARGKDYHDTLKSRLKQLAREFVAKTGAEVKVFVDTAPLMEKPLAAKAGLGWQGKHTNLVSRELGSWFFLGVMLTDAELPPDTPETDHCGSCRNCLDICPTKAFPAPYQLDARRCISYLTIEHKGPIPEEFRTAMGNRIYGCDDCLAVCPWNKFASAAREAAFHARAELKLPGLDELAALDDAAFREVFSGSPIKRIGRDRFVRNVCIAIGNSDAPRFVPLLEGLTRDTSALVRGAAAWALLQLDAERFSLARSQNASGESDPDVLREWNRGA

SEQ ID NO: 77363 - protein, 374 aa, Hyphomonas adhaerens
  misc_feature (1)..(374): tr|A0A069E5M8|A0A069E5M8_9RHOB Epoxyqueuosine reductase OS=Hyphomonas adhaerens MHS-3 OX=1280949 GN=queG PE=3 SV=1
MISDPADRATFARQHALSLGFDAVGIARADEAWAASERLEAFVAAGHHGTMEWMETTLERRRTPVSMWVGAKSAVTVALNYGPDHDPMETLKQREAGNISVYARGKDYHDTLKSRLKQFAREFVAKTGAEVKVFVDTAPLMEKPLAAKAGLGWQGKHTNLVSRELGSWFFLGVMLTDAELPPDTPETDHCGSCRNCLDICPTRAFPAPYQLDARRCISYLTIEHKGPIPEEFRTAMGNRIYGCDDCLAVCPWNKFASAAREAAFHARAELKLPGLDELAALDDAAFREVFSGSPIKRIGRDRFVRNVCIAIGNSDAPRFVPLLEGLTRDTSALVRGAAAWALLQLDAERFSLARSQNASGETDPDVLREWNRGA

SEQ ID NO: 77364 - protein, 370 aa, Hyphomonas atlantica
  misc_feature (1)..(370): tr|A0A059EBS5|A0A059EBS5_9RHOB Epoxyqueuosine reductase OS=Hyphomonas atlantica OX=1280948 GN=queG PE=3 SV=1
MPDPLHIRVKHLARSLGFDGVAIARADEPWQAGERLEAFVDAGHHGSMEWMETTLARRKAPTAMWPDAKSAVVVALNYGPDHDPLDTLQNTTLGNISVYARGRDYHDTLKKRLKQLARDFVAETGAEVKVFVDTAPLMEKPLAHKAGLGWQGKHTNLVSRELGSWFFLGVMLTAAELEPDTPEPDHCGSCRLCQEICPTNAFPAPYKLDARRCISYLTIEHAGPIPEEFRAAMGNRIYGCDDCLAICPWNKFAETAKESAFHARAELKAPGLDELAALDDAGFREVFSGSPIKRIGRDRFVRNVCIAIGNSGDPGLIASLLPLLDDPAPVVRGMAVWALARLDGARFAKEKAARMEPETDPSVLAEWMTG

SEQ ID NO: 77365 - protein, 128 aa, Hyphomonas atlantica
  misc_feature (1)..(128): tr|A0A356W392|A0A356W392_9RHOB Epoxyqueuosine reductase (Fragment) OS=Hyphomonas atlantica OX=1280948 GN=DD728 _04255 PE=4 SV=1
CLAICPWNKFAETAKESAFHARAELKAPGLDELAALDDAGFREVFSGSPIKRIGRDRFVRNVCIAIGNSGDPGLIANLLPLLDDPAPVVRGMAVWALARLDGARFAKEKAARMEPETDPGVLAEWMTG

SEQ ID NO: 77366 - protein, 370 aa, Hyphomonas beringensis
  misc_feature (1)..(370): tr|A0A062U7T0|A0A062U7T0_9RHOB Epoxyqueuosine reductase OS=Hyphomonas beringensis OX=1280946 GN=queG PE=3 SV=1
MPDPLHILVKDLARSLGFDAVAITRADEPWQAGERLEAFVDAGHHGSMEWMETTLERRKAPTAMWADAKSAVVVALNYGPDHDPLLTLQHKTVGNISVYARGKDYHDTLKKRLKQLAREFVDESGAEVKVFVDTAPLMEKPLAHKAGLGWQGKHTNLVSRELGSWFFLGVMLTAAELEPDTPETDHCGSCRACQDICPTNAFPAPYTLDARRCISYLTIEHAGPIPQEFRAAMGNRIYGCDDCLAICPWNKFAGAANEAAFHARAELKVPGLDELAALDDQGFRDVFSGSPIKRIGRDRFVRNVCIAIGNSGEAQLISSLLPLLQDDVPVVRGAAVWALGRLDAARFAEQKAALMDRETDPDVLAEWMMD

SEQ ID NO: 77367 - protein, 379 aa, Hyphomonas chukchiensis
  misc_feature (1)..(379): tr|A0A062UKR1|A0A062UKR1_9RHOB Epoxyqueuosine reductase OS=Hyphomonas chukchiensis OX=1280947 GN=queG PE=3 SV= 1
MPISTSDPLARSPEAFLKDTARSIGFDSVRITRADEPWAAGERLEAFVADGRHGQMEWMETTLERRKAPTAMWAGAKSAVVVALNYGPGIDPMELLAERSVGNISVYARGRDYHDLVKSRLKQLARAFVAETGAEVKVFVDTAPLMEKPLAAKAGMGWQGKHTNLVSRELGSWFFLGVMLTAAELRPDATETDHCGSCRACLDVCPTQAFPAPYQLDARRCISYLTIEHAGPIPREFRAAMGNRIYGCDDCLAVCPWNKFAEAASEAALHARAELKTPGLDELAALDDATFREVFSGSPIKRSGRTRFVRNVCVAIGNSGDARLVPSLLSLLDDEAADIRGAAIWALARLDPDRFEAEKAARMVEETDPCVMAEWEGAA

SEQ ID NO: 77368 - protein, 375 aa, Hyphomonas hirschiana
  misc_feature (1)..(375): tr|A0A059FGY8|A0A059FGY8_9RHOB Epoxyqueuosine reductase OS=Hyphomonas hirschiana VP5 OX=1280951 GN=queG PE=3 S V=1
MQSSISDPAARLKERALALGFDAAGIARADEAWPAAERLKAFVELGRHGDMAWMETTLARRAAPTAMWPEARSALVVAMNYGPDHNPLDTLAQRQTGNISVYARGRDYHDLIKSRLKQLAGEVAQITGADVKVFVDTAPLMEKPLAQKAGLGWQGRHTNLVSRDLGSWFFLGTVLTSAALTPDAPEPDHCGSCRACLDICPTNAFPAPYQLDARRCISYLTIESAGPIPAEFRPAMGNRIYGCDDCLAACPWNKFASSASEAALFARAELKGPGLDELAALDDAAFRDVFSGSPVKRSGRDRFVRNVAIAIGNSGEPRLAASLLPLLQDPAPIVRGAAIWALARLDPARFAEEKARLRPSEHDMSVQAEWDERPA

SEQ ID NO: 77369 - protein, 374 aa, Hyphomonas jannaschiana
  misc_feature (1)..(374): tr|A0A059F669|A0A059F669_9RHOB Epoxyqueuosine reductase OS=Hyphomonas jannaschiana VP2 OX=1280952 GN=queG PE=3 SV=1
MISDPADRAEFARQHALTLGFDAVGIARAYEAWAASERLEAFVEAGRHGTMDWMETTLERRRTPTSMWAGAKSAITVALNYGPDHDPMDTLQQREAGNISVYARGRDYHDTLKSRLKQLAREFVAKTGAEVKVFVDTAPLMEKPLAAKAGLGWQGKHTNLVSRDLGSWFFLGVMLTDAELVPDTPEADHCGSCRNCLDICPTKAFPAPYQLDARRCISYLTIEHKGPIPEEFRASMGNRIYGCDDCLAVCPWNKFASAASEAAFHARAELKLPGLDELAALDDAAFREVFSGSPIKRIGRDRFVRNVCIAIGNSGAARFVPQLEGLVTDASALVRGAAAWALLQLDAERFSFARSQNVAGETDPDVLREWNRSA

SEQ ID NO: 77370 - protein, 379 aa, Hyphomonas johnsonii
  misc_feature (1)..(379): tr|A0A059FPT3|A0A059FPT3_9RHOB Epoxyqueuosine reductase OS=Hyphomonas johnsonii MHS-2 OX=1280950 GN=queG PE=3 SV=1
MPISTSDPVAGSPEAFLKTTARAIGFDGVRIARADAPWHAGERLEAFVADGRHGQMAWMETTLERRKAPTAMWAGAKSAVVVALNYGPGLDPMEMLAETRLGNISVYARGKDYHDLLKSRLKQLARAFVAETGAEVKVFVDTAPLMEKPLAAKAGMGWQGKHTNLVSRDLGSWFFLGVMLTDAELTPDAAEADHCGSCQACLDVCPTKAFPAPYQLDARRCISYLTIELAGPIPHEFRAAMGNRIYGCDDCLAVCPWNKFAAAASEAALHARAELKAPELDELAALDDATFREVFSGSPVKRSGRNRFVRNVCIAIGNSADPTLVASLLPLLGDAAPEVRGAAIWALARLDPARFAAEKSARRDREADPGVVAEWDQTA

SEQ ID NO: 77371 - protein, 375 aa, Hyphomonas neptunium; identical to SEQ ID NO: 77368
  misc_feature (1)..(375): tr|Q0BXL4|Q0BXL4_HYPNA Epoxyqueuosine reductase OS=Hyph omonas neptunium (strain ATCC 15444) OX=228405 GN=queG PE=3 SV=1

SEQ ID NO: 77372 - protein, 379 aa, Hyphomonas oceanitis
  misc_feature (1)..(379): tr|A0A059G7G7|A0A059G7G7_9RHOB Epoxyqueuosine reductase OS=Hyphomonas oceanitis SCH89 OX=1280953 GN=queG PE=3 SV=1
MPISTSDPLASSPEAFLKDTARSIGFDSVRITRADEPWAAGERLEVFVADGRHGQMEWMETTLERRKAPTAMWAGAKSAVVVALNYGPGIDPMELLAERSVGNISVYARGRDYHDLVKSRLKQLARAFVAETGSEVKVFVDTAPLMEKPLAAKAGMGWQGKHTNLVSRELGSWFFLGVMLTAAELQPDATETDHCGSCRACLDACPTKAFPAPYQLDARRCISYLTIEHAGPIPREFRAAMGNRIYGCDDCLAVCPWNKFAEAASEAALHARAELKTPGLDELAALDDATFREVFSGSPIKRSGRTRFVRNVCVAIGNSGDVRLVPSLLSLLGDEAADIRGAAIWALARLDPDRFEAEKAARMAEETDPGVLAEWEGAA

SEQ ID NO: 77373 - protein, 375 aa, Hyphomonas polymorpha
  misc_feature (1)..(375): tr|A0A062VMW2|A0A062VMW2_9RHOB Epoxyqueuosine reductase OS=Hyphomonas polymorpha PS728 OX=1280954 GN=queG PE=3 SV=1
MQSSISDPEARLKERALALGFDAAGIARADEAWPAGERLKTFVELGRHGDMAWMETTLERRSAPTAMWPEARSALVVALNYGPDHNPLDTLSETATGNISVYARGRDYHDVIKSRLKQLAGEVAEVTGADVKVFVDTAPLMEKPLAQRAGLGWQGRHTNLVSRQLGSWFFLGTVLTSADLTPDAPEADHCGSCRACLDICPTAAFPAPYQLDARRCISYLTIEYGGPIPAAFRPAMGNRIYGCDDCLAACPWNKFASSASEAALYARAELKGPGLDELAALDDAAFREVFSGSPVKRSGRDRFVRNVAVAIGNSGEPRLTASLLALLQDDAPIVRGAAIWALARLDPARFAEEKARRRPSEHDRTVIAEWDETPA

SEQ ID NO: 77374 - protein, 366 aa, Hyphomonas sp.
  misc_feature (1)..(366): tr|A0A2D8W2X1|A0A2D8W2X1_9RHOB Epoxyqueuosine reductase OS=Hyphomonas sp. OX=87 GN=queG PE=3 SV=1
MHIRVKDLARSLGFDAVAITRADEPWQAGERLEAFVGAGHHGSMEWMETTLERRKAPTAMWPDAKSAVVVALNYGPDHDPLDTLQHKTLGNISVYARGRDYHDTLKKRLKQLAREFVAESGAEVKVFVDTAPLMEKPLAHKAGLGWQGKHTNLVSRELGSWFFLGVMLTAAKLEPDTPETDHCGSCRACQDICPTNAFPAPYTLDARRCISYLTIEHSGPIPQEFRAAMGNRIYGCDDCLAICPWNKFAEAASEAAFHARAELKVPGLDELAALEDTDFREVFSGSPIKRIGRDRFVRNVCIAIGNSGEGRLISSLLPLLQDEAPVVRGAAVWALARLDAARFAEEKAAWMDRETDPGVLAEWMMD

SEQ ID NO: 77375 - protein, 376 aa, Hyphomonas sp.
  misc_feature (1)..(376): tr|A0A1Z9Y0E9|A0A1Z9Y0E9_9RHOB Epoxyqueuosine reductase OS=Hyphomonas sp. TMED17 OX=1986605 GN=queG PE=3 SV=1
MADDLAAWLDTEARRLGFDVVGLARADETWAASERLEAFVEAGYHGSMTWIQETLERRKMPTSMWPEAKSAIVVGMNYGPDIDPLAVLDRPDLAGVSVYAKGSDYHDVLKKRLKHLARGFVEQSGQQVKVFVDTAPLMEKPLAAKAGLGWQGKHTNLVSRAFGSWLFLGVMLTDAVLPADAEEIDHCGSCRACLDICPTDAFPGPYRLDARRCIAYLTIEHHGPIPHEFRHQIGNRIYGCDDCLAVCPWNKFAVQSREQALWARLELQYLKLADLLELDDAAFRTLFSGSPIKRIGRNRFVRNVLIGIGNSGDRQFLNETFFACLTDPDATVRATAIWALRCLDENRFGLEKRKHMPHETDPVVIAEWRSAAGPEK

SEQ ID NO: 77376 - protein, 308 aa, Hyunsoonleella jejuensis
  misc_feature (1)..(308): tr|A0A1H9ADC6|A0A1H9ADC6_9FLAO Epoxyqueuosine reductase OS=Hyunsoonleella jejuensis OX=419940 GN=queG PE=3 SV= 1
MMIETKIKYTKLIKTEAKRLGFLSCGISKAEFLEEEAPRLEQWLNQNMHGGMRYMENHFDKRLDPTKLVEDSKSVVSLLLNYFPSEVQNSESYKISKYAYGTDYHFVIKDKLKSLLHFIQEEIGEVNGRAFVDSAPVLDKAWAAKSGLGWIGKHSNLLTQQVGSFYFIAELIIDLELEYDTPVTDHCGTCTACIDACPTEAITEPYVVDGSKCISYFTIELKENIPSEFKGEFDDWMFGCDVCQDVCPWNRFSKAHNEPLFNPHPELLSMSKKDWQEITEETFRKVFKKSAVKRTKYSGLKRNIEFLQ

SEQ ID NO: 77377 - protein, 313 aa, Hyunsoonleella pacifica
  misc_feature (1)..(313): tr|A0A4V2JB41|A0A4V2JB41_9FLAO Epoxyqueuosine reductase OS=Hyunsoonleella pacifica OX=1080224 GN=queG PE=3 SV= 1
MSSLSPRERARERASIIKTEAKRLGFLSCGISKAEFLEEEAPRLERWLNQNMHGEMRYMENHFDKRLDPTKLVEDSKSVVSLLLNYFPSETQNTESYKLSKYAYGTDYHFVIKDKLKSLLHFIQDEIGEVNGRAFVDSAPVLDKAWAAKSGLGWIGKHSNLLTQQIGSFYFIAELIIDLELEYDTPVTDHCGTCTACIDACPTEAIVEPYVVDGSKCISYFTIELKDNIPTEFKGKFDDWMFGCDVCQDVCPWNRFSKSHSEPLFNPHPELLSMSKKDWEDITEETFRKVFKKSAVKRTKFSGLNRNINFLKD

SEQ ID NO: 77378 - protein, 307 aa, Hyunsoonleella sp.
  misc_feature (1)..(307): tr|A0A4Q9FCX7|A0A4Q9FCX7_9FLAO Epoxyqueuosine reductase OS=Hyunsoonleella sp. T58 OX=2527939 GN=queG PE=3 SV=1
MIEAKSKYTKLIKTEAKRLGFLSCGISKAEFLEEEAPRLEKWLNQNKHGDMRYMENHFDKRLDPTKLVEDSKSVVSLLLNYFPSEVQNSESYKISKYAYGTDYHFVIKDKLKSLLHFIKEEIGEVSGRAFVDSAPVLDKAWAAKSGLGWIGKHSNLLTQQVGSFYFIAELIIDLELEYDTPVTDHCGTCTACIDACPTEAITEPYVVDGSKCISYFTIELKENIPSEFKGKFDDWIFGCDVCQDVCPWNRFSKAHSEPLFNPHPELLSMSKKDWEEITEETFRKVFKKSAVKRTKYSGLKRNIEFLQ

SEQ ID NO: 77379 - protein, 308 aa, Ichthyenterobacterium magnum
  misc_feature (1)..(308): tr|A0A420DY08|A0A420DY08_9FLAO Epoxyqueuosine reductase OS=Ichthyenterobacterium magnum OX=1230530 GN=queG PE= 3 SV=1
MINSKSKHTRLIKQEAKRLGFLSCGISKAEFLEIEAPRLENWLNKNMHGEMRYMENHFDKRLDPTKLVEGSKSVVSLLLNYFPNQKQTANSYKLSKYAYGTDYHFIIKDKLKSLLHVIQDEIGEVGGRAFVDSAPVLDKAWAAKSGLGWIGKHSNLLTQQAGSFYFIAELIIDLELDYDTITTDHCGTCTACIDACPTEAITEPYVVDGSKCISYFTIELKENIPTEFKGQFNDWMFGCDVCQDVCPWNRFSKAHNEPLFNPHPELLEMTKKDWDEITEDTFRKVFKKSAVKRTKFSGLTRNIKFLKD

SEQ ID NO: 77380 - protein, 393 aa, Ideonella sakaiensis
  misc_feature (1)..(393): tr|A0A0K8P6L1|A0A0K8P6L1_IDESA Epoxyqueuosine reductase OS=Ideonella sakaiensis (strain NBRC 110686 / TISTR 22 88 / 201-F6) OX=1547922 GN=queG PE=3 SV=1
MNDRQVDAAWVMQCLRREAAALGFSQIGVAPVDLTEAEPGLLAWLAAGCHGDMDYMARHGLRRARPAELVPGTLSVITARMDYLPRAVSGAGASGDGPGVRDPGDPADQADQADQADRAADWRAVEWARLARPEAATVSLYARGRDYHKVLRRRLQRLAERLQAEVGPFGHRVFTDSAPLLEVELAVRSGLGWRGRHTLVLDRQGSMGFLGEICIDLALPPTPPVQAHCGQCRACLDVCPTGAIVAPYRLDARRCLSYLTIEHEGAIPVEWRPALGNRIYGCDDCQLACPWNKFAQRSPLPDFDPREDLADPTLLALWAWDEAAFLHRTEGSAIRRIGYRRWRRNLAVALGNLLRAPAVPAALRAAVQAALAAARDAADPLLREHLDWALAAG

SEQ ID NO: 77381 - protein, 347 aa, Ideonella sp.
  misc_feature (1)..(347): tr|A0A437RFS5|A0A437RFS5_9BURK Epoxyqueuosine reductase OS=Ideonella sp. KYPY4 OX=1862385 GN=queG PE=3 SV=1
MRGWGRELGFSQIAIADIDLTTAEAGLLAWLEAGFHGGMGYMAAHGLKRARPAELVPGTVRVITARMDYLPRDTPPDWQQAEQQALSDPQRAVVSVYARGRDYHKVLRQRLQRLAERLAHDVGPLGHRVFTDSAPVLEVELATRAGLGWRGKHTLALHREAGSMFFLGEIYIDLPLPIDAPVSAHCGSCEACLTACPTQAIVAPYRLDARRCISYLTIEHEGAIAPELRPLIGNRIYGCDDCQLACPWNKYAQRATLPDFDTRAPLGNATLLQLWAWDEAEFLRRTEGSAVRRIGLARWRRNLAVALGNAWRETGDPALALALQAALPAASDLLAEHIRWALSQRRA

SEQ ID NO: 77382 - protein, 371 aa, Idiomarina aestuarii
  misc_feature (1)..(371): tr|A0A2T4CNR0|A0A2T4CNR0_9GAMM Epoxyqueuosine reductase OS=Idiomarina aestuarii OX=624146 GN=queG PE=3 SV=1
MDFHQLAADIKQWGAELGFQKVGITDLDLAAEQEALQRWLDAGMHGEMDYMERHRELRANPDQLHPGAVRAISVRMNYLPAEAGFARTLKNPRLGYISRYALGRDYHKVMRKRLKQLGERIQAACADLDFRPFVDSAPIMERPLAVKAGLGWTGKHTLVLDENGGSWFFLGELLVNLPLPVDQPVEEKCGTCKACMTICPTQAIVEPYVLDARRCISYLTIELKNSIPEEFRPLIGNRIYGCDDCQLICPWNRYAHLTDENDFSPRANLLAPELLELWQWDEATFLKQTEGSPIRRIGFERWSRNLAVALGNAPADDDIIQALEARRSEASEMVQEHIDWALERQRKAEHKTEKQVLRLVRAVERGLPRDA

SEQ ID NO: 77383 - protein, 379 aa, Idiomarina aquatica
  misc_feature (1)..(379): tr|A0A4R6NYI1|A0A4R6NYI1_9GAMM Epoxyqueuosine reductase OS=Idiomarina aquatica OX=1327752 GN=queG PE=3 SV=1
MPDTPLSEPQLQQLASDIKRWGHELGFQKVGIADLDLSRHEASLQEWLDKGYHGEMGFMERHGMLRARPAELHPGSVRAISVRMNYLPVEAGFAKTLNDSNKAFISRYALGRDYHKLLRKRLKQLGDKIKAQFDDTDFRPFVDSAPIMERPLAEKAGLGWTGKHTLILDRDSGSWFFLGELLINLPLPVDQPVEEGCGSCTACMTICPTQAIVGPYELDARRCISYLTIELRGSIPEELRPLMGNRIYGCDDCQLICPWNRYAQLTDEADFNPRQYLHSPQLLALWQWDEETFKTRLEGSPIRRIGFECWLRNLAVALGNADADADIIAALEWRSGEVSDMVQEHIDWALERHRSGAAKVTQQLKRLVRVVEKGLPRDA

SEQ ID NO: 77384 - protein, 371 aa, Idiomarina aquimaris
  misc_feature (1)..(371): tr|A0A432XNP0|A0A432XNP0_9GAMM Epoxyqueuosine reductase OS=Idiomarina aquimaris OX=641841 GN=queG PE=3 SV=1
MDFQQLALDIKKWGQELGFQKVGITDLDLSSERAALQQWLDAGMHGEMDYMERHAELRTRPDQLHEGSVRAISVRMNYLPAEAGFAKTLKNPRLGYISRYALGRDYHKLMRKRLKQLGERIKAACADLDYRPFVDSAPILERPLAVKAGLGWTGKHTLVLDEQGGSWFFLGELLVNLPLPVDEPVEEKCGSCKACITICPTQAIVEPYKLDARRCISYLTIELKSAIPEEYRPLMGNRIYGCDDCQLICPWNRYSQLTAEDDFAPRKDLHAPELLELWSWDEETFLKRTEGSPIRRIGFASWQRNLAVALGNAPHDPTIIEALQMQRGNVNDMVDEHIDWALQRQHNKAATTTKQLLRLTRAIEKGLPRDA

SEQ ID NO: 77385 - protein, 371 aa, Idiomarina atlantica
  misc_feature (1)..(371): tr|A0A094L096|A0A094L096_9GAMM Epoxyqueuosine reductase OS=Idiomarina atlantica OX=1517416 GN=queG PE=3 SV=1
MDFQQLAADIKRWGNELGFQKVGITDLDLSTERAALQRWLDAGMHGEMEYMARHAELRSRPEQLHEGSVRAISVRMNYLPAEAGFARTLKNPRLGYISRYALGRDYHKLMRKRLKQLGERIKAACAELDYRPFVDSAPIMERPLAVKAGLGWTGKHTLVLDEQGGSWFFLGELLVNLPLPVDQPVAEKCGSCTACITICPTQAIVEPYRVDARRCISYLTIELKSAIPEQFRPLMGNRIYGCDDCQLICPWNRYAQLTDEADFAPRKDLHAPELLELWQWDEATFLQKTEGSPIRRIGFACWQRNLAVALGNAPYDPAIISALKAQRGKVNAMVDEHIDWALQRQHDRAAGVTKQVLRLTRAVEKGLPRDA

SEQ ID NO: 77386 - protein, 378 aa, Idiomarina baltica
  misc_feature (1)..(378): tr|A0A348WQ47|A0A348WQ47_9GAMM Epoxyqueuosine reductase OS=Idiomarina baltica OX=190892 GN=queG PE=3 SV=1
MYSSLSYTELEQLAQKIKQWGRELGFQKVGIADLDLQKHEATLQNWLDKGYHGEMGFMERHGMLRARPAELHPGSVRAISVRMNYLPAEAGFAKTLNNDRLGYISRYALGRDYHKLLRKRLKQLGDKIKAEFADTDFRPFVDSAPIMERPLAEKAGLGWTGKHTLILDKDSGSWFFLGELLINLPLPTDSPVEEACGSCSACMTICPTQAIVAPYELDARRCISYLTIELKGSIPEDLRPLMGNRIYGCDDCQLICPWNRYAQLTDEADFNPRHYLHTPELLALWQWDEETFDQRLQGSPIRRIGHECWLRNIAVALGNAQANADVIEALEWRSGQVSEMVQEHIDWALDRQRSGAAQVTQQLKRLVRAVSKGLPRDA

SEQ ID NO: 77387 - protein, 371 aa, Idiomarina donghaiensis
  misc_feature (1)..(371): tr|A0A432XK18|A0A432XK18_9GAMM Epoxyqueuosine reductase OS=Idiomarina donghaiensis OX=519452 GN=queG PE=3 SV=1
MDYHQLAADIKRWGAELGFQKVGITDIDLSAERDYLQKWLASGMHGTMEWMARHADLRTRPDQLHPGTVRAISVRMNYLPAEAGFAKTLKNPRLGYISRYALGRDYHKLMRKRLKQLGDRIQEACSDLDFRPFVDSAPIMEKPLAIKAGLGWRGKHTLVLDEGSGSWFFLGELLINLPLPTDQPVEEKCGSCSACITICPTQAIVEPYVLDARKCISYLTIELRDSIPEPLRPLIGNRIYGCDDCQLICPWNRYAQLTDENDFSPRANLHAPELLELWAWDEETFLKQTEGSPIRRIGYDCWLRNLAVAMGNAPTDTDIIHALEQRREHCTAMVQEHIDWALQRQRSEAVKVEKQVVRLVRAIEKGLPRDA

SEQ ID NO: 77388 - protein, 378 aa, Idiomarina fontislapidosi
  misc_feature (1)..(378): tr|A0A432XU02|A0A432XU02_9GAMM Epoxyqueuosine reductase OS=Idiomarina fontislapidosi OX=263723 GN=queG PE=3 SV =1
MHSKLSQSELEQLAQKIKQWGQELGFQKVGITDLDLQKHEATLQKWLDKGYHGEMGFMERHGMLRARPAELHPGSVRAISVRMNYLPAEAGFAKTLNNDRLGYISRYALGRDYHKLLRKRLKQLGDRIKAEFDDADFRPFVDSAPILERPLAEKAGLGWTGKHTLILDKDSGSWFFLGELLINLPLPTDKPVQEACGSCSACMTICPTQAIVAPYELDARRCISYLTIELKGSIPEDLRPLMGNRIYGCDDCQLICPWNRYAQLTDEADFNPRHYLHTPELLSLWQWDEDTFNERLQGSPIRRIGHECWLRNIAVALGNAQADATVIEALEWRSGEVSAMVQEHIDWALERQRSGAAQVTQQLKRLVRAVSKGLPRDA

SEQ ID NO: 77389 - protein, 371 aa, Idiomarina halophila
  misc_feature (1)..(371): tr|A0A432XW44|A0A432XW44_9GAMM Epoxyqueuosine reductase OS=Idiomarina halophila OX=1449799 GN=queG PE=3 SV=1
MDFHQLAEDIKRWGQELGFQKVGITDLDLSAERDALAQWLADGMHGEMDYMERHAELRTRPEQLHQGSVRAISVRMNYLPAEAGFAKTLKNPRLGYISRYALGRDYHKLMRKRLKQLGEKIKTACADLDYRPFVDSAPILERPLAVKAGLGWTGKHTLVLDEQGGSWFFLGELLVNLPLPVDQPVTEKCGSCKACITICPTQAIVEPYKLDARRCISYLTIELKSAIPEEFRPLIGNRIYGCDDCQLICPWNRYSQLTSEDDFAPRKDLHAPELLELWGWDETTFLKTTEGSPIRRIGFAAWQRNLAVALGNAPHDPAIIDALEAQRGAVNEMVDEHIDWALTRQRNKDATTSKQVLRLTRAVEKGLPRDA

SEQ ID NO: 77390 - protein, 371 aa, Idiomarina homiensis
  misc_feature (1)..(371): tr|A0A432Y6A2|A0A432Y6A2_9GAMM Epoxyqueuosine reductase OS=Idiomarina homiensis OX=364198 GN=queG PE=3 SV=1
MDFQQLALDIKKWGQELGFQKVGITDLDLSSERAALQQWLAEGMHGEMDYMERHAELRTRPDQLHEGSVRAISVRMNYLPAEAGFAKTLKNPRLGYISRYALGRDYHKLMRKRLKQLGERIKEACAELDYRPFVDSAPILERPLAVKAGLGWTGKHTLVLDEQGGSWFFLGELLVNLPLPVDQPVEEKCGSCKACITICPTQAIVEPYKLDARRCISYLTIELKSAIPEELRPLMGNRIYGCDDCQLICPWNRYSQLTAEDDFAPRKDLHTPELLELWAWDEATFLKRTEGSPIRRIGFASWQRNLAVALGNAPHDETIISALKAQRGQVNAMVDEHIDWALQRQHNKAADTSKQVLRLTRAIEKGLPRDA

SEQ ID NO: 77391 - protein, 371 aa, Idiomarina insulisalsae
  misc_feature (1)..(371): tr|A0A432YPH4|A0A432YPH4_9GAMM Epoxyqueuosine reductase OS=Idiomarina insulisalsae OX=575789 GN=queG PE=3 SV=1
MDLQQLAADIKRWGHELGFQKVGITDLDLSSERAALQQWLAEGMHGEMAYMERHADLRTRPDELHPGSVRAISVRMNYLPAEAGFAKTLKNPRLGYISRYALGRDYHKLMRKRLKQLGERIKQACAELDFRPFVDSAPILERPLAVKAGLGWTGKHTLVLDEQGGSWFFLGELLINLPLPVDAPVEEKCGSCKACITICPTQAIVEPYKLDARRCISYLTIELKSAIPEELRPLMGNRIYGCDDCQLICPWNRYSQLTAEDDFAPRKDLHAPELLTLWEWDEATFLKRTEGSPIRRIGFACWQRNLAVALGNAPHDPAIIAALEARRGSVNDMVDEHIDWALTRQHNKSASTSKQVLRLTRAVEKGLPRDA

SEQ ID NO: 77392 - protein, 371 aa, Idiomarina marina
  misc_feature (1)..(371): tr|A0A432YFZ0|A0A432YFZ0_9GAMM Epoxyqueuosine reductase OS=Idiomarina marina OX=502366 GN=queG PE=3 SV=1
MDYHQLAEDIKRWGAELGFQKVGITDVDLSTEREHLRRWLEQGMHGDMEWMARHEALRTRPDQLHEGAVRAISVRMNYLPAEAGFAKTLKNPRLGYISRYALGRDYHKLMRKRLKQLGEKIQEACAELDFRPFVDSAPIMEKPLAIKAGLGWRGKHTLVLDEGSGSWFFLGELLVNLPLPTDSEVEEKCGTCSACITICPTQAIVEPYVLDARRCISYLTIELRDSIPEEYRPLMGNRIYGCDDCQLICPWNRYAQLTDEGDFSPRQELHAPELLELWQWDEETFLKRTEGSPIRRIGYDCWLRNLAVAMGNAPTDTDIIKALEKRRPDVSEMVAEHIDWALERQRSGAVKVEKQVVRLVRAVEKGLPRDA

SEQ ID NO: 77393 - protein, 371 aa, Idiomarina maritima
  misc_feature (1)..(371): tr|A0A317Q2U4|A0A317Q2U4_9GAMM Epoxyqueuosine reductase OS=Idiomarina maritima OX=519453 GN=queG PE=3 SV=1
MDYHQLAADIKQWGRDLGFQKVGITDVDLSTEQQHLERWLAAGMHGDMEWMARHAELRTRPDQLHPGAVRAISVRMNYLPAEAGFAKTLKNPRLGYISRYALGRDYHKLMRKRLKQLGDKIQAACAELDFRPFVDSAPIMEKPLAIKAGLGWRGKHTLVLDEAHGSWFFLGELLVNLPLPMDSPVAEKCGSCSACMTICPTQAIVEPYVLDARRCISYLTIELKQSIPEEFRPLIGNRIYGCDDCQLICPWNRYAHLTDEADFSPRQHLHAPELLQLWAWDEDTFLRQTEGSPIRRIGHECWQRNIAVALGNAPADAAIIDALQQRRDSASAMVQEHIDWALARQQAGLGKVEKQVLRLVRAVEKGMPRDA

SEQ ID NO: 77394 - protein, 371 aa, Idiomarina maritima
  misc_feature (1)..(371): tr|A0A1I6HG45|A0A1I6HG45_9GAMM Epoxyqueuosine reductase OS=Idiomarina maritima OX=519453 GN=queG PE=3 SV=1
MDYHQLAEDIKRWGAELGFQKVGITDVDLSTEREHLRRWLEQGMHGDMEWMARHEELRTSPDQLHEGSVRAISVRMNYLPAEAGFAKTLNNPRLGYISRYALGRDYHKLMRKRLKQLGDRIQEACAELDFRPFVDSAPIMEKPLAIKAGLGWRGKHTLVLDEGSGSWFFLGELLVNLPLPTDREVEEKCGSCSACITICPTQAIVEPYVLDARRCISYLTIELRDSIPEEYRPLMGNRIYGCDDCQLICPWNRYAQLTDEGDFSPRKDLHAPELLELWQWDEETFLKRTEGSPIRRIGYDCWLRNLAVAMGNAPTDTDIIVALEQRRSAVSAMVAEHIDWALERQRSGTVKVEKQVIRLVRAVKKGLPRDA

SEQ ID NO: 77395 - protein, 375 aa, Idiomarina piscisalsi
  misc_feature (1)..(375): tr|A0A432YHH3|A0A432YHH3_9GAMM Epoxyqueuosine reductase OS=Idiomarina piscisalsi OX=1096243 GN=queG PE=3 SV=1
MSNSINYQQLADDIKRWGAELGFQKVGITDLDLSKHEATLQQWLDNGYHGEMDFMERHGMLRARPAELHPGSVRAISVRMNYLPVEAGFAKTLKDGSKGYISRYALGRDYHKLMRKRLKQLGDRIQSEFDGTDFRPFVDSAPIMERPLAEKAGLGWTGKHTLILDKDSGSWFFLGELLINLPLPVDEPVEEGCGSCTACMTICPTQAIVAPYELDARRCISYLTIELRGAIPEEFRPLIGNRIYGCDDCQLICPWNRYAQLTDENDFSPRQELHSPQLLELWTWTEQQFLDNLQGSPIRRIGYECWLRNLAVALGNAPSDAAIIEALENKTEGVTDMVREHIDWALERQRTGVAEVTKQLKRLVRAVEKGLPRDA

SEQ ID NO: 77396 - protein, 371 aa, Idiomarina salinarum
  misc_feature (1)..(371): tr|A0A094ITN0|A0A094ITN0_9GAMM Epoxyqueuosine reductase OS=Idiomarina salinarum OX=435908 GN=queG PE=3 SV=1
MDFHQLAADIKRWGAELGFQKVGIADLDLSAEQEHLQRWLAAGMHGEMDYMERHGDLRAHPEQLHPGSVRAISVRMNYLPAEAGFAKTLKNPRLGYISRYALGRDYHKLMRKRLKQLGDRIKEACAELEFRPFVDSAPIMERPLAVKAGLGWTGKHSLVLDEQGGSWFFLGELLVNLPLPVDKPVAEKCGTCNACITICPTQAIVEPYILDARRCISYLTIELKTAIPEPLRPLIGNRVYGCDDCQLICPWNRYAQLTDEADFSPRQHLHAPELLDLWAWDEETFLARTEGSPIRRIGFERWTRNLAVGLGNAPTDPEIISALESRRDQVSDMVREHIDWALERQRSGAVQPAKQVLRLVRAVERGLPRDA

SEQ ID NO: 77397 - protein, 383 aa, Idiomarina seosinensis
  misc_feature (1)..(383): tr|A0A432ZDM9|A0A432ZDM9_9GAMM Epoxyqueuosine reductase OS=Idiomarina seosinensis OX=281739 GN=queG PE=3 SV=1
MSDQRFTPSLSEHQLQALADDIKRWGAELGFQKVGITDLDLSQHEATLQQWLDKGYHGEMSFMERHGMLRARPAELHPGSVRAISVRMNYLPVEAGFAKTLNDSKLGFISRYALGRDYHKLMRKRLKQLGDKIKAAFEDTDFRPFVDSAPIMERPLAEKAGLGWTGKHTLILDRDGGSWFFLGELLINLPLPVDQPVTEGCGSCTACMTICPTNAIVGPYELDARRCISYLTIELKGSIPEELRPLMGNRIYGCDDCQLICPWNRYAQLTEEADFNPRQYLHSPQLIELWQWSEEQFMQRLEGSPIRRIGFDCWLRNLAVALGNAEPDAEIITALEQRSGQVNAMVQEHIDWALDRQRQGTATVTKQLKRLVRAVEKGLPRDA

SEQ ID NO: 77398 - protein, 379 aa, Idiomarina sp.
  misc_feature (1)..(379): tr|A0A2E9H3P5|A0A2E9H3P5_9GAMM Epoxyqueuosine reductase OS=Idiomarina sp. OX=1874361 GN=queG PE=3 SV=1
MPDTPLSEPQLQQLASDIKRWGHELGFQKVGIADLDLSRHEASLQEWLDKGYHGEMGFMERHGMLRARPAELHPGSVRAISVRMNYLPVEAGFAKTLNDSNKAFISRYALGRDYHKLLRKRLKQLGDKIKAQFDDTDFRPFVDSAPIMERPLAEKAGLGWTGKHTLILDRDSGSWFFLGELLINLPLPVDQPVEEGCGSCTACMTICPTQAIVGPYELDARRCISYLTIELRGSIPEELRPLMGNRIYGCDDCQLICPWNRYAQLTDEADFNPRQYLHSPQLLALWQWDEETFKSRLEGSPIRRIGFECWLRNLAVALGNADADAEIIAALEWRSGEVSDMVQEHIDWALERQRSGAAKVTQQLKRLVRVVEKGLPRDA

SEQ ID NO: 77399 - protein, 378 aa, Idiomarina sp.
  misc_feature (1)..(378): tr|A0A139C166|A0A139C166_9GAMM Epoxyqueuosine reductase OS=Idiomarina sp. T82-3 OX=1794809 GN=queG PE=3 SV=1
MYSSLSYTELEQLAQKIKQWGRELGFQKVGIADLDLQEHEATLQNWLDKGYHGEMGFMERHGMLRARPAELHPGSVRAISVRMNYLPAEAGFAKTLNNDRLGYISRYSLGRDYHKLLRKRLKQLGDKIKSEFADTDFRPFVDSAPIMERPLAEKAGLGWTGKHTLILDKDSGSWFFLGELLINLPLPIDSPVEEACGSCSACMTICPTQAIVAPYELDARRCISYLTIELKGSIPEDLRPLMGNRIYGCDDCQLICPWNRYAQLTDEADFNPRHYLHTPELLALWQWDEETFDQRLQGSPIRRIGHECWLRNIAVALGNAQADAEVIEALEWRSGQVSEMVQEHIDWALDRQRSGAAQVTQQLKRLVRAVSKGLPRDA

SEQ ID NO: 77400 - protein, 371 aa, Idiomarina tainanensis; identical to SEQ ID NO: 77393
  misc_feature (1)..(371): tr|A0A368ULQ7|A0A368ULQ7_9GAMM Epoxyqueuosine reductase OS=Idiomarina tainanensis OX=502365 GN=queG PE=3 SV=1

SEQ ID NO: 77401 - protein, 375 aa, Idiomarina taiwanensis
  misc_feature (1)..(375): tr|A0A432ZLF7|A0A432ZLF7_9GAMM Epoxyqueuosine reductase OS=Idiomarina taiwanensis OX=337250 GN=queG PE=3 SV=1
MTTTVDFEQLAQDIKRWGLELGFQHVGITDLDLSAEQAALDRWLEAGMHGEMGFMERHRELRADPAKLHQGSVRAISVRMNYLPAEAGFAKTLNNPRLGYISRYALGRDYHKLLRKRLKDLGERIKLACADLDYRPFVDSAPIMERPLAVKAGLGWTGKHSLVLAEDSGSWFFLGELLVNLPLPIDQPKQDKCGSCTACITICPTKAIVEPYVVDARRCISYLTIEHKTAIPEEFRPLLGNRIYGCDDCQLICPWNRFAQLTNEDDFSPRQSLHAPKLLELWQWDEATFLKQTEGSAIRRIGFERWQRNLAVALGNADPAPEILSALEQGKGRVSALVDEHIEWAIARQHEGLAKPNQQVRRLVRAIEKGLPRDA

SEQ ID NO: 77402 - protein, 376 aa, Idiomarina tyrosinivorans
  misc_feature (1)..(376): tr|A0A432ZQL1|A0A432ZQL1_9GAMM Epoxyqueuosine reductase OS=Idiomarina tyrosinivorans OX=1445662 GN=queG PE=3 S V=1
MSNNTYDYQQLAADIKRWGKELGFQKVGITDVDLSAHEQALQDWLDKGYHGEMEYMARHGMLRARPAELHPGSVRAISVRMNYLPAEAGFAKTLKNPRLGYISRYALGRDYHKVLRKRLKQLGDKIKAAFDDTDFRPFVDTAPILERPLAEKAGLGWTGKHSLILDRDSGSWFFLGELLINLPLPVDQPVEEGCGSCTACMTICPTQAIVEPYVIDARRCISYLTIELRGSIPEEFRPLMGNRIYGCDDCQLICPWNRYAQLTDENDFSPRKDLLAPELISLWQWTEEQFNSQLQGSPIRRIGFDCWLRNIAVALGNADPDVSVINALAQRSGQVSEMVQEHIDWALERQQRGVAKTTQQLKRLVRAVEKGLPRDA

SEQ ID NO: 77403 - protein, 371 aa, Idiomarina woesei
  misc_feature (1)..(371): tr|A0A0K6HAV1|A0A0K6HAV1_9GAMM Epoxyqueuosine reductase OS=Idiomarina woesei OX=1381080 GN=queG PE=3 SV=1
MDYHQLAADIKRWGAELGFQKVGITDIDLSAERDYLQKWLASGMHGTMEWMARHADLRTRPDQLHPGAIRAISVRMNYLPAEAGFAKTLKNPRLGYISRYALGRDYHKLMRKRLKQLGERIQEACADLDFRPFVDSAPIMEKPLAIKAGLGWRGKHTLVLDEGGGSWFFLGELLINLPLPTDQPVAEKCGSCSACITICPTQAIVEPYVLDARKCISYLTIELRDSIPESLRPLIGNRIYGCDDCQLICPWNRYAQLTDEHDFSPRANLHAPELLALWAWDEETFLKQTEGSPIRRIGYECWLRNLAVAMGNAPTDTDIIRALEQRRESCSAMVQEHIDWALERQRSEAVKVEKQVVRLVRAIEKGLPRDA

SEQ ID NO: 77404 - protein, 375 aa, Idiomarina zobellii
  misc_feature (1)..(375): tr|A0A1G7MXZ9|A0A1G7MXZ9_9GAMM Epoxyqueuosine reductase OS=Idiomarina zobellii OX=86103 GN=queG PE=3 SV=1
MSNSINYQQLADDIKRWGAELGFQKVGITDLDLSKHEATLQQWLDNGYHGEMDFMERHGMLRARPAELHPGSVRAISVRMNYLPVEAGFAKTLKDGSKGYISRYALGRDYHKLMRKRLKQLGDRIQSEFDGADFRPFVDSAPIMERPLAEKAGLGWTGKHTLILDKDSGSWFFLGELLINLPLPVDEPVEEGCGSCTACMTICPTQAIVAPYELDARRCISYLTIELRGAIPEEFRPLIGNRIYGCDDCQLICPWNRYAQLTDEDDFSPRQELHSPQLLELWAWTEQQFLDNLQGSPIRRIGYECWLRNLAVALGNAPSDAAIIEALENKTEGVTDMVREHIDWALERQRTGVAEVTKQLKRLVRAVEKGLPRDA

SEQ ID NO: 77405 - protein, 379 aa, Idiomarinaceae bacterium
  misc_feature (1)..(379): tr|A0A2D7YS99|A0A2D7YS99_9GAMM Epoxyqueuosine reductase OS=Idiomarinaceae bacterium OX=1898113 GN=queG PE=3 SV =1
MPDTPLSEPQLQQLASDIKRWGHELGFQKVGIADLDLSRHEASLQEWLDKGYHGEMGFMERHGMLRARPAELHPGSVRAISVRMNYLPVEAGFAKTLNDSNKAFISRYALGRDYHKLLRKRLKQLGDKIKAQFDDTDFRPFVDSAPIMERPLAEKAGLGWTGKHTLILDRDSGSWFFLGELLINLPLPVDQPVEEGCGSCTACMTICPTQAIVGPYELDARRCISYLTIELRGSIPEELRPLMGNRIYGCDDCQLICPWNRYAQLTDEADFNPRQYLHSPQLLALWQWDEETFKTRLEGSPIRRIGFECWLRNLAVALGNADADAEIIAALEWRSGEVSDMVQEHIDWALERQRSGAAKVTQQLKRLVRVVEKGLPRDA

SEQ ID NO: 77406 - protein, 375 aa, Idiomarinaceae bacterium
  misc_feature (1)..(375): tr|A0A0N8KBM3|A0A0N8KBM3_9GAMM Epoxyqueuosine reductase OS=Idiomarinaceae bacterium HL-53 OX=1298881 GN=queG P E=3 SV=1
MSESIDYQQLAEKIKAWGEELGFQQVGIADLDLSKHEAALQDWLDKQYHGDMDYMERHGMLRARPAELHPGSLRAISVRMDYLPKNAKFGSVLRQKDLAYVSRYALGRDYHKVMRKRLKQLGDKIKAYCEHTDFRPFVDSAPILERPLAEKAGLGWTGKHSLLLDSKDGSWFFLGELLINLPLPIDKPQAEQCGSCTACMTICPTQAIVEPYVVDARKCISYLTIEHPGVIDEKYRKAMGNRIYGCDDCQLICPWNRYATPTPEADFLPRHALHAPKLLDLWAWNEETFMKQTEGSPIRRIGFEKWQRNLAIALGNAPHELAIIDALEEKLEHVTAMVREHVSWAIEQQKEKQERTSRQEQRLIRAIEKGLPRDF

SEQ ID NO: 77407 - protein, 356 aa, Ignatzschineria cameli
  misc_feature (1)..(356): tr|A0A2U2AQN4|A0A2U2AQN4_9GAMM Epoxyqueuosine reductase OS=Ignatzschineria cameli OX=2182793 GN=queG PE=3 SV=1
MSSNDTYNSPQFIAKLQAKAREIGINELSSSDIDPGKNRDYFIEWLGEGFHGELDYMYKHGEKRYHPDQLVPGTVSMLTAQLHYFNPEIDAQARLEDPNHAYVAEYALGRDYHKVLRNMLTKLGKWLQTEIPDLEFRAFVDSAPVLERAFSQKSGLGFFGKNTMIIHPKRGSFFFLGELLLSKRIEIPSEPITNHCGQCTRCIKACPTDAIVSPFKIDARKCISYLTIEHFGPIPEEYRTAMGNRIFGCDDCQIVCPWNRFAIDLTTEDFFPRHQLDSSTLLQLFNWSEAEFLRKTEGSPIRRLGYARWLRNIAIGIGNSPYAEANIEALKAKLEFEDEAVREHVKWALKEQNEKK

SEQ ID NO: 77408 - protein, 365 aa, Ignatzschineria indica
  misc_feature (1)..(365): tr|A0A2U2AJ22|A0A2U2AJ22_9GAMM Epoxyqueuosine reductase OS=Ignatzschineria indica OX=472583 GN=queG PE=3 SV=1
MRHETAHDTDYNSPQFIAKLKAKAAELGINELSSADIDPGKNRDYFIEWLGEGFHGDLDYMYKHGEKRYHPDLLVPGTVSMLTAQLHYFNPEIDAKARLEDPNHAYVAEYALGRDYHKVLRNMLTKLGKWLQEEIPGLEFRAFVDSAPVLERAFSQKSGLGFFGKNTMIIHPKRGSFFFLGELLLSKRIDIPSEPITNHCGQCTRCIKACPTDAIVSPFKIDARKCISYLTIEHFGPIPEEYRSAMGNRIFGCDDCQIVCPWNRFAIDLTTQDFFPRHKLDSSTLLELFSWTEAEFLRKTEGSPIRRLGYARWLRNIAIGIGNSPYSEENIEALKAKENFEDEAVREHVKWALEEQNEKNNRSIS

SEQ ID NO: 77409 - protein, 365 aa, Ignatzschineria sp.
  misc_feature (1)..(365): tr|A0A256CR20|A0A256CR20_9GAMM Epoxyqueuosine reductase OS=Ignatzschineria sp. F8392 OX=1980117 GN=queG PE=3 S V=1
MRHETAHDTDYNSPQFIAKLQAKAREIGINELSSADIDPGKNRDYFIEWLGEGFHGDLDYMYKHGEKRYHPDLLVPGTVSMLTAQLHYFNPEIDAKARLEDPNHAYVAEYALGRDYHKVLRNMLTKLGKWLQEEIPGLEFRAFVDSAPVLERAFSQKSGLGFFGKNTMIIHPKRGSFFFLGELLLSKRIEIPSEPITNHCGQCTRCIKACPTDAIVSPFKIDARKCISYLTIEHFGPIPEEYRTAMGNRIFGCDDCQIVCPWNRFAIDLTTEDFFPRHQLDSSTLLQLFNWSEAEFLRKTEGSPIRRLGYARWLRNIAIGIGNSPYSEENISALKAKENFEDEAVREHIKWALEEQNEKNNSSIS

SEQ ID NO: 77410 - protein, 359 aa, Ignatzschineria ureiclastica
  misc_feature (1)..(359): tr|A0A2U2AHC1|A0A2U2AHC1_9GAMM Epoxyqueuosine reductase OS=Ignatzschineria ureiclastica OX=472582 GN=queG PE=3 SV=1
MNAPIQSPEFISRLLAKAEELGISELSSSDIDPGINRDYFIEWLGKGYHADLDYMEKHGEKRYHPDQLVPGTVSLLTAQLHYFNPEIDAKARLEDPHHAYVAEYALGRDYHKVLRNMLTKLGKWLQEEIPGLEFRAFVDSAPVLERAFSQKSGLGFFGKNTMIIHPKRGSFFFLGELLLSRRIEIPSEPITNHCGQCTRCIKACPTDAIVAPFQIDAGKCISYLTIEHFGVIPIEYRAAMGNRIFGCDDCQIVCPWNRFAVPLNTEDFLPRHQLDSSTLLELFAWSEAEFLRKTEGSPIRRLGYQRWLRNIAIGIGNSPYSEANMIALQQRLTITDEMVQEHIQWALNEQSAKQFVSVS

SEQ ID NO: 77411 - protein, 306 aa, Ignavibacteria bacterium
  misc_feature (1)..(306): tr|A0A3M0WSW4|A0A3M0WSW4_9BACT Epoxyqueuosine reductase OS=Ignavibacteria bacterium OX=2053306 GN=queG PE=3 SV =1
MAISNDEVIHIAKEKGFDLVGFSKADKLTKEVQKLNKWLAEGFHAGMEYMSRNVEKREDVSLILPGAKSVISLGMNYYLDFNPEIKDGEGKVSRYAWGKDYHLIIWEKLEEIIVELKSKDEDFEAKAYVDTGPVMDKAWAVRSGLGWMGKHSNIINREFGSWFFIANLICNKEFDYSEIKTDHCGTCTACIDSCPTGAIVEDFVIDSNKCISYLTIENKGDIPEKLKDNFGNWAFGCDVCQDVCPWNEKFSQPSRVEDFFDTPNTKLNLEEIEGLSNSKFNRKFATSPIKRARLKGIKRNLNYIGK

SEQ ID NO: 77412 - protein, 311 aa, Ignavibacteria bacterium
  misc_feature (1)..(311): tr|A0A1G0XDS1|A0A1G0XDS1_9BACT Epoxyqueuosine reductase OS=Ignavibacteria bacterium RIFOXYD12_FULL_36_8 OX=179 8454 GN=queG PE=3 SV=1
MPVNNQTVIELAKKYGFDLIGFAEAKVLDKEIERLTEWLDRGYHARMSYMQRNLNKRKDIKEILSFARSVISLGMNYYSPEKHSEDKAKGKVSRYAWGKDYHFVIWEKLDKIIDHLKQKEPSFEAISYIDTGPVMDKAWAVRSGLGWMGKHTNVINKEIGSWFFIANMITNWEFEYSDPLEDFCGSCTACIDACPTNAIVNEYVLDSNKCISYLTIENKKNIPEEFKGQFENWIFGCDICQDVCPWNLKFSKATSIKEFYPEKGNKELQLDEIFSLTKKEFDKRFAVSPIKRAKLSGLKRNAEFLLAKNGC

SEQ ID NO: 77413 - protein, 319 aa, Ignavibacteriae bacterium
  misc_feature (1)..(319): tr|A0A3N5JZY3|A0A3N5JZY3_9BACT Epoxyqueuosine reductase OS=Ignavibacteriae bacterium OX=2026749 GN=queG PE=3 S V=1
MEYSRSGRIKKKAAEIGFSSIGIARAEIIHDEEKHMREWLDRGFQASMQWMERDAGKRSDVATVLPQAKSVICVALNYYAPVPHTHSPAVGKISRYAWGDDYHEVMRDRLELLSEFLMSEIPGAATKYYVDTGPVMDKAWAVRAGIGWLGKHSNVITRKFGSWVFLGEILIDVELEYDNPALDLCGSCTACLDACPTQAIVQPYVVDSNKCISYLTIEHRGDLPKERVTKFENWIYGCDICQDVCPWNRFQKETDEPAFHPREENRAPELTELAGMSQEEFSRRFKNSPIKRTKHSGLTRNAKAIIESFPDKTHLMKKK

SEQ ID NO: 77414 - protein, 311 aa, Ignavibacteriae bacterium
  misc_feature (1)..(311): tr|A0A2N1V9V9|A0A2N1V9V9_9BACT tRNA epoxyqueuosine(34) reductase QueG OS=Ignavibacteriae bacterium HGW-Ignavib acteriae-4 OX=2013811 GN=queG PE=4 SV=1
MISQIEKDDIIKLCEGENFSQINIAKYEILTSEIEKYNEWLAKGYNADMDWMKNYLDKRQDVRLIQENTKSIIVLAYNYNQTTKHEYGINKISRYAWGDDYHNYIPKKLKRICKELKTTYPNEEFKYYIDTGAILEKQWGVKSGLGWQGKNSLLLNKKLGSYFFIAIIFSTLEIESDELVKDYCGKCTKCIDACPTDAIIADKIIDSTKCISYWTIESKSEKFPSEISDNLEGWAFGCDICQEVCPWNNHRVPIQIEDFVNPRFGETILDKKTIFNYTEDEFKERYIKSPLKRPKHNGIKRNILELEKNSK

SEQ ID NO: 77415 - protein, 311 aa, Ignavibacteriales bacterium
  misc_feature (1)..(311): tr|A0A419H5R4|A0A419H5R4_9BACT Epoxyqueuosine reductase OS=Ignavibacteriales bacterium OX=2049428 GN=queG PE=3 SV=1
MKISNEIVIHKAHELGFDLVGFSRSEILSEESSHLQMWLDNGFNASMEYMKRNFEKRQDVKQILPSAKSVISLALNYYTPNQHSTDSNTGKISRYAWGRDYHLVIWDKLSLLEEYLSSLDENFESKSYVDTGPVMDKAWAVRSGIGWLGKNSNVINKEIGSWFFIANIITNCEFNYSEPIADLCGSCTACLDACPTNAIVQPYIVDANRCISFLTIENKGEISNEFKGKFDNWIFGCDVCQDVCPWNKKFSEPTMLQEFQPKGTNLVLDEVINMNEEEFKAKLETSPIKRAKLSGLKRNAAFLFGESLPQE

SEQ ID NO: 77416 - protein, 312 aa, Ignavibacteriales bacterium
  misc_feature (1)..(312): tr|A0A2H0FNI0|A0A2H0FNI0_9BACT tRNA epoxyqueuosine(34) reductase QueG OS=Ignavibacteriales bacterium CG18_big_ fil_WC_8_21_14_2_50_31_20 OX=1974047 GN=queG PE=4 SV=1
MKITNKIVIETAQKFGFDLVGFADSTTLNEEVSNLKNWLINGFNSKMSYMERNIEKRLDVKEILPSAKSVISLALNYYVKGEFSNNYQNGKISRYAWGTDYHYIIWEKLGQLISELKVIDNNFEAKSYVDTGPVMDKAWAVRSGIGWQGKNSNILNKQIGSWFFIATIVTNYNFSVSKIVTDHCGKCMACIDACPTNAIVEPYIIDANKCISNLTIENKDEIPIEFKGKFKGWIFGCDICQDVCPWNQKFSTATKIPEFLIGENREIDLQSVSKLTNSEFKKKYVSSPIYRAKAKGLKRNAKFLLEDNLETD

SEQ ID NO: 77417 - protein, 306 aa, Ignavibacterium album
  misc_feature (1)..(306): tr|I0ALW3|I0ALW3_IGNAJ Fe-S protein OS=Ignavibacterium album (strain DSM 19864 / JCM 16511 / NBRC 101810 / Mat 9-16) OX=945713 GN=IALB_2267 PE=4 SV=1
MKKLTNEVVISKAKSLGFDLVGFAQAVELTDEIEKLNLWLDKKFHAGMNYMGRNIHKRRNPKEILPEAKSIISLALVYNTPFSHSNDIDFGKISRYAWGKDYHLIIWEKLDQLENELKAIDSNFNSISYVDTGPVMDKVWAVKAGLGWMGKHTNIINREIGSWFFIANIICNYEFEYSEQLPDFCGECTACIDACPTDAIVQPYVVDSNKCISYQTIENKNEIDDELKGKFENWLFGCDICQEVCPWNKKFSITTSLKDFYPRNKELTYSEIMQMDEKTFKEKFSDSPIKRTRLSGLKRNAKFLFE

SEQ ID NO: 77418 - protein, 395 aa, Ignavigranum ruoffiae
  misc_feature (1)..(395): tr|A0A1H9E1K5|A0A1H9E1K5_9LACT Epoxyqueuosine reductase OS=Ignavigranum ruoffiae OX=89093 GN=SAMN04488558_1065 7 PE=4 SV=1
MDRQSIKDKVIAYAKSIGIDKIGFASSQPFDDLRESLIEQKAKGHTTGFEHPIIEERLYPDRILPGAQSIISIGLAYPSRIRQEVPKDKLNKRGQFARASWGLDYHHVLRNKLQQLDQFLKELCPQAQTEMMVDTGALIDVAVAARAGLGFIGRNGLLISKEFGSWLYLGEMITNINFEPDTEVAYDCGQCFRCIRACPTQALLGDGRMNAQKCLSYQTQTKSIMPEDYRRKISSVIYGCDICQLVCPYNQGIDYHLHEEMEPIVDQVQPQLKPLLTLSNREFKAQFGHLAGSWRGKKPIQRNAIIALANMGDKSAMPELIRVMEDDPRPDIRAIAAWALSQIEKFYNPVLLEAVIAQADSETDSAALTEFDQAIQHLKQKRPARTTHRKRDDLS

SEQ ID NO: 77419 - protein, 344 aa, Ilumatobacter coccineus
  misc_feature (1)..(344): tr|A0A2G6KBI4|A0A2G6KBI4_9ACTN tRNA epoxyqueuosine(34) reductase QueG OS=Ilumatobacter coccineus OX=467094 GN= queG PE=4 SV=1
MSRRHPLPTWDEIVDLAADAGITRLGVAPAEILTDARHTLHARKADGLHAGMAFTYRNPDRSTDPFRTLDDARSIIVAARPYQATEEPDRPDGVQGRVGRYAWTDHYTPLRLGLRSIVRRIKAAGYRAVAFADDNSVVDREVAYRGGIGWYGKNSNILVPGAGSYFVLGSIITNADYPVSEPEPNRCGKCHRCLDGCPTAAIVAPGVIDANRCLAWLVQQPGDFPEEFRAALGDRIYGCDECQEVCPPSIRFGDHHRVTVDAPEAWIDLLDLLEGDDDAILARHWYIAQRDPVWVRRNALIVVGNTADPGDRRARAIVERYRAHSVLGEIARWADDQLDKRQAI

SEQ ID NO: 77420 - protein, 364 aa, Ilumatobacter fluminis
  misc_feature (1)..(364): tr|A0A4R7HXV3|A0A4R7HXV3_9ACTN Epoxyqueuosine reductase OS=Ilumatobacter fluminis OX=467091 GN=BDK89_1492 PE=4 SV=1
MRRTEPLPTWDELVALASEHDIHHVGVAPADVLERARIALVERKEAGLHAGMEFTYRNPDRSTDPSRAVEGARSVLVFAKPYLAEHEPERPPGVQGRVGRYAWVDHYGPLRTSLQEIARRIRRSGHRATAFTDDNSIVDREVAYRGGLGWFGKNANLLLPGAGSFFVLGSIITTAHYEPNEPVKDGCGSCRRCLDGCPTGAIVAPGVVDANRCLAWLVQQPGTFPHEYREALGDRFYGCDDCQEVCPPTVRLGGRHEVDIVELARHPRGQHPPDGGVQAWVDMLDVLEMSDDDLVAHFGRWYLAGRDPIWWRRNALVVLGNVGDAADERTRRVLDHYRAHDSELLREHADWAAGRLGLQSSERP

SEQ ID NO: 77421 - protein, 364 aa, Imhoffiella purpurea
  misc_feature (1)..(364): tr|W9W1I5|W9W1I5_9GAMM Epoxyqueuosine reductase OS=Imho ffiella purpurea OX=1249627 GN=queG PE=3 SV=1
MNHPPNIVRSDSSPAHPNRWLADRIRDWGRELGFQQVGITDTDLSTAEGRLMEWLADGRHGDMEYMARHGTKRSRPAELVPGTLRVISVRMDYLPETPDRTRGILADPATAFISRYALGRDYHKLIRKRLQRMAERIQAAVAPAACRVFVDSAPVLEKPLAEKAGLGWIGKHTNLIDPQAGSWFFLGEIYTDLSLPIDHPGVSHCGRCQNCIDICPTRAIVAPYQLDARRCISYLTIEHQGSIPEALRTPIGNRIYGCDDCQLVCPWNRFARRTREADFLPRAGLDTATLIELFGWDETTFLERTQGSAIRRIGHVRWLRNIAVALGNADSAPEVETALRTHAEHPSEMVREHVAWALERQGSA

SEQ ID NO: 77422 - protein, 357 aa, Immundisolibacter cernigliae
  misc_feature (1)..(357): tr|A0A1B1YT81|A0A1B1YT81_9GAMM Epoxyqueuosine reductase OS=Immundisolibacter cernigliae OX=1810504 GN=queG PE= 3 SV=1
MNPAPAAPDPTALAATLRTLATELGFTGLGIGGVDLAVAEQHLTDWLARGYHGDMAWMARHGAKRSRPAELVPGTLRVISVRMDYWPHGAAAPWPVLESPTLGYVSRYALGRDYHKRVRQRLQSLADGIAALIGPFGYRVFCDSAPVLEKPLAQQAGLGWIGKHTCLIDARGGSWFFLGEIYTDLPLPLDAPAGGHCGTCRACIDVCPTGAIVAPYVLDARRCISYLTIEHPGPIPEPLRPLLGNRIYGCDDCQLVCPWNKFARPTGEADFAPRHGLDAPRLIDLMDWTADQFDTRLAGSAIRRIGHQRWQRNIAVALGNAPAGDADTVACLRRHGDSASPLVAEHVAWALQRHGAG

SEQ ID NO: 77423 - protein, 310 aa, Imperialibacter sp.
  misc_feature (1)..(310): tr|A0A5E8AXL6|A0A5E8AXL6_9BACT Epoxyqueuosine reductase OS=Imperialibacter sp. EC-SDR9 OX=2038371 GN=queG PE=3 SV=1
MPTHTVSKNTQIIKAIASELGFSFCGIAKAEFLAEEAPKLEEWLNRGYQGKMSYLENHFDMRLDPTKLVPGARSVVSLVYNYYPKAKHESENNFKIAKYAYGQDYHLVVKEKLKEFFSSIQKQIGAVEGRVFVDSAPVHERAWAAKSGLGWVGKNSLLLNKQMGSFFFLAELIIDLELEADGPMKDYCGTCTACQDACPTKAIPEPYVVDGSRCISYLTIELKESIPDEFSGKMENWAFGCDICQDVCPWNRFSKPHREAAFSPQGWEGFSKSEWEEMTEETFGRVFKKSAVKRAKFAGLKRNIQFAGKK

SEQ ID NO: 77424 - protein, 310 aa, Imtechella halotolerans
  misc_feature (1)..(310): tr|I0WI25|I0WI25_9FLAO Epoxyqueuosine reductase OS=Imte chella halotolerans K1 OX=946077 GN=queG PE=3 SV=1
MEIKALHTQKIKSEAKRLGFLSCGVSKAGFLEQEAPRLEQWLRNGYHGEMQYMENHFDKRLDPRLLVDGAQSVISLLLNYYPTDIQNSSDTLKISKYAYGTDYHYVIKDKLKQLLHFIENEIGEVSGRAFVDSAPVLDKAWAAKSGLGWIGKHSNLLTKQTGSFYFIAELIIDLPLMYDGPTTDHCGSCSACIDSCPTEAIIAPYVVDGSKCISYATIELKNEIPAYFSGKMDDWMFGCDVCQDVCPWNRFSKPHSEPEFNPHEKLLDLTRKEWEEITIEVFQEIFKKSAVKRTKYEGLRRNITFLSKKD

SEQ ID NO: 77425 - protein, 309 aa, Indibacter alkaliphilus
  misc_feature (1)..(309): tr|S2E383|S2E383_9BACT Epoxyqueuosine reductase OS=Indi bacter alkaliphilus LW1 OX=1189612 GN=queG PE=3 SV=1
MKKDKYAQIIKSQARLLGFDFCGIAKAEFLEEEAPKLENWLKQNYHGKMAYLANHFDKRLDPTQLVEGAKSVVSLIYNYYPEKKLPEAKDDFKLAKYAYGKDYHFVVKDKLKSFLANLQLEIGDFGGRVFVDSAPVMERQWAQKAGLGWLGKNSLLLNREMGSFFFLAELIIDLEVSPDAPLQKDYCGTCTKCIDACPTDAIVKNGVVDASKCISYLTIELKDAIPEDFRGKMENWVFGCDICQDVCPWNRFSQNHSEPEFLPNPELLGFGKSDWQEMTAETFGKVFKKSALKRTKFEGLKRNIKFLEG

SEQ ID NO: 77426 - protein, 365 aa, Inhella sp.
  misc_feature (1)..(365): tr|A0A3S2UHI5|A0A3S2UHI5_9BURK Epoxyqueuosine reductase OS=Inhella sp. CCP-18 OX=2499851 GN=queG PE=3 SV=1
MTQATDLDPVLPGAALVAQVQAWGRAAGFSQIGIAPIDLRDAEPGLLAWLAAGFHGEMDYMARHGLKRARPAELVPGTASVISVRMDYLPGATPEGWQAVEWAGLQRAQQAQVSLYARGRDYHKVLRQRLQGLADRIAAHLGPFGHRCFTDSAPVLEVELAQRAGLGWRGKHTLLLHREAGSTFFLGEIYVDLALPRSEPTSSHCGQCTACLDACPTQAIVAPYRLDARRCISYLTIEHEGDIPLEFRRALGNRIYGCDDCQLACPWNKFAQRSPLPDFDPREGMQGAHLLSLWAWDEASFLRRTEGSAIRRIGYERWRRNLAVALGNALRADPEDQTLRAALRAARPHASARVARHIDWALDEG

SEQ ID NO: 77427 - protein, 357 aa, Inmirania thermothiophila
  misc_feature (1)..(357): tr|A0A3N1XZK0|A0A3N1XZK0_9GAMM Epoxyqueuosine reductase OS=Inmirania thermothiophila OX=1750597 GN=queG PE=3 S V=1
MDPHRLAEDIRRWARELGFAGAGFARAPRPADLARLDAWLAAGRHGAMEWMARHRALRADPAALHPGTRTIISVRMHYTPPTAAPAQAVLADPRRGYISRYALGRDYHKVLRGRLRALARRIEAAAGRFGHRAFVDSAPVLEKPLAREAGLGWIGRHSNLVHPREGSLFVLGELYTDLELPADPPFARDHCGRCTACIDACPTGAIVAPYQVDARRCISYLTIELRGPIPEPLRRPLGNRIFGCDDCQLVCPWNRFARTAAVADFDPRHGLDAPALTALFAWDEATFLARTEGSALRRTGYEGWLRNVAVALGNAPPDPAVAAALRARADHPSALVREHVAWALREQARRRGAPPAG

SEQ ID NO: 77428 - protein, 376 aa, Inquilinus limosus
  misc_feature (1)..(376): tr|A0A211ZRS2|A0A211ZRS2_9PROT Epoxyqueuosine reductase OS=Inquilinus limosus OX=171674 GN=queG PE=3 SV=1
MSGAAEIKDRIRAEAFALGFDSAGFAAATPDPRLRERLELFLGEGQHGDMGWLEANADRRADPQILWPDALTVLSLGLNYGPAEDPLPLLDQRERGVISVYAQGRDYHDVVKKKLKALGGWIHRSFKTELKVFVDTAPVMEKPLAMRAGIGWQGKHTNLVSRDWGSWLFLGEIYLAIALPPDEPERDRCGSCRSCLDICPTAAFPAPYRLDARRCISYLTIEHKGPIPREMRPLIGNRIYGCDDCLAVCPWNKFAAVGREAALAPWPELNGPALASLLGFDDAGFRAAFSGSPIKRIGRDRFLRNVLVALGNSADPALARDVEPLLDDASPLVRGAAVWALARLLGPGGLGRLASARADDPEAEVREEWQAGLQAA

SEQ ID NO: 77429 - protein, 377 aa, Inquilinus limosus
  misc_feature (1)..(377): tr|A0A0A0D060|A0A0A0D060_9PROT Epoxyqueuosine reductase OS=Inquilinus limosus MP06 OX=1398085 GN=queG PE=3 SV= 1
MTGPADIKDRIRAEAFALGFDSAGFAAATPDPRLRERLELFLGEGQHGDMGWLEANADRRADPQTLWPDALTVLSLGLNYGPAEDPLPLLEQRERGVISVYAQGRDYHDVVKKKLKALGGWIHRTFKSELKVFVDTAPVMEKPLAMRAGIGWQGKHTNLVSRDWGSWLFLGEIYLAIALPPDAPERDRCGSCHACLDICPTAAFPAPYRLDARRCISYLTIEHKGPIPRELRPLLGNRIYGCDDCLAVCPWNKFAAAGREAALAPRPELNGPALASLLGFDDAGFRAAFSGSPIKRIGRDRFLRNVLVAIGNSGDPTLAPAVEPLLDDASPMVRGAAVWALGRLLGPEGLRRLAAPRAEDPEAEVREEWQAGLQAAA

SEQ ID NO: 77430 - protein, 312 aa, Inquilinus sp.
  misc_feature (1)..(312): tr|A0A554SL76|A0A554SL76_9PROT Epoxyqueuosine reductase OS=Inquilinus sp. KBS0705 OX=2578108 GN=queG PE=3 SV=1
MQQNLSAYSQLIKTEAKNLGFLFCGIAKAGFLEEEAPRLEAWLNKGMHGEMQYMENHFDKRLDPRLLVDGAKSVISLGLNYYTNQTQLDPFAPKLSKYAYGTDYHFVIKDKLKQLLAIINQKIGEVGGRAFVDSAPVLDKAWAKKAGLGWVGKNTNLISKKAGSFFFLAELIVDIELQYDLEPTADHCGDCTRCIDACPTDAIVGPYIVDGSRCISYLTIELKNEIPQEFKGKMDNWMFGCDICQDVCPWNRFSVLHNQPAFQPHPDLHGLKKQDWEDITTDVFNKVFKNSAVKRTKLDGLKRNIEFLRNTE

SEQ ID NO: 77431 - protein, 412 aa, Insolitispirillum peregrinum
  misc_feature (1)..(412): tr|A0A1N7PWN6|A0A1N7PWN6_9PROT Epoxyqueuosine reductase OS=Insolitispirillum peregrinum OX=80876 GN=queG PE=3 SV=1
MAKRPALPTDPEALKQAIRAEALTIGFDTVGFAHASLPPSVGEDLRGYLAADSHGTMSWMAETADRRADPRVLWPEVVSVIALGVSYAPGDDPFALHAHRDHGVISVYARNRDYHDLLKKRLKQLARWLHEASGEGVKVFVDTAPVMEKPLAVAAGLGWQGKHTNLVSRQHGSWLFLGEVFTTLRLDPDRVQRDHCGSCSACLDSCPTQALWITADGQRRIDGRRCIAYLTIEHQGPIARELRPMLGNRVYGCDDCVGVCPWNRFASPTRLDEFLPRVELLAPELRDLVALDDAAFREVFSGSPIKRIGRGRMVRNALVALGNSGQPALAAAVVPLLDDDDPTVRGCAVWALGRLAPQQLAERAPAALACEQDPLVREEWSHALCDSAEAVPAGARAAAGAPAGRDVGGTGC

SEQ ID NO: 77432 - protein, 303 aa, Intestinibacter bartlettii
  misc_feature (1)..(303): tr|W1UIC5|W1UIC5_9FIRM Uncharacterized protein OS=Intes tinibacter bartlettii DORA_8_9 OX=1403940 GN=Q606_CBAC0 0336G0004 PE=4 SV=1
MHKDRLKQICENKKIDIMGVAPIGPYFELEKILNDRKQKEHLTGMEEEDINKRINPRLIMDDAKSVIVCAFPYYIGEYRDSNISKYCYGEDYHIVTKQILTDICLEIEKEIPDFKYEIFADNGPLVDRYLAYLSGIGYFGINNNIITDKYGSYIFIAYVVNNYEFEPDKPSEKSCLKCNKCVKYCPGNAILGNFEIDPRKCLSYITQKKEELSESEIQLLKENGKVFGCDICQDVCPHNKDIQTTKICEFNNELITKINQEEIDEISNKEFKRRYKNRAFSWRGRKIIKRNLDIISDKNKMDF

SEQ ID NO: 77433 - protein, 303 aa, Intestinibacter bartlettii; identical to SEQ ID NO: 77432
  misc_feature (1)..(303): tr|A0A1T4V3E9|A0A1T4V3E9_9FIRM Epoxyqueuosine reductase OS=Intestinibacter bartlettii DSM 16795 OX=445973 GN=S AMN02745147_2304 PE=4 SV=1

SEQ ID NO: 77434 - protein, 283 aa, Intestinimonas butyriciproducens
  misc_feature (1)..(283): tr|A0A0S2W062|A0A0S2W062_9FIRM Epoxyqueuosine (OQ) redu ctase QueG OS=Intestinimonas butyriciproducens OX=12976 17 GN=IB211_00227c PE=4 SV=1
MTGPDAWFAAAGAAAWGTCAYEDVRPHMDAPALARAEALCPAPAGIYVAAFPYFPGEAPGNLSLYARGEDYHAAVARRLDQVCAALRPAHPGRCFAPLVDNSPLPEQLCAALAGLGLRGRNTLTILPPWGTWLFLGAILTDLPLESAPVPAPACMDCGKCTAACPAGALGPNGLDPDRCLSALTQKKGALTAEEEARLRGHGLVWGCDACQRACPYNRDVPLSPLPEFRTNLIHTLGTTDVDHLTRRQFQEKYPLRAFTWRGPGVLLRNLRLKEREGRNGPSV

SEQ ID NO: 77435 - protein, 283 aa, Intestinimonas butyriciproducens
  misc_feature (1)..(283): tr|A0A2U1CGD5|A0A2U1CGD5_9FIRM Uncharacterized protein DUF1730 OS=Intestinimonas butyriciproducens OX=1297617 GN=C7373_101488 PE=4 SV=1
MTGPDAWFAAAGAAAWGTCAYEDVRPHMDAPALARAEALCPAPAGIYVAAFPYFPGEAPGNLSLYARGEDYHAAVARRLDQVCAALRPAHPGRCFAPLVDNSPLPEQLCAALAGLGLRGRNTLTILPPWGTWLFLGAILTDLPLESAPVPAPACMDCGKCTAACPTGALGPNGLDPDRCLSALTQKKGALTAEEEARLRGHGLVWGCDACQRACPYNRDVPLSPLPEFRTNLIHTLGTTDVDHLTRRQFQEKYPLRAFTWRGPGVLLRNLRLKEREGRNGPSV

SEQ ID NO: 77436 - protein, 357 aa, Iodobacter fluviatilis
  misc_feature (1)..(357): tr|A0A377Q2Z8|A0A377Q2Z8_9NEIS Epoxyqueuosine reductase OS=Iodobacter fluviatilis OX=537 GN=queG PE=3 SV=1
MTTSLQQLDYQKLAQQIKGWAQELGFARAGITGIDLSHAEAGLQEWLDAGFHGDMDYMARHGMKRARPAELHPGTISLISVFLPYLPPAAANSEEILANGSKAYLSRYALGRDYHKVLKGRLQQLADRLAAEIGPFGHRVFVDSAPVLEVEIAQQAGQGWRGKHTLLINREYGSYFFIGELFTDLPLPPDPPQQEEHCGRCTRCITVCPTGAIVAPYKVDARRCISYLTIELKGSIPLEFRPMLGNRVYGCDDCQMVCPWNRFAVDTNEADFHVRHGLDDVTLVELFAWSEADFKQKMAGSAIYRIGYEQWLRNMAVGLGNAPKSAGVIAALAARADDPSELVREHVQWALAQHGMV

SEQ ID NO: 77437 - protein, 357 aa, Iodobacter sp.
  misc_feature (1)..(357): tr|A0A2G3JD92|A0A2G3JD92_9NEIS Epoxyqueuosine reductase OS=Iodobacter sp. BJB302 OX=1506510 GN=queG PE=3 SV=1
MHTSLPLSDYQKLAQQIKGWALELGFARAGISGVDLSHAEAGLQEWLDAGFHGEMDYMARHGMKRARPAELHPGTISLISVFLPYLPPAAANSEEILADGSKAYLSRYALGRDYHKVLKGRLQQLADRLAAEIGPFGHRVFVDSAPVLEVEIAQQAGQGWRGKHTLLINREYGSYFFIGELFTDLPLPPDPPQQEEHCGRCTRCITACPTGAIVAPYKVDARRCISYLTIELKGSIPLEFRPMLGNRVYGCDDCQMVCPWNRFAVDTKEADFHVRHGLDDVTLVELFAWSEADFKQKMAGSAIYRIGYEQWLRNMAVGLGNAPKSAGVIAALAARADDPSELVREHVQWALAQHGMV

SEQ ID NO: 77438 - protein, 368 aa, Iodobacter sp.
  misc_feature (1)..(368): tr|A0A3S8ZP68|A0A3S8ZP68_9NEIS Epoxyqueuosine reductase OS=Iodobacter sp. H11R3 OX=2496266 GN=queG PE=3 SV=1
MHTSPPSLDYQKLARQIKGWAQELGFARAGVTSIDLSHAEAGLQEWLDAGFHGEMDYMARHGMKRARPHELHAGTISLISVFLPYLPLAAANSEEILANGSKAYLSRYALGRDYHKVLKGRLQQLADRLVKEIGPFGHRVFVDSAPVLEVEIATQAGQGWRGKHTLLINREYGSYFFIGELFTDLPLPADPQQQEEHCGRCARCMTACPTGAIVAPYQVDARRCISYLTIELKGSIPLPFRSMLGNRVYGCDDCQMVCPWNRFAVNTKEADFHVRHGLDDVTLVELFAWSEADFKQKMAGSAIFRIGYEQWLRNIAVGLGNAPASPGVITALMARAGDPSEIVREHVLWALGQHGVYDTDLRPGLLLF

SEQ ID NO: 77439 - protein, 384 aa, Isobaculum melis
  misc_feature (1)..(384): tr|A0A1H9U5T8|A0A1H9U5T8_9LACT Epoxyqueuosine reductase OS=Isobaculum melis OX=142588 GN=SAMN04488559_12154 PE =4 SV=1
MITLKQQIIAESKRLGIDKIGFASAEPFYELEDSLREQRERGFHSGFEHQVIEERIYPEKTFKHPKTIISIALAYPTKIKEDIPKDEKRGMFARASWGIDYHEVLKDRLTKLIAYIQSLATEKEISKDWRFAPQVDTGELVDVAVAQRAGLGFIGRNGLLITEEFGSFVYLGEIITNIDFEIDEPVPFGCGDCTRCVTACPTKALLGNGQMNAQRCLSYQTQTKGMMPEEYRKKIRNVIYGCDICQMVCPYNKGKDFHFHQEMEPEVDTVYPKLKPMLSLSNKAFKEEFGHLSGAWRGKKPLQRNALIALANVGDRSALPDILLCAKEDVRPVIRGTAAWAIGRLGSREADKWLAALNELLQQETEEEVIVELEQAVKQLSKKK

SEQ ID NO: 77440 - protein, 391 aa, Isosphaera pallida
  misc_feature (1)..(391): tr|E8R5X0|E8R5X0_ISOPI 4Fe-4S ferredoxin-type domain-co ntaining protein OS=Isosphaera pallida (strain ATCC 436 44 / DSM 9630 / IS1B) OX=575540 GN=Isop_3310 PE=4 SV=1
MSVDDHNLSALATELKAQALGLGFDLAGIAPAVAAPGHDRLLDWLARGRAAGMTYLERHAQARGHPRSVLPEVRSILMVAASYRPRDEAAAPRTPLGSPAQPTDPPRSDASPTGRVARYARGRDYHQVIWKRLDRLAQWLKNRVPGAAARGVADTAPLPERDFARLAGLGWIGKNTMLINTRWGSYTFLGALLTNLDLPPDQPHETDHCGRCTRCLEACPTGAFPEPGVLDARRCIAYWTIEHKGPWLPDGDLEPVAPHGWLFGCDICQEVCPWNRKAPGGTLDELQPLPEWTAPVDLRELVALPPAELARRLKPTAMTRAKRSGLVRNAIHLIAEACQHIQGRAEDHLPSALADDPDPMVSATARALLAAANGVRPSTAPTEDQGRSSPA

SEQ ID NO: 77441 - protein, 360 aa, Isosphaeraceae bacterium
  misc_feature (1)..(360): tr|A0A432MPS0|A0A432MPS0_9BACT tRNA epoxyqueuosine(34) reductase QueG OS=Isosphaeraceae bacterium GM2012 OX=20 80755 GN=queG PE=4 SV=1
MSPIDRSRTVRRLAVALGFDLVGIAPAVSPPGYDHFLDWLAEGFAAGMGYLHRHAEARRHPEHVLPGVRSVVMVGLSYKPAEADPPESPRSGKVARYARGRDYHQVLWKRLGTLADRVGDAFPGSHCRAVADSAPLLERDFARLAGLGWIGKNTMLIHKQIGSYTVLGALLTDLDLEPDLPFGADHCGTCTRCLDACPTDAFAGPYRLDAGRCISYATIEHRGDLPDDLADSLHGWLFGCDICQEVCPWNRKAPPGRDPELAADPARAAPDLIDLLEADDEAIARLIRGSAMTRAKRSGMLRNAAALLAERGLSEALPALADRLEDEDPVVRAACARAMARIGNGKRAQSLGDEEGKAKQ

SEQ ID NO: 77442 - protein, 379 aa, Izhakiella australiensis
  misc_feature (1)..(379): tr|A0A1S8YRU0|A0A1S8YRU0_9ENTR Epoxyqueuosine reductase OS=Izhakiella australiensis OX=1926881 GN=queG PE=3 SV =1
MSHPLDLAQLAQQIKRWGLELGFQQVGICDTDLTPEEPRLQAWLDKQYHGEMAWMARHGMMRARPQELLPGTLRVISVRMNYLPANAAFARVLKDPQLGYVSRYALGRDYHKVLRNRLKKLGEMIQQQCEKVSFRPFVDSAPLLERPLAAKAGLGWTGKHSLILNRQAGSWFFLGELLINLPLPVDKPVEENCGRCIACMTICPTGAIVEPYTVDARRCISYLTIELEGAIPVELRPLIGNRIYGCDDCQLICPWNRYGQLSDEADFSPRARLHAPALIELFRWDEATFLRVTEGSAIRRIGHLRWLRNIAVALGNAPWDQGNLLALETRLGENPLLDEHINWAIEQQIARRSEVRIEVQRSQKQRLVRAIEKGLTRDA

SEQ ID NO: 77443 - protein, 248 aa, Izhakiella capsodis
  misc_feature (1)..(248): tr|A0A1I4VSF1|A0A1I4VSF1_9ENTR Epoxyqueuosine reductase OS=Izhakiella capsodis OX=1367852 GN=SAMN05216516_1024 0 PE=4 SV=1
MCFRPFVDSAPVLERPLAVKAGLGWTGKHSLILNREAGSWFFLGELLINLPLPVDQPAGENCGRCVACMTICPTGAIVEPYTVDARRCISYLTIELEGAIPVELRSLIGNRIYGCDDCQLICPWNRYGQLGDETGFSPRHKLHAPSLTALFRWDEATFLSVTEGSAIRRIGHLRWLRNVAVALENAPWNENNLLVQKSRLGENPLLDEHILWAIEQQITRRSENRIDVQHSQQQRLVRAIEKGLMRDV

SEQ ID NO: 77444 - protein, 380 aa, Izhakiella sp.
  misc_feature (1)..(380): tr|A0A4P8YG30|A0A4P8YG30_9ENTR Epoxyqueuosine reductase OS=Izhakiella sp. KSNA2 OX=2579935 GN=queG PE=3 SV=1
MSQPLDLNQLAQDIKQWGKALGFQHVGITDTDLSASEPALQAWLDKQYHGEMEWMARHGMMRARPHELLPGTLRVISVRMNYLPAKAGFASTLKNPSLGYVSRYALGRDYHKLLRNRLKKLGETIRGHCTSLNFRPFVDSAPLLERPLAEKAGLGWTGKHSLILSRDAGSFFFLGELLIDLPLPIDRPVKEECGRCVACITTCPTGAIVEPYVVDARRCISYLTIELEGAIPEEFRPLMGNRIYGCDDCQLICPWNRFSHLTDEADFSPRQALHAPQLVELFAWSEEKFLKVTEGSAIRRIGHLRWLRNIAVALGNAPWDPDCLAALQQRQGEHPLLDEHIDWAIARQLEKRSADAVEVRSAKQQQRLVRAIEKGLPRDA

SEQ ID NO: 77445 - protein, 328 aa, Jannaschia aquimarina
  misc_feature (1)..(328): tr|A0A0D1EBK3|A0A0D1EBK3_9RHOB QueG protein OS=Jannasch ia aquimarina OX=935700 GN=queG PE=4 SV=1
MGICGPDAIPDAAPRLARFLEDGRHGQMGWMGDRQAWRGDPRALWPDCRSVIMLAMSYAPDHDPLEDLALRDRGAISVYAAGRDYHDVIKKALKRLGRWLIDAGADLTEAGPPEIKVFVDTAPVMEKPLAQAAGLGWQGKHTNLLGRDFGNWVFLGAIFTTLDLPRDTPEAEHCGSCTRCLDICPTDAFPAPFQLDARRCISYLTIEHRGPVDKNLRPGIGNRIYGCDDCLAICPWNKFAVAAGDMRLHGPHRAPPLADLASLDDSGFRARYQGSPVKRIGRDRMVRNVSYAIGNSGDGRMIPAVQALCDDADAAVADAARWAVERLR

SEQ ID NO: 77446 - protein, 338 aa, Jannaschia donghaensis
  misc_feature (1)..(338): tr|A0A0M6YIV8|A0A0M6YIV8_9RHOB Epoxyqueuosine reductase OS=Jannaschia donghaensis OX=420998 GN=queG PE=4 SV=1
MSLRDRLDAEARAAGFVSVGVCRPGAIADAPARLKTFLDQGHHGQMAWMAERTAWRGDPTALWPAARSVVMLAHSYAPEHDPLDDLEKPAHGALSVYAQGRDYHDVVKKALKRVARWMVAEADCEVKVFVDTAPVMEKPLAQAAGIGWQGKHTNLLSRDFGNWVFLGAIFTTLDLPPDAAEGEHCGSCRKCLDVCPTDAFPAPFRLDARRCISYLTIEHRGPVDPELRGKMGNRIYGCDDCLAVCPWNKFAVQASDIRYHGPHRAPALADLAVLNDADFRTVFAGSPIKRIGRDRMVRNVCYAIGNSGQERLRPVVQDLCEDADEAVADAARWAVERL

SEQ ID NO: 77447 - protein, 338 aa, Jannaschia faecimaris
  misc_feature (1)..(338): tr|A0A1H3JEI5|A0A1H3JEI5_9RHOB Epoxyqueuosine reductase OS=Jannaschia faecimaris OX=1244108 GN=SAMN05444004_10 1290 PE=4 SV=1
MTFRGRLEAEARAAGFVSLGVCRPDAIPEAPDSLARFLEAGHHGQMGWMGERTAWRGDPASLWPEARSVVMLAHSYAPEHDPLEDLERPEHGAISVYAQGRDYHDVVKKALKRVARWMVTDAKCEVKVFVDTAPVMEKPLAQAAGLGWQGKHTNLLSRDFGNWVFLGAIFTTLDLAPDVAEGEHCGSCRKCLDICPTDAFPAPFQLDARRCISYLTIEHSGPVDMDLRARMGNRIYGCDDCLAVCPWNKFAVAASDLRYHGPHRAPDLAGLAVLDDAAFRARFSGSPIKRIGRDRMVRNVCYAIGNSGEARLKPVVQGLFDDADAAVADAARWAVGRL

SEQ ID NO: 77448 - protein, 338 aa, Jannaschia helgolandensis
  misc_feature (1)..(338): tr|A0A1H7GQQ9|A0A1H7GQQ9_9RHOB Epoxyqueuosine reductase OS=Jannaschia helgolandensis OX=188906 GN=SAMN04488526 _0476 PE=4 SV=1
MSFRVRLEAEARAAGFVSVGVCAPDAIPKAPGQLASFLDAEYHGQMTWMGERSTWRGNPAALWPEARSVVMLAHSYSPGHDPLNDLNRPEHGAISVYAQGRDYHDVVKKALKRVARWMVAEGDCEVKVFVDTAPVMEKPLAQAAGLGWQGKHTNLLSRDFGNWVFLGAIFTTLNMEPDAPEAEHCGSCRKCLDICPTDAFPAPFQLDARRCISYLTIEHRGPVDEGLRPALGNRIYGCDDCLAVCPWNKFAVEASDLRYHGPHRTPDLDELAMLDDTAFRARFSGSPIKRIGRDRMVRNVCYAIGNSRSDRLKTFVQGLCEDPDAGVSNAARWAVERI

SEQ ID NO: 77449 - protein, 338 aa, Jannaschia pohangensis
  misc_feature (1)..(338): tr|A0A1I3TB47|A0A1I3TB47_9RHOB Epoxyqueuosine reductase OS=Jannaschia pohangensis OX=390807 GN=SAMN04488095_33 69 PE=4 SV=1
MSFRARLEAEAQAAGFVALGVCRPDAIPEAPARLAAFLDAGHHGQMGWMGERTAWRGDPGALWPEARSVVMLAQSYAPEHDPLTDLERPEHGAVSVYAQGRDYHDVVKKALKRVARWMVSVADCEVKVFVDTAPVMEKPLAQAAGLGWQGKHTNLLSREFGNWVFLGAIFTTLDLEPDAPEGEHCGTCRKCLDVCPTDAFPAPFQLDARRCISYLTIEHRGPVDEGLRAAMGNRIYGCDDCLAVCPWNKFAVAASDIRYHGPHRAPPLADLAVLDDAAFRVRFSGSPIKRIGRDRMVRNVCYAIGNSGENPLKPIVQSLCDDADDAVADAARWAVGRL

SEQ ID NO: 77450 - protein, 338 aa, Jannaschia rubra
  misc_feature (1)..(338): tr|A0A0M6XQY2|A0A0M6XQY2_9RHOB Epoxyqueuosine reductase OS=Jannaschia rubra OX=282197 GN=queG PE=4 SV=1
MSLRARLEAEAREAGFVRMGVCRPDAIPDAPGRLHRFLDDGSHGQMAWMDERVAWRGDPASLWPEARSVVMLAHSYAPDHDPLDDLTRPDRGAVSVYAQGRDYHDIVKKALKRLARWMVAEAGCEVKVFVDTAPVMEKPLAQAAGLGWQGKHTNLLSRDFGNWVFLGAIFTTEVLEPDAAEGEHCGSCTKCLDICPTDAFPAPFRLDARRCISYLTIEHRGPVDATLRPALGNRIYGCDDCLAICPWNKFAVGASDMRYHGPHRAPPLEELARLDDAAFRDRFSGSPIKRIGRDRMVRNVCYAIGNSGLARLKPVAQALCDDADVAVADAARWAVDRL

SEQ ID NO: 77451 - protein, 343 aa, Jannaschia seohaensis
  misc_feature (1)..(343): tr|A0A2Y9C824|A0A2Y9C824_9RHOB Epoxyqueuosine reductase OS=Jannaschia seohaensis OX=475081 GN=BCF38_106108 PE= 4 SV=1
MKARLQAEARAAGFVAMGVCRPDAVPEAAGRLDRFLAAGRHGQMTWMGERVAWRGSAAALWPEARSVVMLAHSYAPEHDPLDDLRDPGRGAVSVYAQGRDYHDVVKKALKRVGRWLMAEAAAEDPEIKVFVDTAPVMEKPLAQAAGLGWQGKHTNLLSRDFGNWVFLGAIFTTLELEPDAPEGEHCGSCTRCLDVCPTDAFPAPFQLDARRCISYLTIEHRGPVDPDLRVGLGNRIYGCDDCLAVCPWNKFAVAASDLRYHGPHRAPDLAELAGLDDAAFRSRFAGSPIKRIGRDRMVRNVCYAIGNSGREELKPVVQALCEDEDAAVADAARWAVERLWRSS

SEQ ID NO: 77452 - protein, 339 aa, Jannaschia seosinensis
  misc_feature (1)..(339): tr|A0A0M7B966|A0A0M7B966_9RHOB Epoxyqueuosine reductase OS=Jannaschia seosinensis OX=313367 GN=queG PE=4 SV=1
MTIRARLDAEAREAGFVSVGVCRPDAIPDAGVRLRQYLADGNHGGMSWMGERVAWRGDPSALWPEARSVVMLAHSYAPEHNPMTDLSRPDRGTVSAYAQGRDYHEIVKKALKRVARWMVAEADCEVKVFVDTAPVMEKPLAQAAGIGWQGKHTNLLSREFGNWVFLGAIFTTLELAPDAAEGEHCGSCTRCLDICPTDAFPAPFQLNARRCISYLTIEHHGPVDESLRPHLGNRIYGCDDCLAVCPWNKFAVAASDLRYRGPHRAPDLADLAGLDDAGFRARFSGSPIKRIGRNRMTRNVCYAIGNSGEKRLGPVAQRLCDDADPVVADAARWAVDRLS

SEQ ID NO: 77453 - protein, 343 aa, Jannaschia sp.
  misc_feature (1)..(343): tr|Q28VS1|Q28VS1_JANSC Epoxyqueuosine reductase OS=Jann aschia sp. (strain CCS1) OX=290400 GN=queG PE=3 SV=1
MTDLKDALRTEALDAGFAKMGVCSPNAVPETAARLKAFVDAGFHGQMGWMAERMHWRGDASALWPEAKSVVMLAEPYTPDSDPLDALARKDRATISVYAQGRDYHDLVKKRLKRVGRWLLAQCPGEQIKVFVDTAPVMEKPLAQAAGLGWQGKHTNLLARDLGNWVFLGAIFTTVELPIDEPEAEHCGSCTACLDICPTNAFPAPFQLDARKCISYLTIEHKGPVDLALRAKLGNRIYGCDDCLAVCPWNKFAQTARDIRYAPRDDLRSPLLADLAALDDAGFRARFSGSPIKRIGRDRFVRNILYAIGNSGQAKLVDAARPLTDDPDVAVADAARWAMERLL

SEQ ID NO: 77454 - protein, 324 aa, Jannaschia sp.
  misc_feature (1)..(324): tr|A0A1B6Z0V1|A0A1B6Z0V1_9RHOB tRNA epoxyqueuosine(34) reductase QueG OS=Jannaschia sp. EhC01 OX=1849359 GN=A8 B78_11260 PE=4 SV=1
MGVCRPDAVPETAARLKAFVDAGHHGQMGWMAERMHWRGDASALWPEARSVVMLAEPYTPTVDPLDALEARDRATISVYAQGRDYHDLVKKRLKRVGRWLLEQAPEEQIKVFVDTAPVMEKPLAQAAGLGWQGKHTNLLARDLGNWFFLGAIFTTVDLPSDEAGKENCGSCTACLDICPTDAFPAPFQLDARKCISYLTIEHKGPVDAALRAKMGNRIYGCDDCLAVCPWNKFAQAARDIRYAPREELQSPRLADLVRLDDAGFRALFSGSPIKRIGRDRFVRNVLYAIGNSGEPALAEAARPLADDPDPAIADAARWAVERLR

SEQ ID NO: 77455 - protein, 363 aa, Janthinobacterium agaricidamnosum
  misc_feature (1)..(363): tr|A0A3G2EE46|A0A3G2EE46_9BURK Epoxyqueuosine reductase OS=Janthinobacterium agaricidamnosum OX=55508 GN=queG PE=3 SV=1
MSATTTDLAVLARTIKEWGRELGFAEVRIADVDLSHMEAPLQAWLDAGYHGEMDYMASHGMKRARPAELVPGTVRAISARMNYLPPALGPDWRAHEAARDADPAAAVISVYARGRDYHKVMRSRLQQLAERIKGEIGDFGYRVFSDSAPVMEVELAQKGGLGWRGKHTLLINRQGGSFFFLGEILIDVPLPVDPPETPRCGQCSACITVCPTQAILGPYQLDARRCISYLTIELKGAIPVEMRPLIGNKVYGCDDCQTVCPWNKFAQRAVVPDFDERHSLGSAGMVELFAWTEEEFNRRMEGSAIRRIGHERWLRNLAVGMGNAAAKARGQADIVAALLSRRAHPSAIVREHVEWALALHGIA

SEQ ID NO: 77456 - protein, 368 aa, Janthinobacterium agaricidamnosum
  misc_feature (1)..(368): tr|W0V0W3|W0V0W3_9BURK Epoxyqueuosine reductase OS=Jant hinobacterium agaricidamnosum NBRC 102515 = DSM 9628 OX =1349767 GN=queG PE=3 SV=1
MSTTEPDLIELARTIKSWGRELGFAEVRIADIDLSHQEAGLQAWLDAGYHGQMDYMASHGMKRARPAELVPGTVRVISARMNYLPPALGPDWRRDEAARQDDPAAAVISVYARGRDYHKVMRSRLQQLAERIEGEIGAFGFRVFSDSAPVMEVALAEKAGLGWRGKHTLLINRQGGSFFFLGEILVDLPLPVDSPETPRCGQCSACIAVCPTQAILGPQQLDARRCISYLTIELKGSIPLEMRPLIGNRVYGCDDCQTICPWNKFAQRAVVADFDERNGLGGSSMVALFGWTEEQFNRCMEGSAIRRIGHERWLRNLAVGMGNAAVKAKGAPDIVAALTARLDHPSEIVREHVAWALALHRSCAAGST

SEQ ID NO: 77457 - protein, 363 aa, Janthinobacterium lividum
  misc_feature (1)..(363): tr|A0A1E8PT14|A0A1E8PT14_9BURK Epoxyqueuosine reductase OS=Janthinobacterium lividum OX=29581 GN=queG PE=3 SV= 1
MSATVTDLAALARTIKEWGRELGFAEVRIADVDLSHMEAPLQAWLAAGYHGEMDYMASHGMKRARPAELVPGTVRAISARMNYLPPALGQDWRAHEAARDADPTAAVISVYARGRDYHKVMRSRLQQLAERIKGEIGDFGYRVFSDSAPVMEVELAQKGGLGWRGKHTLLINRQGGSFFFLGEILIDVPLPVDPPETPRCGQCSACITVCPTQAILGPHQLDARRCISYLTIELKGAIPVEMRPLIGNKVYGCDDCQTVCPWNKFAQRAVVPDFDERHSLGSAGMLELFAWTEEQFNRRMEGSAIRRIGHERWLRNLAVGMGNAAAKAKGQEDIVAALLSRREHPSAIVREHVEWALALHGIA

SEQ ID NO: 77458 - protein, 203 aa, Janthinobacterium lividum
  misc_feature (1)..(203): tr|A0A377RRE3|A0A377RRE3_9BURK Epoxyqueuosine reductase OS=Janthinobacterium lividum OX=29581 GN=queG_2 PE=4 S V=1
MGWRGKHTLLINRQGGSFFFLGEILIDVPLPVDPPETPRCGQCSACITVCPTQAILGPYQLDARRCISYLTIELKGAIPVEMRPLIGNKVYGCDDCQTVCPWNKFAQRAVVPDFDERHSLGSAGMVELFAWTEEEFNRRMEGSAIRRIGHERWLRNLAVGMGNAAAKAKGQADIVAALLSRREHPSAIVREHVEWALALHGIA

SEQ ID NO: 77459 - protein, 361 aa, Janthinobacterium sp.
  misc_feature (1)..(361): tr|A0A349KV74|A0A349KV74_9BURK Epoxyqueuosine reductase OS=Janthinobacterium sp. OX=1871054 GN=queG PE=3 SV=1
MPSTEPDLAALARTIKSWGAELGFAGVGIADVDLARLEPGLRAWLDAGFHGQMDYMASHGMKRARPAELVPGTVRVISARMNYLPPATLDSWRAGEAARLADPGAAVVSVYARGRDYHKVMRSRLQQLAERIRGAVGEFGFRVFSDSAPVMEVALAEKAGLGWRGKHTLLLSREAGSMFFLGEILVDLALPVDAPASPHCGQCQACITVCPTQAILGPQRLDARRCISYLTIELKGAIPEELRPLIGNRVYGCDDCQTACPWNKFAQRAPLADFDERNGLGGATMVELFAWSEDEFQRRMEGSAIRRIGHERWLRNLAVGLGNAADGDRGAPAIVAALEARRLDPSEIVREHVAWALQRHR

SEQ ID NO: 77460 - protein, 363 aa, Janthinobacterium sp.
  misc_feature (1)..(363): tr|A0A1G8AHM4|A0A1G8AHM4_9BURK Epoxyqueuosine reductase OS=Janthinobacterium sp. YR213 OX=1881027 GN=queG PE=3 SV=1
MSATVTDLAALAHTIKEWGRELGFAEVRIADVDLSHMEAPLQAWLDAGYHGEMDYMASHGMKRARPAELVPGTVRAISARMNYLPSALGPDWREHEAARDADPAAAVISVYARGRDYHKVMRSRLQQLAERIKGEIGDFGYRVFSDSAPVMEVELAQKGGLGWRGKHTLLINRQGGSFFFLGEILIDVPLPVDPPETPRCGQCSACITVCPTQAILGPYKLDARRCISYLTIELKGAIPVEMRPLIGNKVYGCDDCQTVCPWNKFAQRAVVPDFDERHSLGSAGMVELFAWTEEEFNRRMEGSAIRRIGHERWLRNLAVGMGNAATKARGQADIVAALLSRREHPSAIVREHVEWALALHGIA

SEQ ID NO: 77461 - protein, 363 aa, Janthinobacterium svalbardensis
  misc_feature (1)..(363): tr|A0A290X2F2|A0A290X2F2_9BURK Epoxyqueuosine reductase OS=Janthinobacterium svalbardensis OX=368607 GN=queG P E=3 SV=1
MSATVTDLAVLARTIKEWGRELGFAEVRIADVDLSHMEAPLQAWLDAGYHGEMDYMASHGMKRARPAELVPGTVRAISARMNYLPPALGPDWRTHEAARDADPSAAVISVYARGRDYHKVMRSRLQQLAERIKGEIGDFGYRVFSDSAPVMEVELAQKGGLGWRGKHTLLINRQGGSFFFLGEILIDVPLPVDPPETPRCGQCSACITVCPTQAILGPYQLDARRCISYLTIELKGAIPVEMRPLIGNKVYGCDDCQTVCPWNKFAQRAVVPDFDERHSLGSAGMVELFAWTEEEFNRRMEGSAIRRIGHERWLRNLAVGMGNAAAKARGQADIVAALLSRREHPSAIVREHVEWALALHGVA

SEQ ID NO: 77462 - protein, 308 aa, Jejuia pallidilutea
  misc_feature (1)..(308): tr|A0A362WZX6|A0A362WZX6_9FLAO Epoxyqueuosine reductase OS=Jejuia pallidilutea OX=504487 GN=queG PE=3 SV=1
MINNTAKYALKIKNEAKRLGFLSCGISRAAFLEDEAPRLEKWLNQNMHGEMRYMENHFDKRLDPTKLVEGSKSVVSLLLNYFPSEVQNSESYKISKYAYGTDYHFVIKDKLKSLLHFIQEEIGEVNGRAFVDSAPVLDKAWAAKSGLGWIGKHSNLLTQQVGSFYFIAELIIDLELEYDTPVTDHCGTCTACIDSCPTEAITEPYVVDGSKCISYFTIELKENIPSEFKGQFNDWMFGCDICQDVCPWNRFSKSHAEPLFNPHPELLALTKKDWEEITEDTFKKVFKKSAVKRTKFSGLKRNIKFLKE

SEQ ID NO: 77463 - protein, 308 aa, Jejuia pallidilutea
  misc_feature (1)..(308): tr|A0A090VPK9|A0A090VPK9_9FLAO Epoxyqueuosine reductase OS=Jejuia pallidilutea OX=504487 GN=queG PE=3 SV=1
MINNTAKYTLKIKNEAKRLGFLSCGISRAAFLEDEAPRLEKWLNQNMHGEMRYMENHFDKRLDPTKLVEGSKSVVSLLLNYFPSEVQNSESYKISKYAYGTDYHFVIKDKLKSLLHFIQEEIGEVNGRAFVDSAPVLDKAWAAKSGLGWIGKHSNLLTQQVGSFYFIAELIIDLELEYDTPVTDHCGTCTACIDACPTEAITEPYVVDGSKCISYFTIELKENIPSEFKGQFNDWMFGCDICQDVCPWNRFSKSHAEPLFNPHPELLAMTKKDWEEITEDTFKKVFKKSAVKRTKFSGLKRNIKFLKE

SEQ ID NO: 77464 - protein, 360 aa, Jeongeupia sp.
  misc_feature (1)..(360): tr|A0A1D9BDQ1|A0A1D9BDQ1_9NEIS Epoxyqueuosine reductase OS=Jeongeupia sp. USM3 OX=1906741 GN=queG PE=3 SV=1
MDLDKGLDVRELAASIKAWGQALGFARVAITGTDLSHAEPGLQAWLDAGFHGEMDYMARHGLKRARPAELVPGTKTVVSVFLPYRPPGVSSSEAVLADGEKAHVSRYALGRDYHKVLRNRLQKLADRIGAEIGPFGHRVFVDSAPVLEVELATQAGLGWRGKHTLLINRDYGSYFFLGELFTDLALPLDPPEENEHCGRCTKCLVACPTQAIVAPYTVDARRCISYLTIELHGAIPEEFRPMIGNRVYGCDDCQLCCPWNRFAVDTAEPDFHVRHGLDDVTLVELFAWTEDDFREKLAGSPIYRIGYARWLRNLAVGLGNAPSSPAVLAALASRADDGNALVREHVGWALSRHAALQNGP

SEQ ID NO: 77465 - protein, 383 aa, Jeotgalibaca dankookensis
  misc_feature (1)..(383): tr|A0A1S6IMD4|A0A1S6IMD4_9LACT Epoxyqueuosine reductase OS=Jeotgalibaca dankookensis OX=708126 GN=queG PE=4 SV =1
MVEMTLKEEVIAACKEIGIDKIGFTTAEPFDDLKESLLEQQSNGHSSGFEHQVLDERLYPELIFDQPKSIISIALAYPSKPLVKAEREKGVRRGSFARASWGIDYHTILRNRLDQLVAFMSEKVPTASFKAMVDTGELMDTVVAQRAGIGFIGRNGLLITEEFGSYVYLGEIITDIEFEPDQPGVFGCGDCTRCVTACPTGALLGDGRLNAQVCLSYQTQTKGSMPLEFRRKIGSVIYGCDICQQACPYNRGIDFHHHPEMEPVPGRETPILQPMLSLSNREFKETFGVLAGSWRGKKPLQRNAIIALANYRDRTAVPELLRVMEEEVRPVIRGTAAWAIGQIVRDVNPELLAFFQEKVENEEDDEARVEMEMALAKLEGDTK

SEQ ID NO: 77466 - protein, 384 aa, Jeotgalibaca sp.
  misc_feature (1)..(384): tr|A0A3Q9BL82|A0A3Q9BL82_9LACT tRNA epoxyqueuosine(34) reductase QueG OS=Jeotgalibaca sp. H21T32 OX=2496265 GN =queG PE=4 SV=1
MTNAVLKREILEACKEIGIDKIGFTTAEPFDYMKEPLLEQHAKGHTSGFEHQVLDERLYPELIFDNPKSILAIGLAYPSKPLEKPERVKGERRGSFARASWGTDYHFILRDKMDQLITFIQERVPDARFKPMVDTGELIDTVVAQRAGLGFIGRNGLLITEEFGTYVYLGEIITDIPFEPDAPGVFGCGDCMRCVTACPTGALLGNGQLNPKVCLSFQTQTKGSMPEEFRKKMGHVIYGCDICQQACPYNRGIDSHFHPEMEPEPDRETPVLQPMLTISNRDFKARFGVLAGSWRGKKPLQRNAIIALANYRDRSAVPQLLQLMEQDPRPVIRGTAAWAIGQILRDANADILDFFKERMEAEEDEEARAEMEMALVKLEELADK

SEQ ID NO: 77467 - protein, 376 aa, Jeotgalibacillus alimentarius
  misc_feature (1)..(376): tr|A0A0C2W0C8|A0A0C2W0C8_9BACL Epoxyqueuosine reductase OS=Jeotgalibacillus alimentarius OX=135826 GN=queG PE= 3 SV=1
MNYDALKQEIIDHADELGIDKIGFTSADFFSDLKGRLIRQEALNYQSGFEEKDIDKRVTPSLLMHEPKSIISIALAYPSKMKDAPRSKKGERRGVFARASWGEDYHTVLRKALERLEQFIQERVPDARMKSMVDTGELVDRAVAERAGVGWSAKNCSIITPEFGSYVYLGEMITNIPFSPNEPMEDQCGDCNLCVDVCPTGALVQGGQLDAKKCIAFLTQTKDFLPDEYRTKIGNRLYGCDTCQTVCPKNKGIDMHKHPEFEPDPEIAKPLLEPLLTISNREFKESYGHVSGSWRGKKPIQRNALIALAHFKEASALPSIFEVMQHDVRPVMRGTAAWAAGKIGGEEAEKMLLKQKELEQDEEVLKEIEKGLSLCK

SEQ ID NO: 77468 - protein, 377 aa, Jeotgalibacillus campisalis
  misc_feature (1)..(377): tr|A0A0C2VS42|A0A0C2VS42_9BACL Epoxyqueuosine reductase OS=Jeotgalibacillus campisalis OX=220754 GN=queG PE=3 SV=1
MNYRLLKQEIKDHADSLGIDKIGFTTADVFTEMKNHLIRQEQLDYQSGFEEKDINKRVDPSLIFSEPRSIIAIALAYPSKMKDSPRSVKGERRGIFARASWGTDYHEVLRDRLNKLEAFIKERVPEARFRSMVDTGELVDRAVAERAGIGWSAKNCAVITPEFGSYVYLGEMITNLPFEPDEPMNDQCGSCNKCVDVCPTGALVQGGQLDAKKCIAFLTQTKGFLPEQYRSKIGNRIYGCDTCQTVCPKNKGKDFHFHLEMEPDPEIAKPLLEPLLTISNRDFKETYGHVSGSWRGKKPIQRNAIIALAHFKEESALPSLISVMQEDVRPVIRGTAAWAVGKIGGEEAHQALLAFKDQEEDEEVLIEIQKGLSFLNN

SEQ ID NO: 77469 - protein, 376 aa, Jeotgalibacillus malaysiensis
  misc_feature (1)..(376): tr|A0A0B5AKL9|A0A0B5AKL9_9BACL Epoxyqueuosine reductase OS=Jeotgalibacillus malaysiensis OX=1508404 GN=queG PE =3 SV=1
MNYDALKQEIIDHADELGIDKIGFTSADFFSDLKGRLMRQEALNYQSGFEEKDIDKRVTPSLLMHEPKSIISIALAYPSKMKDAPRSKKGERRGIFARASWGEDYHTVLRKALERLEQFIQERVPDARMKSMVDTGELVDRAVAERAGVGWSAKNCSIITPEFGSYVYLGEMITNIPFSPDEPMEDQCGDCNLCVDVCPTGALVQGGQLDAKKCIAFLTQTKDFLPDEYRSKIGNRLYGCDTCQTVCPKNKGIDMHIHPEFEPDPEIAKPLLEPLLSISNREFKEQYGHVSGSWRGKKPIQRNALIALAHFKEASALPSIFEVMQHDVRPVMRGTAAWAAGKIGGKEAEEMLLKQKEIELDEEVLKEIDKGLSLCK

SEQ ID NO: 77470 - protein, 386 aa, Jeotgalibacillus marinus
  misc_feature (1)..(386): tr|A0A0M0KZY8|A0A0M0KZY8_9BACL Epoxyqueuosine reductase OS=Jeotgalibacillus marinus OX=86667 GN=queG PE=3 SV=1
MNVYQLKEELIEYAKSIGVDKIGFTTADTFDSLKDRLVLQESLGYLSGFEEPDIEKRVTPKLLLPKAKSIVAIALAYPSRMKDAPRSTRTERRGIFCRASWGKDYHDVLREKLDLLEEFLRSKHEDIRTKSMVDTGELSDRAVAERAGIGFSAKNCMITTPEYGSYVYLAEMITNIPFEPDVPIEDMCGSCTKCLDACPTGALVNPGQLNAQRCISFLTQTKGFLPDEFRTKIGNRLYGCDTCQTVCPLNKGKDFHLHPEMEPDPEIAKPLLKPLLTISNREFKEKFGHVSGSWRGKKPIQRNAILALAHFKDASALPELTELMHKDPRPVIRGTAAWAIGKIGDHAYAEELEKALEKEKDEEAKLEIEKGIELLKASGMTKQGLS

SEQ ID NO: 77471 - protein, 377 aa, Jeotgalibacillus proteolyticus
  misc_feature (1)..(377): tr|A0A2S5GHR2|A0A2S5GHR2_9BACL Epoxyqueuosine reductase OS=Jeotgalibacillus proteolyticus OX=2082395 GN=queG P E=3 SV=1
MDYRLLKQEIIDHANSLGIDKIGFTTADVFTEMKNHLIRQEQLGYQSGFEEKDIEKRVDPSLIFSEPRSIIAIALAYPSRMKNPPKSVKGARRGIFARASWGTDYHTVLRDRLSKLEAFIQERVPEARFRSMVDTGELADRAVAERAGIGWSAKNCAVITPEFGSYVYLGEMITNLPFEPDEPMQDQCGSCNKCVDACPTGALVQGGQLNAQKCIAFLTQTKGFLPDEYRSKIGNRIYGCDTCQTVCPKNKGKDFHFHREMEPDGEIAKPLLEPLLMMSNREFKETFGHISGSWRGKKPIQRNAIIALAHFKEEQSLPVLIEVMNNDPRPVIRGTAAWAVGKIGGSKAKDALLEFKEKEKEGDVLQEIEKGLSFLNN

SEQ ID NO: 77472 - protein, 376 aa, Jeotgalibacillus salarius
  misc_feature (1)..(376): tr|A0A4Y8L4X8|A0A4Y8L4X8_9BACL Epoxyqueuosine reductase OS=Jeotgalibacillus salarius OX=546023 GN=queG PE=3 SV =1
MNYDVLKQEIIDHAEELGIDKIGFTSADFFSDLKSRLIRQEALNYQSGFEEKDINKRVTPSLLMNEPKSIISIALAYPSKMNGAPRSKKGERRGVFARASWGEDYHTVLRNALERLEDFIKERVPDARFKSMVDTGELADRAVAERAGVGWSAKNCSIITPEFGSYVYLGEVITNLPFSPDESMEDQCGECNLCVDVCPTGALVQGGQLDAKRCIAFLTQTKDFLPDEYRSKIGNRLYGCDTCQTVCPKNKGIDMHTHPEFEPDPEIAKPLLEPLLTISNREFKEKYGHVSGSWRGKKPIQRNALIALAHFKEESALPSIFEVMQNDVRPVLRGTAAWAAGKIGGKEAEEMLLKQKDIEKDEEVLIEIEKGLSLCK

SEQ ID NO: 77473 - protein, 375 aa, Jeotgalibacillus soli
  misc_feature (1)..(375): tr|A0A0C2VCR1|A0A0C2VCR1_9BACL Epoxyqueuosine reductase OS=Jeotgalibacillus soli OX=889306 GN=queG PE=3 SV=1
MDYTTLKQEIIDHSKSLGIDKIGFTTANLFTELKNHLIRQEQLGYQSGFEEKDINKRIDPSLIFDHPRSIISIALAYPSKMKDAPRSVKGARRGIFARASWGTDYHTVLRDRLTRLEAFIKERVPEARFKSMVDTGELSDRAVAERAGIGWSAKNCAVITPEFGSYVYLGEMISNLPFEPDEPMEDQCGSCNKCVDACPTGALVQGGQLNSQKCIAFLTQTKGFLPDQYREKLGNRIYGCDTCQTVCPKNKGKDFHFHLEMEPDGEIAKPLLEPLLTMSNKEFNETFGHVSGSWRGKKPIQRNAIIALAHFKEESAVPTLIDIMKNDVRPVIRGTAAWAIGKIGGAEASDALIVQHRHEKDEEVLEEIKKGLAFF

SEQ ID NO: 77474 - protein, 379 aa, Jeotgalibacillus sp.
  misc_feature (1)..(379): tr|A0A4Y8KS79|A0A4Y8KS79_9BACL Epoxyqueuosine reductase OS=Jeotgalibacillus sp. R-1-5s-1 OX=2555897 GN=queG PE =3 SV=1
MNYDVLKQEILDHAKSLGIDKIGFTSAGYFSELKNRLIRQQELDYQSGFEEPDVDKRTDPSLLLSEPRSIISIALAYPSKMKDAPRSKAGERRGIFARASWGEDYHTVLRDRLERLEHFIKERVPHARFKSMVDTGELVDRAVAERAGIGWSAKNCSIITPEYGSYVYLGEMITNLPFTSDQPMEDQCGTCNICVDVCPTGALVQGGQLDSKKCIAFLTQTKGFLPDEYRTKIGNRLYGCDTCQTVCPKNKGIDLHLHEEFEPEPELTKPLLEPLLTISNRDFKEKYGHMSGSWRGKKPIQRNALIALAHFKETSALPAILTVLNEDVRPVMRGTAAWAAGKIGGVEAEEALLKQKTVEKDQDVLNEIEKGLQLLKKES

SEQ ID NO: 77475 - protein, 377 aa, Jeotgalibacillus sp.
  misc_feature (1)..(377): tr|A0A4R5XUM2|A0A4R5XUM2_9BACL Epoxyqueuosine reductase OS=Jeotgalibacillus sp. S-D1 OX=2552189 GN=queG PE=3 S V=1
MDYRLLKQEIIEHAASLGIDKIGFTTADVFTEMKNHLIRQEQLGYQSGFEEKDINKRVDPSLTFSEPRSIIAIALAYPSKMKDAPKSIKGARRGIFARASWGTDYHTVLRDRLSKLEAFIQKRVPKARFRSMVDTGELADRAVAERAGIGWSAKNCAVITPEFGSYVYLGEMITNLPFEPDEPMQDQCGTCNKCVDACPTGALVQGGQLNAQKCIAFLTQTKGFLPDEYRNKIGNRIYGCDTCQTVCPKNKGKDFHFHREMEPDGEIAKPLLEPLLTISNREFKEKFGHVSGSWRGKKPIQRNAIIALAHFKEESALPALIGVMSEDVRPVIRGTAAWAAGKIGGDQAKEALLKRRLEEKDEEVLAEIEKGLSFLKN

SEQ ID NO: 77476 - protein, 376 aa, Jeotgalicoccus halophilus
  misc_feature (1)..(376): tr|A0A1G9CRC0|A0A1G9CRC0_9STAP Epoxyqueuosine reductase OS=Jeotgalicoccus halophilus OX=586411 GN=SAMN05216187 _11030 PE=4 SV=1
MDRREFKNRIIEYAHSIGIDDIGFTTAEPFTEFKAKLIDYYKNGYESGFETGTIEERTNPKASLPNAKSIISIAVGYPNKLRNAPKSKQGERRGIFARASWGMDYHTLLRSRLEKLEAYIKQLDPDIDCKSMVDTGVLSDREVARRSGLGFVGKNGFVINPKLGTYSYLGEMIVSYPFPADEELLDSCGDCNICVDRCPTGALVGDGQLDSKKCISFLTQTKGFMPVEYRSKIGNRLYGCDTCQQVCPRNRGINTEHHEDIVLEPEILKPELTSLLQISNRDFKETYGHLAGVWRGKKPIQRNAIIALAHFKERSALDILKSVAETDMRPVIKGTAYWAIGQIAGDEALDYIHERYGIETDDDVKKEMLLGIQEVS

SEQ ID NO: 77477 - protein, 376 aa, Jeotgalicoccus halotolerans
  misc_feature (1)..(376): tr|A0A3E0B2U3|A0A3E0B2U3_9STAP Epoxyqueuosine reductase OS=Jeotgalicoccus halotolerans OX=157227 GN=DFR63_0212 PE=4 SV=1
MDRHEFKERVIEYAHTIGIDDIGFTTAEPFTEFKAKLIDYYKNGYESGFETGTIEERTNPKASLANAESIVSIAVGYPNKLRNAPKSKQGERRGIFARASWGMDYHTLLRTRLEKLEAFIKELDPSIDCKSMVDTGVLSDREVARRSGLGFAGKNGFIINPKLGTYSYLGEMIVSYPFPADEELLDSCGDCNICVDRCPTGALVGNGQVDSKKCISFLTQTKGFMPVEYRSKIGNRLYGCDTCQQVCPRNRGINTEHHEDIVLEPEILKPELTSLLQISNREFNETYGHLAGVWRGKKPIQRNAIIALAHFKETAAIDILKQVAETDVRPVIKGTAYWAIGQISGDEALDYIYERYGIETDDDVKKEMLMGIQEAS

SEQ ID NO: 77478 - protein, 376 aa, Jeotgalicoccus nanhaiensis
  misc_feature (1)..(376): tr|A0A4Y9HJ54|A0A4Y9HJ54_9STAP tRNA epoxyqueuosine(34) reductase QueG OS=Jeotgalicoccus nanhaiensis OX=568603 GN=queG PE=4 SV=1
MDRHEFKKRVIEYAHTIGIDDIGFTTAEPFTEFKAKLIDYYKNGYESGFETGTIEERTNPKASLANAKSIVSIAVGYPNKLRNAPKSKQGERRGIFARASWGMDYHTLLRTRLEKLEAFIRELDPSIDCKSMVDTGVLSDREVARRSGLGFSGKNGFIINPKLGTYSYLGEMIVSYPFPADEELLDSCGDCNICVDRCPTGALVGNGQVDSKKCISFLTQTKGFMPMEYRSKIGNRLYGCDTCQQVCPRNKGINTEHHEDIVLEPEILKPELTSLLQISNREFNKTYGHLAGVWRGKKPIQRNAIIALAHFKETAAIDILKQVAETDVRPVIKGTAYWAIGQISGDEALDYIYERYGIETDDDVKKEMLMGIQEAS

SEQ ID NO: 77479 - protein, 376 aa, Jeotgalicoccus saudimassiliensis
  misc_feature (1)..(376): tr|A0A078M4P9|A0A078M4P9_9STAP Epoxyqueuosine reductase OS=Jeotgalicoccus saudimassiliensis OX=1461582 GN=queG PE=4 SV=1
MDRHEFKRRVIEYAETIGIDDIGFTTAEPFTEFKAKLIDYYKNGYESGFETGTIEERTNPKASLPNAQSIISIAVGYPNKLRNAPKSKKGERRGIFARASWGTDYHTLLRKRLEKLEAFIKELDPSVDCKSMVDTGVLSDREVARRSGLGFTGKNGFVINPKLGTYSYLGEMIVSYPFPADEELLDSCGDCNICVDRCPTGALVGNGQVDSQKCISFLTQTKGFMPVEYRSKMGNRLYGCDTCQQVCPRNKGINTEHHEDIVLEPEILKPELTGLLQISNKEFKETYGHLAGVWRGKKPIQRNAIIALAHFKEEGAVDILKTVAETDVRPVIKGTAYWAIGQIAGDGALEYIYERYGIETDADVKKEMLMGIQEAG

SEQ ID NO: 77480 - protein, 376 aa, Jeotgalicoccus sp.
  misc_feature (1)..(376): tr|A0A358JTM5|A0A358JTM5_9STAP tRNA epoxyqueuosine(34) reductase QueG OS=Jeotgalicoccus sp. OX=1871619 GN=queG PE=4 SV=1
MDRHEFKKRIIEYAHSIGIDDIGFTTAEPFTEFKAKLIDYYKNGYESGFETGTIEERTNPKASLPNAKSIISIAVGYPNKLRNAPKSKQGERRGIFARASWGMDYHTLLRSRLQKLETFINELDPSVDCKSMVDTGVLSDREVARRSGLGFAGKNGFIINPKLGTYSYLGEMIVSYPFPADEELLDSCGDCNICVDRCPTGALVGDGQLDSKKCISFLTQTKGFMPMEYRSKIGNRLYGCDTCQQVCPRNKGINTEHHEDIVLEPEILKPELTGLLQISNKEFKETYGHLAGVWRGKKPIQRNAIIALAHFKETAAIDILKTVAETDVRPVIKGTAYWAIGQISGDAALDYIYERYAIETDDDVKKEMLTGIQEAS

SEQ ID NO: 77481 - protein, 343 aa, Jhaorihella thermophila
  misc_feature (1)..(343): tr|A0A1H5XKL2|A0A1H5XKL2_9RHOB Epoxyqueuosine reductase OS=Jhaorihella thermophila OX=488547 GN=queG PE=3 SV=1
MDELKKRLVARALEEGFVDVGICRPWAVPEVAERLAAFVAAGRHGQMRWMAERMAWRGNPAALWPEARSVIMLAESYTPAEDPMAVVGRPGRGAISVYARNRDYHDIVKKRLKRLARWLIAEAGGEVKVFVDTAPVPEKPLGQAAGIGWQGKHTNLVSRRWGNWAFLGAVFTTLELPVDPPEQDHCGSCRACLAACPTDAFPAPYQLDARRCISYLTIEHDGPVGEPLREKLGNRIYGCDDCLAACPWNKFAVTASDMRYAARDALRAPRLRELAALDDVGFRAMFSGSPIKRIRRGRFVRNVLYAIGNSGDPELRSAAQALVGDDDPVVADAARWAVKRLSG

SEQ ID NO: 77482 - protein, 385 aa, Jiella sp.
  misc_feature (1)..(385): tr|A0A4Y8RPW5|A0A4Y8RPW5_9RHIZ Epoxyqueuosine reductase OS=Jiella sp. CBS5Q-3 OX=2558362 GN=queG PE=3 SV=1
MTAAALATLKDFAREDAARLGFAALGVADASGNLLASGRLEEFVEKGRHGTMGWMPETLDRRRSPMDLWPGVRSILVLAMNYGPDEDPLEILERPDRGAISVYARHRDYHDVIKGRLKELAGRLVARARQSGLGEHDAKVFVDTAPIMEKPLGELAGLGWQGKHTNLLSRDFGSWLFLGSIFTTLDLPPDEAGDDRCGSCRACLDACPTDAFPAPYQLDARRCISYLTIETKAVIPREFRTAMGNRIYGCDDCLAVCPWNKFAQAASEAKLVAREELKAPKLDQLLGLDDAAFRALFSGSPIKRIGRDKFVSNCLIAAGNSGLSALLAPVVARLGDAAPLVRAMAVWALWRLDRGEALRLSSAALDNEKDETVRSEWHALEEGKV

SEQ ID NO: 77483 - protein, 310 aa, Jiulongibacter sediminis
  misc_feature (1)..(310): tr|A0A0P7CA09|A0A0P7CA09_9BACT Epoxyqueuosine reductase OS=Jiulongibacter sediminis OX=1605367 GN=queG PE=3 SV =1
MSRASQYSKLIKAKAKELGFDFCGISKADFLEEQAPRLEDWLKRNYHGEMAWMANHFDKRLDPTKLVPGAKSVISVMLNYYPSKRLPEGGEDFKISKYAYGTDYHFVVKDKLKQLFTFIHKEIGAVEGRIFTDSAPVMDKVWAEKSGLGWIGKHSNLLNRQSGSFFFLGEIICDLELEPDGPVKDYCGTCTACLDACPTDAITGPYVVDGSKCISYYTIELKDAIPEEAKGKMENWIFGCDICQDVCPWNRFSKPHQIEEFELKDGLVEMSKKDWEEITEEVFKELFKKSPIKRTKLQGLKRNIEFVKKA

SEQ ID NO: 77484 - protein, 309 aa, Joostella marina
  misc_feature (1)..(309): tr|I3C524|I3C524_9FLAO Epoxyqueuosine reductase OS=Joos tella marina DSM 19592 OX=926559 GN=queG PE=3 SV=1
MTVKEKHTALIKTEAKRLGFLSCGISKADFLEEEAPRLEKWLKNNMHGEMQYMENHFDKRLDPRLLVEGSKSVISLLLNYFPSQTQQDPEAPKISKYAYGTDYHFVIKDKLKQLLTFIETEIGEVGGRAFVDSAPVLDKAWAAKSGLGWVGKNSNLLSKQVGSFFFIAELIVDLELEYDAPVTDHCGSCTACIDACPTEAITEPYVVDGSKCISYFTIELKDQIPTEFSGKFDDWMFGCDVCQDVCPWNRFSKPHNEPLFNPNPELLSMSKKDWEEITQEVFSEIFKKSPVKRTKFAGLKRNIEFLKDK

SEQ ID NO: 77485 - protein, 378 aa, Kaistia algarum
  misc_feature (1)..(378): tr|A0A2S5TWY3|A0A2S5TWY3_9RHIZ Epoxyqueuosine reductase OS=Kaistia algarum OX=2083279 GN=queG PE=3 SV=1
MSEADALRQKDLLVQDALSEGFSVVRVTTPDAIPFAAERLHRALEDGHHATMGWMTDHEDRRGNPRVLWPDVRSIVMLGMNYGPDEDPRALLERADRGAISVYARNRDYHDVIKGRLKLIAGRLAARTGAEVKVFVDTAPVMEKPLAEAAGLGWQGKHTNLVSREFGSWLFLGSIFTALELPPDEAEADHCGSCRACLAACPTDAFPAPYRLDARRCISYLTIEHAGPIPQEFRAAMGNRIYGCDDCLAACPWNKFAQSASEMKLKARDDLLAPELAELAGLDDAAFRTRFAGSPVKRIGRDRFVRNVLIAIGNSERLELVKVVLARLDDASPLVRGAAVWALGRLALERWEVERDARVDAETHVSVRAEWARAQPVT

SEQ ID NO: 77486 - protein, 398 aa, Kaistia soli
  misc_feature (1)..(398): tr|A0A1M5D3L2|A0A1M5D3L2_9RHIZ Epoxyqueuosine reductase OS=Kaistia soli DSM 19436 OX=1122133 GN=queG PE=3 SV=1
MNEAGLLAEKARLVADAAGEGFDALRITTPDAIPEAAGRLSTFLADGHHASMDWMAETEARRADPRILWPDVRAVIMLGLNYGPESDPRAILEQRDRGAISVYAQNRDYHDVIKGKLKLLAGRLAARTGAEVKVFVDTAPLMEKPLAARAGLGWQGKHTNLVSREFGSWLFLGAILTALPLPPDSSERDHCGSCRACLDACPTSAFPAPYRLDARRCISYLTIEHAGPIPEEFRAAMGNRIYGCDDCLAACPWNKFARAGAEMKLKARPDLQAPRLADLAALDDQAFRALFSGSPVKRIGRDRFVRNVLIAIGNSADSSLAPAVLARLDDEAAVVRGAAVWALGRLSPERAREEWMTRKGRERDAAVIDEWIALSRLAADDATEQERHDQDPAPPRSS

SEQ ID NO: 77487 - protein, 379 aa, Kaistia sp.
  misc_feature (1)..(379): tr|A0A1E4BJ41|A0A1E4BJ41_9RHIZ Epoxyqueuosine reductase OS=Kaistia sp. SCN 65-12 OX=1660103 GN=queG PE=3 SV=1
MTPKQLAAEKARLVADARAEGFDAVRIAAPDAIPLAPERLAAFLAEGHHGSMAWMEETAERRADPRVLWADVRSVVMLGMNYGPETDPRALLGERDRGNISVYARNRDYHDIIKGKLKLLAGRLASRTGAEVKVFVDTAPVMEKPLAAASGLGWQGKHTNLVSREYGSWLFLGSIFTALDLPLDAPERDHCGTCRACLDACPTKAFPAPYRIDARRCISYLTIENAGPIPREFRAAMGNRIYGCDDCLAACPWNKFARAASEMKLQPRPELERPALADLAALDDSGFRAFFAGSPVKRIGRDRFVRNVLVAIGNSHDPALLPAVRTLLQDPAPVVRGAAVWALSRLAPDEFEALRPGSTLREPDEAVKEEWRAQGPAIG

SEQ ID NO: 77488 - protein, 387 aa, Kaistia sp.
  misc_feature (1)..(387): tr|A0A1E4CSZ9|A0A1E4CSZ9_9RHIZ Epoxyqueuosine reductase OS=Kaistia sp. SCN 65-12 OX=1660103 GN=queG PE=3 SV=1
MRTSISDPLKLRALIDREAESSGFDVVAVTTPDAIPLAPARLAEFVDAGFHGSMGWIAETLERRSSPSALWPEVRSIVVLAMNYAPDHDPREILARKASGAISVYARNRDYHDVMKGRLKEIAGKIVARAGGDVKVFVDTAPVMEKPLAGAAGLGWQGKHTNLVSRQHGSWLFLGSIFTTAELVPDVPESDHCGSCRACLDACPTNAFPAPYKLDARRCISYLTIENKGPIPHEFRQAIGNRIYGCDDCLSACPWNKFAHTAHEAKLAAREDLRDPPLAELLSLDDAAFRGFFSGSPVKRIGRDRFLRNVLIAAGNSGDGLLAGRVRELAADPAPLVRGAAVWALSQLLPSRQFADLAGEMLPGESDEDVRGEWRAAMSGIETEASA

SEQ ID NO: 77489 - protein, 379 aa, Kalamiella piersonii
  misc_feature (1)..(379): tr|A0A3A9IQD8|A0A3A9IQD8_9GAMM Epoxyqueuosine reductase OS=Kalamiella piersonii OX=2364647 GN=queG PE=3 SV=1
MSYPLDLHQLAQQIKQWGKDLGFQQVGITDTDLSAEEPRLQAWLDKQYHGEMEWMARHGMMRARPHELLPGTLRVISVRMNYLPAKAAFASTLKNPQLGYVSRYALGRDYHKVLRNRLKKLGEMIQEKCGELNFRPFVDSAPVLERPLAAKAGLGWTGKHSLILNREAGSWFFLGELLIDLPLPIDAPQEEQCGRCVACMTICPTNAIVEPYVVDARRCISYLTIELEGAIPEALRPLMGNRIYGCDDCQLICPWNRYGQLSDETDFSPRAALHAPELMTLFQWDEKTFLRVTEGSAIRRIGHLRWLRNIAVALGNAPWRAEIAEVLKKRLGENPLLDEHIEWALVQQQEKRQALSIDVQPAQQKRLVRAIEKGLPRDA

SEQ ID NO: 77490 - protein, 390 aa, Kangiella koreensis
  misc_feature (1)..(390): tr|C7R9Q7|C7R9Q7_KANKD Epoxyqueuosine reductase OS=Kang iella koreensis (strain DSM 16069 / KCTC 12182 / SW-125 ) OX=523791 GN=queG PE=3 SV=1
MVNSKPPEMPLTDQQLEQIKQTAVKLAKQHGFQDLRVSDTNTSGYFERFKQWVDDGYHGCMSFLERNQELRQNPAELHPNSCRVLSLRFDYLNDNASFTTPLKDKSIANISRYALGRDYHKLMRKRLQQVIEELKSTLNDELDIDYRVFVDSAPVLETAFAEKSGLGWKGKHTLIINKDAGSWFFLGEIFINLPLPVDEPGEDMCGGCTSCITLCPTNAILDDRKIDARRCISYLTIENQGAIPEELRPLMGNRIYGCDDCQLACPWNRYSKQTQIDDFSPRHNLHTISLETLWGWDEQEFLDNFQGSPIRRIGYQNWLRNLAVAIGNSKQPAMIEPLKAKYEDANEMVQEHIDWAIDQLSNPYKTDTSTIDKKTQKLIHCVTVMLPRDA

SEQ ID NO: 77491 - protein, 382 aa, Kangiella profundi
  misc_feature (1)..(382): tr|A0A2K9AQK2|A0A2K9AQK2_9GAMM Epoxyqueuosine reductase OS=Kangiella profundi OX=1561924 GN=queG PE=3 SV=1
MPLTDLQLEQIKHTAVKLAKQHGFQDLRVSDTDTGGYFERFKQWVDDGYHGCMSFLERNQELRQNPAELHPNTCRVLSLRFDYLNNNASFTTPLKDKTLANISRYALGRDYHKLMRKRLQMVIEDLKSKLNDEPNLDYRVFVDSAPVLETAFAEKAGLGWKGKHTLILNKDAGSWFFLGEIFINLPLPVDEPVEDLCGSCSSCINLCPTDAIIDNKKIDARRCISYLTIENQDAIPEELRPLMGNRIYGCDDCQLACPYNRFANHTNIDDFSPRHNLHNISLATLWEWDEQTFLENFQGSPIRRIGYQNWLRNLAVAIGNSKQSDMIEPLKAKYKVANEMVREHIDWAIEQLNNLEDNETSIIDKKTQKLINCVTVMLPQDA

SEQ ID NO: 77492 - protein, 380 aa, Kangiella sp.
  misc_feature (1)..(380): tr|A0A2G2LB26|A0A2G2LB26_9GAMM Epoxyqueuosine reductase OS=Kangiella sp. OX=1920245 GN=queG PE=3 SV=1
MIDLTDIKISLLDEINKEGFQQAGISTTDTSPYFESFAKWVSEGFNGQMDYLNRNQDLREFPAKLHANTCRVISLRYDYLPENPRFNQVLEDQNLANISRYALGRDYHKLIRKKLSRLCKRLSNICNSENNIELDYRVFVDSAPVLETSFAEKSGLGWKGKHTLVINKDAGSWFFLGEIFINLPLPIDESVENLCKDCVACLSICPTQAIIAPYKVDARRCISYLTIENKGAIPVEFREMIGNRVYGCDDCQLICPWNRYAISNVNNDFESRNNLDSSSLLSLLAWDEKNFLSNFEGSPIRRIGYQSWLRNLAVAIGNSPASKANIDALLYKQKDANEMASEHFDWAINLQNTHLIDDKREHKRNRKLIRTIKKLMPNHV

SEQ ID NO: 77493 - protein, 374 aa, Keratinibaculum paraultunense
  misc_feature (1)..(374): tr|A0A4R3KZ37|A0A4R3KZ37_9CLOT Epoxyqueuosine reductase OS=Keratinibaculum paraultunense OX=1278232 GN=EDD65_1 0370 PE=4 SV=1
MNLKQFIIDKAKELNIDLIGFTDCEPLDDLKDYLIMRKLKNMEIEFEEKDIEKRINPKLILPSCKTIIVIAMSYNNDFNYVSEYELKGKVSRSSWGLDYHVVLEDRLEKLIMEIKKNKEFNYKYYVDTGPLIERELARKAGIGYYGKNCSIINDEYGSFIFIGYILTDIDIPINSPILGSKCGDCNLCIKACPTGALERPFRFNPKKCISYLTQTKMDIPYELREKMGTSIYGCDICQLACPKNKGVKKPNHKEFLPNKGYIDIKELLSMSNREFKKEYGSMAGAWRGKNILKRNAIIALGNIKNKNTLDLLIPLLEDASPMIREYVAWAILNIDFEFGRELVEKQLKKEENQLMKRKMENILNYYLTRIDNNY

SEQ ID NO: 77494 - protein, 382 aa, Ketobacter alkanivorans
  misc_feature (1)..(382): tr|A0A2K9LNB4|A0A2K9LNB4_9GAMM Epoxyqueuosine reductase OS=Ketobacter alkanivorans OX=1917421 GN=queG PE=3 SV= 1
MGGSLHYFCVLSESLLIPQAHTLSYDAGCNLNYQELANNIKQWGQELGFQQIAIADVALNEHEEHLQNWLAAGFHGEMNYMARHGTKRSRPDELQPGTVRVISARMDYLPPDTQIVEVLNDASKAFISRYTLGRDYHKLIRKRLTQLGKRVEDAIGHYGYRAFVDSAPVLEKALAEKAGLGWIGKHTLLLDRSAGSWFFLGEIYVDIPLPVDEPVSAHCGKCSACIDICPTQAIVAPYRLDSRKCISYLTIELHGPIPEALRKPMGNRVFGCDDCQLVCPWNRFAKFTQEDDFKPRHQLQDRTLVELFMWDEETYLRNTEGSAIRRIGYQRWLRNLAVGLGNAPSTPDVIAALQARAHHESELVREHVCWALTQHTGAAKTE

SEQ ID NO: 77495 - protein, 366 aa, Ketobacter sp.
  misc_feature (1)..(366): tr|A0A3L8B821|A0A3L8B821_9GAMM Epoxyqueuosine reductase OS=Ketobacter sp. OX=2083498 GN=queG PE=3 SV=1
MTRISPLDLQALAQQIKDWGQALGFQQIAIADVHLGEHEAHLQRWLAAGFQGEMDYMARHGHKRSRPAELQPGTVRVITARMDYLPPDTAIVDVLQDASKAFISRYTLGRDYHKLIRKRLTQLGRQIEEQIGPFGYRAFVDSAPVLEKALAEKSGLGWIGKHTLLLDRSAGSWFFLGEIFVDIPLPVDPPVRGHCGTCNACMEVCPTQAIVAPYQLDARKCISYLTIELHGPIPEPLRAPMGNRVFGCDDCQLVCPWNRFARYTQEADFLPRHQLQDRSLVELFLWDEATYLQKTEGSAIRRIGYPRWLRNLAVGLGNAPSSEAVIKALWSRAQHPSELVREHVHWALARHGQVPESAAPDPNDQG

SEQ ID NO: 77496 - protein, 348 aa, Ketobacter sp.
  misc_feature (1)..(348): tr|A0A3F2V777|A0A3F2V777_9GAMM Epoxyqueuosine reductase OS=Ketobacter sp. OX=2083498 GN=queG PE=3 SV=1
MDYQQLVNNIKLWGSELGFQKTAIADIRLDQHEHYFQKWLDQGFHGEMEYMARHGTKRSRPHELQPDTIRVISARMDYLAADTELLQILEDPDKAYISRYALGRDYHKLMRKRLTRLGKRIEEEIGPYGYRAFVDSAPVLEKALAEKAGLGWIGKHTLLLDRSAGSWFFLGEIYTDLPLPVDQPVTQHCGSCSACIDVCPTQAIVAPYQLDARKCISYLTIELHGPIPEAYRKPMGNRVFGCDDCQLVCPWNRFAQFTAEDDFNPRHRLQNSDLVELFCWDEQTYLARTEGSPIRRIGYERWLRNLAIGLGNAPTSEAVLKALRTRTNYPSALVQEHVQWALQQHRAH

SEQ ID NO: 77497 - protein, 347 aa, Ketogulonicigenium robustum
  misc_feature (1)..(347): tr|A0A1W6P155|A0A1W6P155_9RHOB Epoxyqueuosine reductase OS=Ketogulonicigenium robustum OX=92947 GN=queG PE=3 S V=1
MPTSTSETLKQRLHAEALSAGFVAMGICRPDSVRKDGEGLRAFVAEGLHGEMQWLEDRIDWRADPTALWPEARSVIMLAESYAPTYNPLSALEDPTRGAISVYAQGKDYHDLVKKRLKRVGRWLIEQAPGSEIKVFVDTAPVMERPLAREAGLGWTGKHGCILSRNFGNWVFLGCIFTTLELEPDAPVRPSCGSCTSCLDICPTQAFIGPGRLDPRKCVSYLTIESSQPVPLELRSKMGNRIYGCDDCLAICPWNKFAVAASDARYHGDVGNPPLAELAQLDDTSFRARFSGSPIKRIGVNKFLRNVMYAIGNSARPELIPSAQAHVLADDPVLRDAAQWAVARLRG

SEQ ID NO: 77498 - protein, 338 aa, Ketogulonicigenium vulgare
  misc_feature (1)..(338): tr|F9YA50|F9YA50_KETVW Methionine sulfoxide reductase A OS=Ketogulonicigenium vulgare (strain WSH-001) OX=7593 62 GN=KVU_1622 PE=4 SV=1
MKARLKAAALDAGFVAMGICRPDSIRKDGDGLRAFVADGMHGEMQWLEDRIDWRADPTALWPQARSVIMLAESYAPTYNPLDALEDPARGAISVYAQGKDYHDLVKKRLKRVGRWLIEQAPGSEIKVFVDTAPVMERPLAREAGLGWTGKHGCILSRDFGNWVFLGCIFTTLDLEPDQPVRPSCGSCTACLDICPTQAFIGPGRLDPRKCVSYLTIEHSGPVPLDLRGKLGNRIYGCDDCLAICPWNKFAVEASDIRYHGDVGNPPLDELAGLDDTSFRARFSGNPIKRIGVNRLLRNVMYAIGNSGKPHLRASAQRHLNAEDPVLRDAAEWAVARLS

SEQ ID NO: 77499 - protein, 338 aa, Ketogulonicigenium vulgare; identical to SEQ ID NO: 77498
  misc_feature (1)..(338): tr|E3F1W4|E3F1W4_KETVY 4Fe-4S ferredoxin, iron-sulfur c luster binding protein OS=Ketogulonicigenium vulgare (s train Y25) OX=880591 GN=EIO_2056 PE=4 SV=1

SEQ ID NO: 77500 - protein, 379 aa, Kiloniella litopenaei
  misc_feature (1)..(379): tr|A0A0M2REH6|A0A0M2REH6_9PROT Epoxyqueuosine reductase OS=Kiloniella litopenaei OX=1549748 GN=queG PE=3 SV=1
MSKKSKQSSASLLDPASAIREKALELKFNTVGFSPAKINEKNQKNLRTFLDLGYHGDMAWMENRIEWREDPTAMWEDAKSIIVLGVNYGPAEPALANLDFDDRGNISVYARNKDYHDFIKKRLKALARWMVENLGCQVKVFVDTAPVLEKVAAAQSGIGWQGKNTHLVSREYGSWLFLGEIYTDLDLKTDRHEEDHCGSCNKCLSICPTDAFPSPYVLDAKRCISYLTIEYHGHIAEEFRAPMGNRIYGCDDCIAICPWNKFAEVTTEEHVFPRIELTAPRLADLAELDDATFRQVFSGSPVKRIGRDRFIRNVLIGIGNCGDKSIVKRITPLLKDSSPYVRAMAVWAMKRLLDKQEFEDLKLEYKDDEPDADVLVEWL

SEQ ID NO: 77501 - protein, 379 aa, Kiloniella spongiae
  misc_feature (1)..(379): tr|A0A0H2MHL9|A0A0H2MHL9_9PROT Epoxyqueuosine reductase OS=Kiloniella spongiae OX=1489064 GN=queG PE=3 SV=1
MSKKSNKSSTSLLDPALAIRQKALELKFDTVGFSPAKINEKNQQNLRTFLDLGYHGDMEWMENRIEWREDPTAMWEDAKSIIVLGVNYGPAEPALANLQFDDRGNISVYARNKDYHDFIKKRLKALARWMVENLECQVKVFVDTAPVLEKVAAAQSGIGWQGKNTHLVSREYGSWLFLGEIYTDLDLKTDRHEEDHCGSCNKCLSICPTDAFPSPYVLDAKRCISYLTIEYHGHIAEEFRAPMGNRIYGCDDCIAICPWNKFAEVTSEEHVFPRIELTAPRLADLAELDDATFRQVFSGSPVKRIGRDRFIRNVLIGIGNSGDKSIAKRIMPLLKDTSPYVRAMAVWAMRRLLDKQEFEDLKLEHKNDEPDVNVLDEWQ

SEQ ID NO: 77502 - protein, 365 aa, Kinneretia asaccharophila
  misc_feature (1)..(365): tr|A0A4R6N3A3|A0A4R6N3A3_9BURK Epoxyqueuosine reductase OS=Kinneretia asaccharophila OX=582607 GN=queG PE=3 SV =1
MQQLRAWARELGFSQIGVADIDLASAEPGLLAWLEAGFHGEMHYMAAHGLKRARPAELVPGTLRVLTARMDYRPANSPEDWQAIEWQGLGTPRRAQVSLYARGRDYHKVLRARLQLLADKLAQAIGPFGHRVFTDSAPVLEVELASRSGIGWRGKHTLTLHREHGSMFFLGEIYLDLPLPLSEPVSAHCGQCSACLDICPTQAIVAPYRVDARRCISYLTIEHDGPIPLELRPALGNRIYGCDDCQLACPWNKFAQRSLLPDFEVRQPWREADLLTLWAWDEAEFLRRTEGTAIRRIGHARWRRNIAVALGNALRARSDGDIRAALESQRPLADALLAEHIDWALAQALPQPQPDGQAEHAHQGG

SEQ ID NO: 77503 - protein, 343 aa, Kiritimatiellaceae bacterium
  misc_feature (1)..(343): tr|A0A2E1U4S3|A0A2E1U4S3_9BACT 4Fe-4S ferredoxin-type d omain-containing protein OS=Kiritimatiellaceae bacteriu m OX=2026752 GN=CMF27_06635 PE=4 SV=1
MREAEEFATWLSEAAERIGAHSACCIRLDHPDLPVALAENHARVEAWLADGKQGEMEYLERMLPQKSDPWTTFPHAQAVIVLTFTNGWGDPEAVHPFPIPEMGAPIGYVSSYAREIDYHARGQAMLAELHTLLGREVEAEAAVDTKPVYERMFATLGGLGIIGANNLLRVPDRTNVRVFIGTLFVNADLPNVIHDVKMPFGCEDCLACIINCPTDAIRPGKPIDAPRCISYLTIEKRSVLSRVEAEMMGDWIFGCDECSNVCPPKEKIDSRIPVDLAWLLKQPAGEIRRTIKGNATAYAGVTQLRRNAVAMLKLREDPVAKELLGWTARQSGSALIQEQLRAW

SEQ ID NO: 77504 - protein, 342 aa, Kiritimatiellaceae bacterium
  misc_feature (1)..(342): tr|A0A1Z9TD95|A0A1Z9TD95_9BACT 4Fe-4S ferredoxin-type d omain-containing protein OS=Kiritimatiellaceae bacteriu m TMED266 OX=1987167 GN=CBE26_00355 PE=4 SV=1
MQEDDFKQWLAAAAERVGAHSACCVRLDHPELPEAVAANEARVRKWLAEGKQGEMSYLERMLPEKADPWGTFPGAKAVIALAFTNGWGDAEAVHPFPTPREGALVGYVSSYAREIDYHARGQAMLQELHGLLGREVKAVAAVDTKPVFERLFATFGGLGIMGANNLLRVPDRTNVRVFIGTLFVDADLPNVIHEVAMPFGCEDCLACISNCPTGAIQPGEPIDAPRCISYLTIEKRSVLSRAEAEMMGSWIFGCDDCSNVCPPKEQVDSRIAVDLNWLLQTPAGEVRRTIAGNATAYAGVTQLRRNAVALLKLSEDSAAKELLKWTAQHSGSALIQEQLRAW

SEQ ID NO: 77505 - protein, 379 aa, Klebsiella aerogenes
  misc_feature (1)..(379): tr|A0A0M3HAP7|A0A0M3HAP7_KLEAE Epoxyqueuosine reductase OS=Klebsiella aerogenes OX=548 GN=queG PE=3 SV=1
MSQPLDLNHLAQQIKQWGTELGFQQVGITDTDLSASEPKLQAWLDKQYHGEMEWMARHGMMRARPHELLPGTLRVISVRMNYLPANAAFASTLKDPTLGYVSRYALGRDYHKLLRNRLKKLGEMIQEQCASLNFRPFVDSAPILERPIAEKAGLGWTGKHSLILSREAGSFFFLGELLIDLPLPVDQPVAEECGRCVACMTICPTGAIVEPYTVDARRCISYLTIELEGAIPEEFRPLIGNRIYGCDDCQLICPWNRFSQLTDEEDFSPRKALHAPQLIELFAWSEAWFLKVTEGSAIRRIGHLRWLRNIAVALGNAPWNEANLVALESRRGEHPLLDEHIEWAVAQQIEKRNANVIEVQLPQKLRLVRVVEKGLPRDA

SEQ ID NO: 77506 - protein, 379 aa, Klebsiella aerogenes
  misc_feature (1)..(379): tr|A0A0H3FVC7|A0A0H3FVC7_KLEAK Epoxyqueuosine reductase OS=Klebsiella aerogenes (strain ATCC 13048 / DSM 30053 / JCM 1235 / KCTC 2190 / NBRC 13534 / NCIMB 10102 / NC TC 10006) OX=1028307 GN=queG PE=3 SV=1
MSQPLDLNQLAQQIKQWGTELGFQQVGITDTDLSASEPKLQAWLDKQYHGEMEWMARHGMMRARPHELLPGTLRVISVRMNYLPANAAFASTLKDPTLGYVSRYALGRDYHKLLRNRLKKLGEMIQEQCASLNFRPFVDSAPILERPIAEKAGLGWTGKHSLILSRDAGSFFFLGELLIDLPLPIDQPVAEECGRCVACMTICPTGAIVEPYTVDARRCISYLTIELEGAIPEEFRPLIGNRIYGCDDCQLICPWNRFSQLTDEEDFSPRKALHAPQLIELFAWSEAWFLKVTEGSAIRRIGHLRWLRNIAVALGNAPWNEANLVALESRRGEHPLLDEHIEWAVAQQIEKRNANVVEVQLPQKLRLVRVVEKGLPRDA

SEQ ID NO: 77507 - protein, 379 aa, Klebsiella grimontii
  misc_feature (1)..(379): tr|A0A5A8XWV2|A0A5A8XWV2_9ENTR Epoxyqueuosine reductase OS=Klebsiella grimontii OX=2058152 GN=queG PE=3 SV=1
MSQPLDLNHLAQQIKQWGTELGFQQVGITDTDLSTSEPKLQAWLDKQYHGEMEWMARHGMMRARPHELQPGTLRVISVRMNYLPANAAFARTLKDPARGYVSRYALGRDYHKLLRHRLKKLGEMIQAQCASLNFRPFVDSAPILERPLAEKAGLGWTGKHSLILSRDAGSFFFLGELLIDLPLPIDQPVEEECGRCVACMTICPTGAIVEPYTVDARRCISYLTIELEGAIPEEFRPLIGNRIYGCDDCQLICPWNRFAQLTDEDDFSPRKALHAPELLELFTWSESYFLKVTEGSAIRRIGHLRWLRNIAVALGNAPWDEANLKALESRRGEHPLLDEHIEWAMTQQMAKRNANVVEVQLPKKLRLVRVVEKGLPRDA

SEQ ID NO: 77508 - protein, 379 aa, Klebsiella grimontii
  misc_feature (1)..(379): tr|A0A285AWL6|A0A285AWL6_9ENTR Epoxyqueuosine reductase OS=Klebsiella grimontii OX=2058152 GN=yjeS PE=3 SV=1
MSQPLDLNHLAQQIKQWGTELGFQQVGITDTDLSASEPKLQAWLDKQYHGEMEWMARHGMMRARPHELQPGTLRVISVRMNYLPANAAFARTLKDPARGYVSRYALGRDYHKLLRHRLKKLGEMIQAQCASLNFRPFVDSAPILERPLAEKAGLGWTGKHSLILSRDAGSFFFLGELLIDLPLPIDQPVEEECGRCVACMTICPTGAIVEPYTVDARRCISYLTIELEGAIPEEFRPLIGNRIYGCDDCQLICPWNRFAQLTDEDDFSPRKALHAPELLELFTWSESYFLKVTEGSAIRRIGHLRWLRNIAVALGNAPWDEANLKALESRRGEHPLLDEHIEWAMTQQMAKRNANVVEVQLPKKLRLVRVVEKGLPRDA

SEQ ID NO: 77509 - protein, 379 aa, Klebsiella michiganensis
  misc_feature (1)..(379): tr|A0A0J2H1A1|A0A0J2H1A1_9ENTR Epoxyqueuosine reductase OS=Klebsiella michiganensis OX=1134687 GN=queG PE=3 SV =1
MSQPLDLNQLAQQIKQWGTELGFQQVGITDTDLSASEPKLQAWLDKQYHGEMAWMARHGMMRARPHELQPGTLRVISVRMNYLPANAAFARTLKDPAVGYVSRYALGRDYHKLLRHRLKKLGEMIQGQCASLNFRPFVDSAPILERPLAEKAGLGWTGKHSLILSRDAGSFFFLGELLIDLPLPIDQPVKEECGRCVACMTICPTGAIVEPYTVDARRCISYLTIELEGAIPEEFRPLIGNRIYGCDDCQLICPWNRFAQLTDEEDFSPRKALHAPALIELFAWSEPWFLKVTEGSAIRRIGHLRWLRNIAVALGNAPWDEANLKALESRRGEHPLLDEHIEWAMAQQIEKRNANVVEVQLPKKLRLVRVVEKGLPRDA

SEQ ID NO: 77510 - protein, 379 aa, Klebsiella michiganensis
  misc_feature (1)..(379): tr|A0A5D1EQ66|A0A5D1EQ66_9ENTR Epoxyqueuosine reductase OS=Klebsiella michiganensis OX=1134687 GN=queG PE=3 SV =1
MSQPLDLNQLAQQIKQWGTELGFQQVGITDTDLSASEPKLQAWLDKQYHGEMAWMARHGMMRARPHELQPGTLRVISVRMNYLPANAAFARTLKDPAVGYVSRYALGRDYHKLLRHRLKKLGEMIQGQCASLNFRPFVDSAPILERPLAEKAGLGWTGKHSLILSRDAGSFFFLGELLIDLPLPIDQPVKEECGRCVACMTICPTGAIVEPYTVDARRCISYLTIELEGAIPEEFRPLIGNRIYGCDDCQLICPWNRFAQLTDEEDFSPRKALHAPALIELFAWSEPWFLKVTEGSAIRRIGHLRWLRNIAVALGNSPWDEANLKALESRRGEHPLLDEHIEWAMAQQIEKRNANVVEVQLPKKLRLVRVVEKGLPRDA

SEQ ID NO: 77511 - protein, 379 aa, Klebsiella oxytoca; identical to SEQ ID NO: 77508
  misc_feature (1)..(379): tr|A0A3E1SR66|A0A3E1SR66_KLEOX Epoxyqueuosine reductase OS=Klebsiella oxytoca OX=571 GN=queG PE=3 SV=1

SEQ ID NO: 77512 - protein, 379 aa, Klebsiella oxytoca; identical to SEQ ID NO: 77509
  misc_feature (1)..(379): tr|A0A0H3H4S6|A0A0H3H4S6_KLEOK Epoxyqueuosine reductase OS=Klebsiella oxytoca (strain ATCC 8724 / DSM 4798 / J CM 20051 / NBRC 3318 / NRRL B-199 / KCTC 1686) OX=10065 51 GN=queG PE=3 SV=1

SEQ ID NO: 77513 - protein, 379 aa, Klebsiella pneumoniae
  misc_feature (1)..(379): tr|A0A486EKR0|A0A486EKR0_KLEPN Epoxyqueuosine reductase OS=Klebsiella pneumoniae OX=573 GN=queG PE=3 SV=1
MSQPLDLVQLAQQIKQWGTELGFQQVGIADTDLSASEPKLQAWLDKQYHGEMEWMTRHGMMRARPHELLPGTLRVISVRMNYLPANAAFARTLKDPTLGYVSRYALGRDYHKLLRNRLKKLGEKIQEQCASLNFRPFVDSAPILERPIAEKAGLGWTGKHSLILSRDAGSFFFLGELLIDLPLPVDSPVAEECGRCVACMTICPTGAIVEPYTVDARRCISYLTIELEGAIPEEFRPLIGNRIYGCDDCQLICPWNRFSQLTDEEDFSPRKALHAPPLVELFAWSEAWFLKVTEGSAIRRIGHLRWLRNIAVALGNAPWDEAHLRALESRRGEHPLLDEHIEWAIAQQLKKRNADAVEVQLPKKLRLVRVVEKGLPRDA

SEQ ID NO: 77514 - protein, 379 aa, Klebsiella pneumoniae
  misc_feature (1)..(379): tr|R4YAQ3|R4YAQ3_KLEPR Epoxyqueuosine reductase OS=Kleb siella pneumoniae subsp. rhinoscleromatis SB3432 OX=861 365 GN=yjeS PE=3 SV=1
MSQPLDLVQLAQQIKQWGTELGFQQVGIADTDLSASEPKLQAWLDKQYHGEMEWMARHGMMRARPHELLPGTLRVISVRMNYLPANAAFARTLKDPTLGYVSRYALGRDYHKLLRNRLKKLGEKIQEQCASLNFRPFVDSAPILERPIAEKAGLGWTGKHSLILSRDAGSFFFLGELLIDLPLPVDSPVAEECGRCVACMTICPTGAIVEPYTVDARRCISYLTIELEGAIPEEFRPLIGNRIYGCDDCQLICPWNRFSQLTDEEDFSPRKALHAPPLVELFAWSEAWFLKVTEGSAIRRIGHLRWLRNIAVALGNAPWDEAHLRALASRRGEHPLLDEHIEWAIAQQLKKRNADAVEVQLPKKLRLVRVVEKGLPRDA

SEQ ID NO: 77515 - protein, 379 aa, Klebsiella quasipneumoniae
  misc_feature (1)..(379): tr|A0A2N4W557|A0A2N4W557_9ENTR Epoxyqueuosine reductase OS=Klebsiella quasipneumoniae OX=1463165 GN=queG PE=3 SV=1
MSQPLDLVQLAQQIKQWGTELGFQQVGIADTDLSASEPKLQAWLDKQYHGEMEWMARHGMMRARPHELLPGTLRVISVRMNYLPANAAFARTLKDPALGYVSRYALGRDYHKLLRNRLKKLGEKIQEQCASLNFRPFVDSAPILERPIAEKAGLGWTGKHSLILSRDAGSFFFLGELLIDLPLPVDSPVAEECGRCVACMTICPTGAIVEPYTVDARRCISYLTIELEGAIPEEFRPLIGNRIYGCDDCQLICPWNRFSQLTDEEDFSPRQALHAPPLVELFAWSESWFLKVTEGSAIRRIGHLRWLRNIAVALGNAPWDEAHLRALESRLGEHPLLDEHIEWAMAQQLKKRSADAVEVQLPKKLRLVRVVEKGLPRDA

SEQ ID NO: 77516 - protein, 379 aa, Klebsiella quasipneumoniae
  misc_feature (1)..(379): tr|A0A5C6I9F7|A0A5C6I9F7_9ENTR Epoxyqueuosine reductase OS=Klebsiella quasipneumoniae subsp. similipneumoniae OX=1463164 GN=queG PE=3 SV=1
MSQPLDLVQLAQQIKQWGTELGFQQVGIADTDLSASEPKLQAWLDKQYHGEMEWMARHGMMRARPHELLPGTLRVISVRMNYLPANAAFARTLKDPALGYVSRYALGRDYHKLLRNRLKKLGEKIQEQCASLNFRPFVDSAPILERPIAEKAGLGWTGKHSLILSRDAGSFFFLGELLIDLPLPVDSPVAEECGRCVACMTICPTGAIVEPYTVDARRCISYLTIELEGAIPEEFRPLIGNRIYGCDDCQLICPWNRFSQLTDEEDFSPRQALHAPPLVELFAWSEAWFLKVTEGSAIRRIGHLRWLRNIAVALGNAPWDEAHLRALESRLGEHPLLDEHIEWAIAQQLKKRSVDAVEVQLPKKLRLVRVVEKGLPRDA

SEQ ID NO: 77517 - protein, 379 aa, Klebsiella quasivariicola
  misc_feature (1)..(379): tr|A0A223UH42|A0A223UH42_9ENTR Epoxyqueuosine reductase OS=Klebsiella quasivariicola OX=2026240 GN=queG PE=3 S V=1
MSQPLDLVQLAQQIKQWGTELGFQQVGIADTDLSASEPKLQAWLDKQYHGEMEWMARHGMMRARPHELLPGTLRVISVRMNYLPANAAFARTLKDPALGYVSRYALGRDYHKLLRNRLKKLGEKIQEQCASLNFRPFVDSAPILERPIAEKAGLGWTGKHSLILSRDAGSFFFLGELLIDLPLPVDSPVAEECGRCVACMTICPTGAIVEPYTVDARRCISYLTIELEGAIPEEFRPLIGNRIYGCDDCQLICPWNRFSQLTDEEDFSPRKALHAPPLVELFAWSEAWFLKVTEGSAIRRIGHLRWLRNIAVALGNAPWDEAHLRALESRRGEHPLLDEHIEWAIAQQMKKRSADAVEVQLPKKLRLVRVVEKGLPRDA

SEQ ID NO: 77518 - protein, 379 aa, Klebsiella quasivariicola
  misc_feature (1)..(379): tr|A0A556VGC6|A0A556VGC6_9ENTR Epoxyqueuosine reductase OS=Klebsiella quasivariicola OX=2026240 GN=queG PE=3 S V=1
MSQPLDLVQLAQQIKQWGTELGFQQVGIADTDLSASEPKLQAWLDKQYHGEMEWMARHGMMRARPHELLPGTLRVISVRMNYLPANAAFARTLKDPALGYVSRYALGRDYHKLLRNRLKKLGEKIQEQCASLNFRPFVDSAPILERPIAEKAGLGWTGKHSLILSRDAGSFFFLGELLIDLPLPVDSPVAEECGRCVACMTICPTGAIVEPYTVDARRCISYLTIELEGTIPEEFRPLIGNRIYGCDDCQLICPWNRFSQLTDEEDFSPRKALHAPPLVELFAWSEAWFLKVTEGSAIRRIGHLRWLRNIAVALGNAPWDEAHLRALESRRGEHPLLDEHIEWAIAQQMKKRSADAVEVQLPKKLRLVRVVEKGLPRDA

SEQ ID NO: 77519 - protein, 379 aa, Klebsiella sp.
  misc_feature (1)..(379): tr|A0A1F2M5F1|A0A1F2M5F1_9ENTR Epoxyqueuosine reductase OS=Klebsiella sp. HMSC16C06 OX=1581110 GN=queG PE=3 SV =1
MSQPLDLVQLAQQIKQWGTELGFQQVGIADTDLSASEPKLQAWLDKQYHGEMEWMARHGMMRARPHELLPGTLRVISVRMNYLPANAAFARTLKDPALGYVSRYALGRDYHKLLRNRLKKLGEKIQEQCALLNFRPFVDSAPILERPIAEKAGLGWTGKHSLILSRDAGSFFFLGELLIDLPLPVDSPVAEECGRCVACMTICPTGAIVEPYTVDARRCISYLTIELEGAIPEEFRPLIGNRIYGCDDCQLICPWNRFSQLTDEEDFSPRKALHAPPLVELFAWSEAWFLKVTEGSAIRRIGHLRWLRNIAVALGNAPWDEAHLRALESRRGEHPLLDEHIEWAIAEQINKRNADAVEVQLPKKLRLVRVVEKGLPRDA

SEQ ID NO: 77520 - protein, 379 aa, Klebsiella sp.
  misc_feature (1)..(379): tr|A0A4S5DNY1|A0A4S5DNY1_9ENTR Epoxyqueuosine reductase OS=Klebsiella sp. Z2 OX=2561928 GN=queG PE=3 SV=1
MSQPLDLNELAQKIKQWGAELGFQKVGITDTDLSASEPKLQAWLDKQYHGEMEWMARHGMMRARPHELLPGTLRVISVRMNYLPANAAFARTLKNPSLGYVSRYALGRDYHKLLRNRLKKLGETIQQHCVSLNFRPFVDSAPILERPIAEKAGLGWTGKHSLILSRDAGSFFFLGELLIDLPLPVDSPVEEGCGRCVACMTICPTGAIVEPYTVDARRCISYLTIELEGAIPEEFRPLIGNRIYGCDDCQLICPWNRYSQLTDEEDFSPRKALHAPQLIELFAWSEAWFLKVTEGSAIRRIGHLRWLRNVAVALGNAPWDEANLQALESRRGEHPLLDEHIEWAIAQQIEKRNAGVVEVQLPKKQRLVRVIEKGLPRDV

SEQ ID NO: 77521 - protein, 379 aa, Klebsiella variicola
  misc_feature (1)..(379): tr|A0A4S4HGD9|A0A4S4HGD9_KLEVA Epoxyqueuosine reductase OS=Klebsiella variicola OX=244366 GN=queG PE=3 SV=1
MSQPLDLVQLAQQIKQWGTELGFQQVGIADTDLSASEPKLQAWLDKQYHGEMEWMARHGMMRARPHELLPGTLRVISVRMNYLPANAAFARTLKDPALGYVSRYALGRDYHKLLRNRLKKLGEKIQEQCASLNSRPFVDSAPILERPIAEKAGLGWTGKHSLILSRDAGSFFFLGELLIDLPLPVDSPVAEECGRCVACMTICPTGAIVEPYTVDARRCISYLTIELEGAIPEEFRPLIGNRIYGCDDCQLICPWNRFSQLTDEEDFSPRKALHAPPLVELFAWSEAWFLKVTEGSAIRRIGHLRWLRNIAVALGNAPWDEAHLRALESRRGEHPLLDEHIEWAIAEQINKRNADAVEVQLPKKLRLVRVVEKGLPRDA

SEQ ID NO: 77522 - protein, 379 aa, Klebsiella variicola
  misc_feature (1)..(379): tr|A0A2V3KLD6|A0A2V3KLD6_KLEVA Epoxyqueuosine reductase OS=Klebsiella variicola OX=244366 GN=queG PE=3 SV=1
MSQPLDLVQLAQQIKQWGTELGFQQVGIADTDLSASEPKLQAWLDKQYHGEMEWMARHGMMRARPHELLPGTLRVISVRMNYLPANAAFARTLKDPALGYVSRYALGRDYHKLLRNRLKKLGEKIQEQCASLNFRPFVDSAPILERPIAEKAGLGWTGKHSLILSRDAGSFFFLGELLIDLPLPVDSPVAEECGRCVACMTICPTGAIVEPYTVDARRCISYLTIELEGAIPEEFRPLIGNRIYGCDDCQLICPWNRFSQLTDEEDFSPRKALHAPPLVELFAWSEAWFLKVTEGSAIRRIGHLRWLRNIAVALGNAPWDEAHLRALESRRGEHPLLDEHIEWAIAEQINKRNADAVEVQLPKKLRLVRVVEKGLPRDA

SEQ ID NO: 77523 - protein, 379 aa, Kluyvera ascorbata
  misc_feature (1)..(379): tr|A0A378GPK7|A0A378GPK7_9ENTR Epoxyqueuosine reductase OS=Kluyvera ascorbata OX=51288 GN=queG PE=3 SV=1
MSQPLDLNQLAQQIKQWGAELGFQQVGITDTDLSASEPKLQAWLDKQYHGEMEWMARHGMMRARPHELQPGTLRVLSVRMNYLPANAAFASTLKNPELGYVSRYALGRDYHKLLRNRLKKLGEMIQEQCVSLNFRPFVDSAPILERPLAEKAGIGWTGKHSLILNRDAGSFFFLGELLVDIPLPIDQPVAEECGRCVACMTICPTGAIVEPYTVDARRCISYLTIELEGAIPEEFRPLLGNRIYGCDDCQLICPWNRFSQLTDEADFSPRKALHAPELIELFAWNEAHFLKVTEGSAIRRIGHLRWLRNIAVALGNAPWSDATLNALESRRGEHPLLDEHIEWAIAQQITRRNEHVVEVQLPKKQRLVRVVEKGLPRDA

SEQ ID NO: 77524 - protein, 379 aa, Kluyvera ascorbata
  misc_feature (1)..(379): tr|A0A3N2S573|A0A3N2S573_9ENTR Epoxyqueuosine reductase OS=Kluyvera ascorbata OX=51288 GN=queG PE=3 SV=1
MSQPLDLNQLAQQIKQWGTELGFQQVGITDTDLSASEPKLQAWLDKQYHGEMEWMARHGMMRARPHELQPGTLRVISVRMNYLPANAAFASTLKNPELGYVSRYALGRDYHKLLRNRLKKLGEMIQEQCVSLNFRPFVDSAPILERPLAEKAGIGWTGKHSLILNRDAGSFFFLGELLVDIPLPIDQPVAEECGRCVACMTICPTGAIVEPYTVDARRCISYLTIELEGAIPEEFRPLLGNRIYGCDDCQLICPWNRFSQLTDEADFSPRKALHAPELIELFAWSEAHFLKVTEGSAIRRIGHLRWLRNIAVALGNAPWSDATLNALESRRGEHPLLDEHIEWAIAQQITRRNEHVVEVQLPKKQRLVRVVEKGLPRDA

SEQ ID NO: 77525 - protein, 379 aa, Kluyvera cryocrescens
  misc_feature (1)..(379): tr|A0A2X3DST9|A0A2X3DST9_KLUCR Epoxyqueuosine reductase OS=Kluyvera cryocrescens OX=580 GN=queG PE=3 SV=1
MSQPLDLNQLAQQIKQWGTELGFQQVGITDTDLSEAEPKLQAWLDKQYHGEMDWMARHGMMRARPHELQPGTLRVISVRMNYLPANAAFARTLKNPELGYVSRYALGRDYHKLLRNRLKKLGEMIQEQCVSLNFRPFVDSAPILERPLAEKAGIGWTGKHSLILNRDAGSFFFLGELLVDIPLPIDRPVAEGCGRCVACMTICPTGAIVEPYTVDARRCISYLTIELEGAIPEEFRPLIGNRIYGCDDCQLICPWNRFSQLTDEEDFSPRKALHSPELIELFAWTEAWFLKVTEGSAIRRIGHLRWLRNIAVALGNAPWSEGVLNALESRRGEHPLLDEHIEWAVAQQIARRNEGAIEVQLPKKQRLVRVVEKGLPRDA

SEQ ID NO: 77526 - protein, 172 aa, Kluyvera cryocrescens
  misc_feature (1)..(172): tr|A0A485BCX1|A0A485BCX1_KLUCR Epoxyqueuosine reductase OS=Kluyvera cryocrescens OX=580 GN=queG PE=4 SV=1
MSNPYTVDARRCISYLTIELEGAIPEEFRPLIGNRIYGCDDCQLICPWNRFSQLTDEEDFSPRKAWHSPELIELFAWTEAWFLKVTEGSAIRRIGHLRWLRNIAVALGNAPWSEGVLNALESRRGEHPLLDEHIEWAVAQQIARRNEGAIEVQLPKKQRLVRVVEKGLPRDA

SEQ ID NO: 77527 - protein, 379 aa, Kluyvera georgiana
  misc_feature (1)..(379): tr|A0A248KLM7|A0A248KLM7_9ENTR Epoxyqueuosine reductase OS=Kluyvera georgiana OX=73098 GN=queG PE=3 SV=1
MSQPLDLNQLAQQIKLWGTELGFQQVGITDTDLSASEPKLQAWLDKQYHGEMEWMARHGMMRARPHELQPGTLRVISVRMNYLPANAAFARTLKNPELGYVSRYALGRDYHKLLRNRLKKLGEMIQEQCVSLNFRPFVDSAPVLERPLAEKAGIGWTGKHSLILNRDAGSFFFLGELLVDIPLPVDQPVAEECGRCVACMTICPTGAIVEPYTVDARRCISYLTIELEGAIPEEFRPLLGNRIYGCDDCQLICPWNRFSQLTDEADFSPRKALHAPELVELFAWSEAHFLKVTEGSAIRRIGHLRWLRNIAVALGNAPWSEAALNALESRRGEHPLLDEHITWAIAQQIARRNEGAIEVQLPKKQRLVRVVEKGLPRDA

SEQ ID NO: 77528 - protein, 379 aa, Kluyvera georgiana
  misc_feature (1)..(379): tr|A0A1B7JQ27|A0A1B7JQ27_9ENTR Epoxyqueuosine reductase OS=Kluyvera georgiana ATCC 51603 OX=1354264 GN=queG PE =3 SV=1
MSQPLDLNQLAQQIKLWGTELGFQQVGITDTDLSASEPKLQAWLDKQYHGEMEWMARHGMMRARPHELQPGTLRVISVRMNYLPANAAFARTLKNPELGYVSRYALGRDYHKLLRNRLKKLGEMIQERCVSLNFRPFVDSAPILERPLAEKAGIGWTGKHSLTLNRDAGSFFFLGELLVDIPLPVDQPVAEECGRCVACMTICPTGAIVEPYTVDARRCISYLTIELEGAIPEEFRPLLGNRIYGCDDCQLICPWNRFSQLTDEADFSPRKALHAPELIELFAWSEAHFLKVTEGSAIRRIGHLRWLRNIAVALGNAPWSEAALNALESRQGEHPLLDEHITWAIAQQIARRNEGAVEVQLPKKQRLVRVVEKGLPRDA

SEQ ID NO: 77529 - protein, 379 aa, Kluyvera intermedia
  misc_feature (1)..(379): tr|A0A3S4GLH0|A0A3S4GLH0_KLUIN Epoxyqueuosine reductase OS=Kluyvera intermedia OX=61648 GN=queG PE=3 SV=1
MSQPLDLNQLAQQIKQWGTELGFQQVGITDTDLSEAEPKLQAWLDKQYHGEMDWMARHGMMRARPHELQPGTLRVISVRMNYLPANAAFARTLKNPELGYVSRYALGRDYHKLLRNRLKKLGEMIQEQCVSLNFRPFVDSAPILERPLAEKAGIGWTGKHSLILNRDAGSFFFLGELLVDIPLPIDQPVVEECGRCVACMTICPTGAIVEPYTVDARRCISYLTIELEGAIPEEFRPLIGNRIYGCDDCQLICPWNRFSQLTDEADFSPRKALHSPELIELFAWSEAWFLKVTEGSAIRRIGHLRWLRNIAVALGNAPWSEAAIHALESRRGEYPLLDEHIDWAIAQQIERRNACVVEVQLPKKQRLVRVVEKGLPRDA

SEQ ID NO: 77530 - protein, 395 aa, Kluyvera intermedia
  misc_feature (1)..(395): tr|A0A1X0XGR4|A0A1X0XGR4_KLUIN Epoxyqueuosine reductase OS=Kluyvera intermedia OX=61648 GN=queG PE=3 SV=1
MECGILTAYFFIVWSVMSEPLDLNQLAHSIKQWGTELGFQQVGIADTDLSASEPKLQAWLDKQYHGEMEWMARHGMMRARPHELLPGTLRVISVRMNYLPANAAFASTLKNPTLGYVSRYALGRDYHKLLRNRLKQLGEKIQQHCASLNFRPFVDSAPILERPLAEKAGLGWVGKHSLILNRHAGSFFFLGELLIDLPLPVDQPIEENCGRCVACLTICPTGAIVEPYTVDARRCISYLTIELEGAIPEEFRPLIGNRIYGCDDCQLICPWNRFSQLTDEADFSPRKALHAPELIELFAWSESWFLKVTEGSAIRRIGHLRWLRNIAVALGNAPWDEANIRALEQRRGEHPLLDEHIEWAIAQQVEKRNACVVEVQTPKKQRLVRVIEKGLIRDA

SEQ ID NO: 77531 - protein, 384 aa, Kluyvera sp.
  misc_feature (1)..(384): tr|A0A2T3XD69|A0A2T3XD69_9ENTR Epoxyqueuosine reductase OS=Kluyvera sp. Nf5 OX=2116543 GN=queG PE=3 SV=1
MVWSVMSEPLDLNQLAHSIKQWGSELGFQQVGIADTDLSASEPKLQAWLDKQYHGEMEWMARHGMMRARPHELLPGTLRVISVRMNYLPANAAFASTLKNPALGYVSRYALGRDYHKLLRNRLKQLGEKIQQHCASLNFRPFVDSAPILERPLAEKAGLGWVGKHSLILNRQAGSFFFLGELLIDLPLPVDQPVEEDCGRCVACLTICPTGAIVEPYTVDARRCISYLTIELEGAIPEEFRPLIGNRIYGCDDCQLICPWNRFSQLTDEADFSPRKALHSPELIELFAWSESWFLKVTEGSAIRRIGHLRWLRNIAVALGNAPWDEANIRALEQRRGEHPLLDEHIEWAIAQQVEKRNACVVEVQTPKKQRLVRVIEKGLIRDA

SEQ ID NO: 77532 - protein, 365 aa, Komagataeibacter cocois
  misc_feature (1)..(365): tr|A0A365YXF3|A0A365YXF3_9PROT Epoxyqueuosine reductase OS=Komagataeibacter cocois OX=1747507 GN=queG PE=3 SV= 1
MARVRPVTHPPGAQGTLARLICERALAVGFDAVGFAPATLDDATRLRLHEFVETGRHGAMDWMAQRMSWRGDPRALWPEVRSVISLGLSYAPDGDALATLRDPTAGNISVYARHRDYHDVVKGMLKQVAQFIVAEGRRQAGGDMPPPGVKVFVDTAPVMEKPLAASAGLGWQGKHTNLVSRQHGSWLFLGEIYTTLDLPPSAPSGGGCGTCTRCLDICPTAAFPAPGRIDARRCISYQTIENPDPIPHELRPLMGNRIYGCDDCLAVCPWNRFARATRQMKLQARPDLVAPALRDLAMLDDAGFRRLFSGSPVKRIGRARFVRNVLIAIGNSGRAELRPVAQGLCDDAAPVVADAARWATERLPA

SEQ ID NO: 77533 - protein, 358 aa, Komagataeibacter europaeus
  misc_feature (1)..(358): tr|A0A0M0EGA2|A0A0M0EGA2_KOMEU Epoxyqueuosine reductase OS=Komagataeibacter europaeus OX=33995 GN=queG PE=3 SV =1
MAAAPPGPDPARMAARIAGHARDLGFDAVGFAPARLDDATRTRLAMFVENGFAGSMGWMAQRMEQRGDPRMLWPEVRSVIALGLNYAPEGDALATTRVPDAGNISVYARNRDYHDVVKGMLKHLAQFVVNEGRRQGMDDAQVKVFVDTAPVMEKPLARNAGLGWQGKHTSLVSRRHGSWLFLGEVYTTLDLPQSAPSGGGCGSCTRCLVACPTDAFPAPGVMDARRCISYLTIENRDPIPEALRPAMGNRIYGCDDCLAVCPWNRFAAATNHMKLAARDDLRAPALRDLAALDDAGFRARFSGSPIKRIGRGRFVRNVAVAIGNSAQPALRPSVAALCGDADPVVADAARWATLRLPR

SEQ ID NO: 77534 - protein, 358 aa, Komagataeibacter europaeus
  misc_feature (1)..(358): tr|A0A0D6Q148|A0A0D6Q148_KOMEU Epoxyqueuosine reductase OS=Komagataeibacter europaeus NBRC 3261 OX=1234669 GN= queG PE=3 SV=1
MAAAPPGPDPARMAARIAGHARDLGFDAVGFAPARLDDATRTRLAMFVENGFAGSMGWMAQRMEQRGDPRMLWPEVRSVIALGLNYAPEGDALAATRVPDAGNISVYARNRDYHDVVKGMLKHLAQFVVNEGRRQGMDDAQVKVFVDTAPVMEKPLARNAGLGWQGKHTSLVSRRHGSWLFLGEVYTTLDLPQSAPSGGGCGSCTRCLVACPTDAFPAPGVMDARRCISYLTIENRDPIPEALRPAMGNRIYGCDDCLAVCPWNRFAAATNHMKLAARDDLRAPALRDLAALDDAGFRARFSGSPVKRIGRGRFVRNVAVAIGNSAQPALRPSVAALCGDADPVVADAARWATLRLPR

SEQ ID NO: 77535 - protein, 366 aa, Komagataeibacter hansenii
  misc_feature (1)..(366): tr|A0A318PZ91|A0A318PZ91_KOMHA Epoxyqueuosine reductase OS=Komagataeibacter hansenii OX=436 GN=queG PE=3 SV=1
MAARAQPVACPPGAPGGLARRIHDRAVAIGFDAVGFAPAMLDDAARARLHEFVRTGRHGAMDWMAQRMAWRGDPRALWPDVRSVISLGLSYAPDGDALATLRNPMAGNISVYARHRDYHDVVKGMLKQVAQFIVAQGRRQPGGEASPPGVKVFVDTAPVMEKPLAANAGLGWQGKHTNLVSRTHGSWLFLGEIYTTLDLPHSAPSGGGCGTCTRCLDICPTSAFPAPGQIDARRCISYQTIENPDPIPHELRPLIGNHIYGCDDCLAVCPWNRFAQATRQMKLRARPDLVAPALRDLAVLDDAGFRTLFSGSPIKRIGRARFVRNVLIAIGNSARADLCDVAQGLCDDPAPVVADAARWAVERLMS

SEQ ID NO: 77536 - protein, 366 aa, Komagataeibacter hansenii
  misc_feature (1)..(366): tr|D5QBB9|D5QBB9_KOMHA Epoxyqueuosine reductase OS=Koma gataeibacter hansenii ATCC 23769 OX=714995 GN=queG PE=3 SV=1
MAARAQPVACPPGAPGGLARRIHDRAVAIGFDAVGFAPAMLDDAACARLHEFVRTGRHGAMDWMAQRMAWRGDPRALWPDVRSVISLGLSYAPDGDALATLRNPMAGNISVYARHRDYHDVVKGMLKQVAQFIVAQGRRQPGGEASPPGVKVFVDTAPVMEKPLAANAGLGWQGKHTNLVSRTHGSWLFLGEIYTTLDLPHSAPSGGGCGTCTRCLDICPTSAFPAPGQIDARRCISYQTIENPDPIPHELRPLMGNHIYGCDDCLAVCPWNRFAQATRQMKLRARPDLVAPALRDLAVLDDAGFRTLFSGSPIKRIGRARFVRNVLIAIGNSARADLCDVAQGLCDDPAPVVADAARWAVERLMS

SEQ ID NO: 77537 - protein, 358 aa, Komagataeibacter intermedius
  misc_feature (1)..(358): tr|A0A0N1N6S7|A0A0N1N6S7_9PROT Epoxyqueuosine reductase OS=Komagataeibacter intermedius AF2 OX=1458464 GN=queG PE=3 SV=1
MAAAPSGPDPVRMAARIADHARDLGFDAVGFAPARLDDAARARLAMFVENGFAGSMGWMAQRMEQRGDPRMLWPEVRSVIALGLNYAPGGDALATTRMPDAGNISVYARNRDYHDVVKGMLKHLAQFVVNEGRRQGMDGTQVKVFVDTAPVMEKPLAQNAGLGWQGKHTSLVSRRHGSWLFLGEIYTTLDLPQSVPSGGGCGSCTRCLVACPTDAFPAPGVMDARRCISYLTIENRDPIPEGLRPAMGNRIYGCDDCLAVCPWNRFATATHHMKLAARDDLRAPALQDLATLDDAGFRARFSGSPVKRIGRGRFVRNVAVAIGNSGQAVLRPSVAALCADADPVVADAARWATLRLPR

SEQ ID NO: 77538 - protein, 365 aa, Komagataeibacter maltaceti
  misc_feature (1)..(365): tr|A0A2S3W2N9|A0A2S3W2N9_9PROT Epoxyqueuosine reductase OS=Komagataeibacter maltaceti OX=1203393 GN=queG PE=3 SV=1
MARARSVTYPSDARGVLARRIHDRALAVGFDAVGFAPAMLDDATRARLREFVAAGHHGAMEWMAQRMAWRGDPRALWPEVRSVISLGLSYAPEGDALATLRDPTAGNISVYARHRDYHDVVKGMLKQVAQFVVAEGRRQHGGDAPPPGVKVFVDTAPVMEKPLAAGAGLGWQGKHTNLVSRTQGSWLFLGEIYTTLDLPHSAPSGGGCGTCTRCLDVCPTSAFPAPGQIDARRCISYQTIENPGPIPHDLRPLMGNHIYGCDDCLAVCPWNRFAQATRQMKLRARPDLVAPALRDLALLDDAGFRALFSGSPVKRIGRARFVRNVLIAIGNSARADLRGVAQALCDDPAPVVADAARWAVGRLPS

SEQ ID NO: 77539 - protein, 356 aa, Komagataeibacter medellinensis
  misc_feature (1)..(356): tr|G2I0K6|G2I0K6_KOMMN Epoxyqueuosine reductase OS=Koma gataeibacter medellinensis (strain NBRC 3288 / BCRC 116 82 / LMG 1693 / Kondo 51) OX=634177 GN=queG PE=3 SV=1
MARAAAGPAALAARIAEHARTLGFDAVGFAPARLDDGARARLAAFVENGFAGSMGWMAQRMEQRGDPRGLWPEVRSVIALGLNYAPEGDPLATTRVPDAGNISVYARNRDYHDVVKGMLKHLAQFVVNAGRRQGYDGAEVKVFVDTAPVMEKPLAQNAGLGWQGKHTSLVSRQHGSWLFLGEIYTTLDLPQSAPSGGGCGTCTRCLVACPTDAFPAPGVMDARRCLSYLTIENRGPIPHAFRPAMGNRIYGCDDCLAACPWNRFAQATRHMKLAAREDLRAPALHELAALDDRGFRSRFSGSPVKRIGRDRFVRNVAVAIGNSGQAALRPAAAALCADPDPVVAEAAQWAVARLPR

SEQ ID NO: 77540 - protein, 355 aa, Komagataeibacter nataicola
  misc_feature (1)..(355): tr|A0A1U9RKM1|A0A1U9RKM1_9PROT Epoxyqueuosine reductase OS=Komagataeibacter nataicola OX=265960 GN=queG PE=3 S V=1
MAGAPPDPARLAARIAAHARMLGFDAVGFAPARLDEATRARLATFVERGFAGSMGWMAERMAQRGDPATLWPEVRSVIALGLNYAPQGDALATTQVPDAGNISVYARNRDYHDVVKGMLKHLAQFVVNEGRRAGLEAQVKVFVDTAPVMEKPLAQNAGLGWQGKHTSLVSRQHGSWLFLGEVYTTLDLPQSAPSGGGCGTCTRCLDACPTDAFPAPGVMDARRCISYLTIENRDPIPEALRPAMGNRIYGCDDCLAVCPWNRFAQATRHMKLAARDDLHAPALRELAVLDDAAFRARFSGSPIKRIGRNRFVRNVAVAIGNSGQASLRPVVSGLCHDPDPVVAEAARWATLRLPA

SEQ ID NO: 77541 - protein, 358 aa, Komagataeibacter oboediens
  misc_feature (1)..(358): tr|A0A318R024|A0A318R024_9PROT Epoxyqueuosine reductase OS=Komagataeibacter oboediens OX=65958 GN=queG PE=3 SV =1
MAGASSGPDPVRMAARIADHARDLGFDAVGFAPARLDEAARARLAMFVENGFAGSMGWMAQRMEQRGDPRMLWPEVRSVIALGLNYAPEGDALATTRMPDAGNISVYARNRDYHDVVKGMLKHLAQFVVNEGRRQGMDGTQVKVFVDTAPVMEKPLAQNAGLGWQGKHTSLVSRRHGSWLFLGEVYTTLDLPQSASSGGGCGSCTRCLVACPTDAFPAPGVMDARRCISYLTIENRDPIPEALRPAMGNRIYGCDDCLAVCPWNRFATATHHMKLAARDDLRAPALRELATLDDARFRARFSGSPVKRIGRGRFVRNVAVAIGNSGQAALRPSVAALCADPDPVVADAARWATLRLPQ

SEQ ID NO: 77542 - protein, 361 aa, Komagataeibacter pomaceti
  misc_feature (1)..(361): tr|A0A318Q9Q8|A0A318Q9Q8_9PROT Epoxyqueuosine reductase OS=Komagataeibacter pomaceti OX=2021998 GN=queG PE=3 S V=1
MARVPSPGAQGALARRIYDRALAVGFDAVGFAPAMLDDATRLRLREFVEEGRHGAMEWMAQRMSWRGDPRALWPEVRSVISLGLSYAPDGDALATLRDPVAGNISVYARHRDYHDVVKGMLKQVAQFVVAEGRRQANGDTPPPGVKVFVDTAPVMEKSLAASAGLGWQGKHTNLVSRQHGSWLFLGEIYTTLDLPPSAPSGGGCGTCTRCLDICPTAAFPAPGRIDARRCISYQTIENPDPIPLELRPLMGNRIYGCDDCLAVCPWNRFARATRQMKLRARADLVAPALRDLAVLDDAGFRRLFSGSPVKRIGRARFVRNVLIAIGNSGRAELRPVAQGLCDDAAPVVADAARWAVGRLPA

SEQ ID NO: 77543 - protein, 357 aa, Komagataeibacter rhaeticus
  misc_feature (1)..(357): tr|A0A181C6Z0|A0A181C6Z0_9PROT Epoxyqueuosine reductase OS=Komagataeibacter rhaeticus OX=215221 GN=queG PE=3 S V=1
MARAACAHDPAALAARIADHARRLGFDAVGFTPARLDDGTRARLAAFVENGFAGSMGWMAQRMEQRGDPRGLWPEVRSVIALGVSYTPDGDPLATTRVPDAGNISVYARNRDYHDVVKGMLKHLAQFVVNEGRRQGSDTEVKVFVDTAPVMEKPLARDAGLGWQGKHTSLVSRQHGSWLFLGEVYTTLDLPQSAPSGGGCGTCTRCLVACPTDAFPAPGVMDARRCLSYLTIENRGPIPHALRPAMGNRIYGCDDCLAACPWNRFAQATRHMKLAARDDLRAPALRELAALDDGGFRRRFSGSPIKRIGRERFVRNVAVAIGNSGQPALRPAAMALCSDPDPVVAEAARWAVARLPR

SEQ ID NO: 77544 - protein, 357 aa, Komagataeibacter rhaeticus; identical to SEQ ID NO: 77543
  misc_feature (1)..(357): tr|A0A070A9U3|A0A070A9U3_9PROT Epoxyqueuosine reductase OS=Komagataeibacter rhaeticus AF1 OX=1432055 GN=queG P E=3 SV=1

SEQ ID NO: 77545 - protein, 361 aa, Komagataeibacter saccharivorans
  misc_feature (1)..(361): tr|A0A347W9W2|A0A347W9W2_9PROT Epoxyqueuosine reductase OS=Komagataeibacter saccharivorans OX=265959 GN=queG P E=3 SV=1
MAGPCASAMADPVRLAAAIAGHARALGFDAVGFAPAQLDDGVRARLAAFVENGFAGGMEWMAQRMEQRGDPRGLWPEVRSVIALGVSYAPGEDDPLATTRQPEAGNISVYARHRDYHDVVKGMLKHLAQFVVNAGRRQGAGAAEVKVFVDTAPVMEKPLAQNAGLGWQGKHTSLVSRQHGSWLFLGEIYTTLDLPQSVPSGGGCGTCTRCLDACPTGAFPQPGIMDARRCISYLTIENRDPIPHEFRPAMGNRIYGCDDCLAVCPWNRFARATNHMKLAARDDLRAPALRDLAMLDDAGFRARFSGSPVKRIGRNRFVRNVAVAIGNSGRPELRPVVAALCADADPVVAEAAQWATVRLPS

SEQ ID NO: 77546 - protein, 357 aa, Komagataeibacter sp.
  misc_feature (1)..(357): tr|A0A371YWB4|A0A371YWB4_9PROT Epoxyqueuosine reductase OS=Komagataeibacter sp. AV 382 OX=2301223 GN=queG PE=3 SV=1
MRASPPADGARLAAVIAGHARALGFDAVGFAPARLDDTVRARLAAFVDNGFAGGMGWMAQRMEQRGDPRGLWPEVRSVIALGVTYAPEGDALATTRQPDAGNISVYARNRDYHDVVKGMLKHLAQFVVNEGRRQGVDQPEVKVFVDTAPVMEKPLAQQAGLGWQGKHTSLVSRQHGSWLFLGEVYTTLDLPQSAPSGGGCGSCTRCLDACPTGAFPAPGIMDARRCISYLTIENRDPIPVELRPAMGNRIYGCDDCLAVCPWNRFATATHHMKLAARDDLRAPALAELAALDDAGFRARFSGSPIKRIGRGRFVRNVAVAVGNSARAELRPAVAALCADADPVVADAARWAVDRLPA

SEQ ID NO: 77547 - protein, 358 aa, Komagataeibacter sp.
  misc_feature (1)..(358): tr|A0A4P5NRP1|A0A4P5NRP1_9PROT Epoxyqueuosine reductase OS=Komagataeibacter sp. MSKU9 OX=1932662 GN=queG PE=3 SV=1
MRAAPPGPDPARMAARIAGHARDLGFDAVGFAPARLDDAVRTRLAMFVEHGFAGSMGWMAQRMDQRGDPRGLWPEVRSVIALGLNYAPESDALATTRVPDAGNISVYARNRDYHDVVKGMLKHLAQFVVNEGRRQGMDDTQVKVFVDTAPVMEKPLAQNAGLGWQGKHTSLVSRQHGSWLFLGEVYTTLDLPQSAPSGGGCGSCTRCLDACPTNAFPAPGVMDARRCISYLTIENRDPIPEALRPAMGNRIYGCDDCLAVCPWNRFAAATNHMKLAARDDLRAPALRTLAGLDDAGFRARFSGSPIKRIGRNRFVRNVAVAIGNSAQPALRPSVAALCDDADPVVADAARWAMLRLPR

SEQ ID NO: 77548 - protein, 355 aa, Komagataeibacter sucrofermentans
  misc_feature (1)..(355): tr|A0A318QFY4|A0A318QFY4_9PROT Epoxyqueuosine reductase OS=Komagataeibacter sucrofermentans OX=1053551 GN=queG PE=3 SV=1
MAQASPDPARLAVRIAEHARGLGFDAVGFAPARLDDATRARLAAFVENGFAGSMGWMAERMAQRGDPRGLWPEVRSVIALGLNYAPQGDALATTRVPDAGNISVYARNRDYHDVVKGMLKHLAQFVVNEGRRAGNEAQVKVFVDTAPVMEKPLAQNAGLGWQGKHTSLVSRQHGSWLFLGEVYTTLDLPQSAPSRGGCGTCTRCLDACPTDAFPAPGVMDARRCISYLTIENRDPIPEALRPAMGNRIYGCDDCLAVCPWNRFAQATSHMKLAARDDLHAPPLAELAALDDAGFRARFSGSPIKRIGRNRFVRNVAVAIGNSGQAALRPVVARLCNDPDPVVAEAARWATLRLPA

SEQ ID NO: 77549 - protein, 358 aa, Komagataeibacter swingsii
  misc_feature (1)..(358): tr|A0A2V4S3Z1|A0A2V4S3Z1_9PROT Epoxyqueuosine reductase OS=Komagataeibacter swingsii OX=215220 GN=queG PE=3 SV =1
MPSAPSGPDPVRMAARIAGHARDLGFDAVGFAPARLDDAVRNRLAMFVENGFAGGMGWMAQRMEQRGDPRALWPEVRSVIALGLNYAPEGDALATTRVPDAGNISVYARNRDYHDVVKGMLKHLAQFVVGEGRRQGMDGTQVKVFVDTAPVMEKPLAQNAGLGWQGKHTSLVSRRHGSWLFLGEVYTTLDLPQSAPSGGGCGSCTRCLVACPTDAFPAPGVMDARRCISYLTIENRDPIPEALRPAMGNRIYGCDDCLAVCPWNRFAAATNHMKLAARDDLRAPALQDLAALDDAGFRARFSGSPIKRIGRNRFVRNVAVAIGNSAQPALRPSVAALCDDADPVVADAARWATLRLPR

SEQ ID NO: 77550 - protein, 357 aa, Komagataeibacter xylinus; identical to SEQ ID NO: 77051
  misc_feature (1)..(357): tr|A0A2D3HGP9|A0A2D3HGP9_KOMXY Epoxyqueuosine reductase OS=Komagataeibacter xylinus OX=28448 GN=queG PE=3 SV=1

SEQ ID NO: 77551 - protein, 358 aa, Komagataeibacter xylinus
  misc_feature (1)..(358): tr|A0A0D6Q5H8|A0A0D6Q5H8_KOMXY Epoxyqueuosine reductase OS=Komagataeibacter xylinus NBRC 13693 OX=1234668 GN=q ueG PE=3 SV=1
MAGASSGPDPVRMAARIADHARDLGFDAVGFAPARLDDAARARLAMFVENGFAGSMGWMAQRMEQRGDPRMLWPEVRSVIALGLNYAPEGDALATTRMPDAGNISVYARNRDYHDVVKGMLKHLAQFVVNEGRRQGMDGTQVKVFVDTAPVMEKPLAQNAGLGWQGKHTSLVSRRHGSWLFLGEVYTTLDLPQSAPSGGGCGSCSRCLVACPTDAFPAPGVMDARRCISYLTIENRDPIPEALRPAMGNRIYGCDDCLAVCPWNRFATATHHMKLAARDDLRAPALRELATLDDAGFRARFSGSPVKRIGRGRFVRNVAVAIGNSGQAALRPSVAALCADPDPVVADAARWATLRLPQ

SEQ ID NO: 77552 - protein, 310 aa, Kordia algicida
  misc_feature (1)..(310): tr|A9DPF6|A9DPF6_9FLAO Epoxyqueuosine reductase OS=Kord ia algicida OT-1 OX=391587 GN=queG PE=3 SV=1
MKSTQKHTELIKAEAKRLGFLSCGISKSEFLEEEAPRLETWLNKNMHGEMSYMENHFDKRLDPTKLVDDSKSVVSLLLNYYPSETQKDPEAPKISKYAYGTDYHFVIKDKLKQLLNFIQEEIGEVSGRAFVDSAPVLDKAWAAKSGLGWIGKHSNLLTQKVGSFYFIAELIIDLELEYDLPVTDHCGSCTACIDACPTQAIVEPYVVDGSKCISYFTIELKNEIPTHVQGQFDNWMFGCDVCQDVCPWNRFSKPHNEPLFNPHPELLSMSKKEWEEITQEVFSEIFKKSAVKRTKYTGLMRNIQFLKTEN

SEQ ID NO: 77553 - protein, 313 aa, Kordia periserrulae
  misc_feature (1)..(313): tr|A0A2T6C6A4|A0A2T6C6A4_9FLAO Epoxyqueuosine reductase OS=Kordia periserrulae OX=701523 GN=queG PE=3 SV=1
MNSKEKHTNLIKAEAKRLGFLSCGISKAAFLEEEAPRLEAWLNQNMHGEMQYMENHFDKRLDPTKLVEGSKSVVSLLLNYYPSETQKDSEAPKISKYAYGMDYHFVIKDKLKQLLHFIQEEIGEVSGRAFVDSAPVLDKAWAAKSGLGWIGKHSNLLTQKVGSFYFIAELIIDLELEYDAPVTDHCGSCTACIDACPTQAIVEPYVVDGSKCISYFTIELKNEIPTHVQGQFDNWMFGCDVCQDVCPWNRFSKPHNEPLFNPHPELLSMSKKEWEEITQEVFSEIFKKSAVKRTKYTGLVRNIKFLKTEKGLE

SEQ ID NO: 77554 - protein, 307 aa, Kordia sp.
  misc_feature (1)..(307): tr|A0A2G2KJY3|A0A2G2KJY3_9FLAO Epoxyqueuosine reductase OS=Kordia sp. OX=1965332 GN=queG PE=3 SV=1
MNLKEKYTQMIKTEALRLGFLSCGISKATFLEEEAPKLESWLKNDFHGEMKYMENHFDKRLDPRLLVEDAKSVISLSYNYYPEQLQREDSYKIAKYAYGQDYHHVIKAKLKELSVFVQEQVGDVQGRAFVDSAPVMERAWAKKSGLGWEGKHSLILQKKQGSFFFLSELVIDLELDYDTPMTDHCGTCTKCIDACPTEAILPNNTVDGSKCISYFTIELKENIANEFKGQFDDWMFGCDICQDVCPWNRFSKPHNEPLFTPKSELLNMTKKDWEDITEDVFGKVFQKSAVKRTKFAGLQRNISFLKK

SEQ ID NO: 77555 - protein, 310 aa, Kordia sp.
  misc_feature (1)..(310): tr|A0A501HKK4|A0A501HKK4_9FLAO Epoxyqueuosine reductase OS=Kordia sp. TARA_039_SRF OX=2530203 GN=queG PE=3 SV= 1
MKSTEKHTQLIKAEAKRLGFLSCGISKAEFLEEEAPRLEAWLNQNMHGEMHYMENHFDKRLDPTKLVEGSKSVVSLLLNYYPSETQKDSEAPKISKYAYGMDYHFVIKDKLKQLLHFIQEEIGDVHGRAFVDSAPVLDKAWAAKSGLGWIGKHSNLLTQKVGSFYFIAELIIDLELEYDTPVTDHCGSCTACIDACPTNAIVEPYVVDGSKCISYFTIELKNEIPTHVQGQFDNWMFGCDVCQDVCPWNRFSKPHNEPLFNPHPELLSMTKKEWEEITQEVFSEIFKKSAVKRTKYAGLVRNIKFLKTEK

SEQ ID NO: 77556 - protein, 348 aa, Kordiimonadales bacterium
  misc_feature (1)..(348): tr|A0A2A4VUN7|A0A2A4VUN7_9PROT Epoxyqueuosine reductase OS=Kordiimonadales bacterium OX=2030814 GN=queG PE=3 S V=1
MSAAGGDIRAAIEAKAFELGFDQMGITRATTSEKVIEGFRSFIKLERHASMEWLADRMHQREHPQNLWPEAKSVIMLGVNYGPKDDPRLLLDHKEMANISVYARGKDYHDLIKKRLKAFARWLVPEYGCDLKVFVDTAPVPEKPLAVSAGLGWQGKHTNMVSREYGSWLFLGAIYTDMELPADTPHEDKCGSCTACIDACPTNAFPAPYEIDAGRCISYLTIEHKGPIPEEFRRPMGNRIYGCDDCLAACPWNKFAQVSAEAAFHARVELGAPALKDLVTLDDASFRQIFSGSPIKRIGRNRFIRNILYAIGNTGDADHMGAVNKLCDDPDEAVKDAAKWAKEQILSS

SEQ ID NO: 77557 - protein, 397 aa, Kordiimonadales bacterium
  misc_feature (1)..(397): tr|A0A5A7N2N4|A0A5A7N2N4_9PROT Epoxyqueuosine reductase OS=Kordiimonadales bacterium JCM 17846 OX=1236968 GN=q ueG PE=4 SV=1
MGIADPDGVEKAGVHLLRFVALGRHGEMGWMAEKADRRRHPKALWPEVRSVIMLGLNYGPAHDPLDQLGWPDQGTISVYARNKDYHDLIKTRLRMLARWLVEQTGCALKLFVDTAPVMEKPLAAAAGLGWQGKHTNLISRDLGNWLFLGAIFTDLALPTDGPIKDHCGSCRRCLDICPTKAFPAPYQLDARRCISYLTIEYKGHIDADLRPAMGNRIYGCDDCLAVCPWNKYAHKTNDPAFFPRPELSAPDLADLAELDDAAFRTVFAGSPIKRTGRDCFVRNVLIAIGNSANPAHLPVIHRRLDDPSPLVRAMAIWHWVGWGMSIRSKRPNAPIGPGKRIKMSSGNGRGSIPGLWIRPREARFDGSFSLRALMLCSCIMASGLPPSAYGKQHQHQK

SEQ ID NO: 77558 - protein, 354 aa, Kordiimonas lacus
  misc_feature (1)..(354): tr|A0A1G6TXU4|A0A1G6TXU4_9PROT Epoxyqueuosine reductase OS=Kordiimonas lacus OX=637679 GN=queG PE=3 SV=1
MPGGPTSGPGDIRAALEAKARELGFDAFGITRAETSDKVVEGLRNFVALDRHGSMAWMKERLHHRESPTNLWPEARSAIMLGVNYGPKDDPRLLLEQKGFGNISVYARGKDYHDIIKKRLKTLARWMVETWGCELKVFVDTAPVPEKPLSAAAGLGWQGKHTNMVSPEFGSWLFLGAIYTTMELPLDGPHRDQCGSCRACLDACPTDAFPAPYEIDARRCISYLTIEHKDPIPEEFRRALGNRIYGCDDCLAACPWNKFAQTSAEAAFHARVELGAPALEDLVALDDATFREVFSGSPIKRIGRDRFVRNVLYAIGNSGDAGYLTKIAALKDDQSHVVRDAAEWAWDTLQNEGE

SEQ ID NO: 77559 - protein, 385 aa, Kordiimonas sp.
  misc_feature (1)..(385): tr|A0A2E1CUL5|A0A2E1CUL5_9PROT Epoxyqueuosine reductase OS=Kordiimonas sp. OX=1970157 GN=queG PE=3 SV=1
MTNAGIKMTTAAQITADIRDTARRLGFDAVGITHADNLTQNAQWLQDFLNRHHYGDMDWMQEKADRRADPKVLWPDVKSIIMLAMNYGPSHDPRDLLAAKERGNISVYARGKDYHDVIKKRLKQIARHLVQHHHADVKVFVDTAPVMEKPLAANAGLGWQGKHTNMVSRHFGSWLFLGCIYTTLDLPSDDAHRDHCGQCHACLDICPTHAFPAPYKLDARRCISYLTIEHKGHIPREFRNPIGNRIYGCDDCLAVCPWNKYAQTAQDAAYFARAELQAPRLGDLARLDDVAFRQIFAGSPIKRLGRDRFIRNVLIAIGNSQNLDLLPAALSKLRDDSPLVRAMAVWALGKLIPLPQFNALRADHLSREVDPAVRQEWFTPEGPNA

SEQ ID NO: 77560 - protein, 360 aa, Koribacter versatilis
  misc_feature (1)..(360): tr|Q1IIW8|Q1IIW8_KORVE 4Fe-4S ferredoxin, iron-sulfur b inding protein OS=Koribacter versatilis (strain Ellin34 5) OX=204669 GN=Acid345_4182 PE=4 SV=1
MEAPMPSISAISEQVRRLAREHGFDLAGIAGVGPYPESEVFEPWIAEERHGEMSYLASRNDAGALKRAELKNAAPWARSVVVCAMNYNSSAPYSTHAGSNREGWIARYAQGEVDYHDVLLPRLRTLEAAIAALAPNEEPFRSWCYVDTGPVIERVFAKYAGIGWIGKNTCILNEQLGSWLFLGVILTNLALEPDLPATDRCGSCTRCLDACPTNAFVGPHQLDATKCISYLTIEKRGPIPEELRTGIGRHLFGCDICQDVCPWNRKAPVGTVPEFQPKEERVNPPLRELAEMDVDQYREFVQKSPIKRTKWVGFRRNLAVAIGNNGDLELLATAEKLAADEDPLVAEHGRWAVEQLRKIF

SEQ ID NO: 77561 - protein, 379 aa, Kosakonia arachidis
  misc_feature (1)..(379): tr|A0A1I7C2Y8|A0A1I7C2Y8_9ENTR Epoxyqueuosine reductase OS=Kosakonia arachidis OX=551989 GN=queG PE=3 SV=1
MSQPLNLNDLAQQIKLWGSELGFQQVGIADTDLSASEPKLQAWLDKQYHGEMEWMARHGMMRARPHELLPGTLRVISVRMNYLPAQAAFASTLKNPTLGYVSRYALGRDYHKLLRNRLKKLGELIQQHCASLNFRPFVDSAPILERPLAEKAGLGWTGKHSLILSRDAGSFFFLGELLIDIPLPVDSPIEEGCGRCVACMTICPTGAIVEPYTVDARRCISYLTIELEGAIPEAFRPLIGNRIYGCDDCQLICPWNRYSQLTSEEDFSPRKTLHAPALIELFAWNEAHFLKVTEGSAIRRIGHLRWLRNIAVALGNSPWDEAAIQALQQRLGEHPLLDEHIEWAIAQQIEKRNACVVEVQPAKKQRLVRVVEKGLPRDA

SEQ ID NO: 77562 - protein, 379 aa, Kosakonia cowanii
  misc_feature (1)..(379): tr|A0A410KI43|A0A410KI43_9ENTR Epoxyqueuosine reductase OS=Kosakonia cowanii OX=208223 GN=queG PE=3 SV=1
MSQPLDLNQLAQQIKQWGTELGFQQVGITDTDLTASEPKLQAWLDKQYHGEMEWMARHGMMRARPHELLPGTLRVISVRMNYLPPNAAFASTLKNPALGYVSRYALGRDYHKLLRSRLKKLGELIQQQCASLNFRPFVDSAPILERPLAEKAGLGWTGKHSLILSRDAGSFFFLGELLIDLPLPVDQPVEEACGRCVACMTICPTGAIVEPYTVDARRCISYLTIELEGAIPEEFRPLIGNRIYGCDDCQLICPWNRFSQLTDEADFSPRKALHAPALIELFAWSEAHFLKVTEGSAIRRIGHLRWLRNIAVALGNAPWDEANIVALEQRLGEHPLLDEHITWAIAQQIEKRNACVVEVQLPQKQRLVRVVEKGLPRDA

SEQ ID NO: 77563 - protein, 379 aa, Kosakonia oryzae
  misc_feature (1)..(379): tr|A0A1T5GHD9|A0A1T5GHD9_9ENTR Epoxyqueuosine reductase OS=Kosakonia oryzae OX=497725 GN=queG PE=3 SV=1
MSQPLNLNDLAQQIKQWGSELGFQQVGITDTDLSASEPKLQAWLDKQYHGEMEWMARHGMMRARPHELLPGTLRVISVRMNYLPAQAAFASTLKNPTLGYVSRYALGRDYHKLLRNRLKKLGELIQQHCASLNFRPFVDSAPILERPLAEKAGLGWTGKHSLILSRDAGSFFFLGELLIDLPLPVDSPVEEGCGRCVACMTICPTGAIVEPYTVDARRCISYLTIELEGAIPKAFRPLIGNRIYGCDDCQLICPWNRYSQLTSEEDFSPRKALHAPALIELFSWNEAHFLKVTEGSAIRRIGHLRWLRNIAVALGNAPWDEATIQALRQRLGEHPLLDEHIEWAIAQQIEKRNACVVEVQPPKKQRLVRVVEKGLPRDA

SEQ ID NO: 77564 - protein, 379 aa, Kosakonia oryzendophytica
  misc_feature (1)..(379): tr|A0A1C3ZV79|A0A1C3ZV79_9ENTR Epoxyqueuosine reductase OS=Kosakonia oryzendophytica OX=1005665 GN=queG PE=3 S V=1
MSQPLDLNYLAQQIKQWGSELGFQHVGITDTDLSASEPKLQAWLDKQYHGEMEWMARHGMMRARPHELLPGTLRVISVRMNYLPAQAAFASTLKNPTLGYVSRYALGRDYHKLLRNRLKKLGETISQQCASLNFRPFVDSAPVLERPLAEKAGLGWTGKHSLILSRDAGSFFFLGELLIDLPLPVDKPVEEGCGRCVACMTICPTGAIVEPYTVDARRCISYLTIELEGAIPEALRPLIGNRIYGCDDCQLICPWNRYSQLTNEDDFSPRKALHAPALIDLFAWDEAHFLKVTEGSAIRRIGHLRWLRNIAVALGNAPWEEANIQALEQRLGEHPLLDEHIQWAIAQQKEKRNACRVEVQMPKQQRLVRVVEKGLPRDA

SEQ ID NO: 77565 - protein, 379 aa, Kosakonia oryziphila
  misc_feature (1)..(379): tr|A0A1C4EP11|A0A1C4EP11_9ENTR Epoxyqueuosine reductase OS=Kosakonia oryziphila OX=1005667 GN=queG PE=3 SV=1
MSQPLNLNDLAQQIKLWGSELGFQQVGIADTDLSASEPKLQAWLDKQYHGEMEWMARHGMMRARPHELLPGTLRVISVRMNYLPAQAAFASTLKNPTLGYVSRYALGRDYHKLLRNRLKKLGELIQQHCASLNFRPFVDSAPILERPLAEKAGLGWTGKHSLILSRDAGSFFFLGELLIDLPLPVDSPVEEGCGRCVACMTICPTGAIVEPYTVDARRCISYLTIELEGAIPEAFRPLIGNRIYGCDDCQLICPWNRYSQLTSEEDFSPRKALHASALIELFTWNEAHFLKVTEGSAIRRIGHLRWLRNIAVALGNAPWDEASIQALRQRLGEHPLLDEHIEWAIAQQIEKRNACVVEVQPPKQQRLVRVVEKGLPRDA

SEQ ID NO: 77566 - protein, 379 aa, Kosakonia radicincitans; identical to SEQ ID NO: 77563
  misc_feature (1)..(379): tr|A0A5C1PD90|A0A5C1PD90_9ENTR Epoxyqueuosine reductase OS=Kosakonia radicincitans OX=283686 GN=queG PE=3 SV=1

SEQ ID NO: 77567 - protein, 379 aa, Kosakonia radicincitans
  misc_feature (1)..(379): tr|A0A1V0LJY4|A0A1V0LJY4_9ENTR Epoxyqueuosine reductase OS=Kosakonia radicincitans DSM 16656 OX=1177180 GN=que G PE=3 SV=1
MSQPLNLNDLAQQIKQWGSELGFQQVGITDTDLSASEPKLQAWLDKQYHGEMEWMARHGMMRARPHELLPGTLRVISVRMNYLPAQAAFASTLKNPTLGYVSRYALGRDYHKLLRNRLKKLGELIQQHCASLNFRPFVDSAPILERPLAEKAGLGWTGKHSLILSRDAGSFFFLGELLIDLPLPVDSPVEEGCGRCVACMTICPTGAIVEPYTVDARRCISYLTIELEGAIPEAFRPLIGNRIYGCDDCQLICPWNRYSQLTSEEDFSPRKALHAPALIELFSWNEAHFLKVTEGSAIRRIGHLRWLRNIAVALGNAPWDEATIQALRQRLGEHPLLDEHIEWAIAQQIEKRNACVVEVQPPKKQRLVRVVEKGLPRDA

SEQ ID NO: 77568 - protein, 379 aa, Kosakonia sp.
  misc_feature (1)..(379): tr|A0A369A0H6|A0A369A0H6_9ENTR Epoxyqueuosine reductase OS=Kosakonia sp. AG348 OX=2183906 GN=queG PE=3 SV=1
MSEPLDLNHLAQQIKQWGTELGFQQVGITDTDLSASEPALQAWLDKQYHGEMEWMARHGMMRARPHELLPGTLRVISVRMNYLPAQAAFASTLKNPTLGYVSRYALGRDYHKLLRNRLKKLGELIQQQCASLNFRPFVDSAPILERPLAEKAGLGWTGKHSLILSRDAGSFFFLGELLIDLPLPVDQPVEEGCGRCVACMTICPTGAIVEPYTVDARRCISYLTIEVEGAIPEEFRPLIGNRIYGCDDCQLICPWNRFSQLTEEEDFSPRKALHAPELIELFGWTEAYFLKITEGSAIRRIGHLRWLRNIAVALGNAPWDVANIQALEQRLGEHPLLDEHIQWAIAQQIEKRNAYVVEVQTSKKQRLVRVVEKGLPRDA

SEQ ID NO: 77569 - protein, 379 aa, Kosakonia sp.
  misc_feature (1)..(379): tr|A0A4R0HQG5|A0A4R0HQG5_9ENTR Epoxyqueuosine reductase OS=Kosakonia sp. WCHEs120001 OX=2529380 GN=queG PE=3 S V=1
MSEPLDLNHLAQQIKQWGTELGFQQVGITDTDLSASEPALQAWLDKQYHGEMEWMARHGMMRARPHELLPGTLRVISVRMNYLPAQAAFASTLKNPALGYVSRYALGRDYHKLLRNRLKKLGEMIQQQCASLNFRPFVDSAPILERPLAEKAGLGWTGKHSLILSRDAGSFFFLGELLVDLPLPIDQPVEEGCGRCVACMTICPTGAIVEPYTVDARRCISYLTIELEGAIPEEFRPLIGNRIYGCDDCQLICPWNRFSQLTDEEDFSPRKALHAPELIELFSWTEAYFLKVTEGSAIRRIGHLRWLRNIAVALGNAPWDAANIQALEQRNGEHPLLDEHIQWAIAQQIEKRNACKVEVQTSKKQRLVRVVEKGLPRDA

SEQ ID NO: 77570 - protein, 311 aa, Kosmotoga sp.
  misc_feature (1)..(311): tr|A0A5D0RPB4|A0A5D0RPB4_9BACT Epoxyqueuosine reductase OS=Kosmotoga sp. OX=1955248 GN=FXF54_13805 PE=4 SV=1
MNGVKRSELMKLNEMISEKLNELGYSVGFASIEAVNDLENEIKSRVDKADIDRDLYEHRMSWFNFNPYEVLAGNKTIIIVSVPQNAISVSYLWKGKNRKFILPPTYIFSPIGENLLEIIRKTLEPFGFTAENAALPEKLLATRTGLAKYGRNNITYVEGSGSYHRLFAFFTDMPCENPSWRKPELLEQCEFCSNCVDNCPTKCIKEEKFIINAERCLTHFNESRKPFPDWIKDHWHNAIIGCLKCQTICPANPKLIVEESHISFSEFEVKQIINQTPKEDLQKETWNKLKELCLHMCYSFIGRNLKVLIPD

SEQ ID NO: 77571 - protein, 143 aa, Kosmotogaceae bacterium
  misc_feature (1)..(143): tr|A0A3B8N7H7|A0A3B8N7H7_9BACT 4Fe-4S ferredoxin-type d omain-containing protein OS=Kosmotogaceae bacterium OX= 2053567 GN=DCE14_01985 PE=4 SV=1
MMNLVTGVMDSEGFSVGRAALPEKLLAARTGLAGYGRNNITYVPKAGSYHRLVALYTDMPCEDYEWQSPSRLDECKNCSACIRSCPTGCIVEERFLINASRCLTYFNESRRPFPSWVNSKWHNAIIGCLKCQMICPANPELTI

SEQ ID NO: 77572 - protein, 351 aa, Kozakia baliensis
  misc_feature (1)..(351): tr|A0A1D8UVC8|A0A1D8UVC8_9PROT Epoxyqueuosine reductase OS=Kozakia baliensis OX=153496 GN=queG PE=3 SV=1
MKKSVEDRIAEHARHLGFDAVGFCRAELPDEARARLREFVEAGRHGTMGWMEQRLDQRGEPKTLWPEVRSVIVLGMSYAPAADPLATLRQPDRGNISVYARHRDYHDVIKGLLKHLAQFIVKQGDGVEVKVFVDTAPVLEKPLAEAAQLGWQGKHTNLVSRDEGSWLLLGEIYTTLELTPSEPRAGSCGSCTRCLTACPTDAFPAPYQLDARRCISYLTIEHTGPIPNEFRPLMGNHIYGCDDCLAACPWNRFAQASRQTKLTARPDLIAPKLEELARLDDPAFRALFSGSPIKRIGRNRFVRNVLIAIGNSADPALSPVAMELTQDSDPVVAEAAQWAVQKLGEKATCLQ

SEQ ID NO: 77573 - protein, 306 aa, Kriegella aquimaris
  misc_feature (1)..(306): tr|A0A1G9THV0|A0A1G9THV0_9FLAO Epoxyqueuosine reductase OS=Kriegella aquimaris OX=192904 GN=queG PE=3 SV=1
MLGKPEYAKAIKTEAKRLGFLSCGISKAEFLEEEAPRLEQWLENNMHGEMAYMANHFDKRLDPTKLVEGSKSVISLLLNYYPEETQKNDSYKLSKYAYGHDYHHVIKSKLKLLQEFISEEIGDVNGRAFVDSAPVLDKAWAAKSGLGWIGKHSNLLTQQVGSFYFIAELIVDLELEYDLPVTDHCGTCTACIDACPTEAIVEPYVVDGSKCISYFTIELKNEIPNEFHGKFDDWMFGCDVCQDVCPWNRFSKPHNEPLFNPHPELLSMTKKDWQEITEDVFKKVFQKSAVKRTKFSGLQRNIEFLK

SEQ ID NO: 77574 - protein, 388 aa, Kroppenstedtia eburnea
  misc_feature (1)..(388): tr|A0A1N7MF17|A0A1N7MF17_9BACL Epoxyqueuosine reductase OS=Kroppenstedtia eburnea OX=714067 GN=SAMN05421790_10 648 PE=4 SV=1
MDTEQIKEELKREAKRLHIDKIGFASAEPFTELKERLIQHRKAGYESGFEEPDLEKRTDPRKSLPEARSIIAIALAYPTRMENPPESRAGALRGVFCRASWGEDYHRVLKNKLEGLKAKLSELVPGAAAKVMVDTGALSDRAVAERAGIGWSGKNTSIITQEFGSWVYLGEMITDVQLPPDEPITQACGDCTACLDACPTGALTEPGRLNSQACLAYLTQTKGYLPEEYRSKLGGSLYGYETCQLVCPYNRGKNFTHHREFTPEPDQVKPLLKPLLQMSNREFRERFGSMAGSWRGKKPIQRNAIIALGRYRDRTAVPDLIHLLETDIRPVIRGTAAWALGRIGGAEAETALRQSKDREQDEEVLQEIASALQACHSEEKAEHRYREA

SEQ ID NO: 77575 - protein, 413 aa, Ktedonobacter racemifer
  misc_feature (1)..(413): tr|D6TMU1|D6TMU1_9CHLR 4Fe-4S ferredoxin-type domain-co ntaining protein OS=Ktedonobacter racemifer DSM 44963 O X=485913 GN=Krac_8415 PE=4 SV=1
MLETQVVKEYAYELGFDTVRITTAEAFTEAKGIIKERISRGLMDGLPWYTSERADVSCHPDALLPEAQSIISLGMTYLTEQPGNEEGEGPRGRIARYAWGDDYHDIIKPRLQRFAEWLREYTRSELGSEAEARLFVDTGRMVDRAVAQRAGLGWYGKNTNILTHGWGSWLFLAEIVTNVPLEPDEPLKANCGHCEICLHACPTGALTNPYELDNRLCISFLTIELRGSIPLELRPLIGNYIFGCDICQEVCPVNKVAERRLGLRDQQGQPQFVALEAVNRRSTERQATFQPHQEFLKRPAVGSEPELIPLLALSEEEFRERFRHSPIKRTKRRGLLRNVCVALGNSGNREAVPALIGALHDQEALVRGHAAWALGRLQGLEAYQALQAALMSEEDTEVQQEIHCAIAMFGEDK

SEQ ID NO: 77576 - protein, 109 aa, Ktedonobacter sp.
  misc_feature (1)..(109): tr|A0A3D2MI65|A0A3D2MI65_9CHLR tRNA epoxyqueuosine(34) reductase QueG (Fragment) OS=Ktedonobacter sp. OX=19327 16 GN=DHV65_02150 PE=4 SV=1
MLNPTTIKEYAYALGFDIARITTADALPETERVIKERIAQGLMDGLPWFTAERTEVSCHPDALLSGAQSIITLAMFYLTQQPDEAQDNVPRGRISRYAWGDDYHEIIKP

SEQ ID NO: 77577 - protein, 413 aa, Ktedonobacter sp.
  misc_feature (1)..(413): tr|A0A1Q6YHP1|A0A1Q6YHP1_9CHLR tRNA epoxyqueuosine(34) reductase QueG OS=Ktedonobacter sp. 13_2_20CM_53_11 OX= 1805233 GN=AUH05_12355 PE=4 SV=1
MLNPTTIKEYAYSLGFDTARITSAEALPEAERVIRERIAEGLMEGLPWFTAERAEVSCYPDALLPGAQSIITLAMFYLTEQPDETQDDVPRGRISRYAWGDDYHEIIKPRLQQFAAWLREYARKEISDDIETRLFVDTGRMVDRAVAQRAGLGWYGKNTNILTKGWGSWVFLAEIVTNLPLQADLPLKTSCGSCEICLHACPTKALPAPYVLDNTRCISFLTIELRGSIPLELRPLMGNLIFGCDICQEVCPVNIVAEKRLGLRGSQKTLSSASHEESQQQPEHAKTLPVLPHKEFRPRATVGSSPELIPLLSLTEEQFRERFRHSPIRRAKRRGLLRNVCVALGNCGDQRAVPALIGALQDNEALIRGHAAWALGRIGGEHAKGALHTALATEENQEVQKEIQCALAEIGSL

SEQ ID NO: 77578 - protein, 418 aa, Ktedonobacterales bacterium
  misc_feature (1)..(418): tr|A0A4P6JUN4|A0A4P6JUN4_9CHLR tRNA epoxyqueuosine(34) reductase QueG OS=Ktedonobacterales bacterium SCAWS-G2 OX=2509675 GN=queG PE=4 SV=1
MLETEPIKAYAYELGFDTVRITTAEEFAEARQIIQERIGRGLMDGMSWFTAERAEVSSRPKALLPEAQSIIALGMVYLTEQPDDGEPQDLPRGRISRYAWGDDYHDTIKPKLQQFAGWLREYARAEMGEQLETRLFVDTGRMVDRAVAQRAGLGWYGKNTNILTRGWGSWLFLAEIVTNLSLRPDTPIKANCGSCEICLHACPTAALPNPYELDSTRCISYLTIELRGSIPLELRPLMGNLIFGCDICQEVCPVNKVAEKRLGLRTETGKTQFIALEGIGKNSKEPAHSFRPHPELRPRSGVGSSPELIPLLSLTEEQFRERFRRSPIKRTKRRGLLRNVCVALGNIGDPRAIPALIGALHDQEPLVRGHAAWALGRLGGEEAIHALQSALASEEEAEVQQEIRCALASTTTSPVGEA

SEQ ID NO: 77579 - protein, 376 aa, Kurthia sibirica
  misc_feature (1)..(376): tr|A0A2U3AH71|A0A2U3AH71_9BACL tRNA epoxyqueuosine(34) reductase QueG OS=Kurthia sibirica OX=202750 GN=queG PE =4 SV=1
MNVLTLQQQVRDYAISIGIDKIGFTSAAPFIDLKRLLKQQQELGYQSGFEEADITKRTEPTLLLEQAQSIIAIAVAYPSKMVDAPQGKKGERRGIFCRASWGIDYHTAMRERLALLEQFILEKVPTAKLRSMVDTGELSDRAVAERAGIGWSGKNTNIITPEFGSYVYLAEMITNIPFESDEAIGDQCEDCRLCLDVCPTGALIQGGQLNAQRCIAFLTQTKGDLPDEFRTHLGNRIYGCDTCQTVCPKNKRKHNLIHEELFPDPEIAKPLLKPLLTISNKDFKQQFGHISGAWRGKKPLQRNAIYALAHFKEEEAIPLLEEVMTTDERPVIKGAAAWAIGKINGEQSKAILQRALIDEQDAYVIEEIHKGLLFTQ

SEQ ID NO: 77580 - protein, 377 aa, Kurthia sp.
  misc_feature (1)..(377): tr|A0A0X1RV87|A0A0X1RV87_9BACL Epoxyqueuosine reductase OS=Kurthia sp. 11kri321 OX=1750719 GN=queG PE=4 SV=1
MNVLSFQQQVREYAQSIGIDKIGFASATPFIDLKARLIQQQQLNYQSGFEESDVTLRTEPTLLLEDAKSIIAIALAYPSKMLNVPQGKKGARRGIFCRASWGVDYHTVLREKLALLEEFIHTHHPHSRTKSMVDTGELSDRAVAERAGIGWSGKNTNIITPEFGSYVYLGEIITDIPFIADEPIEDECLDCRLCIDVCPTGAIVQAGQLNAQRCIAFLTQTKDTLPDEFRTHLGNRIYGCDTCQTVCPKNKRKHNLIHEEFFPDPEIAKPLLEPLLTMSNKQFKQDFGHVSGSWRGKKPLQRNAIYALAHFKEESAIPTLTEVLQKDTRPIIRGAAAYAIGKIDAPASKAILEQALQKEQDEEVLEEIEKGLSFITK

SEQ ID NO: 77581 - protein, 377 aa, Kurthia sp.
  misc_feature (1)..(377): tr|A0A433RRF0|A0A433RRF0_9BACL Iron-sulfur cluster-bind ing protein OS=Kurthia sp. 3B1D OX=1562256 GN=QI30_1373 5 PE=4 SV=1
MNVLTLQQELRDFAASIGVDKIGFTTAAPFVDLKHLLKQQQELNYQSGFEEENIELRTEPTLLLEEAASIIAIAVAYPSRMENAPTGKKGARRGIFCRASWGTDYHTVLREKLKEIEGFLVERVPGIKFRSMVDTGELVDRAVAERAGIGWSGKNCSIITPEFGSYVYLGEMITNIPFAPDEAIEDQCGECTLCIDVCPTGAIVQGGQLDSNRCVAFQTQTKGFLPDEFREKIGNRIYGCDTCQTVCPKNKGKKNWLHAAFEPEPELAKPLLAPLLSMTNKEFKSQFGHMSGSWRGKKPIQRNAIIALAHFKEEDAMPQLIELLTKDERPMIRGTAAWAIGKIAAAEAEEVLLAALQLEQDPDVLNEIDKGLTLLKN

SEQ ID NO: 77582 - protein, 376 aa, Kurthia zopfii
  misc_feature (1)..(376): tr|A0A2U3AH32|A0A2U3AH32_9BACL tRNA epoxyqueuosine(34) reductase QueG OS=Kurthia zopfii OX=1650 GN=queG PE=4 S V=1
MNVLSFQKQLREYAKTIGIDKIGFASAAPFIDLKQRLIQQQQLNYQSGFEESNVELRTEPTLLLEEAQSIVAIALAYPSKMVDAPQGKKGARRGIFCRASWGVDYHIALRKRLALLEEFIQENFPGGRTKSMVDTGELSDRAVAERAGIGWSGKNTNIITPEFGSYVYLGEIITNIPFEPDEPMEDECLDCRLCLDVCPTGALIQGGQLNAQKCIAFLTQTKGTLPDEFRSHLGNRIYGCDTCQTICPKNKRKHNLIHEEFFPEPEIAKPLLEPLLTISNKQFKNEFGHISGSWRGKKPLQRNAIYALAHFKEESAIPTLEEVLKKDDRPVIRGAAAWAIGKINGEQSLAILQQALQVEKEEEVILEIEKGLAFIH

SEQ ID NO: 77583 - protein, 376 aa, Kurthia zopfii
  misc_feature (1)..(376): tr|A0A3S4V6I3|A0A3S4V6I3_9BACL Epoxyqueuosine reductase OS=Kurthia zopfii OX=1650 GN=queG PE=4 SV=1
MNVLSFQKQLREYAKTIGIDKIGFASAAPFIDLKQRLIQQQQLNYQSGFEESNVELRTEPTLLLEEAQSIVAIALAYPSKMVDAPQGKKRARRGIFCRASWGVDYHIALRKRLALLEEFIQENFPGGRTKSMVDTGELSDRAVAERAGIGWSGKNTNIITPEFGSYVYLGEIITNIPFEPDEPMEDECLDCRLCLDVCPTGALIQGGQLNAQRCIAFLTQTKGTLPDEFRSHLGNRIYGCDTCQTICPKNKRKHNLIHEEFFPDPEIAKPLLEPLLTISNKQFKNEFGHISGSWRGKKPLQRNAIYALAHFKEESAIPTLEEVLKKDDRPVIRGAAAWAIGKINGEQSLAILQQALQVEKAEEVILEIEKGLAFIH

SEQ ID NO: 77584 - protein, 400 aa, Kushneria avicenniae
  misc_feature (1)..(400): tr|A0A1I1IF00|A0A1I1IF00_9GAMM Epoxyqueuosine reductase OS=Kushneria avicenniae OX=402385 GN=queG PE=3 SV=1
MNTVSPHSPEPGNIDDPMPREASRALDPAEMAEKLKIWGRELGFQQLGITDTDLDAHEDYLNRWLEAGYHGEMDYMARHGTRRTRPAELEPGTLRIISVRMDYLPPEIESTRVLGQPERAYVARYALGRDYHKLIRKRLTQLAQKLQKEIGTFGFRAFVDSAPVMERALAQKAGIGWFGKNAMILNPKAGSLFFLGELYTDLPLPVDAPFERDHCGKCTRCQTWCPTGAIVDDKVIDARRCISYLTIEKHGAIPLEYRHAMGNRVFGCDDCQLVCPFTRFTRATREQDFAPRHALDRARLIDLFNWSEPEFLEHTQGSAIRRLGYERWLRNLAVGLGNAPFSDEIVSALKARLSWPSDLVREHVRWALSQQAQKRDATREAASAPLIEAGFKDIIARQST

SEQ ID NO: 77585 - protein, 398 aa, Kushneria indalinina
  misc_feature (1)..(398): tr|A0A3D9DUI2|A0A3D9DUI2_9GAMM Epoxyqueuosine reductase OS=Kushneria indalinina DSM 14324 OX=1122140 GN=queG P E=3 SV=1
MTTSKTARAENASASASSDAARALDPAEMADKLRIWARELGFQQLGITDTDLDAHEAYLNRWLEAGYHGEMDYMARHGTKRTRPAELEPGTLRIISVRMDYLPPEIESTRVLGQPERAYVARYALGRDYHKLIRKRLTQLAQKLQQEIGDFGFRAFVDSAPVMERALAQKAGIGWFGKNAMILNPQAGSLFFLGELYTDLPLPVDQPFERDHCGKCTRCQTWCPTGAIVDDKVIDARRCISYLTIEKHGPIPLEYRRAMGNRVFGCDDCQLVCPFTRFTRATREPDFAPRHALDRARLVDLFNWSEPEFLEHTQGSAIRRLGYERWLRNLSVGLGNAPFSEEIVAALRARLAWPSDLVREHVRWALSEQYLKRDEGREVSEPPLIEAGYSDIIARAPA

SEQ ID NO: 77586 - protein, 390 aa, Kushneria konosiri
  misc_feature (1)..(390): tr|A0A2Z2H3G4|A0A2Z2H3G4_9GAMM Epoxyqueuosine reductase OS=Kushneria konosiri OX=698828 GN=queG PE=3 SV=1
MALHHDTDAPPAPGTLDPARMAEKLRVWARELGFQQLGITDTDLDAHEDHLHRWLEAGYHGEMDYMARHGTKRTRPAELEPGTLRIISVRMDYLPPEIESTRVLGQPERAYVARYALGRDYHKLIRKRLTQLAQKLQKEIGTFGFRAFVDSAPVMERALAQKAGIGWFGKNAMILNPKAGSLFFLGELYTDLPLPVDEPFEGDHCGKCTRCQTWCPTGAIVDDKVIDARRCISYLTIEKHGSIPLEYRHAMGNRVFGCDDCQLVCPFTRFTRTTREQDFAPRHALDRARLVDLFNWSEPEFLEHTQGSAIRRLGYERWLRNLAVGLGNAPFSEEIVSALKARLAWPSDMVREHVRWALSQQLQKRDDAREAALAPLIEAGFKDIIARQPA

SEQ ID NO: 77587 - protein, 393 aa, Kushneria marisflavi
  misc_feature (1)..(393): tr|A0A240USR5|A0A240USR5_9GAMM Epoxyqueuosine reductase OS=Kushneria marisflavi OX=157779 GN=queG PE=3 SV=1
MATGHDADSSTALETTRALDPARMAEKLRVWARELGFQQLGITDTDLGAHEARLEQWLEAGHHGEMDYMARHGTKRTRPAELEPGTLRIISVRMDYLPPEIESTRVLGQPERAYVARYALGRDYHKLIRKRLTQLAQKLQKEIGTFGFRAFVDSAPVMERALAQKAGIGWFGKNAMILNPKAGSLFFLGELYTDLPLPVDEPFEGDHCGKCTRCQTWCPTGAIVDDKVIDARRCISYLTIEKHGAIPLEYRHAMGNRVFGCDDCQLVCPFTRFTRATREKDFAPRHALDRTRLVDLFNWSEPEFLEHTQGSAIRRLGYERWLRNLAVGLGNAPFSEEIVSALKARLAWPSDMVREHVRWALSQQAQKRDATREAASAPLIEAGFKDIIARQPA

SEQ ID NO: 77588 - protein, 414 aa, Kushneria phyllosphaerae
  misc_feature (1)..(414): tr|A0A2R8CNM7|A0A2R8CNM7_9GAMM Epoxyqueuosine reductase OS=Kushneria phyllosphaerae OX=2100822 GN=queG PE=3 SV =1
MIPASSDTVSSDTAASNTAASNTARPDDAGPPAADACRALDPAEMAEKLKLWARELGFQQLGITDTDLDAHEARLNRWLEAGYHGDMDYMARHGTKRTRPAELEPGTLRIISVRMDYLPPEVETTRVLAQPERAYVARYALGRDYHKLIRKRLTQLAQKLQKEIGDFGFRAFVDSAPVMERALAQKAGIGWFGKNAMILNPKAGSLFFLGELYTDLPLPVDQPFERDHCGKCTRCQTWCPTGAIVDDKVIDARRCISYLTIEKHGPIPLEYRHAMGNRVFGCDDCQLVCPFTRFTRATREQDFAPRHALDRARLVDLFNWSEPEFLENTQGSAIRRLGYERWLRNLAVGLGNAPFSEEIISALRARLAWPSDMVREHIRWALAEQTRKRDEHQKPVSAPLIEAGFEDIIARQPA

SEQ ID NO: 77589 - protein, 391 aa, Kushneria sinocarnis
  misc_feature (1)..(391): tr|A0A420WTD4|A0A420WTD4_9GAMM Epoxyqueuosine reductase OS=Kushneria sinocarnis OX=595502 GN=queG PE=3 SV=1
MTDSVLPAAHHDNGELDFAAIAERLRVWARELGFAQLGITDTDLSNHEAYLERWLAAGYQGEMDYMSRHGTKRTRPAELEPGTLRVISVRMDYLPPEVETTRVLGQPARAYISRYGVGRDYHKLMRKRLTRLARQLEAEIGEFGYRAFVDSAPVMERALAQKAGLGWFGKNAMILHPQAGSFFFLGELYTDLPLPVDEPFESEHCGSCSRCQTWCPTGAIVDDRVIDARRCISYLTIEKHGEIPVEFREAMGNRVFGCDDCQLVCPFTRFTRATREDDFTPRHELDRAELVTLFNWSEEEFLERTQGSPIRRIGYERWLRNLAVGLGNAPHDPAIISALRARLAWPSDMVREHVRWALARQEERAHPDSPTDERPTPNDAGYRDIIAREAH

SEQ ID NO: 77590 - protein, 391 aa, Kushneria sp.
  misc_feature (1)..(391): tr|A0A1S1NT68|A0A1S1NT68_9GAMM Epoxyqueuosine reductase OS=Kushneria sp. YCWA18 OX=657387 GN=queG PE=3 SV=1
MTDSALTTALHDHGDPDFAAIAERLKVWARELGFAQLGITDTDLSNHEAYLERWLAAGYQGEMDYMSRHGTKRTRPEELEPGTLRVISVRMDYLPPEVETTRVLSQPNRAYISRYGIGRDYHKLMRKRLTRLARQLAAEIGPFGYRAFVDSAPVMERALAQKAGLGWFGKNAMILHPQAGSLFFLGEIYTDLPLPVDKPFEGEHCGSCNRCQTWCPTGAIVDDRVIDARRCISYLTIEKHGEIPLEFREAMGNRVFGCDDCQLVCPFTRFTRATREQDFTPRHALDRAELVTLFNWSEEEFLARTEGSPIRRIGYERWLRNLAVGLGNAPHDPAIISALRARLAWPSDMVREHVRWALAKQYERARPENPVDARITPVDAGYRDIIAREAR

SEQ ID NO: 77591 - protein, 425 aa, Kyrpidia spormannii
  misc_feature (1)..(425): tr|A0A2K8N8L6|A0A2K8N8L6_9BACL Epoxyqueuosine reductase OS=Kyrpidia spormannii OX=2055160 GN=CVV65_12645 PE=4 SV=1
MKKDQARAQQACRGEWEISRQQLAGMATDLGLKAAAMPARPLRSLGRILEKRRQAGWMCEFEAENTADRIDPLRSLPGAQSVVAVAMPYRNRRWDTPRPPGLRGALSKYAWGEDYHRVLRRRLGALADRLATTAGREITVRAAVDTGPLVERAFAEAAGLGRVGKNGCLYVEPYGSWVFLGLLLTDLRIEPERTDPPGEVGRWGNEGPRVDGQADPDVFTLCGTCDRCLRACPTQAFEAPGVLNPNRCLSYVTQMKGLLPEEFQAPMGTRIWGCDICQAVCPINRRAACAPEVLEEIGEPGPESDREFLDRAYPDLIELLTMSRRSFERRFGVTAVAWRGVHTLRRNAASALGTWRDPRAVPPLIDRLGDGRPEVRSAAAWALARICTPEGWAALAEAAERETDSRVRARMEALLSQQGLSAKPL

SEQ ID NO: 77592 - protein, 425 aa, Kyrpidia tusciae
  misc_feature (1)..(425): tr|D5WTG8|D5WTG8_KYRT2 4Fe-4S ferredoxin-type domain-co ntaining protein OS=Kyrpidia tusciae (strain DSM 2912 / NBRC 15312 / T2) OX=562970 GN=Btus_2545 PE=4 SV=1
MNKDQARAQEAGPGEWEISRRQLAGMAAELGLKAAAMPALPLRSLGRILEKRRQAGWMCEFEAENTADRIDPLRSLPCAQSVVAVAMPYRNRRWDTPRPPGLRGALSKYAWGEDYHRVLRGRLGALADRLATTAGREITVRAAVDTGPLVERAFAEAAGLGRVGKNGCLYVEPYGSWVFLGLLLTDLRIEPERTDPPGEVGSWRNEGPRVDGQADPDVFALCGTCDRCLRACPTDAFEAPGVLNANRCLSYVTQMKGLLPEEFQAPMGTRIWGCDICQAVCPINRRAACAPEHLEEIGEPGPESDREFLDRAYPDLVELLTMSRRSFERRFGVTAAAWRGVHTLRRNAASALGTWRDPRAVPPLIDRLGDGRPEVRSAAAWALARIGTPEGWAALAKAAEQETDSRVRARMEALLSQQGLPAKPL

SEQ ID NO: 77593 - protein, 372 aa, Kyrpidia tusciae
  misc_feature (1)..(372): tr|D5WR20|D5WR20_KYRT2 4Fe-4S ferredoxin iron-sulfur bi nding domain protein OS=Kyrpidia tusciae (strain DSM 29 12 / NBRC 15312 / T2) OX=562970 GN=Btus_2061 PE=4 SV=1
MFGPVESAAVTLQQDAEARGFLAAWAPVDLPPSVVDRYRAWIADRRQAGMGQLARNVEVRLAPRSRLAWARSVLVLAAPHRFPDPGPPPGGVRIGRVGRIFWMREQDYIQRRVQPHLDELKEICHRLGGRCRDYVEQGPLSFRSYGAGAGLGWIGRNGMLLHPEWGSYMTLAVLLTDFEVEAAPEHPFRCGRCRRCLDRCPTGALLGDGTLDANRCISYWTTQHLDLIPPEVWDGLGSWLFGCDECQEVCPWTPEAERFWEGYEPEPELAHPDLSDFLTLPIHMFAQKYAQSAFERAGRPRMARNALIVLGNTRDSAYLPLIRMGCEDPSPLVRATASWAAVRVGGRQEAERLLRDPEPLVCNEARRALEFS

SEQ ID NO: 77594 - protein, 316 aa, Labilibaculum antarcticum
  misc_feature (1)..(316): tr|A0A1Y1CK03|A0A1Y1CK03_9BACT Epoxyqueuosine reductase OS=Labilibaculum antarcticum OX=1717717 GN=queG PE=3 S V=1
MNLTLTAKSNLIKSKALELGLDLCGIAKADFLEDEKENFQSWLDKEYHGEMAYMANNIEKRLDPRLLVENTKSIVVVGLNYFPKQQQEDPEAPVIAKYAYGKDYHFVLKDRLNQLLEYINTEIGEVSGRAFVDSAPILEHAWAKKAGLGWIGKNSLLLNRKIGSFLFLGELLIDMELEYEEEKYQDFCGGCSKCIRACPTGAITEPYVVNGSKCISYFTIELKGEIPEEMKGKFENRAFGCDICQDVCPWNRMAKAHSVPEFEPNPDLLSLSKAEWEQMEAHKFGEIFKNSAVKRTKFKGLKRNLDFITENNDENT

SEQ ID NO: 77595 - protein, 316 aa, Labilibaculum filiforme
  misc_feature (1)..(316): tr|A0A2N3HXD5|A0A2N3HXD5_9BACT Epoxyqueuosine reductase OS=Labilibaculum filiforme OX=1940526 GN=queG PE=3 SV= 1
MNLTLSIKSKLIKAKALELGLDLCGIAKADFLEDEKENFQSWLEKKYHGEMTYMTNNIEKRLDPRLLVENTKSVVVVGLNYFPKEQQQDPKAPIIAKYAYGKDYHFVLKDRLNQLLEYINTEIGEVSGRAFVDSAPILEHAWAKKAGLGWIGKNSLLLNRKIGSFLFLGELLIDMELEYEDEKYQDFCGGCSKCIRACPTGAITEPYVVNGSKCISYFTIELKGEIPEEMKGKFENRAFGCDICQDVCPWNRMAKAHSVPEFEPNPDVLSLSKLEWEQMDAHKFGELFKNSAVKRTKLKGLKRNIDFLNKANNEND

SEQ ID NO: 77596 - protein, 313 aa, Labilibaculum manganireducens
  misc_feature (1)..(313): tr|A0A2N3I7R0|A0A2N3I7R0_9BACT Epoxyqueuosine reductase OS=Labilibaculum manganireducens OX=1940525 GN=queG PE =3 SV=1
MNLTLSAKSNLIKAKAIELGLDLCGIAKADFLEDEKENLRSWLDQKYHGEMLYMANNIEKRLDPRLLVENTKSIVVVGLNYFPKELQQDSEAPVIAKYAYGKDYHFVLKDRLNQLLEYINTEFGEVSGRAFVDSAPILEHAWAKKAGLGWIGKNSLLLNRKIGSFLFLGELLIDMELEYEEEKYQDFCGGCSKCIRACPTGAITEPYVVNGSKCISYFTIELKGEIPEEMNGKFENRVFGCDICQDVCPWNRMVKSNSVPEFQPNSDLLSLSKAEWEHMDAHKFGEIFKNSAVKRTKFKGLKRNLDFLHKECE

SEQ ID NO: 77597 - protein, 367 aa, Labilithrix luteola
  misc_feature (1)..(367): tr|A0A0K1Q9L1|A0A0K1Q9L1_9DELT Epoxyqueuosine (OQ) redu ctase QueG OS=Labilithrix luteola OX=1391654 GN=AKJ09_0 8768 PE=4 SV=1
MPEPILEGDVPLKARVVAEARRLGFEAVGFARADVPLEADFERYEAFVRDGKQGEMGWLAAAAEARRSLDGEHILRGARTVICLARPYARSSVDEAADPEVVQAIARYARGRDYHNGLRKKLRKLAAFVRTLGGEEPVQARPLCDEEPILERAWASRAGLGFVGKNGLLIVPGVGSLVLLGEVVTTLAIEPDATIPERCGSCTRCLDACPTGAFEAPFVLDPRRCVAYLTIEHRAAIPDELHEGVGGHLFGCDDCQTVCPFNASARSARRAGMPIDARFTPDPRWGEVRVRDLLMLDDAGFAALREGSPVGRATRIGLARNAAVVLGNRADPADVEALTRAAEHHDSEIVRKAAFWALARIEKSTAP

SEQ ID NO: 77598 - protein, 380 aa, Labrenzia aggregata
  misc_feature (1)..(380): tr|A0A0M6Y5C9|A0A0M6Y5C9_9RHOB Epoxyqueuosine reductase OS=Labrenzia aggregata OX=187304 GN=queG PE=3 SV=1
MDRKTQKLLTAFEEKARALGFDGVKIAAADSIPEAGERLRHFLDKGYEGSMGWMAETADRRYSPQALWPEVRSVIMLAMNYGPGSAPHEHPLAHLADKTSGGISVYARHRDYHDVIKGRLKELASFLVSRSGGDVKVFVDTAPVMEKPLGEAAGLGWQGKHTNLVSRDLGSWFFLGSIFTTLDLPPSGAERDHCGSCRACLDSCPTNAFPAPYQLDARRCISYLTIEHPGPIPGAFRKAIGNRIYGCDDCLAACPWNKFAEAAREAKLIAREEMITPKLADLLSLDDTAFRQLFSGSPVKRIGRGKFLRNVLIAAGNSGETELLGKIEALLDDADALVRGTAVWALGQLSAQEDFQARKTAALRVETDETVRSEWLLAQS

SEQ ID NO: 77599 - protein, 380 aa, Labrenzia aggregata
  misc_feature (1)..(380): tr|A0NRJ8|A0NRJ8_LABAI Epoxyqueuosine reductase OS=Labr enzia aggregata (strain ATCC 25650 / DSM 13394 / JCM 20 685 / NBRC 16684 / NCIMB 2208 / IAM 12614) OX=384765 GN =queG PE=3 SV=1
MDHKTQKLLTAFEEKAHTLGFDGVKIAAADSIPQAGERLRHFLDKGYEGSMGWMAETADRRSSPQALWPEVRSVIMLAMNYGPGSAPHEHPLAHLADKTTGGISVYARHRDYHDVIKGRLKELASLLVSRSGGDVKVFVDTAPVMEKPLGEAAGLGWQGKHTNLVSRELGSWFFLGAIFTTLDLPPSGAERDHCGSCRACLDSCPTNAFPAPYQLDARRCISYLTIEHPGPIPHDFRKAIGNRIYGCDDCLATCPWNKFAEAAREAKLIARDELINPKLADLLSLDDAAFRTLFSGSPVKRIGRGKFLRNVLIAAGNSGEPALLEKVEALLADDDALVRSTAVWALRQLSAQEDFQDRKTAALRVETDEIVRSEWLHAQI

SEQ ID NO: 77600 - protein, 393 aa, Labrenzia alba
  misc_feature (1)..(393): tr|A0A0M6ZHB0|A0A0M6ZHB0_9RHOB Epoxyqueuosine reductase OS=Labrenzia alba OX=311410 GN=queG PE=3 SV=1
MDKKTQKLLTALEDKAQTLGFCGLKIAPADSIPGAADRLQAYLDNGYHGTMVWMKETATRRASPRALWPDVRSVLMLAMNYGPDDTPENHPLAHLNDTGTGGLSVYARNRDYHDVIKGRLKELASFLISRAGGGDVKVFVDTAPVMEKPLGEAAGLGWQGKHTNLVSREHGSWFFLGSIFTTLDLPASGRETDHCGSCRACLDSCPTDAFPAPYQLDARRCISYLTIEHPGPIPLEFRKAMGNRIYGCDDCLAACPWNKFASAANEIKLVARKDLNNPLLADLLDLDDADFRKFFAGSPVKRIGRNRFMRNVLIAAGNSGQRGLLPKIDRLMNDPDPVVRGAAVWAFRQLADEGDVSARSATKFDTEADENVRAEWLANTGGLSAPESTSSQE

SEQ ID NO: 77601 - protein, 379 aa, Labrenzia alba
  misc_feature (1)..(379): tr|A0A0M6YYF6|A0A0M6YYF6_9RHOB Epoxyqueuosine reductase OS=Labrenzia alba OX=311410 GN=queG PE=3 SV=1
MDAKTEKFLKAFTEKAASLGFDDCKIAPADSIPEAESRLRAFLDQGFQGTMNWMADTAERRGSPGSLWPEVNSVIMLAMNYGPDDAPENHPLAHLSDKGTGGISVYARHRDYHDIIKGRLKELASFLVSRAGGDVKVFVDTAPVMEKPLGEAAGLGWQGKHTNLVSKELGSWFFLGSIFTTLALPASGSERDHCGSCRACLDSCPTDAFPAPYQLDARRCISYLTIEHPGPIPAEFRQAMGNRIYGCDDCLAACPWNKFASAAREAKLIAREDLKNPKLTDLLELDDKAFRKLFSGSPVKRIGRNKFIRNVLIAAGNSGDPGLLQKIVQHLGDPDATVRGTAVWAFRQLASAEIFFRQKETDFPAETDELVCAEWGDQT

SEQ ID NO: 77602 - protein, 383 aa, Labrenzia alexandrii
  misc_feature (1)..(383): tr|A0A0M7AJD1|A0A0M7AJD1_9RHOB Epoxyqueuosine reductase OS=Labrenzia alexandrii OX=388408 GN=queG PE=3 SV=1
MGPQLDTKTQKLVTALEAKATALGFDALNITAADSIPNAKERLNVFLEKNYHGSMGWMAETAERRAAPKALWSEVNSVIMLAMNYGPDDAPENHPLAHLSDKGAGGISVYARHRDYHDIIKGRLKELASFLISRAGGDVKVFVDTAPVMEKPLGQAAGLGWQGKHTNLVSRELGSWFFLGSIFTTLELPESGAETDHCGSCKACLDACPTDAFPAPYQLDARRCISYLTIEHAGPIPDEFRKPIGNRIYGCDDCLAACPWNKFAQAASEAKLVAREDLKSPRLADLLRLDDPAFRKLFSGSPIKRIGRNRFLRNVLIAAGNSAKPDLVNSVERLLDDPDETVRGTAVWAWRQLVSTDRFKQKSHAALPSETSAEVRTEWQKQR

SEQ ID NO: 77603 - protein, 383 aa, Labrenzia alexandrii
  misc_feature (1)..(383): tr|A0A5E8GVK0|A0A5E8GVK0_LABAD Epoxyqueuosine reductase OS=Labrenzia alexandrii (strain DSM 17067 / NCIMB 1407 9 / DFL-11) OX=244592 GN=queG PE=3 SV=1
MGPQLDTKTQKLVTALEAKATALGFDALNITAADSIPNAKERLNAFLEKNYHGSMGWMAETAERRAAPKALWSEVNSVIMLAMNYGPDDAPENHPLAHLSDKGAGGISVYARHRDYHDIIKGRLKELASFLISRAGGDVKVFVDTAPVMEKPLGQAAGLGWQGKHTNLVSRELGSWFFLGSIFTTLELPESGAETDHCGSCKACLDACPTDAFPAPYRLDARRCISYLTIEHAGPIPDEFRKPIGNRIYGCDDCLAACPWNKFAQAASEAKLVAREDLKSPRLADLLRLDDPAFRKLFSGSPIKRIGRNRFLRNVLIAAGNSAKPELVNSVERLLDDPDETVRGTAVWAWRQLVSTDRFKQKSHAALLSETSAEVRTEWQKQG

SEQ ID NO: 77604 - protein, 390 aa, Labrenzia marina
  misc_feature (1)..(390): tr|A0A2S3V2Y4|A0A2S3V2Y4_9RHOB Epoxyqueuosine reductase OS=Labrenzia marina OX=281252 GN=queG PE=3 SV=1
MTQHALQTVLDKKKRHLLTAFAEKASGLGFDDVRIAPADGIPEAGDRLRRFLDKGYHGTMGWMAETAERRSAPVNLWPEVKSVIMLAMNYGPDAAPENHPLAHLQDRSSGGISVYARHRDYHDIIKGRLKELASFLVSRAGGDVKVFVDTAPVMEKPLGQAAGLGWQGKHTNLVSRDLGSWFFLGAIFTTLDLPPSGAEEDHCGSCRACLDSCPTDAFPAPYQLDARRCISYLTIEHPGPIPGEFREAIGNRIYGCDDCLAACPWNKFASAAREAKLIAREDLKNPKLADLLSLEDAAFRALFSGSPVKRIGRGRFLRNVLIAAGNSGQPVLLDKVRPLLKDADPVVRGAAVWAYRRLAPEQSVLAVRPGEMAQETDETVRAEWLAPHRL

SEQ ID NO: 77605 - protein, 381 aa, Labrenzia sp.
  misc_feature (1)..(381): tr|A0A2T7HAW4|A0A2T7HAW4_9RHOB Epoxyqueuosine reductase OS=Labrenzia sp. 011 OX=2171494 GN=queG PE=3 SV=1
MDKKTSTLLTAFAERASGLGFDGVRVAPADAIPEAGDRLRRYLDNGFHGTMAWMAETADRRSAPARLWPEVKSVIMLAMTYGPDDAPENHPLAHLQDRSTGGISVYARNRDYHDVVKGRLKELASFLVSRAGGDVKVFVDTAPVMEKPLGQAAGLGWQGKHTNLVSRQLGSWFFLGAIFTTLDLPASGAEKDHCGSCRACLDSCPTDAFPAPYQLDARRCISYLTIEHPGPIPAEFREAIGNRIYGCDDCLAACPWNKFASAAREAKLIAREDLKNPRLEDLLVLDDAAFRRLFSGSPVKRIGRGRFLRNVLIAAGNSGQPALADRIRPLLKDADPVVRGAAVWAFRRLVPDHSVLALKAAEVAGETDESVRREWLAPHPH

SEQ ID NO: 77606 - protein, 380 aa, Labrenzia sp.
  misc_feature (1)..(380): tr|A0A222FB08|A0A222FB08_9RHOB Epoxyqueuosine reductase OS=Labrenzia sp. VG12 OX=2021862 GN=queG PE=3 SV=1
MHTKPEKLLKAFQEKAAALGFDGVRVAAADSIPQAGARLKEFLDKGRHGTMGWMAETAERRAAPSSLWPDVRSVIMLAMNYGPDDAPEHHPLAHLDDPGSGGISVYARHRDYHDIIKGRLKELASLLVSRGGGDVKVFVDTAPVMEKPLGEAAGLGWQGKHTNLVSRELGSWFFLGAIFTTLELPPSGAERDHCGSCRACLDACPTDAFPAPYQLDARRCISYLTIEHPGPIPAEFREAIGNRIYGCDDCLAVCPWNKFAETAREAKLIARKDLDLPRLLDLLQLDDAAFRKFFSGSPIKRIGRNRFLRNVLIAAGNSGDTALLDEVRGHLADPDETVRSTAVWAFGKLASEAQFQAEKAKVFPGENNEQVRCEWLAVTS

SEQ ID NO: 77607 - protein, 389 aa, Labrenzia suaedae
  misc_feature (1)..(389): tr|A0A1M6ZM85|A0A1M6ZM85_9RHOB Epoxyqueuosine reductase OS=Labrenzia suaedae OX=735517 GN=queG PE=3 SV=1
MSGTAKQDKKTEKLLQAFVEKAAQLGFDDLKIAAADSIPQAPERLKQFVESGYHGSMGWMEETQERRGDPRVLWPEVRSVIMLAMNYGPDCDPLAHLETPDRAGISVYARNRDYHDIIKGKLKELASFLVSRAGGDVKVFVDTAPVMEKPLAASAGLGWQGKHTNLVSRQLGSWFFLGSIFTSLDLPPSGAERDHCGTCRSCLDSCPTEAFPAPYQLDARRCISYLTIEHAGPIPREFRSQMGNRIYGCDDCLAACPWNKFAQTASEAKLMARSDLISPHLSDLLALDDAAFRSLFSGSPIKRIGRNRFLRNVLIAAGNSGESGLFDDVRTHLDDSDPVVRGAAVWALSRIAPLAQWSELAKQHEISEPHDMVREEWALGCGEDKSSIY

SEQ ID NO: 77608 - protein, 414 aa, Labrys neptuniae
  misc_feature (1)..(414): tr|A0A5C1WLX4|A0A5C1WLX4_9RHIZ Epoxyqueuosine reductase OS=Labrys neptuniae OX=376174 GN=queG PE=3 SV=1
MPASASAAGATFPGAGWKPAVPGRFAVTPLKTQLLQRAEAEGFDVVRITTPDAIPEAPARLRHFLEEGCHGEMGWMQERADQRGAPSTLWPEVRSIIMLGVNYGPDGDPMAGLADRAGGLISVYAQGDDYHDVIKKRLKSLGRWWGEVTGAPLKVFIDTAPVMEKPLAAAAGLGWQGKHTNLVSRDFGSWLFLGSIFSATEIEADTPERDRCGSCRACLDACPTAAFPAPYRLDARRCISYLTIENKGPISAEFREAIGNRIYGCDDCLAACPWNKFAVAAREHKLQAREDLRAPRLAELARLDDPTFRTLFAKNPVKRIGRDRFIRNVLIAIGNSGDAGLVDAAEELLGDESALVRAMAVWALARLSPIRLAAQSWRRQHETDADVRAEWQAAGQSVLRFGGIAKNRKDASNQ

SEQ ID NO: 77609 - protein, 387 aa, Labrys okinawensis
  misc_feature (1)..(387): tr|A0A2S9Q419|A0A2S9Q419_9RHIZ Epoxyqueuosine reductase OS=Labrys okinawensis OX=346911 GN=queG PE=3 SV=1
MASRKEVAVSALKTELLQRAEAEGFDVVRVTTPEAIPEAPARLRRFLEEGFHGEMGWMQERAEQRGAPATLWPEVRSIIMLGVNYGPDGDPMAGLSDRSGGLISVYAQGDDYHDVIKKRLKSLGRWWGEVTGAPLKVFVDTAPVMEKPLAAAAGLGWQGKHTNLVSRDFGSWLFLGSIFSATEIEADAPERDRCGSCRACLDACPTAAFPAPYRLDARRCISYLTIENKGPIPAEFREAIGNRIYGCDDCLAACPWNKFAVAAREHKLKAREALQAPRLAELARLDDPTFRALFAKNPVKRIGRDRFIRNVLIAIGNSGDPGLVEEAERLLVDGSALVRAMAVWALARLAPSRLAAQSWRRQQETDADVRAEWRAAGHAAPAPQEAL

SEQ ID NO: 77610 - protein, 378 aa, Laceyella sacchari
  misc_feature (1)..(378): tr|A0A2I7SQ81|A0A2I7SQ81_LACSH Epoxyqueuosine reductase OS=Laceyella sacchari OX=37482 GN=queG PE=3 SV=1
MNSAELKQKLITKAKEIGIDKIGFTTADPFIALRERLKESQEKGYASGFEEPDIEKRVRPELSLPEAKSIIAIALAYPSKLKNPPRSEAGAYRGIFCRASWGEDYHHVLREKLTLLSTYLQELVPDARTQVMVDTGALSDRAVAERAGIGWSGKNTSIITKEFGSWVYLGEMITDVYFPPDTPATDECGDCTICIDACPTGAIVQAGQLNAQACIAYLTQTKDFLGEEYRSKLGNRLYGCDTCQTVCPKNRKRHFDHHTAFQPDPEMVKPLLKPLLQMSNREFKERFGRMSGAWRGKKPIQRNAIIALAHFKDQTAIPDLVRLLAEDPRPVIRGTAAWALGKIGGKEVLEALLKAQEKEVNQEVLHEIGKALDMAQNA

SEQ ID NO: 77611 - protein, 378 aa, Laceyella sacchari
  misc_feature (1)..(378): tr|A0A4R4AM27|A0A4R4AM27_LACSH Epoxyqueuosine reductase OS=Laceyella sacchari OX=37482 GN=queG PE=3 SV=1
MNSADLKQKLISKAKEIGIDKIGFTTADPFIALRERLKESQEKGYASGFEEPDIEKRVRPELSLPEAKSIIAIALAYPSKLKNPPRSESGAYRGIFCRASWGEDYHHVLREKLSLLSVYLQELVPDARTQVMVDTGALSDRAVAERAGIGWSGKNTSIITKEFGSWVYLGEMITDVYIPPDTPATDECGDCTICIDACPTGAIVQAGQLNAQACIAYLTQTKGFLAEEYRSKLGNRLYGCDTCQTVCPKNRKRHFDHQTAFQPDPEKVKPLLKPLLQMSNREFKERFGRMSGAWRGKKPIQRNAIIALAHFKDQTAIPDLVRLLAEDPRPVIRGTAAWALGKIGGKEVLEALQKAQEKEGDQEVLHEIGKALDMAQNA

SEQ ID NO: 77612 - protein, 378 aa, Laceyella sediminis
  misc_feature (1)..(378): tr|A0A2T0YFT0|A0A2T0YFT0_9BACL Epoxyqueuosine reductase OS=Laceyella sediminis OX=573074 GN=queG PE=3 SV=1
MNSAELKQKLITKAKEIGIDKIGFTTADPFIALRERLKESQEKGYASGFEEPDIEKRVRPELSLPEAKSIIAIALAYPSKLKNPPRSEAGAYRGIFCRASWGEDYHHVLREKLTLLSAYLQELVPDARTQVMVDTGALSDRAVAERAGIGWSGKNTSIITKEFGSWVYLGEMITDVYFPPDTPATDECGDCTICIDACPTGAIVQAGQLNAQACIAYLTQTKGFLAEEYRSKLGNRLYGCDTCQTVCPKNRKRYFDHHTAFQPDPEKVKPLLKPLLQMSNREFKERFGRMSGAWRGKKPIQRNAIIALAHFKDQTAIPDLVRLLAEDPRPVIRGTAAWALGKIGGKEVLEALQKAQEKEGDQEVLHEIGKALDMAQNA

SEQ ID NO: 77613 - protein, 330 aa, Lachnoclostridium phytofermentans
  misc_feature (1)..(330): tr|A0A3D2X3W1|A0A3D2X3W1_9FIRM tRNA epoxyqueuosine(34) reductase QueG OS=Lachnoclostridium phytofermentans OX= 66219 GN=queG PE=4 SV=1
MWKQQIEDFCKSLGLDTIGFIRCRRFVELIDFYEKRKEKNLQNEFEEKDIEKRINPNLTMESGKTIISIAFPYYHDEENIENGFSIYTKRMDYHKVVKSYLAKVCEYIESLGGKAEGFVDSNALPERYIAYLAGVGFIGNNNMLITKKYGSYVFLGEIITDLEMELEDVRSYQEIPKHIECGDCKRCYHECPSKSINQNKINPNICLSYLTQKKELSDQEISLLKGNVFGCDYCQLKCPYNEEIETNVLDDFKTLCYMNEDLKIFASMDNKFFKDKISNTSCGWRGKNVIKRNAILRIHKENQDITELRGDSPYINDYIDRLLNKHDRKE

SEQ ID NO: 77614 - protein, 330 aa, Lachnoclostridium phytofermentans
  misc_feature (1)..(330): tr|A9KIG0|A9KIG0_LACP7 DUF1730 domain-containing protei n OS=Lachnoclostridium phytofermentans (strain ATCC 700 394 / DSM 18823 / ISDg) OX=357809 GN=Cphy_2044 PE=4 SV= 1
MWKQQIEDYCKSLGLDTIGFIRSRRFVELIDFYEQRKEKNLQNEFEEKDIEKRIDPSLTMESGKTIISIAFPYYHDEEYKENGFSIYTKRNDYHKVLKSYLNKVCEYIESLGGKAECFVDSNALPERYIAYLAGVGFIGKNNMLITKKYGSYVFLGEVITDLEMDLEDVRTYHEIPKYIECGDCKLCYHECPTKSINQTKINPNICLSYLTQKKDLSDQEISLLKGNVFGCDYCQLKCPYNEEVETNVLDDFKTLSYMNEDMEIFASMDNKFFKDKISNTSCEWRGKNVIKRNAILRMHRENQDITKLRGDSPYINDYIERLLKKRDVKE

SEQ ID NO: 77615 - protein, 156 aa, Lachnoclostridium sp.
  misc_feature (1)..(156): tr|A0A3D6ACH0|A0A3D6ACH0_9FIRM 4Fe-4S ferredoxin-type d omain-containing protein OS=Lachnoclostridium sp. OX=20 28282 GN=DHU73_07245 PE=4 SV=1
MKGRVAKYYLTDGRRHTDSEGYKTSVAFEKYLADCGLQVATDRDFGITALRWAGMKAGIGIIRKNNFFYTEKGSYQYLEAFLIDEPLQYIVENQIRPCAEKCNLCIRSCPTESLEAPYMMCRNTCVSCLTTWDGWDLRTEPLQNKFEKWIYGCDAC

SEQ ID NO: 77616 - protein, 318 aa, Lachnoclostridium sp.
  misc_feature (1)..(318): tr|A0A1Y4RER7|A0A1Y4RER7_9FIRM Uncharacterized protein OS=Lachnoclostridium sp. An138 OX=1965560 GN=B5E82_1516 5 PE=4 SV=1
MDSLSQKIYDQALRCGFDKCGIISISALDGFKQLYQQRLNDVPVSQYFYKGVGNLTETKSRFPWSKSIVILVFDYGKYRFPESLQGKYGKAFFLEPEKKSRERFDLERLEVWFYENGIQAKGGEQFGSLSVGPLRYMAMKAGLGIIRKNNFFYTENGSYNNLFAYVIDQECELIHTCSAPPCSEKCDLCRRACKTKALEAPYTMNPFKCVSFLTTFGNSDTPEGLSDEMYEQWVCGCDNCQDACPYNRRHDWKHGLPLNKLEEIAPAILPENYENLTDEFLIKNVIPKTANHLQDKDIPALRKNAARSAINAQRAGAK

SEQ ID NO: 77617 - protein, 376 aa, Lachnospiraceae bacterium
  misc_feature (1)..(376): tr|A0A3C1XG18|A0A3C1XG18_9FIRM PBS lyase OS=Lachnospira ceae bacterium OX=1898203 GN=DCR27_03145 PE=4 SV=1
MNKQELTLKIKYKAYELGFARIGIAPADDFSEYEEEFRSRIDDYQFLVGDAIDPLKGSRPKTVMPEGKSIVALVWDYSKTIYPEKLVQSFGRAYLSRTYLPKENSEHGARLRVFTDYMESLGLHIAPGLHMPERNACARAGITNYGKNNFAYAEGCGSYIILRAFLVDQELVYDEPTVECGCPPNCHLCIDSCPTGALYAPGKLKPEKCLLYNQMRGTYNMEVRDKAGMSIHGCDICQAVCPRNKKVAAQANRRDHFLELLAEDFDLEKVLLLTPDYYEKVIYPIAYNYIHKLELFQRNAAIALGNTGDQAHVPALMQALETCKPRVQGAAAWALGKIGGKEAEAALKRQLMQENTDERTKAEILHALEMCAVKAF

SEQ ID NO: 77618 - protein, 268 aa, Lachnospiraceae bacterium
  misc_feature (1)..(268): tr|A0A0D0RID8|A0A0D0RID8_9FIRM TWA4_scaffold00001, whol e genome shotgun sequence OS=Lachnospiraceae bacterium TWA4 OX=1392836 GN=P261_02554 PE=4 SV=1
MSRLTKLKKRYPWAKSVVICTEWLGKYRYPEELRGKYAKAFLLSRNTVPNHKIYKDRIRFESFLSESGIRWVGGEANSPVDTIPLREAAVCAGLGIMRKNNFFYGEKGSYYNLEGYLIGEECVLKQTCNLKPCSDKCNLCQNACRTKALCAPYTMSPISCLSLWTTFGKNLTPPHLKSDQFGEWMCGCDDCQDTCPHNRKHDWSEGEEFPGLHEIVELLQPENILKASKEELQKKVVPKTYDHVKPRQTNTFKRGAKRLIRLQEKAKN

SEQ ID NO: 77619 - protein, 310 aa, Lacibacter cauensis
  misc_feature (1)..(310): tr|A0A562SFV6|A0A562SFV6_9BACT Epoxyqueuosine reductase OS=Lacibacter cauensis OX=510947 GN=queG PE=3 SV=1
MLPVTAYTTFIKDTAARLGFSFCGISKAVRLDEDAKRLEQWLKQGMHGNMQYMENYFELRVDPAKLVPGAKSVITLMMNYYPAVPQTTDGPKISKYAYGNDYHEVIRSKLKELLFEMNQSIGEVNGRGFVDSAPVLERSWATRSGLGWIGKNGNLINKQQGSFSFLATIICDLELEYDAAFAKDYCGSCTRCIDNCPTDAIQPNKVIDGSKCISYFTIELKDALIDESMKGKFNNWLFGCDVCQDVCPWNRFSKPTTEPAFAPLPQILNLSTKQWEEMTEETFKLVFKHSPIKRTKFSGIQRNLKFIQST

SEQ ID NO: 77620 - protein, 310 aa, Lacibacter sp.
  misc_feature (1)..(310): tr|A0A4Q1CNM8|A0A4Q1CNM8_9BACT Epoxyqueuosine reductase OS=Lacibacter sp. TTM-7 OX=2508719 GN=queG PE=3 SV=1
MIPVTAYTSFIKQTATKLGFSFCGISKAVRLDDDARRLEQWLSKGMHGQMQYMENHFELRVDPAKLVPGAKSVITLMMNYYPSAMQTTDGPKISKYAYGNDYHEVIRSKLKELLFEMNSSIGEVNGRGFVDSAPVLERSWAKRSGLGWIGKNGNLINKQQGSFFFLATIICDLELEYDDLFAKDYCGSCTRCIDNCPTDAILPGKVVDGSKCISYFTIELKDALIDESMQGKFNNWLFGCDVCQDVCPWNRFSKQTAEPAFTPLPQILNLSTKQWEEMTEELFKQVFKHSPLKRTKFSGIQRNLKFIQTN

SEQ ID NO: 77621 - protein, 378 aa, Lacimicrobium alkaliphilum
  misc_feature (1)..(378): tr|A0A0U3B8Z1|A0A0U3B8Z1_9ALTE Epoxyqueuosine reductase OS=Lacimicrobium alkaliphilum OX=1526571 GN=queG PE=3 SV=1
MAELSPQYLQQLTENIKSWGKALGFQQVGVCDVDLSRHEQALQSWLDKGMHGEMQYMAEHGMKRARPAELQPGTVRIISVRMDYLPPDAGFARNLKDRQLGYISRYALGRDYHKLMRQRLKKLGQKIDQHVSDLAFRPFVDSAPVLEHPVAEKAGLGWTGKHSLTLNREAGSWFFLGELFINLPLPVDEPVEEGCGSCNACMTICPTQAIVEPYVVDARRCISYLTIELKGAIPESFRPLIGNRIYGCDDCQLVCPWNRYAHLTDEADFHPRAQLHGKELLDLFSWDEESFLRNTEGSAIRRIGFERWQRNIAVALGNAPCVPEIIHALEAAYDKSSELVREHIHWALEQQRKKQRAGNERQTQRLIRVVEKGLPRDA

SEQ ID NO: 77622 - protein, 309 aa, Lacinutrix sp.
  misc_feature (1)..(309): tr|F6GIS7|F6GIS7_LACS5 Epoxyqueuosine reductase OS=Laci nutrix sp. (strain 5H-3-7-4) OX=983544 GN=queG PE=3 SV= 1
MINNKAKYTNLIKTEAKRLGFLSCGISKAEFLEAEAPRLENWLNNNMNGEMRYMENHFDKRLDPTKLVEDSKSVISLLLNYYPEETQKDSEAPKLSKYAYGNDYHHVIKSKLKTLTHYIQEEIGEVSGRAFVDSAPVLDKAWAAKSGLGWIGKHSNLLTQQVGSFYFIAELIIDLDLEYDTIVSDHCGTCTACIDACPTQAIVEPYVVDGSKCISYFTIELKDQLPNEMKGKFDSWMFGCDVCQDVCPWNKFSKAHNEPLFNPHPELLDMTKKDWEEITEDVFKKVFQKSAVKRTKFSGLTRNIKFLNE

SEQ ID NO: 77623 - protein, 308 aa, Lacinutrix sp.
  misc_feature (1)..(308): tr|A0A1J5K485|A0A1J5K485_9FLAO Epoxyqueuosine reductase OS=Lacinutrix sp. MedPE-SW OX=1860087 GN=queG PE=3 SV= 1
MINNKAKYTNLIKTEAKRLGFLSCGISKAEFLEAEAPRLENWLNKNMNGEMRYMENHFDKRLDPTKLVEDSKSVISLLLNYYPEETQKDPEAPKLSKYAYGNDYHHVIKSKLKTLTHYIQEEIGEVSGRAFVDSAPVLDKAWAAKSGLGWIGKHSNLLTQQVGSFYFIAELIIDLDLEYDTIVSDHCGTCTACIDACPTQAIVEPYVVDGSKCISYFTIELKDQLPNEMKGKFDSWMFGCDVCQDVCPWNKFSKPHNEPLFNPHPELLDMTKKDWDEITEDVFKKVFQKSAVKRTKFSGLKRNIEFLK

SEQ ID NO: 77624 - protein, 309 aa, Lacinutrix venerupis
  misc_feature (1)..(309): tr|A0A420ZJN1|A0A420ZJN1_9FLAO Epoxyqueuosine reductase OS=Lacinutrix venerupis OX=1486034 GN=queG PE=3 SV=1
MINNKAKYTSLIKTEAKRLGFLSCGISKAEFLEDEAPRLENWLNKNMNGQMRYMENHFDKRLDPTKLVEDSKSVISLLLNYYPEETQKDNKAPKLSKYAYGNDYHHVIKSKLKTLTHFIQDTIGEVSGRAFVDSAPVLDKAWAAKSGLGWIGKHSNLLTQQVGSFYFIAELIIDLDLEYDTIVSDHCGTCTACIDACPTQAIVEPYVVDGSKCISYFTIELKNELPNEMKGKFDNWMFGCDVCQDVCPWNRFSKAHNEPLFNPHPELLDMTKKDWDEITEDVFKKVFQKSAIKRTKFSGLTRNIEFLKK

SEQ ID NO: 77625 - protein, 389 aa, Lactobacillus acidipiscis
  misc_feature (1)..(389): tr|A0A1W7QML7|A0A1W7QML7_9LACO Epoxyqueuosine reductase OS=Lactobacillus acidipiscis OX=89059 GN=queG PE=4 SV= 1
MSALANAQLKQQIIEASQEIGIDKIGFTTANNFEHLRSSLVAQKAAGHTSGFEHQNLDERLEPGLIFNKPRSIIAIALAYPTKMKKRPPRTKYKRGHFARASWGDDYHAVLRKKMAALIEKIKELSQNAVDFKPMVDTGELIDVAVAQRAGLGFIGKNGLLITEEFGSFVYLGEIITDLEFEPDRPLKSQCGDCTRCIDYCPPNALLGDGRLNAQKCLSYQTQTKGMMPEKYRPMIHNVIYGCDICQLVCPFNRGKDQHFHSDMEPDPEKVSPELVPLLTISNRDFKETFGQMAGSWRGKKPLQRNALIALANLGDRSALPQILAVIDNDPRPVIRATGAYAVGRLVREYNPEIIDFLEDKYTQEMSEGATEECSLEYRTAIQKISDLK

SEQ ID NO: 77626 - protein, 389 aa, Lactobacillus acidipiscis
  misc_feature (1)..(389): tr|A0A0R2JW83|A0A0R2JW83_9LACO (Fe-S)-binding protein O S=Lactobacillus acidipiscis OX=89059 GN=IV43_GL001954 P E=4 SV=1
MSALANAQLKQQIIEASQEIGIDKIGFTTANNFEHLRSSLVAQKAAGHTSGFEHQNLDERLETGLIFNKPRSIIAIALAYPTKMKKRSPRTKYKRGHFARASWGDDYHAVLRKKMAALIEKIKELSQNAVAFKPMVDTGELIDVAVAQRAGLGFIGKNGLLITEEFGSFVYLGEIITDLEFEPDRPLKSQCGDCTRCIDYCPPNALLGDGRLNAQKCLSYQTQTKGMMPEKYRPMIHNVIYGCDICQLVCPFNRGKDQHFHSDMEPDPEKVSPELVPLLTISNRDFKETFGQMAGSWRGKKPLQRNALIALANLGDRSALPQILAVIDNDPRPVIRATGAYAVGRLVREYNPEIIDFLEDKYTQEMSEGATEEYLLEYRTAIQKISDLK

SEQ ID NO: 77627 - protein, 377 aa, Lactobacillus backii
  misc_feature (1)..(377): tr|A0A2G9VPS4|A0A2G9VPS4_9LACO tRNA epoxyqueuosine(34) reductase QueG OS=Lactobacillus backii OX=375175 GN=BSQ 39_11985 PE=4 SV=1
MYNDLKRKIIAASDEIGIDQIGFTDAAPFAEMKESLLAQKAAGHTSGFEHQVMAERLYPEKIFDQPKSIIAIALAYPSRMQEKAPRDRTKRRGSFARASWGEDYHFVLRDRMTKLVDFINATVPEENFTFKPMVDTGELSDVAVAQRAGLGFIGRNGLLITEKFGSFVYLGEIITNIPFEPDTPVENQCGTCTRCVDYCPPQALMGDGRLNAQRCLSYQTQTKGVMPEEFRSEIRSVIYGCDICQLVCPFNRGKDFHLHEEMDPRVDEVTPILQPMLTISNREFKEQFGRLAGSWRGKKPLQRNAIIALANMKDRSALPLLLQLIEEDPRPVIRLTAVWAVGQLSRGLNDELHRFFKERLLNETDVDVRAEINKLLE

SEQ ID NO: 77628 - protein, 377 aa, Lactobacillus backii
  misc_feature (1)..(377): tr|A0A192H662|A0A192H662_9LACO Epoxyqueuosine reductase OS=Lactobacillus backii OX=375175 GN=ACX53_09625 PE=4 SV=1
MYNDLKRKIIAASDEIGIDQIGFTDAAPFAEMKESLLAQKAAGHTSGFEHQVMAERLYPEKIFDQPKSIIAIALAYPSRMQEKAPRDRTKRRGSFARASWGEDYHFVLRDRMTKLVDFINATVPEENFTFKPMVDTGELSDVAVAQRAGLGFIGRNGLLITEKFGSFVYLGEIITNIPFEPDTPVENQCGTCTRCVDYCPPQALMGDGRLNAQRCLSYQTQTKGVMPEEFRSEIRSVIYGCDICQLVCPFNRGKDFHLHEEMEPRVDEVTPILQPMLTISNREFKEQFGRLAGSWRGKKPLQRNAIIALANMKDRSALPLLLQLIEEDPRPVIRLTAVWAVGQLSRGLNDELHRFFKERLLNETDVDVRAEINKLLE

SEQ ID NO: 77629 - protein, 388 aa, Lactobacillus brevis
  misc_feature (1)..(388): tr|C2D0T0|C2D0T0_LACBR Putative iron-sulfur cluster-bin ding protein OS=Lactobacillus brevis subsp. gravesensis ATCC 27305 OX=525310 GN=HMPREF0496_1152 PE=4 SV=1
MSASVTLKQQIITESQKLGIDKIGFTTADDFEELRSSLEAQKAAGHTSGFEHPNIDERLNPTLIFDHPQSIIAIALAYPSRMKQQPKRTGLKRGQFARASWGDDYHHILREKMALLIDRVKDIVGEGNARFEPMVDTGQLIDVAVAHRAGLGFIGKNGLLITEEFGSFVYLGEMITDLKLEPDTPIPCQCGECTRCLDACPVQALLGDGRMNAQRCLSYQTQTKGLMADEFRPKIRNVIYGCDICQVACPFNRGKDFHLHQRMEPDVEKVRPELLPMLKLSNKQFNDRFGQMAGAWRGKKPLQRNAIIALVNLGDVSAVDDLLHVMSQDPRPMIRATAAYAVGRLSRSYETTSRAKVAEQYQKELVSGQEEAFLKEYRRALETIDALK

SEQ ID NO: 77630 - protein, 388 aa, Lactobacillus buchneri
  misc_feature (1)..(388): tr|C0WPH5|C0WPH5_LACBU Putative iron-sulfur cluster-bin ding protein OS=Lactobacillus buchneri ATCC 11577 OX=52 5318 GN=HMPREF0497_1028 PE=4 SV=1
MSASVTLKQQIITESKKLGIDKIGFTTADDFEELRSSLEAQKAAGHTSGFEHPNIDERLNPKLIFDHPQSIIAIALAYPSRMKQRPKRSGLKRGQFARASWGDDYHHILREKMALLIDRIKDIVGEGKARFEPMVDTGQLIDVAVAHRAGLGFIGKNGLLITEEFGSFVYLGEMITDLKLEPDTPIPCQCGECTRCLDACPVQALLGDGRMNAQRCLSYQTQTKGLMADEFRPKIRNVIYGCDICQVACPFNRGKDFHLHQRMEPNVEKVRPELLPMLKLSNKQFNDRFGQMAGAWRGKKPLQRNAIIALANLGDVSAVDDLLHVMSQDPRPMIRATAAYAVGRLSRSYETTSRAKVAEQYQKELASGQEEALLKEYRRALKTIDALK

SEQ ID NO: 77631 - protein, 380 aa, Lactobacillus casei
  misc_feature (1)..(380): tr|A0A1Q9MMG6|A0A1Q9MMG6_LACCA Epoxyqueuosine reductase OS=Lactobacillus casei OX=1582 GN=AUQ39_05195 PE=4 SV= 1
MDLKETIKSHAKDLGIDKIGFTTADDFAALKPSLLAQKAAGHTTGFEHQNLDERLYPDKIFDQPQSIIAIALAYPSKIHDRPPRTGPKRGRFARASWGIDYHTVLDRKMDALMQFIKDTAATDTAIRFKSMVDTGELIDVAVAQRAGLGFIGKNGLLITPEFGSYVYLGEIITNIKFAPDEPMACQCGTCTRCIDFCPPKALLGDGRMNGQRCLSYQTQTKGYMDPEFRPMIRNVLYGCDICQQVCPFNKGKDFHIHPEMEPDPDTVMPELIPMLTLSNKGFKTRFGKLAGAWRGKKPLQRNAIIALVNLHDRSAVPHLLEVIENDPRPMIRATAAWAISELAAAPTAELTTFLKNAQAKETTEEARTEFQKAIDRIVQR

SEQ ID NO: 77632 - protein, 380 aa, Lactobacillus casei
  misc_feature (1)..(380): tr|K0NA75|K0NA75_LACCA Epoxyqueuosine reductase OS=Lact obacillus casei W56 OX=1215914 GN=queG PE=4 SV=1
MDLKMMIKAHAKELGIDKIGFTTADNFAALKPSLLAQKAAGHTTGFEHQNIDERLYPDKIFDQPQSIIAIALAYPAKIHERPPRTGPKRGRFARASWGIDYHTVLDRKMASLIKFIKRTAENDPTLRFKPMVDTGELIDVVVAQRAGLGFIGKNGLLITPEFGSYVYLGEIITNIKFAPDEPMTSQCGDCTRCIDFCPPKALLGDGRMNGQRCLSYQTQTKGYMDPEFRPMIRNVLYGCDICQQVCPFNKGKDFHIHPEMEPDPETVLPELIPMLTLTNKDFKTRFGKLAGAWRGKKPLQRNAIIALVNLHDRSAIPHLLEVIEHDPRPMIRATAAWAVGELQSSSNPEIETFLKTALAKETTPEAQVAFQDALDHLTQH

SEQ ID NO: 77633 - protein, 380 aa, Lactobacillus chiayiensis
  misc_feature (1)..(380): tr|A0A4Q1U7E9|A0A4Q1U7E9_9LACO tRNA epoxyqueuosine(34) reductase QueG OS=Lactobacillus chiayiensis OX=2100821 GN=BVJ53_05160 PE=4 SV=1
MDLKETIKSHAKDLGIDKIGFTTADNFAALKPSLLAQKAAGHTTGFEHQNLDERLYPDKIFDQPQSIIAIALAYPSKIHDRPPRTGPKRGRFARASWGLDYHTVLNRKMAALIQFIKNTAATDTTIRFKPMVDTGELIDVAVAQRAGLGFIGKNGLLITPEFGSYVYLGEIITNIKFAPDEPMACQCGTCTRCIDFCPPKALLGDGRMNGQRCLSYQTQTKGYMDPEFRPMIRNVLYGCDICQQVCPFNKGKDFHIHAEMEPDPNTVLPELIPMLSLSNKGFKTRFGKLAGAWRGKKPLQRNAIIALVNLHDRSAVPHLLEVIENDPRPMIRATAAWAVSELATTPTDELTTFLKNAQAKETTKEARTEFQKAIDRIVQR

SEQ ID NO: 77634 - protein, 407 aa, Lactobacillus composti
  misc_feature (1)..(407): tr|A0A0R1XYI9|A0A0R1XYI9_9LACO (Fe-S)-binding protein O S=Lactobacillus composti DSM 18527 = JCM 14202 OX=14237 34 GN=FC83_GL002037 PE=4 SV=1
MPGGLLLYNGGLEIIGGGTMADKVDLKAQIIAASQRLGIDKIGFTTAADFEDMRPSLVQQKADGHTTGFEHQNLDERLNPSLIFDQPKSIIAIALAYPSRMTDRPKRTKAKRGQFARASWGRDYHFILRDKMAALVAEIEQLVAPDDTIRFKPMVDTGELMDVVVAQRAGLGFIGKNGLLITEEFGSFVYLGEIITNLELAPDTAMACQCGDCRRCVDYCPPQALMGNGQLNGQRCLSYQTQTKDLLAPEFRPLIKNVIYGCDICQLVCPFNKGKNFHRHGAMEPDPEQVMPELQPMLALSNRDFKARFGMMAGSWRGKKPLQRNAIIALANQKDQSALPHLMQVVTADPRPMIRATAAYAIGQITKFHNEATLDFLKQAYDQEVAQTTPAAYLAEFAQAIAAIAAL

SEQ ID NO: 77635 - protein, 397 aa, Lactobacillus concavus
  misc_feature (1)..(397): tr|A0A0R1VQK6|A0A0R1VQK6_9LACO Iron-sulfur cluster-bind ing protein OS=Lactobacillus concavus DSM 17758 OX=1423 735 GN=FC15_GL000737 PE=4 SV=1
MTSMRHDQLKQQIIDVSKKIGIDKIGFTTADNFEHLRPSLLAQKAAGHTTGFEHQNLDERLNPDLIFDQPKSIIAIALAYPTRMNQRPERTAYKRGQFARASWGIDYHRILDEKMAALIETIRELISAEPSITFKPMVDTGELIDVAVAQRAGLGFIGRNGLLITEEFGSYVYLGEIITNIDFTPDQPIANQCGTCRRCIEACPPSALLGDGRLNGQRCLSYQTQTKGLMDPEFRPMIRNVIYGCDICQIVCPFNKGKNFHFHPEMEPDPEAVMPELVPMLTMSNKTFKLKFGPMSGSWRGKKPLQRNAIIALVNLRDRSVIPKLLEVIDHDPRPVIRATAAWGVAELSDLQNQELLQFLKNAKAREDSAETDILNEYQQAIDKLVRLPKLPQSPEN

SEQ ID NO: 77636 - protein, 383 aa, Lactobacillus coryniformis
  misc_feature (1)..(383): tr|A0A5B8TDH1|A0A5B8TDH1_9LACO tRNA epoxyqueuosine(34) reductase QueG OS=Lactobacillus coryniformis OX=1610 GN =queG PE=4 SV=1
MYDDLKQKIIAASADLGIDKIGFTTAAPFAEMAASLKAQKAAGHTSGFEHQVLAERLYPEQIFEQPQSIIAIALAYPSKMRQKAPRDRQQRRGSFARASWGEDYHFILRDKMQQLVEFIEANATAEVRFKPMVDTGELSDVAVAQRAGLGFIGRNGLLITEEFGSFVYIGEIITNIPFTPDPPVENQCGTCTRCIDYCPPSALMGDGRLNAQRCLSYQTQTKGMMAAEFRPQIRSVIYGCDICQLVCPFNRGKDFHRHSRMEPEVEEVTPVLQSMLTISNKEFKQRFGRLAGSWRGKKPLQRNAIIALANVKDRSAVPLLLEVIDNDPRPVIRATAIWAVAELAQHNEAELLEFLQNQQVSENETEVQSAITAATAKLKSQQD

SEQ ID NO: 77637 - protein, 383 aa, Lactobacillus coryniformis
  misc_feature (1)..(383): tr|A0A2D1KLX5|A0A2D1KLX5_9LACO tRNA epoxyqueuosine(34) reductase QueG OS=Lactobacillus coryniformis subsp. tor quens DSM 20004 = KCTC 3535 OX=1423822 GN=LC20004_03975 PE=4 SV=1
MYDDLKQKIIAASADLGIDKIGFTTAAPFAEMAASLKAQKAAGHTSGFEHQVLAERLYPEQIFEQPQSIIAIALAYPSKMRQKAPRDRQQRRGSFARASWGEDYHFILRDKMQQLVEFIEANAAAEVRFKPMVDTGELSDVAVAQRAGLGFIGRNGLLITEEFGSFVYIGEIITNIPFTPDPPVENQCGTCTRCIDYCPPSALMGDGRLNAQRCLSYQTQTKGMMAAEFRPQIRSVIYGCDICQLVCPFNRGKDFHRHSRMEPEVEEVTPVLQSMLTISNKEFKQRFGRLAGSWRGKKPLQRNAIIALVNVKDRSAVPLLLEVIDNDPRPVIRATAIWAVAELAQHNEAELLEFLQNQQVSENETEVQAAITAATAKLKSQQD

SEQ ID NO: 77638 - protein, 385 aa, Lactobacillus curvatus
  misc_feature (1)..(385): tr|A0A1X7QHS3|A0A1X7QHS3_LACCU Putative epoxyqueuosine reductase OS=Lactobacillus curvatus OX=28038 GN=queG PE =4 SV=1
MPTLKEQVIEASKTIGIDKIGFTSAAPFDYLEASLKEQKANGHSTGFEHKVLEERLYPDLIFDQPKSIIAIALAYPTKITNKPARTGAKRGSFARASWGIDYHDILRDKMDQLISAIETLADSDTEITFKPMVDTGELSDVAVAQRAGLGFIGLNGLLITPEFGSYVYLGEIITNIPFEPDTPMANQCGSCTRCIDYCPPQALMGDGRLNAKRCLSYQTQTKGFMPEEFRPKIRSVIYGCDICQQVCPFNKGKDFHFHPDMEPDPESVMPELQPMLTISNKQFKLQFGHLASSWRGKKPLQRNAIIALANVKDRTAIPKLLELIDTDPRPVIRGTAAWALSQLVRDVTPEILDFLETAAKREEEPEAQVEFDNALQILKERYSER

SEQ ID NO: 77639 - protein, 385 aa, Lactobacillus curvatus
  misc_feature (1)..(385): tr|A0A0B2XN63|A0A0B2XN63_LACCU Epoxyqueuosine reductase OS=Lactobacillus curvatus OX=28038 GN=queG PE=4 SV=1
MPTLKEQVIEASKTIGIDKIGFTSAAPFDYLEASLKEQKANGHSTGFEHKVLEERLYPDLIFDQPKSIIAIALAYPTKIINKPARTGAKRGSFARASWGIDYHDILRDKMDQLISAIETLADSDTEITFKPMVDTGELSDVAVAQRAGLGFIGLNGLLITPEFGSYVYLGEIITNIPFEPDTPMANQCGSCTRCIDYCPPQALMGDGRLNAKRCLSYQTQTKGFMPEEFRPKIRSVIYGCDICQQVCPFNKGKDFHFHPDMEPDPESVMPELQPVLTISNKQFKLQFGHLAGSWRGKKPLQRNAIIALANVKDRTAIPKLLELIDTDPRPVIRGTAAWALSQLVRDVTPEILDFLETAAKREEEPEAQVEFDNALQILKERYSER

SEQ ID NO: 77640 - protein, 396 aa, Lactobacillus dextrinicus
  misc_feature (1)..(396): tr|A0A5J6UQW7|A0A5J6UQW7_9LACO tRNA epoxyqueuosine(34) reductase QueG OS=Lactobacillus dextrinicus OX=51664 GN =queG PE=4 SV=1
MTNELLKQAIIKASQEIGIDKIGFTTADNFEHLRPSLVAQKAAGHTTGFEHQNLDERLNPDQIFDQPQSIIAIALAYPTRIKQRPPRTENIRGQFARASWGIDYHRILDNKMAQLITAIKQLATKNNDIKFKPMVDTGELIDVAVAQRAGLGFIGRNGLLITEEFGSFVYLGEIITNIEFTPDEPIANQCGTCTRCIDACPPSALLGDGRLNGQRCLSYQTQTKNLMPKEFRPMIRNVIYGCDICQIVCPFNKGKNFHFHAEMEPDPEAVMPELVPMLTMSNKEFKVKFGPMSGSWRGKKPLQRNAIIALVNSKATSTIPQLLEVIDHDPRPVIRATATWAVVELSDLRNEALLNFLTSARTKETSVAEVDPEILDEYDQAIAKLRALPELPNTTN

SEQ ID NO: 77641 - protein, 396 aa, Lactobacillus dextrinicus; identical to SEQ ID NO: 77640
  misc_feature (1)..(396): tr|A0A0R2BKX5|A0A0R2BKX5_9LACO Putative Fe-S protein OS =Lactobacillus dextrinicus DSM 20335 OX=1423738 GN=FC84 _GL000736 PE=4 SV=1

SEQ ID NO: 77642 - protein, 385 aa, Lactobacillus diolivorans
  misc_feature (1)..(385): tr|A0A0R1S7U7|A0A0R1S7U7_9LACO Iron-sulfur cluster-bind ing protein OS=Lactobacillus diolivorans DSM 14421 OX=1 423739 GN=FC85_GL000770 PE=4 SV=1
MSISKQQVIELSQQIGIDKIGFTTADNFEYLRAGLEAQKAAGHTSGFEHPNLDERLNPALTFDHPKSIIAIALAYPSRMKESPVRTNLKRGQFARASWGIDYHQILREKMTSLIKQLKGLDETARFKPMVDTGELVDVAVANRAGLGFIGKNGLLITKEYGSFVYLGEMITNLEFEADTPIPCQCGDCTRCIDACPVRALLGNGKMNAQRCLSYQTQTKGLMSDFARKKTRNVIYGCDICQLVCPFNQGKDFHLHKEMTPDPDKVRPELLPILSLSNHDFKAGFGQMAGSWRGKKPLQRNAIIALANLNDRSAIPKLREVMDGDVRPVIRATAAYALGRLAKPGDEEILGDLQSAYQKERTEKSDALILHDYQVAINAVQRQKNS

SEQ ID NO: 77643 - protein, 224 aa, Lactobacillus farraginis
  misc_feature (1)..(224): tr|X0PAY3|X0PAY3_9LACO Iron-sulfur cluster-binding prot ein OS=Lactobacillus farraginis DSM 18382 = JCM 14108 O X=1423743 GN=JCM14108_1752 PE=4 SV=1
MRTPSALKERIIAESRKIGIDKIGFTTADDFESLRSSLEAQKAAGHTSGFEHPNLDERLNPKLILKDAKTIIAIALAYPSKLKRQPPRTGLKRGQFARASWGDDYHDILREKMALLTERIQELTDESVSFEPMVDTGQLIDVAVANRAGLGFIGKNGLLITEEFGSFVYLGEIVTNLVLAPDQPIPCQCGDCTRCLDACPVQALLGDGRMNAQRCLSYQTQTKG

SEQ ID NO: 77644 - protein, 388 aa, Lactobacillus farraginis
  misc_feature (1)..(388): tr|A0A0R1VTK5|A0A0R1VTK5_9LACO Iron-sulfur cluster-bind ing protein OS=Lactobacillus farraginis DSM 18382 = JCM 14108 OX=1423743 GN=FD41_GL000083 PE=4 SV=1
MRTPSALKERIIAESRKIGIDKIGFTTADDFESLRSSLEAQKAAGHTSGFEHPNLDERLNPKLILKDAKTIIAIALAYPSKLKRQPPRTGLKRGQFARASWGDDYHDILREKMALLTERIQELTDESVSFEPMVDTGQLIDVAVANRAGLGFIGKNGLLITEEFGSFVYLGEIVTNLVLAPDQPIPCQCGDCTRCLDACPVQALLGDGRMNAQRCLSYQTQTKGVMADEFRPKIRNVIYGCDICQVACPFNRGKDFHRHARMEPETTKVRPELLPMLTLSNRQFKDQFGNMAGAWRGKKPLQRNAMIALANLGDASAVPDLLAVMSRDPRPMIRATAAYAVGRLVRKFDEPVRQAIAAQYQKARQANEAPEFLTEYHRALLKIDALIR

SEQ ID NO: 77645 - protein, 385 aa, Lactobacillus fuchuensis
  misc_feature (1)..(385): tr|A0A2N9DSY8|A0A2N9DSY8_9LACO Epoxyqueuosine reductase OS=Lactobacillus fuchuensis OX=164393 GN=queG PE=4 SV= 1
MPTLKEQVIAASQSIGINKIGFTTAAPFDYLEASLKEQQQNDHSSGFEHKILEERLYPELIFDQPKSIIAIALAYPTKMANKPARTGAKRGSFARASWGIDYHDILRDKMAQLIDAIKDLAADDAEVTFKPMVDTGELSDVAVAQRAGLGFIGLNGLLITPEFGSYVYLGEIITNIPFEPDVPMSNQCGSCTRCIDYCPPSALMGDGRLNAKRCLSYQTQTKGFMPEEYRPKIRSVIYGCDICQQVCPFNKGKDFHFHPDMEPDPESVMPELQPLLTIGNKEFKVKFGHLAGSWRGKKPLQRNAIIALANVKDRSAVPQLLQLIDTDPRPVIRGTAAWAIAQLTRDVTPELITFMQQAEAQEIDPEAQGEFQNALLKLNEQLSEN

SEQ ID NO: 77646 - protein, 385 aa, Lactobacillus fuchuensis; identical to SEQ ID NO: 77645
  misc_feature (1)..(385): tr|A0A0R1RYC6|A0A0R1RYC6_9LACO 4Fe-4S ferredoxin-type d omain-containing protein OS=Lactobacillus fuchuensis DS M 14340 = JCM 11249 OX=1423747 GN=FC69_GL001193 PE=4 SV =1

SEQ ID NO: 77647 - protein, 385 aa, Lactobacillus graminis
  misc_feature (1)..(385): tr|A0A5J6Z2A4|A0A5J6Z2A4_9LACO tRNA epoxyqueuosine(34) reductase QueG OS=Lactobacillus graminis OX=60519 GN=qu eG PE=4 SV=1
MPTLKEQVITASKAIGIDKIGFTSAAPFDYLEASLKEQKSNDHSTGFEHKVLEERLYPNLIFDQPQSIIAIALAYPTKITNKPARTGAKRGSFARASWGIDYHDILRDKMDQLIKTIEELANSDTKITFKPMVDTGELSDVAVAQRAGLGFIGLNGLLVTPEFGSYVYLGEIITNIPFEPDTPMANQCGSCTRCVDYCPPQALMGDGRLNAKRCLSYQTQTKGFMPEEFRPKIRSVIYGCDICQQVCPFNKGKDFHFHPDMEPDPESVMPELQPMLTISNKQFKLQFGHLAGAWRGKKPLQRNAIIALANVKDRTAIPKLLELIDTDVRPVIRGTAAWAIAQLVRDVTPEILTFLETAAKRESEPEAQVEFDNALQILKKRYSER

SEQ ID NO: 77648 - protein, 385 aa, Lactobacillus graminis; identical to SEQ ID NO: 77647
  misc_feature (1)..(385): tr|A0A0R1XB29|A0A0R1XB29_9LACO Iron-sulfur cluster-bind ing protein OS=Lactobacillus graminis DSM 20719 OX=1423 752 GN=FC90_GL000736 PE=4 SV=1

SEQ ID NO: 77649 - protein, 407 aa, Lactobacillus harbinensis
  misc_feature (1)..(407): tr|A0A510TZD0|A0A510TZD0_9LACO Epoxyqueuosine reductase OS=Lactobacillus harbinensis OX=304207 GN=LHA01_28770 PE=4 SV=1
MHADLKQQIIAASQTIGIDKIGFTTAAPFTDLKPSLVAQREKGYNSGFEHQNIDERVYPDKIFNQPRSIIAIALAYPTRMHQRAPRSEYKRGYFARASWGTDYHTILRAKMTQLIEKIRQLAGNDASIAFKPMVDTGELVDVAVAQRAGLGFIGKNGLLITKEFGSWVYLGEIITNIDFPPDTPIPCQCGECTRCIDFCPPSALLGDGHLNAQRCLSFQTQTKGMMPAEFRPMIRNVIYGCDICQLVCPFNKGKDTHFHPDMEPDPEAVSPKLVPLLDISNKQFKEKFGALAGAWRGKKPLQRNAIIALANMRDRSAVPKLLEVIDKDPRPVIRGTAAWAVGHLLKNQNAEISAFLTTALAKETDADAQAEFQQALRAIAALPLNTVFGEGNFYYETLSSIDPGHRG

SEQ ID NO: 77650 - protein, 384 aa, Lactobacillus harbinensis
  misc_feature (1)..(384): tr|A0A0R1XGB5|A0A0R1XGB5_9LACO Iron-sulfur cluster-bind ing protein OS=Lactobacillus harbinensis DSM 16991 OX=1 122147 GN=FC91_GL001739 PE=4 SV=1
MHADLKQQIIAASQTIGIDKIGFTTAAPFTDLKPSLVAQREKGYNSGFEHQNIDERVYPDKIFNQPRSIIAIALAYPTRMHQRAPRSEYKRGYFARASWGTDYHTILRAKMTQLIEKIRQLAGDDASIAFKPMVDTGELVDVAVAQRAGLGFIGKNGLLITKEFGSWVYLGEIITNIDFPPDTPIPCQCGECTRCIDFCPPSALLGDGHLNAQRCLSFQTQTKGMMPAEFRPMIRNVIYGCDICQLVCPFNKGKDTHFHPDMEPDPEAVSPELVPLLDISNKQFKEKFGALAGAWRGKKPLQRNAIIALANMHDRSAVPKLLEVIDKDPRPVIRGTAAWAVGHLLKNQNAEISAFLTTALAKETDADAQAEFQQALRAIAALPA

SEQ ID NO: 77651 - protein, 388 aa, Lactobacillus hilgardii
  misc_feature (1)..(388): tr|C0XMY6|C0XMY6_LACHI Putative iron-sulfur cluster-bin ding protein OS=Lactobacillus hilgardii DSM 20176 = ATC C 8290 OX=1423757 GN=HMPREF0519_2597 PE=4 SV=1
MSASVTLKQQIITESKKLGIDKIGFTTADDFEELRSSLEAQKAAGHTSSFEHPNIDERLNPKLIFDHPQSIIAIALAYPSRMKQRPKRSGLKRGQFARASWGDDYHHILREKMALLIDRIKDIVGEGKARFEPMVDTGQLIDVAVAHRAGLGFIGKNGLLITEEFGSFVYLGEMITDLKLEPDTPIPCQCGECTRCLDACPVQALLGDGRMNAQRCLSYQTQTKGLMADEFRPKIRNVIYGCDICQVACPFNRGKDFHLHQRMEPNVEKVRPELLPMLKLSNKQFNDRFGQMAGAWRGKKPLQRNAIIALANLGDVSAVDDLLHVMSQDPRPMIRATAAYAVARLSRSYETTSRAKVAEQYQKELASGQEEALLKEYRRALKTIDALK

SEQ ID NO: 77652 - protein, 394 aa, Lactobacillus odoratitofui
  misc_feature (1)..(394): tr|A0A0R1LZ10|A0A0R1LZ10_9LACO Iron-sulfur cluster-bind ing protein OS=Lactobacillus odoratitofui DSM 19909 = J CM 15043 OX=1423776 GN=FD04_GL000611 PE=4 SV=1
MNGMVQAATLKQQIITASQQLGIDKIGFTTADDFEYMRAGLEKQKADDHVTGFEHPNLDERLNPSLIFDEPKSIIAIALAYPARLQEKPAKTDSKRGQFARASWGEDYHFILRDKLNALIDAIRDLLPADVQARFKPMVDTGELMDVVVAQRAGVGFIGKNGLLITPEFGSFVYLGEVITNLAIEPDEPMACQCGECTRCVDACPPQALMGNGQLNGKRCLSYQTQTKGQMPDEFRPMIRNVIYGCDICQVVCPFNRGVDNHLHQRMEPDPERVRPELVPMLTQSNREFKETFGEMAGSWRGKKPLQRNAIIALANLNDTSAIPDLMAVIQNDPRPVIRATAAYAVGRLTKRPEPVMLQALQTAYEAEQQAGTEAALLNEYARALARIEVLTSD

SEQ ID NO: 77653 - protein, 380 aa, Lactobacillus paracasei
  misc_feature (1)..(380): tr|A0A422MG01|A0A422MG01_LACPA Epoxyqueuosine reductase OS=Lactobacillus paracasei OX=1597 GN=FAM3228_00951 PE =4 SV=1
MDLKMMIKVHAKELGIDKIGFTTADNFAALKPSLLAQKAAGHTTGFEHQNIDERLYPDKIFDQPQSIIAIALAYPAKIHERPPRTGPKRGRFARASWGIDYHTVLDRKMASLIKFIKRTAENDPNLRFKPMVDTGELIDVVVAQRAGLGFIGKNGLLITPEFGSYVYLGEIITNIKFAPDEPMTSQCGDCTRCIDFCPPKALLGDGRMNGQRCLSYQTQTKGYMDPEFRPMIRNVLYGCDICQQVCPFNKGKDFHIHPEMEPDPETVLPELIPMLTLTNKDFKTRFGKLAGAWRGKKPLQRNAIIALVNLHDRSAIPHLLEVIEHDPRPMIRATAAWAVGELQSSSNPEIETFLKTALAKETTPEAQVVFQDALDHLTQH

SEQ ID NO: 77654 - protein, 380 aa, Lactobacillus paracasei
  misc_feature (1)..(380): tr|S2NBV2|S2NBV2_LACPA Iron-sulfur cluster-binding prot ein OS=Lactobacillus paracasei subsp. paracasei Lpp225 OX=1256225 GN=Lpp225_0945 PE=4 SV=1
MDLKMMIKAHAKELGIDKIGFTTADNFAALKPSLLAQKAAGHTTGFEHQNIDERLYPDKIFDQPQSIIAIALAYPAKIHERPPRTGPKRGRFARASWGIDYHTVLDRKMASLIKFIKRMAENDPTLRFKPMVDTGELIDVVVAQRAGLGFIGKNGLLITPEFGSYVYLGEIITNIKFAPDEPMASQCGDCTRCIDFCPPKALLGDGRMNGQRCLSYQTQTKGYMDPEFRPMIRNVLYGCDICQQVCPFNKGKDFHIHPEMEPDPETVLPELIPMLTLTNKDFKTRFGKLAGSWRGKKPLQRNAIIALVNLHDRSAIPHLLEVIEHDPRPMIRATAAWAVGELQSSSNPEIETFLKTALAKETTPEAQVAFQDALDHLTQH

SEQ ID NO: 77655 - protein, 388 aa, Lactobacillus parafarraginis
  misc_feature (1)..(388): tr|A0A0R1YPM9|A0A0R1YPM9_9LACO Iron-sulfur cluster-bind ing protein OS=Lactobacillus parafarraginis DSM 18390 = JCM 14109 OX=1423786 GN=FD47_GL001203 PE=4 SV=1
MTPTADLKQRIIAASHEVGIDKIGFTTAANFEGLRESLTEQIKAGHTSGFEHPNLDERLNPDLIFDGPKSIIAIALAYPSRMTQRPPKTGLKRGQFARASWGEDYHGILREKMNQLIEKIRVLAGADARFKPMVDTGELIDVAVANRAGLGFIGKNGLLITEEFGSFVYLGEIMTNLTLEPDTPIACQCGDCTRCLDACPVKALLGDGRMNAQWCLSYQTQTKGMMADEFRPKIRNVIYGCDICQVVCPYNRGKDFHLHEKMAPDPERVRPELLPMLTLSNRQFKDQFGEMAGAWRGKKPLQRNAIIALANLHDQSALSQLVAVMQADPRPMIRATAAYAIGEIVRKYDAEMIETLRAQYQREADADQAAEFLDEFERAINRINELKH

SEQ ID NO: 77656 - protein, 402 aa, Lactobacillus parafarraginis
  misc_feature (1)..(402): tr|G9ZRK9|G9ZRK9_9LACO Putative iron-sulfur cluster-bin ding protein OS=Lactobacillus parafarraginis F0439 OX=7 97515 GN=HMPREF9103_02370 PE=4 SV=1
MLIFEHNQTKGPECMTPTADLKQRIIAASHEVGIDKIGFTTAANFEGLRESLTEQIKAGHTSGFEHPNLDERLNPDLIFDGPKSIIAIALAYPSRMTQRPPKTGLKRGQFARASWGEDYHGILREKMNQLIEKTRMLAGADARFKPMVDTGELIDVAVANRAGLGFIGKNGLLITEEFGSFVYLGEIMTNLTLEPDTPIACQCGDCTRCLDACPVKALLGDGRMNAQRCLSYQTQTKGMMADEFRPKIRNVIYGCDICQVVCPYNRGKDFHLHEKMAPDPEKVRPELLPMLTLSNRQFKDQFGEMAGAWRGKKPLQRNAIIALANLHDQSALPQLVAVMQADPRPMIRATAAYAIGEIVRKYDAEMIEILRAQYQREADADQAIEFRHEFERAINRINELKH

SEQ ID NO: 77657 - protein, 389 aa, Lactobacillus perolens
  misc_feature (1)..(389): tr|A0A0R1MWW3|A0A0R1MWW3_9LACO Putative Fe-S protein OS =Lactobacillus perolens DSM 12744 OX=1423792 GN=FD09_GL 002830 PE=4 SV=1
MEVMTMHDDLKQAIIDASHEIGIDKIGFTTADDFAALKPSLVAQREKGYNSGFEHQNVDERVYPDLIFDHPRSIIAIALAYPTRMHQRAPRSQYKRGYFARASWGIDYHTILRDRMNQLVTRIRQLAGDAADVTFKPMVDTGELVDVAVAQRAGLGFIGKNGLLITKEFGSWVYLGEIITNIEFTPDTPIECQCGECTRCIDFCPPAALLGDGHLNAQRCLSYQTQTKGLMPEEFRPMIRNVIYGCDICQLVCPFNKGKDFHFHPEMEPDPATVSPELVPLLDISNKQFKAKFGPLAGSWRGKKPLQRNAIIALVNQHDRSVVPKLLAVIDNDPRPVIRGTAAWGVGQLLTQQNDEITIFLQDAQAKEKEPDVIHEFTQALAIIAQLPA

SEQ ID NO: 77658 - protein, 386 aa, Lactobacillus pobuzihii
  misc_feature (1)..(386): tr|A0A0R2L1E1|A0A0R2L1E1_9LACO (Fe-S)-binding protein O S=Lactobacillus pobuzihii OX=449659 GN=IV66_GL001073 PE =4 SV=1
MVNAYLKKQIIAASQELGIDKIGFTTAEDFEHLRPSLMAQKAAGHTSGFEHQNLDERLDPDLIFDQPRSIIAIALAYPSKMTQRPPRTKYKRGHFARASWGDDYHTVLNKKMSALIEKIKDLATNESEFKPMVDTGELIDVAVAQRAGIGFIGKNGLLITKEFGSFVYLGEIITDLEFEPDEPMDSQCGDCTRCVDYCPPHALLGDGRLNAQKCLSYQTQTKGMMPEKYRPMIHNVIYGCDICQSVCPFNRGSDHHFHPDMEPDPKKVSPELLPLLTISNREFKNTYGPMAGSWRGKKPLQRNALIALANLGDKSALPQILEVIDHDSRPVIRATAAYAVGRLVRKFNPEICDFLTEKYQQEQQQGQEEQYLREYRMAIQKISSLE

SEQ ID NO: 77659 - protein, 354 aa, Lactobacillus rapi
  misc_feature (1)..(354): tr|A0A512PPW6|A0A512PPW6_9LACO Epoxyqueuosine reductase OS=Lactobacillus rapi OX=481723 GN=LRA02_21110 PE=4 SV =1
MRDSLIAQKAAGHTSGFEHQNLDERLNPKLIFDQPKSIIAIALAYPSRIKQRPSRTKLKRGQFARASWGNDYHQILRAKLNCLIEQMKAVAGSEARFKPMVDTGELIDVAVANRAGLGFIGKNGLLITEEYGSYVYLGEIITNLGLPADTPIPCQCGSCTRCIDACPVKALLGDGRMNAQHCLSYQTQTKGLMKAEFRPKIRNVIYGCDICQQVCPFNQGKNFHLHDEMEPDPEKVRPELLPMLTMSNREFKDQFGEMSGLWRGKKPLQRNAIIALANLHDQSAIPQLLAVMKADPRPMIRATAAYAIGEIMTTTNNDILAALQEQLEHEVATGQPDEFLAEFRAAIKQAKQLK

SEQ ID NO: 77660 - protein, 390 aa, Lactobacillus rennini
  misc_feature (1)..(390): tr|A0A1K2I869|A0A1K2I869_9LACO Epoxyqueuosine (OQ) redu ctase QueG OS=Lactobacillus rennini OX=238013 GN=LREN56 5_1707 PE=4 SV=1
MQTDALKQKIITAKTSLGIDKIGFTTAAPFRHLAAGLKTQKAKGYTSGFEHQVLAQRLYPQRIFDHPQSIIAIALAYPSKLPFKVPHDRQQPRGRFARASWGLDYHQILRDKMQQLINFIKANIDVKAHFKAMVDTGELIDVAVAQRAGLGFIGRNGLLITQEFGSFVYLGEIITDIPFVPDQPMANQCGTCTRCIDQCPSQALLGNGHLNAQRCLSYQTQTKGIMAAEFRPKIRNVIYGCDICQLVCPFNRGKAVDGHVQMQPQLDEAAPKLKQLLTISNQEFREQFGQLAGAWRGKKPLQRNAIIALANLGDRSAIPLLLKLSEQDVRPIIRATAIWALAKLAKDNKTAIVAFLKQCQQVEKDAQVQHSLQVALKRIRGKELNSHKIS

SEQ ID NO: 77661 - protein, 390 aa, Lactobacillus rennini
  misc_feature (1)..(390): tr|A0A0R2D2F6|A0A0R2D2F6_9LACO Iron-sulfur cluster-bind ing protein OS=Lactobacillus rennini DSM 20253 OX=14237 96 GN=FC24_GL001446 PE=4 SV=1
MQIDALKQKIIAAKTSLGIDKIGFTTAAPFRHLAAGLKMQKAKEYTSGFEHQVLAQRLYPQRIFDHPQSIIAIALAYPSKLPFKVPHDRQQPRGRFARASWGLDYHQILRDKMQQLINFIKANIDVEAHFKAMVDTGELIDVAVAQRAGLGFIGRNGLLITQEFGSFVYLGEIITDIPFTPDQPMANQCGTCTRCIDRCPSQALLGNGHLNAQRCLSYQTQTKGIMAAEFRPKIRNVIYGCDVCQLVCPFNRGKAVDGHVQMQPQLDEAAPKLKQLLTISNQEFREQFGQLAGAWRGKKPLQRNAIIVLANLGDRSAIPLLLKLSEQDVRPIIRATAIWALAKLAKDNKTAIVAFLKQCQQVENDAQVQQSLQAALKRIRGKELNSHKIS

SEQ ID NO: 77662 - protein, 380 aa, Lactobacillus rhamnosus
  misc_feature (1)..(380): tr|A0A179Y9I8|A0A179Y9I8_LACRH Epoxyqueuosine reductase OS=Lactobacillus rhamnosus OX=47715 GN=PY91_13305 PE=4 SV=1
MDLKATIKQHAKDLGIDKIGFTTADNFAALKPSLLAQKAAGHTTGFEHQNLDERLYPDKIFDQPQSIIAIALAYPPKIHDRPPRTGPKRGRFARASWGIDYHTVLDRKMAALIRFIKKTAKSQTDIRFKPMVDTGELIDVAVAQRAGLGFIGKNGLLITPEFGSYVYLGEIITNIKFAPDEPMSCQCGTCTRCIDFCPPHALLGDGRMNGQRCLSYQTQTKGFMDPEFRPMIRNVLYGCDICQQVCPFNKGKDFHVHPEMEPDPDTVMPELIPMLTLSNKGFKNRFGKLAGAWRGKKPLQRNAIIALVNLHDRSAVPHLLEVIDTDPRPMIRATAAWAVSELAATPNAELTTFLEKAQAKETTALAQAEFQKALERIAQR

SEQ ID NO: 77663 - protein, 380 aa, Lactobacillus rhamnosus
  misc_feature (1)..(380): tr|K8QNP8|K8QNP8_LACRH Epoxyqueuosine (OQ) reductase Qu eG OS=Lactobacillus rhamnosus LRHMDP2 OX=1203258 GN=LRH MDP2_666 PE=4 SV=1
MDLKATIKQHAKDLGIDKIGFTTADNFAALKPSLLAQKAAGHTTGFEHQNLDERLYPDKIFDQPQSIIAIALAYPSKIHDRPPRTGPKRGRFARASWGIDYHTVLDRKMAALIRFIKKTAKSQTDIRFKPMVDTGELIDVAVAQRAGLGFIGKNGLLITPEFGSYVYLGEIITNIKFAPDEPMSCQCGTCTRCIDFCPPHALLGDGRMNGQRCLSYQTQTKGFMDPEFRPMIRNVLYGCDICQQVCPFNKGKDFHVHPEMEPDPDTVMPELIPMLTLSNKGFKNRFGKLAGAWRGKKPLQRNAIIALVNLHDRSAVPHLLEVIDTDPRPMIRATAAWAVSELAATPNAELTTFLEKAQAKETTALAQAEFQKALERIAQR

SEQ ID NO: 77664 - protein, 385 aa, Lactobacillus sakei
  misc_feature (1)..(385): tr|A0A2Z4W6A5|A0A2Z4W6A5_LACSK tRNA epoxyqueuosine(34) reductase QueG OS=Lactobacillus sakei OX=1599 GN=queG P E=4 SV=1
MPTLKEQVIAASREIGIDKIGFTSAAPFDYLEASLIEQKKNGHSSGFEHKVLEERLYPELIFDQPKSIIAIALAYPTKIHNKPARTGAKRGSFARASWGIDYHDILRDKMAQLIDAIKELADEDDEVTFKPMVDTGELSDVAVAQRAGLGFIGLNGLLITPEFGSFVYLGEIITNIPFEPDTPMANQCGSCTRCIDYCPPSALLGDGRLNATRCLSYQTQTKGFMPEEFRPKIRSVIYGCDICQQVCPFNKGKDFHFHPDMEPDPEVVMPELQPLLTISNKEFKVKFGHLSGSWRGKKPIQRNAIIALANVKDRTAIPQLLQLIDNDPRPVIRGTAAWALGQLVRDVTPEMLDFLQQSADKEEEPEAQVEFHKALLILNERFEER

SEQ ID NO: 77665 - protein, 385 aa, Lactobacillus sakei
  misc_feature (1)..(385): tr|Q38ZP1|Q38ZP1_LACSS Putative Iron-sulfur cluster-bin ding protein OS=Lactobacillus sakei subsp. sakei (strai n 23K) OX=314315 GN=LCA_0035 PE=4 SV=1
MPTLKEQVIAASREIGIDKIGFTSAAPFDYLEASLIEQKKNGHSSGFEHKVLEERLYPELIFDQPKSIIAIALAYPTKIHNKPARTGAKRGSFARASWGIDYHDILRDKMAQLIDAIKELADEDDEVTFKPMVDTGELSDVAVAQRAGLGFIGLNGLLITPEFGSFVYLGEIITNIPFEPDTPMANQCGSCTRCIDYCPPKALLGDGRLNATRCLSYQTQTKGFMPEEYRPKIRSVIYGCDICQQVCPFNKGKDFHFHPDMEPDPEVVMPELQPLLTISNKEFKVKFGHLSGSWRGKKPIQRNAIIALANVKDRTAIPQLLQLIDNDPRPVIRGTAAWALGQLVRDVTPEMLDFLQQAADKEEEPEAQVEFHKALLILNERFEER

SEQ ID NO: 77666 - protein, 385 aa, Lactobacillus shenzhenensis
  misc_feature (1)..(385): tr|U4TRP3|U4TRP3_9LACO YhbA OS=Lactobacillus shenzhenen sis LY-73 OX=1231336 GN=yhbA PE=4 SV=1
MADTDLKQRIIAASQTIGIDKIGFTTAAPFSELAPSLAAQRAKGYSSGFEHQNIDERVHPDKIFDQPRSIIAIALAYPSRMHERAPRSEYKRGYFARASWGIDYHTILREKMTRLIAEIKRLAGEDAAVNFKPMVDTGELVDVAVAQRAGLGFIGKNGLLITKEFGSWVYLGEIITNIEFAPDTPIPCQCGDCTRCIDFCPPGALLGDGHLNAQRCLSYQTQTKGMMPAEYRPMIRNVIYGCDICQLVCPFNKGKDTARHPEMTPDPDRVSPELVPMLTMSNKEFKNRFGALAGAWRGKKPLQRNAIIALANTRDRSALPKLLEVIDKDPRPVIRGTAAWAVSQLLKNQNPEISAFLTAALAKETDLAAQTEFRDALAHIAALPA

SEQ ID NO: 77667 - protein, 385 aa, Lactobacillus silagincola
  misc_feature (1)..(385): tr|A0A1Z5J256|A0A1Z5J256_9LACO Epoxyqueuosine reductase OS=Lactobacillus silagincola OX=1714681 GN=queG PE=4 S V=1
MSNVTLKQQIIAASQQVGIDKIGFTTAADFEHLRAGLVKQKADGHTTGFEHQNLDERLNPSLIFDDPKTLISIALAYPAKLKGRAPRTGLKRGQFARASWGEDYHFILDDHLAALINAIKNLLPEDNDIRFKPMVDTGELIDVAVAQRAGVGFIGKNGLLITPEFGSYVYLGEIVTNLELAPDEPMTSQCGNCTRCIDACPPRALMGNGQLNGQRCLSYQTQTKGEMPDEFRPLIRNVIYGCDICQVVCPFNRGVDNHLHERMEPDVERVRPELTPMLAMTNREFKASFGSMAGSWRGKKPLQRNAIIALANLNDTSAVPKLLEVIEKDPRPLIRATAAYAVGRLSQPGNTAIVDFLRAAYETERDSGTDAQLLQEYVRAIDRIS

SEQ ID NO: 77668 - protein, 389 aa, Lactobacillus similis
  misc_feature (1)..(389): tr|A0A0R2EZ11|A0A0R2EZ11_9LACO (Fe-S)-binding protein O S=Lactobacillus similis DSM 23365 = JCM 2765 OX=1423804 GN=FD14_GL000885 PE=4 SV=1
MMANTTLKQQIIAASQRVGIDKIGFTTAADFEHLRAGLVKQKADGHITGFEHQNLDERLNPDLIFDNPKTLISIALAYPARLKNQPPRTGLKRGQFARASWGEDYHFILDDHLEALIAAIKALLPADSDVRFKPMVDTGELIDVAVAQRAGVGFIGKNGLLITPEFGSFVYLGEIVTNLELEPDEPMACRCGDCTRCIDACPPRALMGNGQLNGQRCLSYQTQTKGQMPDEFRPLIRNVIYGCDICQVVCPFNRGVDNHLHERMEPDVELVRPELTPMLTQTNREFKESFGPMAGSWRGKKPLQRNAIIAIANLNDTSSLPKLLEVIENDPRPLIRATAAYAVGRLSQPGNTAVAEFLQAAYETERDNGTDESLLQEYVRAIEQVTVND

SEQ ID NO: 77669 - protein, 383 aa, Lactobacillus sp.
  misc_feature (1)..(383): tr|A0A425WTR4|A0A425WTR4_9LACO tRNA epoxyqueuosine(34) reductase QueG OS=Lactobacillus sp. OX=1591 GN=queG PE= 4 SV=1
MYDDLKQKIIAASADLGIDKIGFTTAAPFAEMAASLKAQKAAGHTSGFEHQVLAERLYPEQIFEQPQSIIAIALAYPSKMRQKAPRDRQQRRGSFARASWGEDYHFILRDKMQQLVEFIEANATAEVRFKPMVDTGELSDVAVSQRAGLGFIGRNGLLITEEFGSFVYIGEIITNIPFTPDPPVENQCGTCTRCIDYCPPSALMGDGRLNAQRCLSYQTQTKGMMAAEFRPQIRSVIYGCDICQLVCPFNRGKDFHRHSRMEPEVEEVTPVLQSMLTISNKEFKQRFGRLAGSWRGKKPLQRNAIIALANVKDRSAVPLLLEVIDNDPRPVIRATAIWAVAELAQHNEAELLEFLQNQQVSENETEVQAAITAATAKLKSQQD

SEQ ID NO: 77670 - protein, 386 aa, Lactobacillus sp.
  misc_feature (1)..(386): tr|A0A401IRP7|A0A401IRP7_9LACO Epoxyqueuosine reductase OS=Lactobacillus sp. YK43 OX=2163553 GN=queG PE=4 SV=1
MANAALKEQIIAASQKIGIDKIGFTTADDFEHLRPSLVAQKAAGHTSGFEHQNLDERLDPALIFDQPRSIIAIALAYPTKLQQRPPKTKYKRGHFARASWGNDYHDILRQKMADLIEQIKVLAGEQVTFKPMVDTGELIDVAVAQRAGLGFIGKNGLLITEEFGSFVYLGEIITNIEFEPDQPQESQCGDCTRCIDYCPPGALLGDGRLDAQKCLSYQTQTKGLMDEQYRPLIRNVIYGCDICQMVCPFNRGKNFHFHPEMEPDPDKVSPELVPLLTISNKQFKAEFGPMAGSWRGKKPLQRNALIALANLGDRSAIPEILQVVEQDPRPVIRATGAYALGRLVRDYNPEISGFLQQKLQQEEDAGLADEYLREYRAAIRKINALQ

SEQ ID NO: 77671 - protein, 380 aa, Lactobacillus zeae; identical to SEQ ID NO: 77631
  misc_feature (1)..(380): tr|A0A0R1EYQ4|A0A0R1EYQ4_LACZE Iron-sulfur cluster-bind ing protein OS=Lactobacillus zeae DSM 20178 = KCTC 3804 OX=1423816 GN=FD51_GL000549 PE=4 SV=1

SEQ ID NO: 77672 - protein, 351 aa, Lactococcus chungangensis
  misc_feature (1)..(351): tr|A0A1K2H4G3|A0A1K2H4G3_9LACT Epoxyqueuosine reductase OS=Lactococcus chungangensis CAU 28 = DSM 22330 OX=112 2154 GN=SAMN02746068_00123 PE=4 SV=1
MTNLKEQIIAISKEIGISKIGFTAADNFDYLEKSLRLAQEKGTNSGFEHQNIEERIKPKLLLDNAKTIISIAIAYPNKLPQLPGKSSYKRGKFSSSSWGVDYHTILTEKMACLSERIAELTDDFDHKAMVDTGALVDTAVARRAGIGFIGKNGLVISKEFGSYMFLGELITNLDIEPDSPVDYGCGDCDHCITSCPTDALNGDSTMNAKRCLSFQTQKKGPLDEEFRVKMKTLIYGCDICQIACPYNKGIRNEAQTIIDPELAYPELQPFIQLSNQEFKAKFSEIAGSWRGKNVLQRNAIYVLANVNDKTAIPLLEEIAADPSNAVHQEAAQWALDKIKSKVNHHQSLKNR

SEQ ID NO: 77673 - protein, 351 aa, Lactococcus fujiensis
  misc_feature (1)..(351): tr|A0A2A5RNL1|A0A2A5RNL1_9LACT Epoxyqueuosine reductase OS=Lactococcus fujiensis JCM 16395 OX=1291764 GN=queG PE=3 SV=1
MNNLKAAIQELARELNIQKIGFTTADNFEYLRKSLVEQKEAGHTSGFEHQNLDERLHPKLAVEDAKTIISIAIAYPNKPLGRPEKTEYRRGQFSRGSWGEDYHDVLGRKLDALARGIEKIAGDFNYKAMVDTGALVDVAVAARSGIGFIGKNGLLISKEYGSWMFLGELVTNLEIEPDQPVDYGCGECTRCVDFCPTKALLGDGRLNAQRCLSYQTQAKGKMPEEYRDKIKTVIYGCDICQMVCPYNKGIDSHFHPEMEPDPELTNPELLPLLDLSNKQFVNKFGAMAGSWRGKNPIQRNAVYALANANDKSALPKLKEIVEQDVREYMVDAAEWAIERLENGKKRIRPRK

SEQ ID NO: 77674 - protein, 351 aa, Lactococcus garvieae
  misc_feature (1)..(351): tr|A0A173M467|A0A173M467_9LACT Epoxyqueuosine reductase OS=Lactococcus garvieae OX=1363 GN=queG PE=3 SV=1
MKSLKEEIQKLAADLNIQKIGFTKADDFEYLRASLIEQKEAGHTSGFEHKNLDERLQPKLSLEDAKTIISIGIAYPNKAEGKPEKTEYRRGSFSRGSWGEDYHHVLRRKLKELAEGIEKIAGSFNYTAMVDTGALVDVAVAARAGLGFVGKNGLLVSKEYGSWMFLGELVTNLDIEEDQPVDYGCGSCTRCVDFCPTKALLGDGRLNAQRCLSYQTQTRGAMPEEYREKIKTVIYGCDICQVVCPYNKGINSHFHPEMEPDPDLTNPELLPLLDLSNKEFANKFGNMAGSWRGKNPIQRNTVYALGNANDRTALPKLHEIAENDVRDYMVDAAEWAIEKLENKHRMRPRKR

SEQ ID NO: 77675 - protein, 351 aa, Lactococcus garvieae
  misc_feature (1)..(351): tr|V8AQN4|V8AQN4_9LACT Epoxyqueuosine reductase OS=Lact ococcus garvieae TRF1 OX=1380772 GN=queG PE=3 SV=1
MKSLKEEIQKLAADLNIQKIGFTKADDFEYLRASLIEQKEAGHTSGFEHKNLDERLQPKLSLEDAKTIISIGIAYPNKAEEKPEKTEYRRGSFSRGSWGEDYHHVLRRKLKELAEGIEKIAGDFNYTAMVDTGALVDVAVAARAGLGFVGKNGLLVSKEYGSWMFLGELVTNLDIEEDQPVDYGCGSCTRCVDFCPTKALLGDGRLNAQRCLSYQTQTRGAMPEEYREKIKTVIYGCDICQVVCPYNKGINSHFHPEMEPDPDLTNPELLPLLDLSNKEFANKFGNMAGSWRGKNPIQRNAVYALGNANDRSALPKLHDIAENDVRDYMVDAAEWAIEKLENKHRMRPRKR

SEQ ID NO: 77676 - protein, 352 aa, Lactococcus lactis
  misc_feature (1)..(352): tr|A0A166VRG6|A0A166VRG6_LACLC Epoxyqueuosine reductase OS=Lactococcus lactis subsp. cremoris OX=1359 GN=queG PE=3 SV=1
MTSLKQAIQTLAQELNIQKIGFTTADDFEYLRKSLVEQKAAGHTSGFEHQNLEERLHPRLAVASAKTIISIGIAYPNKADERPEKTSYRRGQFSRGSWGEDYHFVLQRKLKALAEGIERLAGEFEYKAMVDTGALVDVAVAARAGLGFIGKNGLLISKEFGSWMFLGELVTDLEIEPDEPVDYGCGECSRCVDFCPTSALLGDGRLNAQRCLSFQTQAKGKMPEEYREKIKTVIYGCDICQTVCPYNKGINSHFHPEMEPDPELTNPEILPLLELSNKQFVNKFGQMAGSWRGKNPLQRNAVYALANANDRSALPKLREMAENDKRDYMVDAAQWAIERLENGKTRIRPKRR

SEQ ID NO: 77677 - protein, 351 aa, Lactococcus petauri
  misc_feature (1)..(351): tr|A0A252CFK2|A0A252CFK2_9LACT Epoxyqueuosine reductase OS=Lactococcus petauri OX=1940789 GN=queG PE=3 SV=1
MKSLKEEIQKLAADLNIQKIGFTKADDFEYLRASLIEQKEAGHTSGFEHKNLDERLQPKLSLEDAKTIISIGIAYPNKAEENPEKTEFRRGSFSRGSWGEDYHHVLRRKLKELAEGIEKIAGRFNYTAMVDTGALVDVAVAARAGLGFVGKNGLLVSKEYGSWMFLGELVTNLEIEEDQPVDYGCGSCTRCVDFCPTKALLGDGRLNAQRCLSYQTQTRGPMPEEYREKIKTVIYGCDICQVVCPYNKGINSHFHPEMEPDPDLTNPELLPLLDLSNKEFANKFGNMAGSWRGKNPIQRNAIYALGNANDRSALPKLHEIAENDVRDYMVDAAEWAIEKLENKHRMRPRKR

SEQ ID NO: 77678 - protein, 299 aa, Lactococcus piscium
  misc_feature (1)..(299): tr|A0A2C8EGG5|A0A2C8EGG5_9LACT Epoxyqueuosine reductase OS=Lactococcus piscium OX=1364 GN=queG PE=4 SV=1
MLLANAKTIIAIAVAYPNKLPQMPEKSAYKRGKFSPSSWGIDYHDILAGKMSLLAERISELTDEFDHKAMVDTGALVDTAVARRAGIGFIGKSGLVISKEFGSYMFLGELITNLDIEPDSPVDYGCGDCERCVTFCPTDALNGDTTMNAKRCLSFQTQKTGYIDEEFRIKTKSVLYGCDICQIVCPYNKGINSEPQTPIDPELSYPELQPFIKLTNKEFKETFGEIAGSWRGKNVLQRNAIFVLANLNDKTAIPLLEEIAANPQNAVHQEAAQWALDKLKRTSQHNRPLKKNIERGKIK

SEQ ID NO: 77679 - protein, 358 aa, Lactococcus piscium
  misc_feature (1)..(358): tr|A0A0D6DY24|A0A0D6DY24_9LACT Epoxyqueuosine reductase OS=Lactococcus piscium MKFS47 OX=297352 GN=QueG PE=4 S V=1
MTDLKQQIIAIAKEIGISKIGFTTADNFDYLKKTLTRAQEAGTNSGFEHKNIEERVDPKLLLANAKTIIAIAVAYPNKLPQMPEKSAYKRGKFSPSSWGIDYHDILVGKMSLLAQRISELTDEFDHKAMVDTGALVDTAVARRAGIGFIGKSGLVISKEFGSYMFLGELITNLDIEPDSPVDYGCGDCERCVTFCPTDALNGDTTMNAKRCLSFQTQKTGYIDEEFRIKTKSVLYGCDICQIVCPYNKGINSEPQTPIDPELSYPELQPFIKLTNKEFKEKFGEIAGSWRGKNVLQRNAIFVLANLNDKTAIPLLEEIAANPQNAVHQEAAQWALDKLKRTSQHNRPLKKNIERGKIK

SEQ ID NO: 77680 - protein, 358 aa, Lactococcus plantarum
  misc_feature (1)..(358): tr|A0A2A5S1R8|A0A2A5S1R8_9LACT Iron-sulfur cluster-bind ing protein OS=Lactococcus plantarum OX=1365 GN=RU87_GL 001019 PE=4 SV=1
MTDLKQQIISIAKSVGISKIGFTTADNFDYLKASLIQSQEDGTNSGFEHKNIDERVTPKLLLDNAKTIISIAVAYPNKLPDMPKKSTYKRGKFSPSSWGIDYHDILTEKMSKLAQGISELTDEFDHKAMVDTGALVDTAVARRAGIGFIGKSGLVISKEFGSYMFLGELITNLDIEPDEPVDYGCGDCDRCVTFCPTEALNGDTTMNAKRCLSFQTQTTGMIDEEFRIKTKSILYGCDICQIVCPYNKGIENTPQTPIDPELAYPELQPFIRLTNKEFKEKFGEIAGSWRGKNVLQRNAIYVLANLNDKTAIPLLEEIAANPQNAVHQEAAQWALEKLSRRDKQNRPLKKRHKHGKLK

SEQ ID NO: 77681 - protein, 351 aa, Lactococcus raffinolactis
  misc_feature (1)..(351): tr|A0A2A5S7B9|A0A2A5S7B9_9LACT Iron-sulfur cluster-bind ing protein OS=Lactococcus raffinolactis OX=1366 GN=RU8 8_GL001544 PE=4 SV=1
MTNLKEQIIAISKEIGISKIGFTTADNFDYLEKSLRLSQEKGTNSGFEHQNIEERIKPKLLLDNAKTIISIAVAYPNKLPQLPGKSPYKRGKFSSSSWGVDYHTILTEKMARLSERIAELTDDFDHKAMVDTGALVDTAVARRAGIGFIGKNGLVISKEYGSYMFLGELITNLDIEPDSPVDYGCGDCDHCITSCPTDALNGDSTMNAKRCLSFQTQKKGPLDEEFRVKMKTLIYGCDICQIACPYNKGIRNEGQTAIDPELAYPELQPFIRLSNQEFKAKFSEIAGSWRGKNVLQRNAIYVLANVNDKTAIPLLEEIAANPSNAVHQEAAQWALDKIKTKAKRNQSLKNR

SEQ ID NO: 77682 - protein, 351 aa, Lactococcus raffinolactis
  misc_feature (1)..(351): tr|I7KJ25|I7KJ25_9LACT Epoxyqueuosine (OQ) reductase Qu eG OS=Lactococcus raffinolactis 4877 OX=1215915 GN=BN19 3_10925 PE=4 SV=1
MTNLKEQIIAISKEIGISKIGFTTADNFDYLEKSLRLAQEKGTNSGFEHQNIEERIKPKLLLDNAKTIISIAVAYPNKLPQLPGKSPYKRGKFSSSSWGVDYHTILTEKMARLSERIAELTDDFDHKAMVDTGALVDTAVARRAGIGFIGKNGLVISKEFGSYMFLGELITNLDIEPDSPVDYGCGDCDHCITSCPTDALNGDSTMNAKRCLSFQTQKKGPLDEEFRVKMKTLIYGCDICQIACPYNKGIRNEAQTTIDPELAYPELQPFIQLSNQEFKAKFSEIAGSWRGKNVLQRNAIYVLANVNDKTAIPLLEEIAANPSNAVHQEAAQWALYKIKSKANHHQSLKNR

SEQ ID NO: 77683 - protein, 345 aa, Lactococcus reticulitermitis
  misc_feature (1)..(345): tr|A0A224X911|A0A224X911_9LACT 4Fe-4S ferredoxin-type d omain-containing protein OS=Lactococcus reticulitermiti s OX=2025039 GN=RsY01_71 PE=4 SV=1
MTNLKEQIIAISQEIGISKIGFTTADDFDYLEKSLRLAQENGTNSGFEHPNIDERIKPKLLLKNAKTIISIAVAYPNKLPQLPEKSTYKRGKFSSSSWGVDYHTILTEKMARLSERIAELTDDFDHKAMVDTGALVDTAVARRAGIGFIGKNGLVISKEFGSYMFLGELITNLELEPDSPVDYGCGDCNHCITSCPTDALNGDSTMNAKRCLSFQTQTKGPLDEEFRVKMKTMLYGCDICQIACPYNKGITNEAQTTINPELAYPELQPFIQLTNQEFKAKFSEIAGSWRGKNVLQRNAIYVLANVNDKTAIPLLEEIAANPSNAVHQEAAQWALDKLRSKAKDK

SEQ ID NO: 77684 - protein, 352 aa, Lactococcus sp.
  misc_feature (1)..(352): tr|A0A3C1XBS7|A0A3C1XBS7_LACSP Epoxyqueuosine reductase OS=Lactococcus sp. OX=44273 GN=queG PE=3 SV=1
MKSLKEEIQKLAAELNIQKIGFSKADDFEYLRASLIEQKEAGHTSGFEHKNLDERLQPKLSLEDAKTIISIGIAYPNKAESKPKKTGFRRGSFSRGSWGEDYHHVLQKKLKALAEGIEQLAGSFNYKAMVDTGALIDVAVAARAGLGFIGKNGLLVSKEYGSWLFLGELVTNLEIEADQPVDYGCGSCTRCVDFCPTSALLGDGRLNAQRCLSYQTQTRGAMPEEFREKIKTVIYGCDICQVVCPYNKGINSHFHPEMEPDPELTNPELLQLLDLSNKAFTDKFGNMAGSWRGKNPIQRNAIYALANANDRTALPKLHDIAQNDVRDYMVDAAEWAIEKLENKHRIRRRERE

SEQ ID NO: 77685 - protein, 351 aa, Lactococcus sp.
  misc_feature (1)..(351): tr|A0A5C8JJZ1|A0A5C8JJZ1_9LACT Epoxyqueuosine reductase OS=Lactococcus sp. dk310 OX=2603289 GN=queG PE=3 SV=1
MKTIKEAIQTLAQELNIQKIGFTTADNFEYLRKSLIEQKEAGHTSGFEHQNLDERLHPKLAVENAKTIISIAIAYPNKALEKPEKPDYRRGQFSRGSWGEDYHYVLGRKLEALAQGIERIAGEYNYKAMVDTGALVDVAVASRAGLGFIGKNGLLISKEYGSWMFLGELVTDLEIEPDQPVDYGCGECTRCVDFCPTTALLGDGRLNAQKCLSFQTQAKGKMPVEYREKIKTVIYGCDICQMVCPYNKGINSHFHPEMEPDAELTNPELLPLLDLSNKQFVNKFGTMAGSWRGKNPLQRNAVYALANANDKSALPKLHEIAENDVRDYMVDAAEWAIDKLENGKTRIRPRR

SEQ ID NO: 77686 - protein, 350 aa, Lactococcus termiticola
  misc_feature (1)..(350): tr|A0A2R5HIW1|A0A2R5HIW1_9LACT Epoxyqueuosine reductase OS=Lactococcus termiticola OX=2169526 GN=queG PE=4 SV= 1
MTLKEEIQALASSIGIQKIGFSPADDFEHLRQSLIEQKEAGHSSGFEHQNLDERLHPKLSLENARTIISVAVAYPSKIQEKPEKTAYRRGQFSRSSWGLDYHEVLNAKLRQLAEGIEELAGHYDYKAMVDTGALIDVAVAQRAGLGFIGKNGLLVTKEYGSYVFLGELVTNLDIAPDQAFDYGCGDCRRCVDFCPTEALLGDGRLNAKRCLSFQTQAKGAMPEEFREKIKTTIYGCDICQMVCPYNKGIDSHFTAEMEPDPELAQPELLPLLDLSNKQFKEKFGQVAGSWRGKNPIQRNAIYALGNINDKSALPRLAELAENDPRDDIREAAQWSIQKILAGKKPRNVIK

SEQ ID NO: 77687 - protein, 393 aa, Lacunisphaera limnophila
  misc_feature (1)..(393): tr|A0A1D8AVI1|A0A1D8AVI1_9BACT Epoxyqueuosine reductase OS=Lacunisphaera limnophila OX=1838286 GN=queG PE=4 SV =1
MNSGAGRRMEGLPREALRERLHGLGFDEVRFARAGREAGAGLRDWLGAGHHADMAWMERTAEKRGAADLVLPGVKTVVMLGVNYGPGAAENGSPGAEDRPRWAQYALYEDYHDTIEPALAAAGRVLEEELGLVAADNRPYVDTGPVLERGWAARSGLGFRGKNAMLISRTHGNWLFLACILTRGDIAPDEPLRPAAERPGKEEPAGLLCGKCTRCLDACPTQAFPAPGVVDARRCISYHTIENKGIIPRELRAGIGTRIYGCDVCLEVCPWNRFAAEGRRLLLSARGDIAELALAEILALSPARYAEVFRRTPIKRLKLTGLLRNACVVAGNTGDRALLPALVALAGHESAVVRAHAVWAVQKIAGNGADGLLAAARAGETDAGVLAEYAAGA

SEQ ID NO: 77688 - protein, 386 aa, Lacunisphaera sp.
  misc_feature (1)..(386): tr|A0A4Q1C495|A0A4Q1C495_9BACT tRNA epoxyqueuosine(34) reductase QueG OS=Lacunisphaera sp. TWA-58 OX=2508720 G N=queG PE=4 SV=1
MTTQAGPVVTGAQREKLREQLRALGFDAVRFAAATRPGGESLRSWLEAGHHADMAWIERGAEKRGNPELVLPGVRSVIMLGVNYWSGIETKGPKWARYVLHTDYHDTIKAGLAAAGRLLEQEYAAEAADYRYYVDTGPVLERGWAARSGLGFRGKNAMLISREHGNWLFLACILTRLAIEPDTPLRPEFARPGAEEPAGLLCGKCTRCLDACPTQAFPEPGVVDARRCISYQTIENKGLIPREQRAGIGTRIYGCDVCLEVCPWNRFAQEGRRVLLSVRGEVAELSLQEILELTPVRFAAVFKGTAVKRLKLSGLLRNACVVAGNSGDGTLLPALVGLATHELPLVRAHAVWAVRRLAGGGAGTLLQAARSHESDATVLAEYEGVA

SEQ ID NO: 77689 - protein, 362 aa, Lampropedia hyalina
  misc_feature (1)..(362): tr|A0A1M4WW70|A0A1M4WW70_9BURK Epoxyqueuosine reductase OS=Lampropedia hyalina DSM 16112 OX=1122156 GN=queG PE =3 SV=1
MEQHTELWAKIQQWAHDLGFSQIGVAGIDLSDAEEGLMQWLAKGFHGDMAFMQQHGLKRARPAELVPGTVSIITARMDYLPQDTPPAWQGREWQRQANAHEAVVSVYARGRDYHKVLRNRLQKLAERIQQEVGPLGFRAFTDSAPVMEVELARRSGLGWRGKHTLLLSRKAGSMFFLGEIFLDMALPPTPATTAHCGQCSACMDICPTQAIVAPGQVDARLCISYLTIEHAAAIPEHLRPLIGNHLYGCDDCQLACPWNKFATPAVLADFNARAVWNDTRLLTLLRWQEADFLRYTEGSPIRRIGFARWQRNLAVVCGNALRQLSAEEAVPIRQHLQSMQDSEATPALVREHVLWALAQQAA

SEQ ID NO: 77690 - protein, 364 aa, Lampropedia puyangensis
  misc_feature (1)..(364): tr|A0A4S8F0D6|A0A4S8F0D6_9BURK Epoxyqueuosine reductase OS=Lampropedia puyangensis OX=1330072 GN=queG PE=3 SV= 1
MRSWARELGFSQIGVAGVDLADAEAGLLAWLEQGFHGQMDYMQRHGLMRARPAELVPGTVSVLTARMDYLPPDTSAQWQAQEWARQIDAQQAVVSVYARGRDYHKVLRNRLQKLAMQIQEEIGPLGHRVFTDSAPVLEAELAKRSGLGWRGKHTLVLSRDAGSMFFLGEIFLDIALPETAATSAHCGQCSACIQACPTQAIVAPGQVDARLCISYLTIEYAGVIDTALRPLIGNHLYGCDDCQLACPWNKFAKPAKLVDFQARASWQKNDLLEFLGWSEAQFLRYTEGSPIRRIGFERWQRNLAVVCGNALRQETLVYAHREVICRQLHAWLADAQTSAVVREHIEWALQQAPEPVCQAGVEEE

SEQ ID NO: 77691 - protein, 357 aa, Lampropedia sp.
  misc_feature (1)..(357): tr|A0A4S5BR32|A0A4S5BR32_9BURK Epoxyqueuosine reductase OS=Lampropedia sp. YIM MLB12 OX=2562762 GN=queG PE=3 S V=1
MRLWAHALGFSQVGVASVDLSDAEEGLLAWLAQGFHGQMDYMERHGLKRARPAELVPGTVCVLTARMDYLPPDTPGDWQDVEWRQHAQAGQAVVSLYARGRDYHKVLRNRLQKLADQIQAEVGPLGHRVFTDSAPVLEAELAKRSGLGWRGKHTLVLSREAGSMFFLGEIFLDLALPETAPTTAHCGQCQACIQVCPTQAIVAPGKVDARLCISYLTIEFDGVIEPHLRPLIGNHLYGCDDCQLACPWNKFAKPSQLVDFQSRASLQHNDLLRFLGWSEADFLRNTEGSPIRRIGYVRWQRNLAVVSGNALRQPKASAELRLAIRQHLHAWLEAATTTDVVREHLQWALDAPEEAAI

SEQ ID NO: 77692 - protein, 394 aa, Laribacter hongkongensis
  misc_feature (1)..(394): tr|A0A248LLH0|A0A248LLH0_9NEIS Epoxyqueuosine reductase OS=Laribacter hongkongensis OX=168471 GN=queG PE=3 SV= 1
MPGTSRLASASPKASVAASSASPTVSVVCVSMSAQALQTTDYPQLSRQIKEWATELGFAACRISRASLPAEAEQGLSDWLAAGYHGSMDYMARHGMMRARPAELVAGTLSVICVRLPYWPGDARPAADQLADGDGAYVSRYALGRDYHKVLRARLQKLADRISAAHGPFGYRAFTDSAPLMEVALAAQSGLGWRGKHTLLLTREAGSYFFLGELLTDLPLPEDPPQDQHCGRCTRCLDACPTGAIVAPFQVDARRCISYLTIEHDGPIPPDLRPLLGNRIYGCDDCQLACPWNRFAEPTTVADFAPRHGLDRARLVELFGWSEDDFRQRMAGSPVLRIGFERWSRNLAVALGNAPASPAVVAALRTRADDPSGLVREHVAWALAQHCRSDSQSA

SEQ ID NO: 77693 - protein, 394 aa, Laribacter hongkongensis
  misc_feature (1)..(394): tr|C1DBT4|C1DBT4_LARHH Epoxyqueuosine reductase OS=Lari bacter hongkongensis (strain HLHK9) OX=557598 GN=queG P E=3 SV=1
MPGTSRLASASPKASVAASSASPTVSVVCVSMSAQALQTTDYPQLSRQIKEWATELGFAACRISRASLPAEAEQGLSDWLAAGYHGSMDYMARHGMMRARPAELVAGTLSVICVRLPYWPGDARPAADQLADGDGAYVSRYALGRDYHKVLRARLQKLADRISAAHGPFGYRAFTDSAPLMEVALAAQSGLGWRGKHTLLLTREAGSYFFLGELLTDLPLPEDPPQDPHCGRCTRCLDACPTGAIVAPFQVDARRCISYLTIEHDGPIPPDLRPLLGNRIYGCDDCQLACPWNRFAEPTTVADFAPRHGLDRARLVELFGWSEDDFRQRMAGSPVLRIGFERWSRNLAVALGNAPASPAVVAALRTRADDPSGLVREHVAWALAQHCRSDSQSA

SEQ ID NO: 77694 - protein, 314 aa, Larkinella arboricola
  misc_feature (1)..(314): tr|A0A327X0Q6|A0A327X0Q6_9BACT Epoxyqueuosine reductase OS=Larkinella arboricola OX=643671 GN=queG PE=3 SV=1
MMVDLIKKHTQLIKSKAAELGFDFCGVSKAEFLEEEAPRLETWLRQNRHGQMGYMANHFDKRLDPRLLVEGAKSVVTVLLNYYPEKTIAQEGDGYKISKYAYGTDYHFVIKDKLKDLLALVHEEIGEVNGRVFVDSAPVMDKVWAKRSGLGWVGKHTNLITREMGSFVFIAEMILDLELEADGPVADYCGTCTRCLDACPTDAITEPYVVDGSKCISYFTIELKDAIPDEVKGKFENWIFGCDICQDVCPWNRFARPHRTPAFDPNPGLSELSKNDWEEITQEVFQEIFRRSAVKRTKLEGLKRNIAFVKTEGW

SEQ ID NO: 77695 - protein, 313 aa, Larkinella knui
  misc_feature (1)..(313): tr|A0A3P1CZ71|A0A3P1CZ71_9BACT Epoxyqueuosine reductase OS=Larkinella knui OX=2025310 GN=queG PE=3 SV=1
MISIPQKHTRLLKSKAAELGFDFCGISNAEFLEEEAPRLESWLDRQMHGKMGYMANHFDKRLDPRLLVDGARSVVTVLLNYYPEKTIACEEDGYKISKYAYGTDYHFVIKNKLKELLAFVHEEIGEVGGRFFVDSAPVMDKVWAKRSGLGWVGKHTNLITREMGSFVFIGELILDLELIPDGPIADYCGTCTRCIDACPTDAITDPYVVDGSKCISYFTIELKEAIPDEVKGKFENWIFGCDICQDVCPWNRFSRPHHTPDFDPNPALTEFTKNDWEEITQEIFQEIFRRSAVKRTKLEGLKRNVAFVKLNEE

SEQ ID NO: 77696 - protein, 314 aa, Larkinella rosea
  misc_feature (1)..(314): tr|A0A3P1C2M9|A0A3P1C2M9_9BACT Epoxyqueuosine reductase OS=Larkinella rosea OX=2025312 GN=queG PE=3 SV=1
MLELIQKRTQLIKSKAAELGFDFCGVSKAEFLEAEAPRLEGWLNRQMHGQMSYMANHFDKRLDPRLLVEGAKSVVTVLLNYYPEKTVSETGGYKISKYAYGTDYHFVIKDKLKELLAFVHEEIGEVNGRFFVDSAPVMDKVWAKKSGLGWVGKHTNLITRDLGSFVFIGELILDLELVADGPMADYCGTCTRCIDACPTDAISDPYVVDGSKCISYFTIELKEAIPDEVKGKFENWIFGCDICQDVCPWNRFSRTHSTPAFDPSPGLSEMTKTDWEEITQEIFQEIFRRSAVKRTKLEGLKRNISFVKIDGNAD

SEQ ID NO: 77697 - protein, 312 aa, Larkinella sp.
  misc_feature (1)..(312): tr|A0A4R8CQW3|A0A4R8CQW3_9BACT Epoxyqueuosine reductase OS=Larkinella sp. BK230 OX=2512173 GN=queG PE=3 SV=1
MVDLIKKRTQLIKSKAAELGFDFCGVSKAEFLEEEAPRLEAWLAQNRHGQMGYMANHFDKRLDPRLLVEGAKSVVTVLLNYYPEKTVAQDEDGYKISKYAYGTDYHFVIKDKLKALLAFVEEEIGEVAGRVFVDSAPVMDKAWARRSGLGWVGKHTNLITREMGSFVFIGEMILDLDLEADGPMADYCGTCTRCVDACPTDAITEPYVVDGSKCISYFTIELKDAIPDEVKGKFENWIFGCDICQDVCPWNRFARPHRTPAFDPNPALSSLSKSDWEEITQEIFGELFRRSAVKRTKLEGLKRNIAFVKTEG

SEQ ID NO: 77698 - protein, 312 aa, Larkinella sp.
  misc_feature (1)..(312): tr|A0A368JJ83|A0A368JJ83_9BACT Epoxyqueuosine reductase OS=Larkinella sp. ZZJ9 OX=2315727 GN=queG PE=3 SV=1
MISVIQKHTRLLKAKAAELGFDFCGVSNAEFLEEEAPRLEAWLNRQMHGKMGYMANHFDKRLDPRLLVNGAKSVVTVLLNYYPEKTVAQEEGGYKISKYAYGTDYHFVIKDKLKELLAFVHEEIGDVNGRFFVDSAPVMDKVWAKRSGLGWVGKHTNLITRDTGSFVFIGELILDLELEADGPIADYCGTCTRCIDACPTDAITDPYVVDGSKCISYFTIELKDAIPDEVKGKFENWIFGCDICQDVCPWNRFSRPHTTPAFDPNPALAEFTKTDWEEITQDIFQEIFRRSAVKRTKLEGLKRNITFVKTGE

SEQ ID NO: 77699 - protein, 265 aa, Lautropia sp.
  misc_feature (1)..(265): tr|A0A3B8RHS4|A0A3B8RHS4_9BURK tRNA epoxyqueuosine(34) reductase QueG (Fragment) OS=Lautropia sp. OX=2053568 G N=queG PE=4 SV=1
DYHKVLRSRLQALGQALQQQMPSLRFRAFCDSAPVMEVELAQRAKLGWRGKNTLLLNRQSGSMFFLGSLFLNHSIDQLPVSLRGESAETRVDASSDRCGTCRACLDVCPTKAIVAPYRLDARRCISYLTIENPGPIPEVFREAIGNRIYGCDDCQLVCPWNKFAVATPLEDFKTRQAFVNLSLSEALRWTEPQFLQHTEGMAIRRIGHWRWQRNLVVALGNLLASKQAGEAQALSAKQEARQALFSIRPQADPILAEHIEWALQR

SEQ ID NO: 77700 - protein, 389 aa, Lautropia sp.
  misc_feature (1)..(389): tr|A0A1D2TFZ3|A0A1D2TFZ3_9BURK Epoxyqueuosine reductase OS=Lautropia sp. SCN 70-15 OX=1660105 GN=queG PE=3 SV= 1
MSSTPNLATATLRQWAAELGFASLGVAGVDLSSVEGGLQAWLDAGWHGEMDYMARHGMARARPAELVPGTVSAIMVTLDYAPEESGWVDAAWRTLAQGERAYLSRYALGRDYHKVVRARLQKLAERIAAAVGPFGHRVFCDSAPVMEVELARRAGLGWRGKHTLLIHPKRGSTFFLGTLYTDLPLPADEAEPDHCGSCTRCIEACPTGAIVAPWRLDARRCISYLTIELKGAIPEPLRAPIGNRIYGCDDCQLACPWNRFAQPAALPDFAARNGLDAASLVDLFGWSADEFDARLAGSPIRRIGHERWLRNIAVALGNVGAEGCGAGAADVAGGADAIAAARAALEARADHPSELVREHVGWALAQLARRAPGGRSENGERAAGPRASG

SEQ ID NO: 77701 - protein, 302 aa, Leadbetterella byssophila
  misc_feature (1)..(302): sp|E4RUV9|QUEG_LEAB4 Epoxyqueuosine reductase OS=Leadbe tterella byssophila (strain DSM 17132 / KACC 11308 / 4M 15) OX=649349 GN=queG PE=3 SV=1
MRDYSKEIKSWAAELGFDFCGISAADFLEEEAPRLERWLNRNYHGKMAYMANHFDKRLDPRKLVDGAKSVVSLLLNYYPEEPLDASPYKISKYAYGKDYHYVIKDKLKLLFERIQKEIGEVGGRIFVDSAPVMDKIWAKKAGLGWVGKNSNLINRKMGSFFFIAELILDLPLQADGPIRDYCGTCTACIDACPTDAITPYEVDGSKCISYLTIELKDQIPNEFKGKMENWIFGCDICQDVCPWNSFARPHSTEEFYPNENLKTFQDWDEITSEIFSHLFKKSAVERTKLEGLKRNIAFVKEV

SEQ ID NO: 77702 - protein, 379 aa, Leclercia adecarboxylata
  misc_feature (1)..(379): tr|A0A352U3H9|A0A352U3H9_9ENTR Epoxyqueuosine reductase OS=Leclercia adecarboxylata OX=83655 GN=queG PE=3 SV=1
MSQPLDLNQLAQNIKQWGAELGFQHVGITDTDLSASEPKLQAWLDNQYHGEMEWMARHGMMRARPHELLPGTLRVISVRMNYLPARAAFASTLKDPTLGYVSRYALGRDYHKLLRNRLKKLGEMIQQQCATLNFRPFVDSAPVLERPLAEKAGLGWTGKHSLILSRDAGSFFFLGELLIDLPLPVDKPVEDGCGRCVACMTICPTGAIVEPYTVDARRCISYLTIELEGAIPEEFRPLIGNRIYGCDDCQLICPWNRYSQLTEEDDFSPRKALHAPPLIELFGWSEAWFLKVTEGSAIRRIGHLRWLRNIAVALGNAPWDEANIQALESRRGEHPLLDEHIEWAVAQQIARRNACAVEVQLPQKNRLVRVVEKGLPRDA

SEQ ID NO: 77703 - protein, 379 aa, Leclercia adecarboxylata
  misc_feature (1)..(379): tr|A0A514VCS6|A0A514VCS6_9ENTR Epoxyqueuosine reductase OS=Leclercia adecarboxylata OX=83655 GN=queG PE=3 SV=1
MSQPLDLNQLAQNIKQWGAELGFQHVGITDTDLSASEPKLQAWLDNQYHGEMEWMARHGMMRARPHELLPGTLRVISVRMNYLPAKAAFASTLKDPTLGYVSRYALGRDYHKLLRNRLKKLGEMIQQQCATLNFRPFVDSAPVLERPLAEKAGLGWTGKHSLILSRDAGSFFFLGELLIDLPLPVDKPVEDGCGRCVACMTICPTGAIVEPYTVDARRCISYLTIELEGSIPEEFRPLIGNRIYGCDDCQLICPWNRYSQLTEEDDFSPRKALHAPPLIELFAWSEAWFLKVTEGSAIRRIGHLRWLRNVAVALGNAPWDEANLQALESRRGEHPLLDEHIEWAVEQQIAKRNACVVEVQLPQKIRLVRVVEKGLPRDA

SEQ ID NO: 77704 - protein, 379 aa, Leclercia sp.
  misc_feature (1)..(379): tr|A0A3D3PY27|A0A3D3PY27_9ENTR Epoxyqueuosine reductase OS=Leclercia sp. OX=1898428 GN=queG PE=3 SV=1
MSQPLDLNQLAQNIKQWGAELGFQHVGITDTDLSASEPKLQAWLDNQYHGEMEWMARHGMMRARPHELLPGTLRVISVRMNYLPAKAAFASTLKDPTLGYVSRYALGRDYHKLLRNRLKKLGEMIQQQCATLNFRPFVDSAPVLERPLAEKAGLGWTGKHSLILSRDAGSFFFLGELLIDLPLPVDKPVEDGCGRCVACMTICPTGAIVEPYTVDARRCISYLTIELEGAIPEEFRPLIGNRIYGCDDCQLICPWNRYSQLTEEDDFSPRKALHAPPLIELFAWSEAWFLKVTEGSAIRRIGHLRWLRNVAVALGNAPWDEANLQALESRRGEHPLLDEHIEWAVAQQIAKRNACVVEVQLPQKIRLVRVVEKGLPRDA

SEQ ID NO: 77705 - protein, 379 aa, Leclercia sp.
  misc_feature (1)..(379): tr|A0A345CFH8|A0A345CFH8_9ENTR Epoxyqueuosine reductase OS=Leclercia sp. W17 OX=2282309 GN=queG PE=3 SV=1
MSQPLDLNQLAQNIKQWGAELGFQHVGITDTDLSASEPKLQAWLDNQYHGEMEWMARHGMMRARPHELLPGTLRVISVRMNYLPTGAAFASTLKNPSLGYVSRYALGRDYHKLLRNRLKKLGEMIQEQCATLNFRPFVDSAPVLERPLAEKAGLGWTGKHSLILSRDAGSFFFLGELLVDIPLPVDKPVEEGCGRCVACMTICPTGAIVEPYTVDARRCISYLTIELEGAIPEEFRPLIGNRIYGCDDCQLICPWNRYSQLTEEDDFSPRKALHAPPLTELFAWSEAWFLKVTEGSAIRRIGHIRWLRNIAVALGNAPWNEANLRALESRRGEHPLLDEHIEWAVAQQIAKRNACVVEVQSPQKLRLVRVVEKGLPRDA

SEQ ID NO: 77706 - protein, 310 aa, Leeuwenhoekiella aequorea
  misc_feature (1)..(310): tr|A0A4V1KRE8|A0A4V1KRE8_9FLAO Epoxyqueuosine reductase OS=Leeuwenhoekiella aequorea OX=283736 GN=queG PE=3 SV =1
MIENKLKYTKLIKDEAQRLGFMSCGISKAGFLEQEAPRLESWLNKNMHGEMAYMENHFDKRLDPTLLVPGAKSVVSLLLNYYPDEKQREDTYKISKYAYGTDYHFVIKDKLKELLEFINANIGEVAGRAFVDSAPVLDKAWAAKSGLGWIGKHSNLLTKQVGSFYFIAELIIDLDLDYDTPVTDHCGSCTACIDACPTNAIVDAHVVDGSKCISYFTIELKNELPSFAQDKMDDWMFGCDVCQDVCPWNRFSKPHNEPLFDANPEILKYSKSEWKELTQEVFSTLFKKSPVKRTKFKGLERNINFLNGKF

SEQ ID NO: 77707 - protein, 312 aa, Leeuwenhoekiella blandensis
  misc_feature (1)..(312): tr|A3XHV4|A3XHV4_LEEBM Epoxyqueuosine reductase OS=Leeu wenhoekiella blandensis (strain CECT 7118 / CCUG 51940 / MED217) OX=398720 GN=queG PE=3 SV=1
MNTKAKYTSWIKDKAKELGFMSCGISKAGFLEQEAPRLEDWLNKNRNGEMHYMENHFDKRLDPTLLVPGAKSVVSLLLNYYPEERQRDDSYKISKYAYGTDYHFVIKDKLKGFLEAIREHIGEVDGRAFVDSAPVLDKAWAAKSGLGWIGKNSNLLTKQVGSFYFIAELIIDLELEYDTPVTDHCGSCTACIDACPTQAIVDPYVVDGSKCISYFTIELKNEIPDYAQDKMDDWMFGCDVCQDVCPWNRFSKPHNEPLFNPKPKLLEYSKQEWKELTQEVFSEIFKKSPVKRTKFSGLKRNIDFLENAADAD

SEQ ID NO: 77708 - protein, 310 aa, Leeuwenhoekiella marinoflava
  misc_feature (1)..(310): tr|A0A4V1KSG3|A0A4V1KSG3_9FLAO Epoxyqueuosine reductase OS=Leeuwenhoekiella marinoflava OX=988 GN=queG PE=3 SV =1
MNSKKAEYTRLIKAEAKRLGFMSCGISQAGFLEEEAPRLENWLKQNMNGEMRYMENHFDKRLDPTLLVPGAKSVVSLILNYFPEEKQREDSFKVSKYAYGTDYHFVIKDKLKEFLEYIRETIGEVDGRAFVDSAPVLDKAWAAKSGLGWIGKHSNLLTKQVGSFYFIAELIIDLDLEYDTPVTDHCGSCTACIDACPTQAIVDPYIVDGSKCISYYTIELKNEIPAYAQDKMDDWMFGCDVCQDVCPWNRFSKPHAEPLFNPKSEILNNSKKEWRELTQEVFSEIFRKSPVKRTKYSGLIRNIEFLDKKQ

SEQ ID NO: 77709 - protein, 308 aa, Leeuwenhoekiella nanhaiensis
  misc_feature (1)..(308): tr|A0A2G1VX48|A0A2G1VX48_9FLAO Epoxyqueuosine reductase OS=Leeuwenhoekiella nanhaiensis OX=1655491 GN=queG PE= 3 SV=1
MNTKASNTAFIKAEAKRLGFMSCGVSKAEFLETEAPRLEDWLSKNRNGEMAYMENHFDKRLDPTLLVPGAKSVVSLLFNYFPKEQQREDSFKISKYAYGTDYHFVIKDKLKELLFSINEKIGKVEGRAFVDSAPVLDKAWAARSGLGWIGKNSNLLTKQVGSYYFIAELIIDLNLDYDTPVTDHCGSCTACIDACPTDAIVDPYVVDGSKCISYFTIELKNEIPAYAQDKMEDWMFGCDICQDVCPWNRFSKPHNEPLFQPRPEIISNSKNDWKELTQEVFSEIFKKSPVKRTKYSGLMRNISFLSEE

SEQ ID NO: 77710 - protein, 313 aa, Leeuwenhoekiella palythoae
  misc_feature (1)..(313): tr|A0A1M5YR44|A0A1M5YR44_9FLAO Epoxyqueuosine reductase OS=Leeuwenhoekiella palythoae OX=573501 GN=queG PE=3 S V=1
MNNTKAKHTAWIKAKAKELGFMSCGVSKAGFLEQEAPRLEDWLNKNRNGEMHYMENHFDKRLDPTLLVPGAKSVVSLLLNYYPEETQREDSYKISKYAYGTDYHFVIKDKLKEFLEAIRAHIGEVDGRAFVDSAPVMDKAWAAKSGLGWVGKNSNLLTKQVGSFFFIAELIIDLELEYDTPVTDHCGSCTACIDACPTQAIVDPYVVDGSKCISYFTIELKNEIPDYAKGKMDDWMFGCDVCQDVCPWNRFSKPHNEPLFNPKPELLQYSKKEWKELTQEVFSEIFKKSPVKRTKFSGLKRNIDFLEDIKDPE

SEQ ID NO: 77711 - protein, 310 aa, Leeuwenhoekiella polynyae
  misc_feature (1)..(310): tr|A0A4Q0P1N9|A0A4Q0P1N9_9FLAO Epoxyqueuosine reductase OS=Leeuwenhoekiella polynyae OX=1550906 GN=queG PE=3 S V=1
MNSKKAEYTRLIKAEAKRLGFMSCGISKAGFLEEEAPRLENWLKKNMNGEMRYMENHFDKRLDPRLLVPGAKSVVSLLLNYFPEEQQREDSFKISKYAYGTDYHFVIKDKLKEFLEYIRETIGEVDGRAFVDSAPVLDKAWAAKSGLGWVGKHSNLLTKQAGSFYFIAELIIDLDLEYDTPVTDHCGSCTACIDACPTQAIVDPYIVDGSKCISYYTIELRNEIPDYAQDKLDDWMFGCDVCQDVCPWNRFSKPHSEPLFNPKTQILENSKKEWRELTQEVFSEIFRKSPVKRTKYSGLMRNIEFLDNKQ

SEQ ID NO: 77712 - protein, 314 aa, Leeuwenhoekiella sp.
  misc_feature (1)..(314): tr|A0A2E5GPD2|A0A2E5GPD2_9FLAO Epoxyqueuosine reductase OS=Leeuwenhoekiella sp. OX=1977054 GN=queG PE=3 SV=1
MVNNTKAKHTAWIKAKAKELGFMSCGVSKAGFLEQEAPRLEDWLNKNRNGEMHYMENHFDKRLDPTLLVPGAKSVVSLLLNYYPEETQREDSYKISKYAYGTDYHFVIKDKLKGFLEAIRAQIGEVDGRAFVDSAPVLDKAWAAKSGLGWVGKNSNLLTKQVGSFFFIAELIIDLELEYDTPVTDHCGSCTACIDACPTQAIVDPYVVDGSKCISYFTIELKNEIPDYAKGKMDDWMFGCDVCQDVCPWNRFSRPHKEPLFNPKPELLQYSKKEWKELTQEVFSEIFKKSPVKRTKFSGLKRNIDFLEDIKDPE

SEQ ID NO: 77713 - protein, 310 aa, Leeuwenhoekiella sp.
  misc_feature (1)..(310): tr|A0A4Q0NSR6|A0A4Q0NSR6_9FLAO Epoxyqueuosine reductase OS=Leeuwenhoekiella sp. R-50232 OX=2249425 GN=queG PE= 3 SV=1
MNTKKAEYTRLIKAEAKRIGFMSCGISQAGFLEEEAPRLENWLKKNMNGEMRYMENHFDKRLDPRLLVPGAKSVVSLLLNYFPEEQQREDSFKISKYAYGTDYHFVIKDKLKEFLEYIRENIGEVDGRAFVDSAPVLDKAWAAKSGLGWVGKHSNLLTKQVGSFYFIAELIIDLDLEYDTPVTDHCGSCTACIDACPTQAIVDPYIVDGSKCISYYTIELKNEIPDYAQDKMDDWMFGCDVCQDVCPWNRFSKPHSEPLFNPKPQILENSKKEWRELTQELFSEIFRKSPVKRTKYSGLVRNIEFLDNKQ

SEQ ID NO: 77714 - protein, 368 aa, Legionellaceae bacterium
  misc_feature (1)..(368): tr|A0A2E2WMG4|A0A2E2WMG4_9GAMM Epoxyqueuosine reductase OS=Legionellaceae bacterium OX=2026753 GN=queG PE=3 SV =1
MFHSMTINAENIKQWAMTLGFQQVGVADTKLATYESRLKAWLKKNYHGKMDYMANNIEKRCDPSKLLPGTKSIIMVSMDYLPPNPTFSLLKNPIKAFISRYALGRDYHKLIRKRLQQLANKISEHVDGFQYRSFADSAPVFEKALAEKAGLGWIGKHTNLLNQSRGSWFFLGALYTNLTLAYDKSTDNHCGTCTSCIDVCPTNAIVAPYELDARRCISYLTIELRESIPTELRPLIGNRIYGCDDCQMACPWNKFAKNTEEEGFYARRGLADTELIEVFSWDEKTFLSKTEGSAIRRIGYDCWIRNVAVAMGNAPENKAIIDALRARLDYPNQMVREHIEWAIATQKNKKNVENKLEQIPEKRWLYLG

SEQ ID NO: 77715 - protein, 350 aa, Legionellales bacterium
  misc_feature (1)..(350): tr|A0A2E0PZN0|A0A2E0PZN0_9GAMM Epoxyqueuosine reductase OS=Legionellales bacterium OX=2026754 GN=queG PE=3 SV= 1
MNETKLTKKIKEWGAELGFQQIGVTTTDLHQDEAYLINWLSKGRHGEMNYMASHGKKRSRPQDLIPGTLSVISARMDYFPPSSNHPTKVLKNKNLAYISRYATGRDYHKIIRQRLKKLARRIQEQYGEFGHRCFVDSAPVLEKALARNSGLGWIGKHSNLINPKAGSWFFLGEIYTNLPLEIDEPFTENHCGSCKACIDICPTNAIIGDMEIDARRCISYLTIELRDSIPEKFRKLIGNRVYGCDDCQLICPWNKFAKNSDEDDFRVRNGLDAPDLVELFSWTEKNFIDRTEGSAIRRIGYECWLRNIAVGLGNAPKTEKVVSALIARRKNSTALVSEHIEWALEQHNEK

SEQ ID NO: 77716 - protein, 348 aa, Legionellales bacterium
  misc_feature (1)..(348): tr|A0A2E2WRT0|A0A2E2WRT0_9GAMM Epoxyqueuosine reductase OS=Legionellales bacterium OX=2026754 GN=queG PE=3 SV= 1
  misc_feature (187)..(187): Xaa can be any naturally occurring amino acid
  misc_feature (201)..(201): Xaa can be any naturally occurring amino acid
MNKLELSKEIKKWGAELGFQQIGITTADLHQDEAYLINWLSKGRHGEMSYMASHGTKRSRPNDLIPGTSSVISARMDYMPPSSKHPIEVLKNKKLAYISRYATGRDYHKLIRQRLKKLANKIHEHYSDFGYRCFVDSAPVLEKALARNAGLGWIGKHSNLINPQAGSWFFLGEIYTNLPLEIDTPFXENHCGSCNACIDIXPTNAIVGEMEIDARRCISYLTIELRGRIPEEFRKMIGNRVYGCDDCQLICPWNKFSKNSDEDDFRIRHGLDTANLVDLFSWTEAEFLERTEGSAIKRIGYECWLRNIAVGLGNAPTSKKVINTLKKRQYNSSALVSEHIEWALRQHC

SEQ ID NO: 77717 - protein, 347 aa, Leisingera aquaemixtae
  misc_feature (1)..(347): tr|A0A0P1HDM6|A0A0P1HDM6_9RHOB Epoxyqueuosine reductase OS=Leisingera aquaemixtae OX=1396826 GN=queG PE=3 SV=1
MKDRSGIKEKLVAQALAEGFVSCRVCRPWDVPEVPGRLQAFLDAGYHGQMGWMAERTHWRGDPSLLWPEARSVIMLAESYTPDEDPMAVVGQADRGAVSVYARNKDYHDLVKKRLKRLARWLIAEAGEDCEVKVFVDTAPVPEKALGQAAGLGWQGKHSNLVSRDWGNWAFLGSVFTTLELPADAPERDRCGSCRACLDSCPTDAFPAPYQVDARRCISYLTIEHKGPVAEELREKMGNRIYGCDDCLAACPWNKFAVAASDMRYAAREELKAPKLAELAALEDAAFREMFSGSPIKRIGRDRFVRNVLYAIGNSGLPELRAVVQGLAEDPDPAVADAARWAVQRLS

SEQ ID NO: 77718 - protein, 345 aa, Leisingera methylohalidivorans
  misc_feature (1)..(345): tr|V9VXL2|V9VXL2_9RHOB Epoxyqueuosine reductase OS=Leis ingera methylohalidivorans DSM 14336 OX=999552 GN=queG PE=3 SV=1
MSAALKERLVSQALAEGFVSCRICRPWDVPQVPARLQAFLDAGYHGQMGWMAERTAWRSDPAQLWPEAQSVIMLAESYTPEEDPMAVVGQSDRGAVSVYARNKDYHDLVKKRLKRLARWLIAVAAEPCEVKVFVDTAPVPEKALGMAAGLGWQGKHSNLVSRDWGNWAFLGSVFTTLELPADAAEPDRCGSCRACLDSCPTDAFPAPYQVDARRCISYLTIEHKGPVEEELRAKLGNRIYGCDDCLAACPWNKFAVAASDMRYAARDELKAPKLAELAALDDAEFRAMFAGSPIKRIGRNRFVRNVLYAIGNSGLPELRKVARGLTQDPDAAVADAAAWAVQRLS

SEQ ID NO: 77719 - protein, 347 aa, Leisingera sp.
  misc_feature (1)..(347): tr|A0A0B4EEG3|A0A0B4EEG3_9RHOB Epoxyqueuosine reductase OS=Leisingera sp. ANG1 OX=1002340 GN=queG PE=3 SV=1
MKDGAGIKEKLVAQALAEGFVSCRICRPWDVPQVPGRLQAFLDAGYHGQMGWMAERSHWRGDPAQLWPEARSVIMLAESYTPEEDPMAVVGQADRGAVSVYARGKDYHDLVKKRLKRLARWLIAEAGADCEVKVFVDTAPVPEKALGMAAGLGWQGKHSNLVSRDWGNWAFLGSVFTTLELPADVAEPDRCGSCRACLDSCPTDAFPAPYQVDARRCISYLTIEHKGPVAEELRGKMGNRIYGCDDCLAACPWNKFAVAASDMRYAARDELKAPRLAELAVLDDAAFREKFSGSPIKRIGRDRFVRNVLYAIGNSGLAELREVAQRLAEDPDPAVADAARWAVQRLS

SEQ ID NO: 77720 - protein, 345 aa, Leisingera sp.
  misc_feature (1)..(345): tr|A0A481PQ50|A0A481PQ50_9RHOB Epoxyqueuosine reductase OS=Leisingera sp. NJS204 OX=2508307 GN=queG PE=3 SV=1
MSAALKERLVAQALAEGFVSCRICRPWDVPQVPGRLQAFLDAGYHGQMGWMAERTHWRGDPALLWPDARSVIMLAESYTPDEDPMAVVGQADRGAVSVYARNKDYHDLVKKRLKRLARWLIAEAGEDCEVKVFVDTAPVPEKALGMAAGLGWQGKHSNLVSRDWGNWAFLGSVFTTIELPADHAERDRCGSCRACLDSCPTDAFPAPYQVDARRCISYLTIEHKGPVDEELRGKLGNRIYGCDDCLAACPWNKFAVAASDMRYAARDDLKAPKLAELAVLDDAAFRALFSGSPIKRIGRDRFVRNVLYAIGNSCQPDLRDVARRLTEDPDPAVADAARWAVQQLS

SEQ ID NO: 77721 - protein, 379 aa, Lelliottia amnigena
  misc_feature (1)..(379): tr|A0A3S5XWQ7|A0A3S5XWQ7_LELAM Epoxyqueuosine reductase OS=Lelliottia amnigena OX=61646 GN=queG PE=3 SV=1
MSQPLDLNQLAQNIKQWGAELGFQKVGITDTDLSASEPKLQAWLDKQYHGEMEWMARHGMMRARPHELLPGTLRVISVRMNYLPANAAFARTLKDPSLGYVSRYALGRDYHKLLRNRLKKLGETIQEHCGSLNFRPFVDSAPILERPIAEKAGLGWTGKHSLILSRDAGSFFFLGELLIDLPLPVDGPVEEGCGRCVACMTICPTGAIVEPYTVDARRCISYLTIELEGAIPEAFRPLIGNRIYGCDDCQLICPWNRYSQLTDEDDFSPRKALHAPKLIELFAWDEAYFLRITEGSAIRRIGHLRWLRNIAVALGNASWDEANIMALESRRGEHPLLDEHIEWAIAQQIEKRNACVVEVQLPKKQRLVRVIEKGLIRDA

SEQ ID NO: 77722 - protein, 379 aa, Lelliottia amnigena
  misc_feature (1)..(379): tr|A0A1A9F746|A0A1A9F746_LELAM Epoxyqueuosine reductase OS=Lelliottia amnigena OX=61646 GN=queG PE=3 SV=1
MSQPLDLNQLAQNIKQWGAELGFQKVGITDTDLSASEPKLQAWLDKQYHGEMEWMARHGIMRARPHELLPGTLRVISVRMNYLPANAAFARTLKDPSLGYVSRYALGRDYHKLLRNRLKKLGETIQQHCGSLNFRPFVDSAPILERPLAEKAGLGWTGKHSLILSRDAGSFFFLGELLIDLPLPVDSPVEEGCGRCVACMTICPTGAIVEPYTVDARRCISYLTIELEGAIPEEFRPLIGNRIYGCDDCQLICPWNRYSQLTDEEDFSPRKALHAPPLTELFAWSEAWFLKVTEGSAIRRIGHLRWLRNIAVALGNAAWDEANMTALESRRGEHPLLDEHIEWAIAQQIEKRNACVVEVQLPKKQRLVRVIEKGLVRDA

SEQ ID NO: 77723 - protein, 379 aa, Lelliottia nimipressuralis
  misc_feature (1)..(379): tr|A0A4Q0W7L5|A0A4Q0W7L5_9ENTR Epoxyqueuosine reductase OS=Lelliottia nimipressuralis OX=69220 GN=queG PE=3 SV =1
MSQPLDLNQLAQNIKQWGAELGFQKVGITDTDLSASEPKLQAWLDKQYHGEMEWMARHGMMRARPHELLPGTLRVISVRMNYLPANAAFARTLKDPSLGYVSRYALGRDYHKLLRNRLKKLGETIQQHCGSLNFRPFVDSAPILERPIAEKAGLGWTGKHSLILSRDAGSFFFLGELLIDLPLPVDGPVEEGCGRCVACMTICPTGAIVEPYTVDARRCISYLTIELEGAIPEEFRPLIGNRIYGCDDCQLICPWNRYSQLTDEDDFSPRKALHAPKLTELFAWDEPYFLRITEGSAIRRIGHLRWLRNIAVALGNAPWDEANILALEKRRGEHPLLDEHIEWAIAQQIEKRNACVVDVQLPQKKRLVRVIEKGLVRDA

SEQ ID NO: 77724 - protein, 379 aa, Lelliottia nimipressuralis
  misc_feature (1)..(379): tr|A0A2L2JCG3|A0A2L2JCG3_9ENTR Epoxyqueuosine reductase OS=Lelliottia nimipressuralis OX=69220 GN=queG PE=3 SV =1
MSQPLDLNELAQKIKQWGAELGFQKVGITDTDLSASEPKLQAWLDKQYHGEMEWMARHGMMRARPHELLPGTLRVISVRMNYLPANAAFARTLKDPSLGYVSRYALGRDYHKLLRNRLKKLGETIQQHCVSLNFRPFVDSAPILERPIAEKAGLGWTGKHSLILSRDAGSFFFLGELLIDLPLPVDGPVEEGCGRCVACMTICPTGAIVEPYTVDARRCISYLTIELEGAIPEEFRPLIGNRIYGCDDCQLICPWNRYSQLTDEEDFSPRKALHAPPLIELFAWSEAWFLKVTEGSAIRRIGHLRWLRNVAVALGNAPWDEANIRALESRRGEHPLLDEHIEWAIAQQIEKRNACVVEVQLPKKQRLVRVIEKGLPRDA

SEQ ID NO: 77725 - protein, 379 aa, Lelliottia sp.
  misc_feature (1)..(379): tr|A0A2S5C6D3|A0A2S5C6D3_9ENTR Epoxyqueuosine reductase OS=Lelliottia sp. 7254-16 OX=2080842 GN=queG PE=3 SV=1
MSQPLDLNQLAQNIKQWGAELGFQKVGITDTDLSASEPKLQAWLDKQYHGEMEWMARHGMMRARPHELLPGTLRVISVRMNYLPANAAFARTLKDPSLGYVSRYALGRDYHKLLRNRLKKLGETIQQHCGSLNFRPFVDSAPILERPIAEKAGLGWTGKHSLILSRDAGSFFFLGELLIDLPLPVDGPVEEGCGRCVACMTICPTGAIVEPYTVDARRCISYLTIELEGAIPEEFRPLIGNRIYGCDDCQLICPWNRYSQLTEEDDFSPRKALHAPKLTELFAWDENYFLKITEGSAIRRIGHLRWLRNIAVALGNAPWDEANIQALETRRGEHPLLDEHIEWAIAQQIEKRNACVVEVQLPKKQRLVRVVEKGLPRDA

SEQ ID NO: 77726 - protein, 379 aa, Leminorella grimontii
  misc_feature (1)..(379): tr|A0A485AZZ0|A0A485AZZ0_9GAMM Epoxyqueuosine reductase OS=Leminorella grimontii OX=82981 GN=queG PE=3 SV=1
MSLPLDFNQLAQHIKQWGQELGFQQVGISDTDLRAEEPKLQAWLDNQYHGDMSWMARYGMLRARPHELQPGTLRVISVRMNYLPSDAAFASSLDNPEEGYISRYALGRDYHKVLRQRLKKLGEKIQQHCGELSFRPFVDSAPILERPLAAKAGLGWTGKHSLIINRSQGSWFFLGELLVDIPLPVDVPVEEECGRCVACMTLCPTGAIVEPYVVDARRCISYLTIEHEGAIPLELRPLMGNRIYGCDDCQLACPWNRFAPLTDEADFYPKAALYRTPLLKLYAWDEAEFLAQTEGSPIRRIGYFRWLRNITVALGNAPYREEIVAALRGRKGLFPLLDEHIGWALEQQAKRTDGQPVEIKTSKRMRLIRSIEKGLPRDA

SEQ ID NO: 77727 - protein, 379 aa, Leminorella grimontii; identical to SEQ ID NO: 77726
  misc_feature (1)..(379): tr|A0A085HF53|A0A085HF53_9GAMM Epoxyqueuosine reductase OS=Leminorella grimontii ATCC 33999 = DSM 5078 OX=1005 999 GN=queG PE=3 SV=1

SEQ ID NO: 77728 - protein, 379 aa, Leminorella richardii
  misc_feature (1)..(379): tr|A0A2X4UYQ6|A0A2X4UYQ6_9GAMM Epoxyqueuosine reductase OS=Leminorella richardii OX=158841 GN=queG PE=3 SV=1
MSHPLDLNQLAQHIKLWGQELGFQQVGITDTDLSVEEPKLLAWLDKQYHGDMSWMARYGLLRARPHELQPGTLRVISVRMNYLPADAAFASALDAPEQGYISRYALGRDYHKVLRQRLKKLGEKIQQHCGELSFRPFVDSAPIMERPLAAKAGLGWTGKHSLIINGSEGSWFFLGELLVDIPLPVDIPVQEECGRCVACMTLCPTGAIVEPYVVDARRCISYLTIEHEGAIPLSLRPLMGNRIYGCDDCQLACPWNRFAPLTDEVDFSPRAALHRTPLLALYAWSEDEFLFQTEGSPIRRIGYFRWLRNITVALGNAPYQEENVTALNARKGLFPLLDEHIDWALERQIAQQKGQLIDLKEPKRQRLIRSIEKGLPRDA

SEQ ID NO: 77729 - protein, 380 aa, Lentibacillus amyloliquefaciens
  misc_feature (1)..(380): tr|A0A0U3W6F0|A0A0U3W6F0_9BACI Epoxyqueuosine reductase OS=Lentibacillus amyloliquefaciens OX=1472767 GN=queG PE=3 SV=1
MNTNQLRQEIIDYSKEIGIDKIGFASADVFESLKDRLKRQQELGFQSGFEKGSVEERTEPERLMPEAKSIISIALAYPSRIKNGPKSTKEERRGVFCRASWGTDYHDVLREKLDKLSQFIKEKIPEAATKVMVDTGELSDRAVAERAGIGFSGKNTAIITPEFGSYVYLGELITNLSFESDTPLEDGCGTCTKCLDACPTGALVQGGQLNAQRCLAFLTQTKDFMPDEFRSKIGNFIYGFDTCQAVCPYNKRVDFHNHPEFEPEPEVAKPKLKPMLSLSNREFKETFGHIAGSWRGKKPLQRNALIALAHYKDETAVDEIIRVMNHDPRPVIRGTAAWSLGKIGTDEAYSAIKDAKEHEEDDQVLAEMDKGLEFQKTSSA

SEQ ID NO: 77730 - protein, 381 aa, Lentibacillus halodurans
  misc_feature (1)..(381): tr|A0A1I0VX89|A0A1I0VX89_9BACI Epoxyqueuosine reductase OS=Lentibacillus halodurans OX=237679 GN=queG PE=3 SV= 1
MNLDQLRQEIIDYSKNIGIDKIGFASADVFEGLKERLKRQQELGYQSGFEKGSIEERTEPERLVPEAKSIISVALAYPSRIKDGVKGTKEERRGIFCRASWGTDYHDVLQDKLGKLAAFINEKVPEATTKVMVDTGELSDRAVAERAGIGFSGKNTSIITPEFGSYVYLGELMTNLPFVPDKPLEDGCGSCTKCLDACPTGALVQGGQLNAQRCLAFLTQTKDFMPDEFRPKIGNFIYGFDTCQVVCPYNKHVDFHNHPEFEPDPEVAKPKLKPMLRISNRAFKDTFGHIAGSWRGKKPLQRNALIALAHYKDETAVDEMITVMKNDPRPVIRGTAAWSLGKIGTEDAFAAIKEAVDKETDEQVLAEMDKGLAFQEEFSTT

SEQ ID NO: 77731 - protein, 380 aa, Lentibacillus persicus
  misc_feature (1)..(380): tr|A0A1I1X6P6|A0A1I1X6P6_9BACI Epoxyqueuosine reductase OS=Lentibacillus persicus OX=640948 GN=queG PE=3 SV=1
MNTNQLRQDVIDYSKKIGIDKIGFASADVFESLKDRLKRQQELGFQSGFEKGSVEERTEPDRLMPEAKSIISIALAYPSRIKDGPKSTKEERRGVFCRASWGTDYHEVLRERLTKLSNFIKEKMPEAETKVMVDTGELSDRAVAERAGIGFSGKNTAIITPEFGSYVYLGELITNVPFEPDTPLEDGCGSCTKCLDACPTGALVQGGQLNAQRCLAFLTQTKDFMPDEFRPKIGNFIYGFDTCQVVCPYNKRVDFHNHPEFEPEPDVAKPKLKPMLSISNREFKETFGHVAGSWRGKKPLQRNALIALAHYKDETAIPEITRVMNDDPRPVIRGTAAWSLGKIGTQAAYTAIEEAMETEKDEHVLAEMEKGLEFQDISSG

SEQ ID NO: 77732 - protein, 387 aa, Lentibacillus salicampi
  misc_feature (1)..(387): tr|A0A4Y9A9P7|A0A4Y9A9P7_9BACI Epoxyqueuosine reductase OS=Lentibacillus salicampi OX=175306 GN=queG PE=3 SV=1
MKTEQLKKDIVAYSREIGIDKIGFASADVFAGLKDRLKRQQELGYQSGFEKGSIEERTEPERLLPEAQSIISIALAYPSRIKDGPKSTKEERRGVFCRASWGVDYHEVLREKLGKLSAFIKEKVPEASMKVMVDTGELSDRAVAERAGIGFSGKNTAMITPEFGSYVYLGELITNLPFIPDTPLEDGCGSCTKCLDACPTGALVQGGQLNAQRCLAFLTQTKGFMPDEDRSKIGNFIYGFDTCQVVCPYNKKIDVHHHPEFEPEPDVAKPKLKPLLRISNREFKNTFGHIAGSWRGKKPLQRNALIALAHYKDETAVDDMIAVMNNDPRPVIRGTAAWSLGKIGTDEAFAAIEAATEKESDEQVMAEMEKGLAFNKFAEKSPSKSVI

SEQ ID NO: 77733 - protein, 380 aa, Lentibacillus sp.
  misc_feature (1)..(380): tr|A0A549YIT6|A0A549YIT6_9BACI Epoxyqueuosine reductase OS=Lentibacillus sp. NKC851-2 OX=2584959 GN=queG PE=3 SV=1
MNTQQLKQEIIDYSKEIGIDKIGFASADVFEGLKERLKRQQALGYQSGFEKGSVEERTEPDRLLPEAKSIISIALAYPSRIKNGPKSTKEERRGVFCRASWGVDYHKVLRDKLEKLSAFIVDKIPEASTKVMVDTGELSDRAVAERAGIGFSGKNTAIITPEFGSYVYLGELITNIPFVPDTPLEDGCGSCTKCLDACPTGALVQGGQLNAQRCLAFLTQTKDFLPDEFRPKIGNFIYGFDTCQVVCPYNKHVDFHNHPEFEPEPDVAKPKLKPMLRISNREFKATFGHIAGSWRGKKPLQRNALIALGHYKDKTAVDEIIAVMNNDPRPVIRGTAAWSLGKIGTDDGFVAIKEAMDKETDEQVLAEMEKGLAFKETSTT

SEQ ID NO: 77734 - protein, 380 aa, Lentibacillus sp.
  misc_feature (1)..(380): tr|A0A4Q3X4L4|A0A4Q3X4L4_9BACI Epoxyqueuosine reductase OS=Lentibacillus sp. SSKP1-9 OX=2510307 GN=queG PE=3 S V=1
MNTDQLRQEIIDYSKEIGIDKIGFASADVFAGLKDRLKRQQELGYQSGFEKGSIEERTEPGRLLPEAKSIISIALAYPSRMNDRPTNTKEERRGVFCRASWGVDYHQVLRDRLEKLADFIQEKFPEASTKVMVDTGELSDRAVAERAGIGFSGKNTSIITPEFGSYVYLGELITNVPFVPDTPLEDGCGSCTKCLDACPTGALVQGGQLNAQRCLAFLTQTKDFLPDEFRPKLGNFIYGFDTCQVVCPYNKHVDFHNHPEFEPEPDVAKPKLKPMLRISNREFKETFGHIAGSWRGKKPLQRNALLALGHYKDETAVDEMIAVMNNDPRPVIRGTAAWSLGKIGTEEAFAAIREAMDKETDEQVLTEMEKGLAFAETPAT

SEQ ID NO: 77735 - protein, 352 aa, Lentibacter algarum
  misc_feature (1)..(352): tr|A0A1H3MM05|A0A1H3MM05_9RHOB Epoxyqueuosine reductase OS=Lentibacter algarum OX=576131 GN=queG PE=3 SV=1
MDALANKLREQARAEGFDACQICAPDAVPDVPARLDAFLEKGYHGQMGWLAERTHWRGNPAALWPEARSVIMLAVSYTPEEDPLEALTRKEAGTVSVYAQNKDYHDLVKKGLKRLARWLIAEAGGEVKVFVDTAPVPEKPLGQAAGLGWQGKHTNLVSRELGNWFFIGSIFSTLDLLKDAPEQDHCGSCRNCLDVCPTGAFPAAYQLDARRCISYLTIEHHGPVDEELRPLLGNRIYGCDDCLAVCPWNKFAQNARDIRLKPRDDLQSPPLAELAMLNDTEFREKFSGSPIKRIGRNRFVRNVLYAVGNSGSTNLLKCAQHLLNDNDETVRDAADWACKRLKSAANGQDEAG

SEQ ID NO: 77736 - protein, 306 aa, Lentimicrobiaceae bacterium
  misc_feature (1)..(306): tr|A0A2E2XXI6|A0A2E2XXI6_9BACT tRNA epoxyqueuosine(34) reductase QueG OS=Lentimicrobiaceae bacterium OX=202675 6 GN=queG PE=4 SV=1
MKDQLNKFIIDEAKKLGFFDCGISKAEELTDDKIRMEKWLLEAGNGEMSYLDRNKEKRYNPKLLVENSKSVITVLYNYFPKDKLPEKDNFKIAKYAYGTDYHYVIKEKLNSLVKIIETKAGKYNTRVFVDSAPVMDRAWARKSGLGFVGKNTMLINKKGGSFFFIGNIITELELNYSNTEITKDFCGNCTKCIDACPTQAITEFNVDSKKCISYLTIEYRGDLDTKFKQKAKNWMFGCDICQDVCPWNRFSTQHNEPLFNPSSDLKAMTKEKWKVLEKIEFNKLFKGSAVNRTRYKGLKRNIDSLT

SEQ ID NO: 77737 - protein, 322 aa, Lentimicrobium saccharophilum
  misc_feature (1)..(322): tr|A0A0S7BVF5|A0A0S7BVF5_9BACT Epoxyqueuosine reductase OS=Lentimicrobium saccharophilum OX=1678841 GN=queG PE =3 SV=1
MNLRTELTQLIKTRAGELGFSFCGISRARRLDEEASRLEQWLKEGRHGKMAYMENHFDKRLDPRLLVDGARSVVSLLINYYPSAAEKYTSPLKVSKYAWGADYHTVIREKLYVLTGLLQEKAGEFNFRVFTDSAPVLDRAWAVNAGLGWIGNNTMMITRRHGSFFFIAEIITDLEFDYDQPFGGNYCGDCTRCIDACPTGAIIGPRQLDASRCISYLNIELKDEIPAEFNGKVNDWIFGCDICQDVCPWNRFSLANTEVQFSPAGEWVEWSRDAWEHLEKPVFGSVFGKSALKRAGFKKLKNNVTFAGHSFIDESGYGKDSD

SEQ ID NO: 77738 - protein, 341 aa, Lentisphaera araneosa
  misc_feature (1)..(341): tr|A6DLP8|A6DLP8_9BACT Iron-sulfur cluster-binding prot ein OS=Lentisphaera araneosa HTCC2155 OX=313628 GN=LNTA R_05306 PE=4 SV=1
MSKFDIKTLAQQCGALSVACIDLNDAEFQKALKKHGEEQAQWLAQGYGADMDYLERMLADKIDLQNTFPGANSAIIITFTNKWGMEEAEHPFPEVDPNALVGYISGYAKEQDYHRTGHEILTSIHESLQEQVGEFEAYPAVDTKPVFERFLAAYAGLGIIGPNDLLRTPERDVRVFIGTLFCTEKIAELKLKPEFAFPCHFCRACEKRGCPTGAIKEGQEFDSRLCISYLTIEKKGLLNSSERNLMEDWLFGCDWCSVVCPPKEKEDQRIPVDLEWLMKSSAGEIRRLIKGSAVEYAGVQKLRRNAIAILRKSQDPRAEELLTWCAKNMQSEMLLKQITCD

SEQ ID NO: 77739 - protein, 391 aa, Lentisphaerae bacterium
  misc_feature (1)..(391): tr|A0A3M0ZN90|A0A3M0ZN90_9BACT DUF1730 domain-containin g protein OS=Lentisphaerae bacterium OX=1932692 GN=D682 0_00190 PE=4 SV=1
MTGRFDAHLIIVAETPERFSSVPREYFIQCQKLKTVTTQLSAQQLIHLCREAGFDDAGCTTPEIPEQVQRHALAISRAGFFDELPYLQRHLHDGVSPATVLSGVNTVIVTVLHYNLPASATAPAGSPAIARYACFRDYHRVFKRLHRNVLKKLSAMGAQARAFSDTTPFSERTFAIKARLGNLMRNGMFCHHRFGPRVFLGCILTDLRCDDLPESTPDASVLHPHCHNCDACIRHCPTGALRHGLPPAVDTRRCLSSLTIENRGPVPASLQEKIRYQLFGCDRCLDVCPIQDAYQSEEFPMQSPLFPPRLPQAWDPVQFLAECIDDERFRQRFDGTVLRRPGQWGLIRNALIVCTNLHLSAAVPLIETLLQRNDLPHWLRHLAVASLAELS

SEQ ID NO: 77740 - protein, 302 aa, Lentisphaerae bacterium
  misc_feature (1)..(302): tr|A0A1G1A4V8|A0A1G1A4V8_9BACT tRNA epoxyqueuosine(34) reductase QueG OS=Lentisphaerae bacterium RIFOXYC12_FUL L_60_16 OX=1798582 GN=A2498_08435 PE=4 SV=1
MVPDIPTLMAALRAEHAGQGNAAFGIATAGPSQTQDRFRQWIDRGIPPGIDYLKRHIPLRADPDTLLSGVRSILAIAAPYPVNPDPAAGISTYARCRDYHDILRARLRRFARIIEQHDPGTKCRTCVDSAPLAEREWALRAGLGWRGRQGHLVTASGCSVVLGFLLTRTVLPPTGTIPDQCGTCTRCRDACPTQAIGRDGLINPSRCISYLTIEHSGDIPESFHTAIGRRLFGCDCCTASCPWNRQSDHPPSHDFAFREMPSAHDLLAMDDTTFKARYADTPLIRAGLKRLQRNAAIVIRNT

SEQ ID NO: 77741 - protein, 310 aa, Lentisphaerales bacterium
  misc_feature (1)..(310): tr|A0A524MXS2|A0A524MXS2_9BACT Epoxyqueuosine reductase OS=Lentisphaerales bacterium OX=2448604 GN=E4H02_06665 PE=4 SV=1
MTTPEQLAAELKALAADAGFSACGITSAAPFEEYIEALDKLTTRFQGTIPLYERMRTKSDPRALAPWARSIIVCVRRYGKYKIPKHGVGHIGKNYLFDSRCGGCPDHGMARRMKAGLEQLGLRVKTGGIPDRSAAVRSGIAGIGRNCFAYTSVGSWINIHSWLVDVELPADRPVVRSPCPEGCTVCIDACPTGALVEPGVMRMDRCIAYLSYEAPEPVDPDLWNRMGPWVYGCDVCQDVCPLNRGKWEELESADWLGEIEELLAPEALAGMTQAMFESKIHPMFWYIPKTNIARWHRNAERAVRSTASPL

SEQ ID NO: 77742 - protein, 332 aa, Lentisphaeria bacterium
  misc_feature (1)..(332): tr|A0A3D1K8N9|A0A3D1K8N9_9BACT 4Fe-4S ferredoxin-type d omain-containing protein OS=Lentisphaeria bacterium OX= 2053569 GN=DET40_12420 PE=4 SV=1
MQAGKNSFEKFLREAKDTLGFCAVSALSMNSDTYPRLLERLKEAYVADGKVTHDWPGYMQRTSGKRADPRTVFPWAKSLAVISMPFNGIPINNNFLPEAAEDCIAGLVAGYAGRIDYHTFLQDNIYIFSAALKKYLGKDFRSEIFVDTKPVAEKSLAAFSGLGAIGLNSCLLCKGEGSGTCLGILAMDIDLPETEPVDFDAPCTTCGKCVERCPTGAITGKPGVFIYKKCRSYLTMEKKGVLEKDEAVLLGDWIFGCDICTSLCPGSHPMTPIKADLEWLLLEKDSIVKDVIKSTALEYPGLKLLRRNALAVLENRDSSESHELARKFSSIG

SEQ ID NO: 77743 - protein, 370 aa, Lentisphaeria bacterium
  misc_feature (1)..(370): tr|A0A3D1K2I3|A0A3D1K2I3_9BACT Uncharacterized protein OS=Lentisphaeria bacterium OX=2053569 GN=DET40_06310 PE =4 SV=1
MNSIKESLRAYSAEIGLDLIGVTTPDPFERMISELQLREEHYRGRYAYRIDTWRKFANPKEMLPEAKSIVVIGFYYLADEKPVPGLNGRMGRIVSYGHLGILKRARLMCAFLRNHGFKAVMGAHRKEAAVRAGLGAIGKNNLVCNPKYGGWVAYQSIITDADIEKDQPFEKDLCGDCRLCMEACPTGALYEPYRVDPRRCVTCLLTSREVSEENLPKMGTSILGCDICLEACPRNKGLEPKRDIECLLPDGIGTQPPLRRMLDFTEESFQDELISKIQDKISDKKLLNLLMKSRLIRNTASYVMKKFLKGREMLPETFVHASGNMMVYKRNAIVAAGNLGDPELLPDIRRFKDDPMLGSYARWAERKMMK

SEQ ID NO: 77744 - protein, 380 aa, Leptolinea tardivitalis
  misc_feature (1)..(380): tr|A0A0N8GMA3|A0A0N8GMA3_9CHLR 4Fe-4S ferredoxin-type d omain-containing protein OS=Leptolinea tardivitalis OX= 229920 GN=ADM99_01270 PE=4 SV=1
MSTFITANEIISITSRHGFVLCGAASTDPLPEFDRYLDWIKAGYQGTMHFLEDPKGMKSRSNPEQLFPGSMSVLVLGARYTIDRLTESPFPLSGRIASYAWGKDYHDVLQHRAELVMSDISDSLGKPVENFVAVDSSPILEKPLAKRARLGWTGNNSLLIHPRLGSFFFLTNIFLKEKLDPIFNNLYGSCGTCHRCIDACPTACILPGGLLEARRCISYLTIEHRGIIPVELRKSMGNWIYGCTICQAVCPWNRKPGNNYVLPEFEAADERVIFPDLVEIVHLSDDEFKSRFSGTSLKRLKRSRLVRNAAVALGNSGQLDAVKPLGWLLENEPDPVIRCHAAWGLGQIRTSKARTILSVRLTREIDSSVQSEIRQALDLP

SEQ ID NO: 77745 - protein, 134 aa, Leptolyngbya antarctica
  misc_feature (1)..(134): tr|A0A2W4VQN6|A0A2W4VQN6_9CYAN Epoxyqueuosine reductase (Fragment) OS=Leptolyngbya antarctica OX=268115 GN=DCF 17_19385 PE=4 SV=1
ASHCGTCTRCLEACPTGAITQPYVVDANRCIAYHTIENRAETLPETIVPHLQNWVAGCDICQDVCPWNQRFAQPTPAAELQPYPGNLAPSLDDLATLSEAEWDQRFRASALRRIKPAMWRRNAQAAQQNHPESP

SEQ ID NO: 77746 - protein, 194 aa, Leptolyngbya antarctica
  misc_feature (1)..(194): tr|A0A2W4W3B8|A0A2W4W3B8_9CYAN Epoxyqueuosine reductase (Fragment) OS=Leptolyngbya antarctica OX=268115 GN=DCF 17_13150 PE=4 SV=1
MTPSVPLPDRQAVIDQALGLGFDLVGIAAVETAPSAAETAAVGHLQTWLNQGHQAAMGWMDNPRRQDIRQVLPGARSLVCVALNYYTPHRHSADPRHGKISRYAWGRDYHRVLHKRLKALADWLIAAGEGAIQVRHYADTGPVQDKAWAQQAGLGWVAKNGNLITRQYGSWVFLGELVTTLALAPDPPHASHCG

SEQ ID NO: 77747 - protein, 303 aa, Leptolyngbya boryana
  misc_feature (1)..(303): tr|A0A1Z4J9W6|A0A1Z4J9W6_LEPBY Epoxyqueuosine reductase OS=Leptolyngbya boryana NIES-2135 OX=1973484 GN=queG P E=3 SV=1
MTLTEEIKQKAIELGFHKVGIASVTDPAQSSAIQALQNWLDRGFQADMAWMANPKRQNIRELVPDARSMICVALNYHTAQQRPAGKEYAKISRYGWGRDYHRILHKKLKAFSIWLEQNGAQTRYFADTAPVQDKFWAQQAGLGWIAKNGNLITRDYGSWVFLGGVVTNLDLAIDQPHTQHCGTCTRCIDACPTDAITEPFVIDANRCIAYHTIENRAENLPEMDLKGWVAGCDICQDVCPWNQRFAQETDVQDFQPRSWNIAPTLKELAEISEAEYDRRFTGSALRRIKIGMLRRNAKANLRE

SEQ ID NO: 77748 - protein, 322 aa, Leptolyngbya foveolarum
  misc_feature (1)..(322): tr|A0A2W4WKE8|A0A2W4WKE8_9CYAN Epoxyqueuosine reductase OS=Leptolyngbya foveolarum OX=47253 GN=queG PE=3 SV=1
MNDATKSPLDSEAIKQKAIALGFHQVGIASISQPPSSAEKTAKQHLQSWLAAGYQADMAWMSSAKRQDIRQIVPDAKSVVCVALNYYTSHQRPEGSQYAKISRYGWGRDYHRVLTKKLKQLARWMQESEAGIEARLYADTGPVQDKFWAQQAGIGWIAKNGNVITRKYGSWVFLGEIITNAALAADQPHSAHCGSCTRCLSACPTEAIRAPGVVDANRCIAYHTIENRAEELPGAIAQNLENWVAGCDICQDVCPWNQRFAQETDEAAFQPYRQNIAPTLESLSQITEADWNERFPASALRRIKPEMLRRNARAAMQTHSEE

SEQ ID NO: 77749 - protein, 309 aa, Leptolyngbya frigida
  misc_feature (1)..(309): tr|A0A2T1E1T8|A0A2T1E1T8_9CYAN Epoxyqueuosine reductase OS=Leptolyngbya frigida ULC18 OX=2107698 GN=queG PE=3 SV=1
MPLDTQIKQKALELGFHKVGIAAIAPDAAAPETHLQTWLNNGYNADMTWMENPKRQDLRQIMPDVQSVICVALNYYTPASRPDSHTTAKIARYGWGRDYHKVLHKKLKALTVWLCHQGEAIQARYYADTGPVQDKVWAQRAGIGWIAKNGNVITREYGSWVFLGEVLTNLALPPDRPHTAHCGTCTRCMEACPTNAIPTPYVVDANRCIAYHTIENRAATLPEAIAPHLHGWVAGCDICQDVCPWNQRFAQPTNVADFQPHPWNLTSTLPALATITEEDYDRQFTGSALRRIKPWMLRRNAQANLESLQ

SEQ ID NO: 77750 - protein, 326 aa, Leptolyngbya sp.
  misc_feature (1)..(326): tr|A0A2W6Z0D9|A0A2W6Z0D9_9CYAN Epoxyqueuosine reductase OS=Leptolyngbya sp. OX=47254 GN=queG PE=3 SV=1
MAEAAGLPDRQAVIDQALALGFHLVGIVAVEPEPSPAETAAVGHLQTWLDQGHQADMDWMANPRRQDIRQVLPGARSLICVALNYYTPHRHSQNPNHGKISRYAWGRDYHRVLHKRLKVLADWLTTAGEGTVQARYYADTGPVQDKAWAQQAGLGWIAKNGNLITRQYGSWVFLGELITTLSLAPDAPHTAHCGTCTRCLEACPTGAITQPYVVDANRCIAYHTIENRDAALPEAIAPHLQNWVAGCDICQDVCPWNQRFAQPTTVDDFQPRPGNLTPNLDDLANLSEADWDSRFRASALRRIKPAMWRRNAQAVQKWSGAPNADP

SEQ ID NO: 77751 - protein, 324 aa, Leptolyngbya sp.
  misc_feature (1)..(324): tr|K9PZ59|K9PZ59_9CYAN Epoxyqueuosine reductase OS=Lept olyngbya sp. PCC 7376 OX=111781 GN=queG PE=3 SV=1
MSKKSISEQTRLIKAQGLELGFNKTGIAAIAPEDSENLERLNDWLTKGFQADMAWMASPKRQDIQLCLSEVKSVISVALNYYTDHQHSDDPAIAKISRYGWGRDYHRVLTKKLKAFCHWLSIEFPGDRHRFYVDTGPVQDKIWAQRAGLGWQAKNSNVITREYGSWVFLGEILTTLELEIDKPHTNHCGTCTRCLDACPTGAIAEPYVVDANRCIAYHTIENRAEDLPETIKPHLQNWVAGCDICQDVCPWNQRFAKETDVTDFQPYPKNLAPKLTELADITDEEWGDRLIGSALRRIKPWMWRRNAKANLEAQQKTSPTDGEG

SEQ ID NO: 77752 - protein, 329 aa, Leptolyngbya valderiana
  misc_feature (1)..(329): tr|A0A166V659|A0A166V659_9CYAN Uncharacterized protein OS=Leptolyngbya valderiana BDU 20041 OX=322866 GN=AY599 _13940 PE=4 SV=1
MRREAEMRAWLARGRHGSMAYLARHADLKADPSQLLDGATCAVMVADLYATRDDEPDDVPDGRGRIARYARGGDYHQIMKKRLHALCDDLASRWPESRTRAFVDTAPVHEREMALAAGLGWIGKHTLLIHPKMGSWMLLGGVLTTLELEVRQSEEPDHCGTCTRCIDACPTDAITPYSVDASRCISYLTIERREPIEPDLHRGMGAWIFGCDVCQEVCPHNSPRSVDVGEANPAYAGDRSSFDLLEVLGWDEGARRAAFAKSAMKRAKLAMMRRNAVIAAGNEIRRLGPGDDVATKLVRGLREVAGDAAADQELRTLAMRTLEDLGQSL

SEQ ID NO: 77753 - protein, 328 aa, Leptonema illini
  misc_feature (1)..(328): tr|H2CJ63|H2CJ63_9LEPT 4Fe-4S ferredoxin-type domain-co ntaining protein OS=Leptonema illini DSM 21528 OX=92956 3 GN=Lepil_1312 PE=4 SV=1
MVPLVSPLSHELATEAIALARQQGFDLVGFTDLHISEEEKQHFRSFVEEGRPAEMSWFSRHQELRLNPGRLLAYESTDETDEVSAQSALVLGMLYRDPDYDRALEDSRFRIARYAVGRDYHKVMKKRAAPLTALFEKAGIQARVCVDSAPLPEKLLARKAGLGWQGKHTNLIHPEKGSFFALAVILLSASTPASAMNPELADLCRSCNLCIEACPTGALEPYRIEPRKCLSYITIESKEDRHRQADRRQGWVFGCDICQEVCPYNRSPRGRRAIRSEPEFAPRPVIYAMLNESPDEAVWEETAGMALRRVSLEQMQFNYSFVKEAGTE

SEQ ID NO: 77754 - protein, 318 aa, Leptospira adleri
  misc_feature (1)..(318): tr|A0A5F2CMG4|A0A5F2CMG4_9LEPT tRNA epoxyqueuosine(34) reductase QueG OS=Leptospira adleri OX=2023186 GN=queG PE=4 SV=1
MIESKEIISELAPLIEECGFDLYGICEAAIPEEDQKNILTWVKDGKHGKMDWYPKNMDLRLQFSNLGFEPKSVIALGTLYNDPEYDGICKTMSFRFSRYAIGEDYHRVLRRIAKPLVSELKKKFPNHRFRQGVDSLPVPEKVLAREAGLGWQAKNTNLIHPELGSFFFITVILTDLPISVANVPLKDRCGTCTACIDACPTNALTPYRIDAGKCISHHTLEDHSPKISNSFEWIAGCDICQDVCPWNAVKARKKGIQTKREEFRARSVFKENPNSILDLDKVGFNRVFGDSAISRMNFEMFRRNVELAKEWATKRGTL

SEQ ID NO: 77755 - protein, 318 aa, Leptospira adleri
  misc_feature (1)..(318): tr|A0A2M9YLZ0|A0A2M9YLZ0_9LEPT tRNA epoxyqueuosine(34) reductase QueG OS=Leptospira adleri OX=2023186 GN=queG PE=4 SV=1
MIESKEIISELAPLIEECGFDLYGICEAAIPEEDQKNILTWVKDGKHGKMDWYPKNMDLRLQFSNLGFEPKSVIALGTLYNDPEYDGICKTMSFRFSRYAIGEDYHLVLRRIAKPLVSELKKKFPNHRFRQGVDSLPVPEKVLAREAGLGWQAKNTNLIHPELGSFFFITVILTDLPISVANVPLKDRCGTCTACIDACPTNALTPYRIDAGKCISHHTLEDHSPKISNSFGWIAGCDICQDVCPWNQVKARKKGIQTKREEFRARSVFKENPNSILDLDKEGFDRVFGDSAISRMNFEMFRRNVELAKEWVRKKETF

SEQ ID NO: 77756 - protein, 310 aa, Leptospira alexanderi
  misc_feature (1)..(310): tr|V6IB26|V6IB26_9LEPT Epoxyqueuosine reductase OS=Lept ospira alexanderi serovar Manhao 3 str. L 60 OX=1049759 GN=queG PE=4 SV=1
MIESKEIIAEFKTLIENSGFDLYGICDAKIPQEDKENILTWVQEGKHGKMDWYPKNMDLRLNFKNLGFDPLSVIVLGVIYNDPEYVEVSKGMSFRFSKYAIGEDYHRVLRRLAKSVIQELKKKYPNHRFRQGVDSLPVPEKVLARLAGLGWKAKNTNLIHPDFGSFFFITVILTDLPIYTTQIQVKDRCGTCTACIDACPTGALKPYQIDAGKCISHHTLEDPSEKISDTHGWLAGCDICQDVCPWNRVKANKKGIRTSVEEFKVRSYFKGNSDSLLSLNEREFEEYFFDSAISRMSFKMYKRNIKMIKR

SEQ ID NO: 77757 - protein, 310 aa, Leptospira alstonii
  misc_feature (1)..(310): tr|T0H3W0|T0H3W0_9LEPT Epoxyqueuosine reductase OS=Lept ospira alstonii serovar Pingchang str. 80-412 OX=121856 4 GN=queG PE=4 SV=1
MIESKEIISEFKTLIENCGFDLYGICEAKIPNEDRENILSWVKEGKHGKMEWYPKNMDLRLDFKNLGFDPLSVIALGVIYNDPEYDEVSKGMPFRFSRYAIGEDYHRVLRRLAKPLIQELKRKYPNHRFRQGVDSLPLPEKVLARLAGLGWKAKNTNLIHPDFGSFFFITVILTDLPIHIAHIEIKDRCGTCTACIDACPTGALKPYQIDAGKCISHHTLEDSSDTISDTKGWIAGCDICQDVCPWNRVKAFKKGIRTELEEFKVRSYFKENPDSLLTLNEQEFKETFSDSAISRMSFRMYQRNVKKVSS

SEQ ID NO: 77758 - protein, 310 aa, Leptospira alstonii; identical to SEQ ID NO: 77757
  misc_feature (1)..(310): tr|M6CML2|M6CML2_9LEPT Epoxyqueuosine reductase OS=Lept ospira alstonii serovar Sichuan str. 79601 OX=1218565 G N=queG PE=4 SV=1

SEQ ID NO: 77759 - protein, 312 aa, Leptospira andrefontaineae
  misc_feature (1)..(312): tr|A0A4R9HBQ5|A0A4R9HBQ5_9LEPT tRNA epoxyqueuosine(34) reductase QueG OS=Leptospira andrefontaineae OX=2484976 GN=queG PE=4 SV=1
MLLESKELLDELKDIAETNGFQLFGVGSAFVPTPDKENILHWVEEGRHGNMDWYPKNMNLRLELEGLGFKPESVIALGALYNDPEYENLDLPYRFSRYAMGEDYHSVLRKKASSLLEFLRKKFPNQKFRQGVDSLPVPEKILAREAGLGWIGKNTNLIHEEYGSFFFISLIFTDLPLRFVSVKAKDRCGTCRACIDSCPTGALEPYRIDARKCISYKTIEDRSENVDSLHGWVYGCDICQEICPWNQVKARKKGWKTEIGEFKIRDLFKKENLSDLNEKEFKTYFQDSAVSRISYKQMKRNLSVWERDSSKF

SEQ ID NO: 77760 - protein, 327 aa, Leptospira bandrabouensis
  misc_feature (1)..(327): tr|A0A4Z1B7U1|A0A4Z1B7U1_9LEPT tRNA epoxyqueuosine(34) reductase QueG OS=Leptospira bandrabouensis OX=2484903 GN=queG PE=4 SV=1
MTNPVYQIRSQIKTICEKEGFSLVGFAEAKIPEADLANLEEWISEGRFGNMDWFAKDHALGIRNRFENLGLTPRSAICLGFVYRSDASENILSLMESKVSRYALGSDYHILLKEKGNRILKILRTKFPNYKFRQSVDSLPVAEKILTRESGIAWQGKNTNLIHPKLGSYFFLSTILTDLELGGPDPEEIVTDHCGSCRKCIDICPTGALDAYKIDAKKCISYLTIEDRRETEATESFLKWDRKGWVYGCDLCQEVCPWNANVAKRNKVETTEPGFLPRAFWTDPEFTNKKALTKQEFDEYFKDSPIERIGFEIWNRNLIQKNEKEPN

SEQ ID NO: 77761 - protein, 317 aa, Leptospira barantonii
  misc_feature (1)..(317): tr|A0A2M9YYR4|A0A2M9YYR4_9LEPT tRNA epoxyqueuosine(34) reductase QueG OS=Leptospira barantonii OX=2023184 GN=q ueG PE=4 SV=1
MIESKEIISEFKSLIESSGFDLYGICDAKIPQEDRDNILSWVKEGKHGKMEWYPKNMDLRLDFKNLGFDPVSAIALGTLYNDPEYDEFSRKMSYRFSRYAIGEDYHRVLRRLAKPLIQALKTKYPNHKFRQGVDSLPVPEKVLARMAGLGWKAKNTNLIHPDFGSFFFITVILTDLPVHTVQIDVKDRCGTCTACIDSCPTGALEPYKIDAGKCISHHTLEDSSETISDTQGWLAGCDVCQDVCPWNHVKARKKGIQTKREEFKTRFYFKENPDSILDFNKEEFKTYFSDSAISRMSFEMFQRNANHIKDTFKNPKV

SEQ ID NO: 77762 - protein, 317 aa, Leptospira barantonii
  misc_feature (1)..(317): tr|A0A5F2AX28|A0A5F2AX28_9LEPT tRNA epoxyqueuosine(34) reductase QueG OS=Leptospira barantonii OX=2023184 GN=q ueG PE=4 SV=1
MIESKEIISEFKSLIESSGFDLYGICDAKIPQEDRDNILSWVKEGKHGKMEWYPKNMDLRLDFKNLGFDPVSAIALGTLYNDPEYDEFSQKMSYRFSRYAIGEDYHRVLRRLAKPLIQALKTKYPNHKFRQGVDSLPIPEKVLARMAGLGWKAKNTNLIHPDFGSFFFITVILTDLPVHTVQIDVKDRCGTCTACIDSCPTGALEPYKIDAGKCISHHTLEDSSETISDTHGWLAGCDVCQDVCPWNHVKARKKGIQTKRAEFKTRSYFKENPDSILEFNKEEFKTYFSDSAISRMSFEMFQRNANHIKDTFKNPKA

SEQ ID NO: 77763 - protein, 324 aa, Leptospira biflexa
  misc_feature (1)..(324): tr|A0A5F2C7P5|A0A5F2C7P5_LEPBI tRNA epoxyqueuosine(34) reductase QueG OS=Leptospira biflexa OX=172 GN=queG PE= 4 SV=1
MKNPHSAYQSQIKSLCMKEGFSFVGFTKANIPKKDLQFLDTWISEKKFGNMDWFAKDHALSIRNRFENLGFTPRSAICLGFVYRSEKAERLVSQMDRKVSRYALGTDYHIILRKKGNQILKELRSLYPESHFRQSVDSLPIAEKILTRESGVVWQGKHTNLIHPKLGSYFFLSVILTDLELGESPPEERTTDHCGSCRRCLDVCPTNALEPYQLDASKCISYLTIEDRNATEVTDQFLKWDRRSWVYGCDLCQEVCPWNEGIAKRNQVETSEPGFLPREFWNDPSFPSKEFLSEAEFKEYFENSPIERIGVSIWNRNQVTKKNS

SEQ ID NO: 77764 - protein, 324 aa, Leptospira biflexa
  misc_feature (1)..(324): tr|B0SMS0|B0SMS0_LEPBP Putative iron-sulfur cluster-bin ding protein OS=Leptospira biflexa serovar Patoc (strai n Patoc 1 / ATCC 23582 / Paris) OX=456481 GN=LEPBI_I271 6 PE=4 SV=1
MTMPPFPNQVQIKSLCTKVGFSLVGFTKAEIPKKDLSYLETWIAEKKYGNMDWFAKDHAIAIRNRFENLGFTPRSAICLGFVYRSEKAERLVSQMDRKVSRYALGTDYHILLRKKGNQILKELRSLYPESHFRQSVDSLPIAEKILTRESGVVWQGKHTNLIHPKLGSYFFLSVILTDLELGESPPEERTTDHCGSCRRCLDVCPTNALEPYQLDASKCISYLTIEDRNATEVTDQFLKWDRRSWVYGCDLCQEVCPWNEGIAKRNQVETSEPGFLPREFWNDPSFPSKEFLSEAEFKEYFENSPIERIGVSIWNRNQVTKKNS

SEQ ID NO: 77765 - protein, 310 aa, Leptospira borgpetersenii
  misc_feature (1)..(310): tr|A0A0E3B3G1|A0A0E3B3G1_LEPBO 4Fe-4S binding protein O S=Leptospira borgpetersenii serovar Ballum OX=280505 GN =LBBP_01528 PE=4 SV=1
MIESKEIISEFKTLIKNSGFDLYGICDAKIPQEDKENILTWVQEGKHGKMEWYPKNMDLRLDFKNLGFEPRSVIALGTIYNDPDYDDVALTMSYRFSRYAIGEDYHRVLRRLAKPLLQQLKQKYPNHHFRQGVDSLPVPEKVLARMAGLGWKAKNTNLIHPDFGSFFFITIILTDLPIYTTQIQVKDRCGTCTACIDACPTGALKPYQIDAGKCISHHTLEDPSEKISDTHGWLAGCDICQDVCPWNRVKASKKGIRTNVEEFKVRSYFKRNSDFLLSLNEQEFKEYFFDSAISRMSFQMFQRNIKMIKK

SEQ ID NO: 77766 - protein, 310 aa, Leptospira borgpetersenii; identical to SEQ ID NO: 77765
  misc_feature (1)..(310): tr|M3HIQ2|M3HIQ2_LEPBO Epoxyqueuosine reductase OS=Lept ospira borgpetersenii str. 200701203 OX=1193007 GN=queG PE=4 SV=1

SEQ ID NO: 77767 - protein, 327 aa, Leptospira bourretii
  misc_feature (1)..(327): tr|A0A4R9IIU3|A0A4R9IIU3_9LEPT tRNA epoxyqueuosine(34) reductase QueG OS=Leptospira bourretii OX=2484962 GN=qu eG PE=4 SV=1
MTNPIYQIRSQIKTICEKEGFSLVGFTEAKIPESDLEHLDQWISEGRFGNMDWFAKDHALGIRNRFENLGLTPRSAICLGFVYRSQAAEELLSQMESKVSRYALGSDYHSILKKKGNRILKILKEQFPNHKFRQSVDSLPVAEKILTRESGIAWQGKNTNLIHPKLGSYFFLSTILTDLELGGPDPEEIITDHCGSCRKCLDVCPTGALDAYKIDAKKCISYLTIEDRKETEATESFLSWDRKGWVYGCDLCQEVCPWNANVAKRNEVETIEPDFLPRAFWTDPDFINKKRLTKEEFDGYFKNSPIERIGFEIWNRNLQHLNEKESN

SEQ ID NO: 77768 - protein, 323 aa, Leptospira bouyouniensis
  misc_feature (1)..(323): tr|A0A4R9HSY9|A0A4R9HSY9_9LEPT tRNA epoxyqueuosine(34) reductase QueG OS=Leptospira bouyouniensis OX=2484911 G N=queG PE=4 SV=1
MATQSQYQSQIKSLCMKEGFSFVGFAKASIPEKDLTFLETWILEKKFGNMDWFAKDHAIAIRNRFENLGFAPKSAICMGFVYRSSEGETLLSQMERKVSRYALGTDYHIVLRNKGNLILKALRKLFPTNQFRQSVDSLPIAEKILTRESGVVWQGKHTNLIHPKLGSYFFLSIILTDLELGETPKEEITTDHCGSCRRCLDVCPTNALEPYQLDASKCISYLTIEDRMESEVTESFLKWDRKGWVYGCDLCQEVCPWNEGIAKRNQVETNEPSFLPKEFWNDPSFLSKEFLSEEEFKGYFEKTPIERIGVSIWNRNQVNKKNS

SEQ ID NO: 77769 - protein, 325 aa, Leptospira brenneri
  misc_feature (1)..(325): tr|A0A2M9XYV1|A0A2M9XYV1_9LEPT tRNA epoxyqueuosine(34) reductase QueG OS=Leptospira brenneri OX=2023182 GN=que G PE=4 SV=1
MINPIYQIRSQIKTICEVEGFSLVGFTEAKIPNSDLEHLEEWIQGNQFGSMSWFAKDHAVGIRNRFENLGLIPKSVICLGFIYRSSQGEELLSGMKSKVSRYALGSDYHIILKEKGNRILKTLRTEFPNYKFRQSVDSLPVAEKILTRESGIVWQGKNTNLIHPKLGSYFFLSTILTDLELGGPEPEEIVTDHCGSCRRCIDICPTGALEEYKMDARKCISYLTIEDQEETEATESFLEWDRKGWVYGCDLCQEVCPWNANVAKRNEVETTEPNFLPRDFWTDPNFISKKSLTKQEFAMYFKDSPIERIGFEIWNRNLKEKDDEE

SEQ ID NO: 77770 - protein, 325 aa, Leptospira brenneri
  misc_feature (1)..(325): tr|A0A5F1Z8C1|A0A5F1Z8C1_9LEPT tRNA epoxyqueuosine(34) reductase QueG OS=Leptospira brenneri OX=2023182 GN=que G PE=4 SV=1
MINPIYQIRSQIKTICEVEGFSLVGFTEAKIPNSDLEHLEEWIQGNQFGSMSWFAKDHAVGIRNRFENLGLIPKSVICLGFIYRSSQGEELLSGMKSKVSRYALGSDYHIILKEKGNRILKTLRTEFPNYKFRQSVDSLPVAEKILTRESGIVWQGKNTNLIHPKLGSYFFLSTILTDLELGGPASEEIVTDHCGSCRRCIDICPTGALEEYKMDARKCISYLTIEDREETEATESFLEWDRKGWVYGCDLCQEVCPWNANVAKRNEVETTEPNFLPRDFWTDPNFISKKSITKQEFEMYFKDSPIERIGFEIWNRNLKEKDDEE

SEQ ID NO: 77771 - protein, 312 aa, Leptospira broomii
  misc_feature (1)..(312): tr|T0F6I6|T0F6I6_9LEPT Epoxyqueuosine reductase OS=Lept ospira broomii serovar Hurstbridge str. 5399 OX=1049789 GN=queG PE=4 SV=1
MFMESKELLSELESLVHKNGFQLFGAARAVVPESDKRNILEWVREGRHGNMDWYPRNMKLRLELEGLGFHPETVFVLGALYSDPEYEEIASKLPFRFSRYATGADYHAVLKKSARDVLTILRDRFPNNVFRQGVDSLPVPEKILAREAGLGWIGKNTNLLNEEIGSYFFLTVIFTDLPLRIASLTAKDRCGTCDECIRACPTGALSAYQIDARKCISYKTIEDRSPTVEGLHGWVYGCDICQEVCPWNRVKAKRRGTETEIEEFKVRDFFKTDGSAMLTLTDEEFQRQFSDAAVNRISYAQFRRNLITVNSE

SEQ ID NO: 77772 - protein, 327 aa, Leptospira congkakensis
  misc_feature (1)..(327): tr|A0A4Z1AAS9|A0A4Z1AAS9_9LEPT tRNA epoxyqueuosine(34) reductase QueG OS=Leptospira congkakensis OX=2484932 GN =queG PE=4 SV=1
MTNPIYQIRSQIKTICEEEGFSFVGFAEAKIPKADREYLDEWIREERFGNMHWFAKDHAVGIRNEFQNLGLVPRSAICLGFVYRSSAGEEIVSQMESKVSRYALGSDYHIILKEKGNRILKILRGEFPNYKFRQSVDSLPVAEKILTKESGIVWQGKNTNLIHPKLGSYFFLSTILTDLELGGPDPEEIITDHCGSCRKCLDVCPTNALEEYKMDASKCISYLTIEDREETKVTDSFLKWDRKGWVYGCDLCQEVCPWNANVAKRNKVETSEPEFLPRYFWTDPGFLEKKSLTKQEFDDYFKDSPIERIGFEIWNRNLQHLNEKESS

SEQ ID NO: 77773 - protein, 310 aa, Leptospira dzianensis
  misc_feature (1)..(310): tr|A0A5F2AN05|A0A5F2AN05_9LEPT tRNA epoxyqueuosine(34) reductase QueG OS=Leptospira dzianensis OX=2484905 GN=q ueG PE=4 SV=1
MIESKEIISEFKTLIERSGFDMYGICDAKIPQEDRENILTWVAEGRHGKMEWYPKNMDLRLDFKNLGFEPRSVLALGTIYNDPDYDDVAETMSFRFSRYAVGEDYHRVLRRLAKPLLQELKRKYPNHHFRQGVDSLPVPEKVLARKAGLGWKAKNTNLIHPDFGSFFFITVILTDLPIVSAQIEQKDRCGTCTVCIDACPTQALEPYRIDAGKCISHHTLEDSSPEISATHGWIAGCDICQDVCPWNRVKARKRGIQTRLEEFRVRSIFRENSDSLLDLNESEFRNHFSDSAISRMRFSMYERNVKMAKK

SEQ ID NO: 77774 - protein, 310 aa, Leptospira dzianensis
  misc_feature (1)..(310): tr|A0A5F2BBK2|A0A5F2BBK2_9LEPT tRNA epoxyqueuosine(34) reductase QueG OS=Leptospira dzianensis OX=2484905 GN=q ueG PE=4 SV=1
MIESKEIISEFKTLIERSGFDMYGICDAKIPQEDRENILTWVAEGRHGKMEWYPKNMDLRLDFKNLGFEPRSVLALGTIYNDPDYDDVAETMSFRFSRYAVGEDYHRVLRRLAKPILQELKRKYPNHHFRQGVDSLPVPEKVLARRAGLGWKAKNTNLIHPDFGSFFFITVILTDLPIVSVQIEQKDRCGTCTACIDACPTQALEPYRIDAGKCISHHTLEDSSPEISATHGWVAGCDICQDVCPWNRVKARKKGIRTRLEEFRVRSIFRENPDSILDLNESEFKNNFSDSAISRMSFSMYQRNAKMAKK

SEQ ID NO: 77775 - protein, 309 aa, Leptospira dzoumogneensis
  misc_feature (1)..(309): tr|A0A4Z1APY3|A0A4Z1APY3_9LEPT tRNA epoxyqueuosine(34) reductase QueG OS=Leptospira dzoumogneensis OX=2484904 GN=queG PE=4 SV=1
MLLESKELLDRLKHIAETNGFQLFGVGPASVPSEDKENILHWVGEGRHGNMEWYPKNMNLRLELEGLGFKPESVIALGALYNDPEYDNLDLPYRFSRYAMGEDYHSVLRKKASGLLEFLRKKFPNQKFRQGVDSLPVPEKILAREAGIGWIGKNTNLIHEEYGSFFFISLIFTDLPLRFVSIKAKDRCGTCTACIDSCPTGALEPYKIDARKCISYKTIEDRSENVDSLHGWVYGCDICQEICPWNQVKARKKGWKTEIGEFKIRDLFKEENLSDLDEKKFKVYFQDSAVNRISYFQLKRNLKAVSREK

SEQ ID NO: 77776 - protein, 320 aa, Leptospira ellinghausenii
  misc_feature (1)..(320): tr|A0A2P2DCJ6|A0A2P2DCJ6_9LEPT 4Fe-4S binding protein O S=Leptospira ellinghausenii OX=1917822 GN=LPTSP2_16140 PE=4 SV=1
MTPSPLPIQSQIKSLCEKEGFSFVGFTKAEIPEKDLEYLDHWISEKKHGNMDWFAKDHALSIRNRFENLGFKPTSAICLGFVYRSSEGENLLAHMKRKVSRYALGTDYHIVLRKKGNQILKELKALYPQNHFRQSVDSLPIAEKILTRESRIVWQGKHTNLIHPKLGSYFFLSIILTDLELGETNLEETTTDHCGSCRRCLDVCPTNALEPYELDASKCISYLTIEDRTHTEVTDSFLKWDKKGWVYGCDLCQEVCPWNEGIAKRNQVETLEPSFLPREFWKDRSFQEKQKLSEEEFQTYFQDSPIERIGLSIWNRNQST

SEQ ID NO: 77777 - protein, 318 aa, Leptospira elllisii
  misc_feature (1)..(318): tr|A0A2N0BCB2|A0A2N0BCB2_9LEPT tRNA epoxyqueuosine(34) reductase QueG OS=Leptospira elllisii OX=2023197 GN=que G PE=4 SV=1
MIESKEIISELAESIENSGFELYGICKAYVPEEDKTKILSWVKRGNHGRMDWYPKNMELRLEFKNLGFEAKSVIVLGTIYNDPDYDKISKTMSFRFSKYAIGEDYHRVLKKSTASLLRTLQEKYPHHRFRQGVDSLPVPEKVLAREAGLGWIGKNTNLIHPEFGSFFFLTVLLTDLPIHTVAISVKDRCGTCTACLDSCPTGALRPYEIDAGKCISHHTLEDRSDIVPETFGWIAGCDICQDVCPWNRVKAAKKGVRTLREEFKVRSVFRENPDSILEFNEEEFRRNFQDSAISRMNFSMFRRNVELCKRNVSREENR

SEQ ID NO: 77778 - protein, 312 aa, Leptospira fainei
  misc_feature (1)..(312): tr|S3VI39|S3VI39_9LEPT Epoxyqueuosine reductase OS=Lept ospira fainei serovar Hurstbridge str. BUT 6 OX=1193011 GN=queG PE=4 SV=1
MFMESKELLPELESIAHKNGFQLFGAAKAIVPDVDKRNILEWVQDGRHGKMDWFPRNMKLRLELEGLGFQAETVFVLGALYSDPDYEEITSKLPFRFSRYATGTDYHTVLKKSARDVMDILRNRFPNNVFRQGVDSLPVPEKILAREAGLGWIGKNTNLLNEQIGSYFFLTVIFTDLPLRIASLSAKDRCGTCDECIRACPTGALAPYQIDARKCISYKTIEDRSPTVEGLHGWVYGCDICQEVCPWNRVKAKRRGAATEIEEFRVRDFFRSPGPIILALTEEEFQRQFSDAAVNRISYAQFRRNLISASSE

SEQ ID NO: 77779 - protein, 319 aa, Leptospira fletcheri
  misc_feature (1)..(319): tr|A0A4V3JCJ1|A0A4V3JCJ1_9LEPT tRNA epoxyqueuosine(34) reductase QueG OS=Leptospira fletcheri OX=2484981 GN=qu eG PE=4 SV=1
MILESKELLSELESLSRKNGFQLCGAAKAKVPDSDRENILEWVNSDLHGGMDWYPRNMQLRLEFSGLGFRPESVLVFASLYSDSEYEAIFGESPFRFSRYAVGEDYHTVLRRKAKEILDFLKRTFPNHSFRQGVDSLPVPEKVLAREAGLGWIGKNTNLINEEIGSFFFLTVVLTDVPLRIASLPAKDRCGTCDACLRACPTGALEAYKIDARKCISYKTIEDRSPSVQGLHGWVYGCDICQEVCPWNRVKAKKKGLETELPELKVRDFFRNKIESLETISEQEFDSLFRDSSVNRISYSQFRRNWKTLRSESFPRASS

SEQ ID NO: 77780 - protein, 319 aa, Leptospira fluminis
  misc_feature (1)..(319): tr|A0A4R9GMZ2|A0A4R9GMZ2_9LEPT tRNA epoxyqueuosine(34) reductase QueG OS=Leptospira fluminis OX=2484979 GN=que G PE=4 SV=1
MLLESKELLSELESLSRKNGFQLCGAAKAKVPDSDRENILEWVNSGLHGSMDWYPRNMQLRLEFSGLGFRPESVLVFASLYSDSEYESILGDSPFRFSRYAVGEDYHTVLRRNAKEILDFLRRSFPNRSFRQGVDSLPVPEKVLAREAGIGWIGKNTNLINEEIGSFFFLTVVLTDLPLRIASLPAKDRCGTCDACLRACPTGALESYKIDARKCISYKTIEDRSPSVGGLHGWVYGCDICQEVCPWNKVKARKKGVETELPEFKVRDFFRNKIESLETISEQEFDSLFRDSSVNRISYSQFRRNWKTIRFESFRGDSG

SEQ ID NO: 77781 - protein, 318 aa, Leptospira gomenensis
  misc_feature (1)..(318): tr|A0A5F1YFL0|A0A5F1YFL0_9LEPT tRNA epoxyqueuosine(34) reductase QueG OS=Leptospira gomenensis OX=2484974 GN=q ueG PE=4 SV=1
MIESKEIISELAEPIENSGFELYGICKAFVPEEDKTKILSWVKNGNHGRMDWYPKNMELRLEFKNIGFEARSVIVLGTIYNDPEYDKISKTMSFRFSKYAIGEDYHRVLKKSAASLLETLQKKYPHHRFRQGVDSLPVPEKVLAREAGLGWIGKNTNLIHPEFGSFFFLTVLLTDLPIHTVAVSVRDRCGTCTACLDACPTGALRPYEIDAGKCISHHTLEDRSDVIPDTFGWIAGCDICQDVCPWNRVKAAKKGVRTRREEFKARALFRENPDSILGFDEEDFRGNFGDSAISRMSFSMFRRNVELCKRSIEREKES

SEQ ID NO: 77782 - protein, 309 aa, Leptospira haakeii
  misc_feature (1)..(309): tr|A0A2N0BT40|A0A2N0BT40_9LEPT tRNA epoxyqueuosine(34) reductase QueG OS=Leptospira haakeii OX=2023198 GN=queG PE=4 SV=1
MLLESKELLNELKGIAETNGFQLFGVGPASVPSEDKENILHWVSEGRHGNMEWYPKNMNLRLELEGLGFKPESVIALGALYNDPEYENLDLPYRFSRYAMGEDYHSVLRKKASGLLEFLKKKFPNQKFRQGVDSLPVPEKILAREAGLGWIGKNTNLIHEEYGSFFFISLIFTDLPLTFVSVKAKDRCGTCTACIDSCPTKALEPYKIDARKCISYKTIEDRSENVDSLHGWVYGCDICQEICPWNGVKARKKGWKTEIGEFKIRDLFRKENLSNLDEKEFKTYFQDSAVNRISYFQLKRNLKVVRREK

SEQ ID NO: 77783 - protein, 325 aa, Leptospira harrisiae
  misc_feature (1)..(325): tr|A0A2N0AHY4|A0A2N0AHY4_9LEPT tRNA epoxyqueuosine(34) reductase QueG OS=Leptospira harrisiae OX=2023189 GN=qu eG PE=4 SV=1
MTNPLYQIRSQIKTICEKEGFSLVGFVDAKIPESDLANLEEWVQKKRYGNMDWFAKDHALGIRNRFQNLGLTPHSAICLGFVYRSNAGEELVSEMKSKVSRYALGSDYHIILKKKGNQILKILKEMFPNHKFRQSVDSLPVAEKILSRESGIAWQGKNTNLIHPKLGSYFFLSTILTDLELGGPDPEEIITDHCGNCRKCLDVCPTGALEAYQIDARKCISYLTIEDRNEAKATESFLDWNRKGWVYGCDLCQEVCPWNSNVAKRNEVETTEPDFLPRKFWTNPDFINKKGINKREFDVYFEDSPIERIGFEIWNRNLQQRDWKE

SEQ ID NO: 77784 - protein, 312 aa, Leptospira hartskeerlii
  misc_feature (1)..(312): tr|A0A2M9XBY2|A0A2M9XBY2_9LEPT tRNA epoxyqueuosine(34) reductase QueG OS=Leptospira hartskeerlii OX=2023177 GN =queG PE=4 SV=1
MLLESKELLDRLKNIAETNGFQLFGVGPASVPPEDKENILHWVEEGRHGNMDWYPKNMNLRLELEGLGFKPESVIALGALYNDPEYENLDLPYRFSRYAMGEDYHSVLRKKASDLLEFLRKKFPNQKFRQGVDSLPVPEKILAREAGLGWIAKNTNLIHEEYGSFFFISLIFTDLPLSFVSVKAKDRCGTCRACLDSCPTGALEPYKIDARKCISYKTIEDRSENVDFLYGWVYGCDICQEICPWNQVKARKKGWKTEIGEFKIRDLFKKENLSDLDEKEFKTYFQDSAVSRISYKQMKRNLTAWERDSTKF

SEQ ID NO: 77785 - protein, 323 aa, Leptospira idonii
  misc_feature (1)..(323): tr|A0A4R9M2G0|A0A4R9M2G0_9LEPT tRNA epoxyqueuosine(34) reductase QueG OS=Leptospira idonii OX=1193500 GN=queG PE=4 SV=1
MSLLSVELSRIKDICLSEGFDLVGFTPAVIPKQDIDNIQSWVDQQFFGKMDWFTKQISQEIRLEMRHLGFVPQSVIALGMVYRSEEAEEILEQSAVKVSRYALGDDYHQVLRNKGKNILKKLKQLYPQASFRQSIDSLPIPEKVFARLAGIGWMGKNTNIINEAFGSYFFLSMILTDYKWEIPEVAKVDHCGTCNACLDACPTGALFEPYKIDASKCISHHTIENREDDFSPTEFTANWLYGCDICQEVCPWNKNKAKRNRIQTTVKEFIPYKYWTENKNLMESPLSMEDFASIFRNSAVKRIGSKSWNRNLSSVLNHLIQEE

SEQ ID NO: 77786 - protein, 324 aa, Leptospira ilyithenensis
  misc_feature (1)..(324): tr|A0A4R9LLB7|A0A4R9LLB7_9LEPT tRNA epoxyqueuosine(34) reductase QueG OS=Leptospira ilyithenensis OX=2484901 G N=queG PE=4 SV=1
MISSELEKIKQFCLAQGFDLVGFCKAEIPEKDRNNLLSWVEHGFFGKMNWYTKEVSQEIRLDLKHLGFFPKSVLVLAVVYNSPAAEETIQAQPKKVSRYALGDDYHSVLRKKANPILKELKALYPNHSFRQSVDSLPVPEKVFARLAGIGWMGKNTNIINEELGSYFFISTILTDCEWEIPLQKEFDRCGSCRACLDACPTGALFEPYKINANKCISHHTIEDRNSLLNEETKLSDWIYGCDICQEVCPWNKTKARRNSVKTSMDEFLPYPFWKEEDLSGEKVFSDEEFQSKFKQSAIGRIGSLVWNRNLKSVLGSKEINRKEI

SEQ ID NO: 77787 - protein, 312 aa, Leptospira inadai
  misc_feature (1)..(312): tr|V6HA24|V6HA24_9LEPT Epoxyqueuosine reductase OS=Lept ospira inadai serovar Lyme str. 10 OX=1049790 GN=queG P E=4 SV=1
MFIESKELLPELESLAHKNGFQLFGAARATVPENDKRNILEWVREGRHGKMDWYPRNMKLRLELEGLGFSPETVFVLGALYSDPEYEEITSKLPFRFSRYATGADYHAVLKKSARELLAILRDRFPNNVFRQGVDSLPVPEKILAREAGLGWIGKNTNLLNEEIGSYFFLTVIFTDLPLRIASIGAKDRCGTCDECIRACPTGALSAYQIDARKCISYKTIEDRSPTVQGLHGWVYGCDICQEVCPWNRVKARRKGARTEIEEFKVRDFFKTDASAMRTLTEEEFRRRFSDAAVNRISYAQFRRNLITVNSE

SEQ ID NO: 77788 - protein, 312 aa, Leptospira interrogans
  misc_feature (1)..(312): tr|A0A4D8S528|A0A4D8S528_LEPIR tRNA epoxyqueuosine(34) reductase QueG OS=Leptospira interrogans OX=173 GN=queG PE=4 SV=1
MIESKEIISEFKTLIEGSGFDLYGICEANIPEEDRENILLWVKEHKHGNMEWYPKNMDLRLDFKNLGFDPQSVIVLGAIYNDPEYEKIRSGMTFQFSKYAVGEDYHRVLRKHAKPLIKALQKKYPNHHFRQGVDSLPVPEKVLARLAGLGWKGKNTNLIHPEIGSFFFITVILTDLPIYTTQVQIKDRCGTCTACIDACPTGALKPYQIDAGKCISHHTLEDGSEEIPDTYGWLVGCDICQDVCPWNRVKAFKKGIRTGLEEFKVRSYLKENPESILTLNEQEFEKTFSDSAISRMNFKMYQRNVNKLKNKI

SEQ ID NO: 77789 - protein, 312 aa, Leptospira interrogans
  misc_feature (1)..(312): tr|A0A0E2D4H9|A0A0E2D4H9_LEPIR Epoxyqueuosine reductase OS=Leptospira interrogans str. UI 12758 OX=1049938 GN= queG PE=4 SV=1
MIESKEIISEFKTLIEGSGFDLYGICEANIPEEDRENILLWVKKHKHGNMEWYPKNMDLRLDFKNLGFDPQSVIVLGAIYNDPEYEKIRSGMTFQFSKYAVGEDYHRVLRKHAKPLIKALQKKYPNHHFRQGVDSLPVPEKVLARLAGLGWKGKNTNLIHPEIGSFFFITVILTDLPIYTTQVQIKDRCGTCTACIDACPTGALKPYQIDAGKCISHHTLEDGSEEIPDTYGWLVGCDICQDVCPWNRVKAFKKGIRTGLEEFKVRSYLKENPESILTLNEQEFEKTFSDSAISRMNFKMYQRNVNKLKNKI

SEQ ID NO: 77790 - protein, 329 aa, Leptospira jelokensis
  misc_feature (1)..(329): tr|A0A5F2BJ47|A0A5F2BJ47_9LEPT tRNA epoxyqueuosine(34) reductase QueG OS=Leptospira jelokensis OX=2484931 GN=q ueG PE=4 SV=1
MATHSSDQFQIKTICEKEGFSFVGFTKASLPDKDLQFLETWITEKKYGNMDWFAKDQAIAIRNRFENLGFVPRSAICLGFVYRSSESEALVSQMERKVSRYALGTDYHIVLRNKGNQILKELRNLFPTNHFRQSVDSLPIAEKILTRESGVVWQGKHTNLIHPKLGSYFFLSIILTDLELGETIPEETTTDHCGSCRKCLDICPTNALEPYQLDASKCISYLTIEDRVDPLVSESFLAWDRKGWVYGCDLCQEVCPWNEGIAKRNQVETNEPSFLPKEFWKDPTFQSKEFLSETEFKGYFEKSPIERIGVSIWNRNQVIKKDSNESIIS

SEQ ID NO: 77791 - protein, 325 aa, Leptospira jelokensis
  misc_feature (1)..(325): tr|A0A4Z1A567|A0A4Z1A567_9LEPT tRNA epoxyqueuosine(34) reductase QueG OS=Leptospira jelokensis OX=2484931 GN=q ueG PE=4 SV=1
MATHSSDQFQIKTICEKEGFSFVGFTKASLPDKDLQFLETWITEKKYGNMDWFAKDHAIAIRNRFENLGFVPRSAICLGFVYRSSESEALVSQMERKVSRYALGTDYHIVLRNKGNQILKELRNLFPTNHFRQSVDSLPIAEKILTRESGVVWQGKHTNLIHPKLGSYFFLSIILTDLELGETIPEETTTDHCGSCRKCLDICPTNALEPYQLDASKCISYLTIEDRVDPLVTESFLEWDRKGWVYGCDLCQEVCPWNEGIAKRNQVETNEPSFLPKEFWKDPTFQSKEFLSETEFKGYFEKSPIEWIGVSIWNRNQVNKKDSYE

SEQ ID NO: 77792 - protein, 312 aa, Leptospira johnsonii
  misc_feature (1)..(312): tr|A0A2P2CZF9|A0A2P2CZF9_9LEPT Epoxyqueuosine reductase OS=Leptospira johnsonii OX=1917820 GN=queG PE=4 SV=1
MLLESKELLDELKDIAETNGFQLFGVAPAYVPSEDKENILHWVEEGRHGNMDWYPKNMNLRLELEGLGFKPESVIALGALYNDPEYENLDLPYRFSRYAMGEDYHSVLRKKASSLLEFLKKKFPNQKFRQGVDSLPVPEKILAREAGIGWIGKNTNLIHEEYGSFFFISLIFTDLPVRFVSVNAKDRCGTCRACIDSCPTGALEPYKIDARKCISYKTIEDRSEDVESLHGWVYGCDICQEICPWNQVKARKKGWKTEIGEFKIRDLFKKENLSDLDEKEFKSYFQDSAVSRISYKQMRRNLRVWERDSSKF

SEQ ID NO: 77793 - protein, 327 aa, Leptospira kanakyensis
  misc_feature (1)..(327): tr|A0A4R9HXT9|A0A4R9HXT9_9LEPT tRNA epoxyqueuosine(34) reductase QueG OS=Leptospira kanakyensis OX=2484968 GN= queG PE=4 SV=1
MTNPVYQIRFQIKTICEKEGFSLVGFTEAKIPNSDREHLDKWIQDERFGNMHWFAKDHAVGIRNDFQNLGLVPRSVICLGFVYRSTAGEEIVSQLESKVSRYALGSDYHIILKEKGNRILKTLRSEFPNFKFRQSVDSLPVAEKILTKESGIVWQGKNTNLIHPKLGSYFFLSTILTDLELGGPEPEEIITDHCGSCRKCLDVCPTGALEEYQIDARKCISYLTIEDRKETEATDSFLKWDRKGWVYGCDLCQEVCPWNANIAKRNKVETLEPEFLPRSFWTDPGFLEKKSLTKEEFDDYFKDSPIERIGFEIWNRNLRQKNEKKSN

SEQ ID NO: 77794 - protein, 320 aa, Leptospira kemamanensis
  misc_feature (1)..(320): tr|A0A4R9JU17|A0A4R9JU17_9LEPT tRNA epoxyqueuosine(34) reductase QueG OS=Leptospira kemamanensis OX=2484942 GN =queG PE=4 SV=1
MTITQPQDQSQIKSLCETEGFAFVGFTKAEIPEKDLRFLEKWISEKKHGNMDWFAKDHALAIRNRFENLGFKPTSAICLGFLYRSSEAEDLLPQMKRKVSRYALGTDYHIVLRKKGNQILKELKKLYPKHQFRLSVDSLPIAEKILTRESGMVWQGKHTNLIHPKLGSYFFLSVILTDLELGETNPQEKTTDHCGSCRRCLDICPTNALEPYQIDASKCISYLTIEDRSTAEVSDSFLAWDRRAWVYGCDLCQEVCPWNEGIAKRNQVETNEPSFLPREFWKDLSFQKKEFLTEDEFQEYFKDSPIERIGVSIWNRNQAT

SEQ ID NO: 77795 - protein, 312 aa, Leptospira kirschneri
  misc_feature (1)..(312): tr|M6I3L9|M6I3L9_9LEPT Epoxyqueuosine reductase OS=Lept ospira kirschneri serovar Bim str. 1051 OX=1049941 GN=q ueG PE=4 SV=1
MIESKEIISEFKTLIERSGFDLYGICEAKVPEEDREKILLWVNKGNHGKMEWYPKNMDLRLDFKNLGFDPQSVIVLGAIYNDPEYEEVQKGMTFRFSKYAVGEDYHRVLREHAKPLIKALQKKYPNHHFRQGVDSLPVPEKVLARLAGLGWNGKNTNLIHPEIGSFFFITVILTDLPMYTARIQVKDRCGTCTACIDACPTGALKPYQIDAGKCISHHTLEDSSEEIPDTYGWLAGCDICQDVCPWNRVKAFKKGIRTGLEEFKVRSYLKENPESILTLNEQEFQKNFSDSAISRMSFKMYQRNVNKLKKKI

SEQ ID NO: 77796 - protein, 312 aa, Leptospira kirschneri
  misc_feature (1)..(312): tr|A0A0E2B4H0|A0A0E2B4H0_9LEPT Epoxyqueuosine reductase OS=Leptospira kirschneri str. H1 OX=1049966 GN=queG PE =4 SV=1
MIESKEIISEFKTLIERSGFDLYGICEAKVPEEDREKILLWVNEGNHGKMEWYPKNMDLRLDFKNLGFDPQSVIVLGAIYNDPEYEEVQKGMTFRFSKYAVGEDYHRVLREHAKPLIKALQKKYPNHHFRQGVDSLPVPEKVLARLAGLGWNGKNTNLIHPEIGSFFFITVILTDLPMYTARIQVKDRCGTCTACIDACPTGALKPYQIDAGKCISHHTLEDSSEEIPDTYGWLAGCDICQDVCPWNRVKAFKKGIRTGLEEFKVRSYLKENPESILTLNEQEFQKNFSDSAISRMSFKMYQRNVNKLIKKI

SEQ ID NO: 77797 - protein, 317 aa, Leptospira kmetyi
  misc_feature (1)..(317): tr|A0A2M9XT06|A0A2M9XT06_9LEPT tRNA epoxyqueuosine(34) reductase QueG OS=Leptospira kmetyi OX=408139 GN=queG P E=4 SV=1
MIESKEIISEFKNLIESSGFDLYGICDAKIPQEDRDNILSWVKDGKHGKMEWYPKNMDLRLDFKNLGFDPVSVIALGTIYNDPEYDEFSRKMSYRFSRYAIGEDYHRVLRRLAKPLILALQTKYPNHKFRQGVDSLPVPEKVLARMAGLGWKAKNTNLIHPEFGSFFFITVILTDLPVHTAQIEVKDRCGTCTACIDSCPTGALEPYRIDAGKCISHHTLEDSSLKIENTHGWLAGCDVCQDVCPWNHVKARKKGIRTKREEFRTRSYFKENPDSVLDFNEQEFKNHFSDSAISRMSFDMFQRNANMLKNDLKNPKV

SEQ ID NO: 77798 - protein, 317 aa, Leptospira kmetyi
  misc_feature (1)..(317): tr|A0A5F1XIS5|A0A5F1XIS5_9LEPT tRNA epoxyqueuosine(34) reductase QueG OS=Leptospira kmetyi OX=408139 GN=queG P E=4 SV=1
MIESKEIISEFKNLIESSGFDLYGICDAKIPQEDRDNILSWVKDGKHGKMEWYPKNMDLRLDFKNLGFDPVSVIALGTIYNDPEYDEFSRKMSYRFSRYAVGEDYHRVLRRFAKPLIQALQTKYPNHKFRQGVDSLPVPEKVLARMAGLGWKAKNTNLIHPEFGSFFFITVILTDLPVHTAQIEVKDRCGTCTACIDSCPTGALEPYRIDAGKCISHHTLEDSSLKIANTHGWLAGCDICQDVCPWNHVKARKKGIRTKREEFRTRSYFKENPDSVLDFDEQEFKNHFSDSAISRMSFDMFQRNANMLKNDLKNPKV

SEQ ID NO: 77799 - protein, 324 aa, Leptospira kobayashii
  misc_feature (1)..(324): tr|A0A2P2DRG0|A0A2P2DRG0_9LEPT Epoxyqueuosine reductase OS=Leptospira kobayashii OX=1917830 GN=queG PE=4 SV=1
MISSELEKIKQFCLAQGFDLVGFCKAEIPEKDRNNLLSWVEHGFFGKMNWYTKEVSQEIRLDLKHLGFLPKSVLVLAVVYNSPAAEETIQAQSKKVSRYALGDDYHSVLRKKANPILKELKSLYPSHFFRQSVDSLPVPEKVFARLAGIGWMGKNTNIINEDLGSYFFISTILTDCEWDVPLQEEFDRCGSCRACLDACPTGALFEPYKINANKCISHHTIEDRNTILNEETKLSDWIYGCDICQEVCPWNKTKARRNSVKTSVNEFLPYSFWKEEDLSGEKIYSDEEFQSKFKGSAIKRIGSLVWNRNLKSVLGSKETNRQEI

SEQ ID NO: 77800 - protein, 312 aa, Leptospira koniamboensis
  misc_feature (1)..(312): tr|A0A4R9J2G3|A0A4R9J2G3_9LEPT tRNA epoxyqueuosine(34) reductase QueG OS=Leptospira koniamboensis OX=2484950 G N=queG PE=4 SV=1
MLLESKELLDMLKDIAETNGFQLFGAGPASVPTPDKENILHWVGEGRHGNMDWYPKNMNLRLELEGLGFKPESVIALGALYNDPDYESLDLPYRFSRYAMGEDYHSVLRKKASGLMEFLKKKFPNQKFRQGVDSLPVPEKILAREAGLGWIGKNTNLIHEEYGSFFFISLIFTDLPLSFVSVQAKDRCGTCKACIDSCPTGALEPYKIDARKCISYKTIEDRSEDVDSLHGWVYGCDICQEICPWNQVKARKKGWKTEIGEFKIRDLFKKESLSDLDEKEFKTYFQDSAVSRISYKQMRRNLTVWERDSSKS

SEQ ID NO: 77801 - protein, 312 aa, Leptospira langatensis
  misc_feature (1)..(312): tr|A0A5F1ZPD4|A0A5F1ZPD4_9LEPT tRNA epoxyqueuosine(34) reductase QueG OS=Leptospira langatensis OX=2484983 GN= queG PE=4 SV=1
MVLESKELLDELRPIAFANGFQLFGVSPALVPSVDKENILHWVQEGRHGKMDWYPKNMNLRLELEGLGFKPESVIALGALYNDPEYDALDLPYRFSRYAMGEDYHSVLRRKALCLLDFLRTKYPNQKFRQGVDSLPVPEKILAREAGLGWIGKNTNLIHEEYGSFFFISLIFTDLPLQFVASPAKDRCGTCRACIDSCPTGALEPYRIDARKCISYKTIEDRSEDVDSLHGWVYGCDICQEVCPWNQVKARKKGWKTEMAEFKIRDLFKKDKLSDLNEKEFQVYFQDSAVSRISYKQMKRNLNTLGRESSGS

SEQ ID NO: 77802 - protein, 321 aa, Leptospira levettii
  misc_feature (1)..(321): tr|A0A2N0AUW7|A0A2N0AUW7_9LEPT tRNA epoxyqueuosine(34) reductase QueG OS=Leptospira levettii OX=2023178 GN=que G PE=4 SV=1
MALSHLPIQSQIKSLCEKEGFSFVGFTKAEIPEKDLAYLENWIAEKKHGNMDWFAKDHALSIRNRFENLGFKPLSAICLGFVYRSSEGEGLLAQMQRKVSRYALGTDYHIVLRKKGNQILKELKALYPQNHFRQSVDSLPIAEKILTRESKIVWQGKHTNLIHPKLGSYFFLSIILTDLELGDTNPLESTTDHCGSCRRCLDVCPTNALEPYQLDASKCISYLTIEDRTHTEVTGSFLQWEKKGWVYGCDLCQEVCPWNEGIAKRNQVETIETSFLPREFWKDPAFQKKQKLSEEEFQTYFQDSPIERIGVSIWNRNQVEK

SEQ ID NO: 77803 - protein, 321 aa, Leptospira levettii
  misc_feature (1)..(321): tr|A0A5F2D4G5|A0A5F2D4G5_9LEPT tRNA epoxyqueuosine(34) reductase QueG OS=Leptospira levettii OX=2023178 GN=que G PE=4 SV=1
MALSHLPIQSQIKSLCEKEGFSFVGFTKAEIPEKDLAYLENWIAEKKHGNMDWFAKDHALSIRNRFENLGFKPLSAICLGFVYRSSEGEGLLTQMQRKVSRYALGTDYHIVLRKKGNQILKELKALYPQNHFRQSVDSLPIAEKILTRESGVVWQGKHTNLIHPKLGSYFFLSIILTDLELGDTNPLESTTDHCGSCRRCLDVCPTNALEPYQLDASKCISYLTIEDRTHTEVTDSFLQWEKKGWVYGCDLCQEVCPWNEGIAKRNQVETMESSFLPREFWKDPSFQKKQKLSEEEFQTYFQDSPIERIGVSIWNRNQVEK

SEQ ID NO: 77804 - protein, 314 aa, Leptospira licerasiae
  misc_feature (1)..(314): tr|A0A5F2DZU2|A0A5F2DZU2_9LEPT tRNA epoxyqueuosine(34) reductase QueG OS=Leptospira licerasiae OX=447106 GN=qu eG PE=4 SV=1
MLLESKELLDELKDIAETNGFQLFGVAPASVPTPDKENILHWVEEGRHGNMDWYPKNMNLRLELDGLGFEPQSVIALGALYNDPEYENLDLPYRFSRYAMGEDYHSVLRKKASGLLEFLRKKFPNQKFRQGVDSLPVPEKVLAREAGLGWIGKNTNLIHEEYGSFFFISLIFTDFPLRFASIQAKDRCGTCTACINSCPTGALEPYKIDARKCISYKTIEDRSEIVDSLHGWVYGCDICQEICPWNQVKARKKGWKTEIAEFKIRDLFKKENLSDLDENEFKTYFKDSAVSRISYKQMRRNLTVWQRDSSEFRG

SEQ ID NO: 77805 - protein, 309 aa, Leptospira licerasiae
  misc_feature (1)..(309): tr|I0XMC2|I0XMC2_9LEPT Putative iron-sulfur cluster-bin ding protein OS=Leptospira licerasiae serovar Varillal str. VAR 010 OX=1049972 GN=LEP1GSC185_2803 PE=4 SV=1
MLLESKELLDELKNIAETNGFQLFGVGPASVPSEDKENILHWVEEGRHGNMDWYPKNMNLRLELDGLGFKPQSVIALGALYNDPEYENLDLPYRFSRYAMGEDYHSVLRKKASGLLEFLRKKFPNQKFRQGVDSLPVPEKILAREAGLGWIGKNTNLIHEEYGSFFFISLIFTDFPLRFASIQAKDRCGTCTACINSCPTGALEPYKIDARKCISYKTIEDRSESVDSLHGWVYGCDICQEICPWNQVKARKKGWKTEIAEFKIRDLFKKENLSDLDENEFKTYFKDSAVSRISYFQLKRNLKVIGREK

SEQ ID NO: 77806 - protein, 321 aa, Leptospira macculloughii
  misc_feature (1)..(321): tr|A0A2N0CHP8|A0A2N0CHP8_9LEPT tRNA epoxyqueuosine(34) reductase QueG OS=Leptospira macculloughii OX=2023202 G N=queG PE=4 SV=1
MALSHLPIQSQIKSLCETEGFSFVGFTKAEIPEKDLAYLENWIAEKKHGNMDWFAKDHALSIRNRFENLGFKPLSAICLGFVYRSSEGEGLLAQMQRKVSRYALGTDYHIVLRKKGNQILKELKALYPQNHFRQSVDSLPIAEKILTRESGVVWQGKHTNLIHPKLGSYFFLSIILTDLELGDTNPMESTTDHCGSCRRCLDVCPTNALEPYQLDASKCISYLTIEDRTHTDVTDSFLQWEKKGWVYGCDLCQEVCPWNEGIAKRNQVETMESSFLPREFWKDPSFQKKQKLSEEEFQTYFQDSPIERIGVSIWNRNQVEK

SEQ ID NO: 77807 - protein, 323 aa, Leptospira macculloughii
  misc_feature (1)..(323): tr|A0A2N0CEE6|A0A2N0CEE6_9LEPT tRNA epoxyqueuosine(34) reductase QueG OS=Leptospira macculloughii OX=2023202 G N=queG PE=4 SV=1
MTNPIYQIRSQIKTICEKEGFSLVGFTEAKIPQSDLEHLDQWILEERFGNMDWFAKEHAVGIRNRFENLGLVPRSAICLGFIYRSNEGEKIVSQMQSKVSRYALGSDYHIILKKKGNRILKILKEHFPNHKFRQSVDSLPVAEKILTKESGIAWQGKNTNLIHPKLGSYFFLSTILTDLELGGPDPTEIITDHCGSCRKCLDVCPTGALEEYKIDARKCISYLTIEDRTDTEATDTFLHWDRKGWVYGCDLCQEVCPWNANVAKRNEVETTEPDFLPRPFWTNPNFIEKTSLTKEEFDSFFKDSPIERIGFEIWNRNLKQRES

SEQ ID NO: 77808 - protein, 310 aa, Leptospira mayottensis
  misc_feature (1)..(310): tr|A0A5F2ELC3|A0A5F2ELC3_9LEPT tRNA epoxyqueuosine(34) reductase QueG OS=Leptospira mayottensis OX=1137606 GN= queG PE=4 SV=1
MIESKEIISEFKTLIENSGFDLYGICNAEIPQEDKENILTWVQEGKHGKMDWYPKNMDLRLNFKNLGFDPLSVIVLGVIYNDPEYNEVSKGMSFRFSRYAIGEDYHRVLRRLAKSVIKELKKRYSNHRFRQGVDSLPVPEKVLARLAGLGWKAKNTNLIHPDFGSFFFITVILTDLPIYTTQIQVKDRCGTCTACIDACPTGALKPYQIDAGKCISHHTLEDPSERISDTHGWLAGCDICQDVCPWNRVRANKKGIRTNVEEFKVRSYFKGNSDSLLSLNEQEFKEYFFDSAISRMSFKMYQRNIKMIKR

SEQ ID NO: 77809 - protein, 310 aa, Leptospira mayottensis; identical to SEQ ID NO: 77808
  misc_feature (1)..(310): tr|A0A3S9KJT0|A0A3S9KJT0_9LEPT tRNA epoxyqueuosine(34) reductase QueG OS=Leptospira mayottensis 200901116 OX=1 192864 GN=queG PE=4 SV=1

SEQ ID NO: 77810 - protein, 323 aa, Leptospira meyeri
  misc_feature (1)..(323): tr|A0A5F1ZKA0|A0A5F1ZKA0_LEPME tRNA epoxyqueuosine(34) reductase QueG OS=Leptospira meyeri OX=29508 GN=queG PE =4 SV=1
MTNPIYQIRSQIKTICEKEGFSLVGFTEAKIPQSDLEHLDQWILEERFGNMDWFAKEHAVGIRNRFENLGLVPRSAICLGYIYRSNEGEKIVSQMQSKVSRYALGSDYHIILKKKGNRILKILKEHFPNHKFRQSVDSLPVAEKILTKESGIAWQGKNTNLIHPKLGSYFFLSTILTDLELGGPDPTEIITDHCGSCRKCLDVCPTGALEEYKIDARKCISYLTIEDRTDTEATDTFLHWDRKGWVYGCDLCQEVCPWNANVAKRNEVETTEPDFLPRPFWTNPNFIEKTSLTKEEFDSYFKDSPIERIGFEIWNRNLKQRES

SEQ ID NO: 77811 - protein, 323 aa, Leptospira meyeri
  misc_feature (1)..(323): tr|A0A5F2CXX3|A0A5F2CXX3_LEPME tRNA epoxyqueuosine(34) reductase QueG OS=Leptospira meyeri OX=29508 GN=queG PE =4 SV=1
MTNPIYQIRSQIKTICEKEGFSLVGFTEAKIPQSDLEHLDQWILEERFGNMDWFAKEHAVGIRNRFENLGLVPRSAICLGFIYRSNEGEKIVSQMQLKVSRYALGSDYHIILKKKGNRILKILKEHFPNHKFRQSVDSLPVAEKILTKESGIAWQGKNTNLIHPKLGSYFFLSTILTDLELGGPDPTEIITDHCGSCRKCLDVCPTGALEEYKIDARKCISYLTIEDRTDTEATDTFLHWDRKGWVYGCDLCQEVCPWNANVAKRNEVETTEPDFLPRPFWTNPNFIEKTSLTKEEFDSYFKDSPIERIGFGIWNRNLKQRET

SEQ ID NO: 77812 - protein, 327 aa, Leptospira montravelensis
  misc_feature (1)..(327): tr|A0A4Z0ZH72|A0A4Z0ZH72_9LEPT tRNA epoxyqueuosine(34) reductase QueG OS=Leptospira montravelensis OX=2484961 GN=queG PE=4 SV=1
MTNPVYQIRSQIKTICEAEGFSLVGFAEAKIPESDLANLEKWIEEGRFGTMDWFAKDHALGIRNRFENLGLTPRSAICLGFVYRSNSGEKILSQMGSKVSRYALGSDYHILLKEKGNRILKTLRTEFPNFKFRQSVDSLPVAEKILTRESGIAWQGKNTNLIHPKLGSYFFLSTILTDLELGGPDPEEMVTDHCGSCRKCIDICPTRALDEYKIDAKKCISYLTIEDRKEIEATESFLKWDRKGWVYGCDLCQEVCPWNANVAKRNDVETTEPGFLPRSFWTDPQFIEKKELTKQEFDEYFRDSPIERIGFEIWNRNLKHKEKKELN

SEQ ID NO: 77813 - protein, 327 aa, Leptospira mtsangambouensis
  misc_feature (1)..(327): tr|A0A5F2DJZ1|A0A5F2DJZ1_9LEPT tRNA epoxyqueuosine(34) reductase QueG OS=Leptospira mtsangambouensis OX=248491 2 GN=queG PE=4 SV=1
MTNPIYQIRSQIKTICEKEGFSLVGFTEAKIPEADLAHLEEWISEGRFGNMDWFAKDHALGIRNRFENLGLTPRSAICLGFIYRSNASEEILSQMESKVSRYALGSDYHIILKEKGNRILKTLRTKFPNHKFRQSVDSLPVAEKILTRESGIAWQGKNTNLIHPKLGSYFFLSTILTDLELGGPDPEEIITDHCGSCRKCLDVCPTGALDAYKIDAKKCISYLTIEDRRETEATETFLSWDRKGWVYGCDLCQEVCPWNANIAKRNEVETSEREFLPRAFWTNPEFTNKKTLTKQEFDEYFKDSPIERIGFEIWNRNLQHLNEKESN

SEQ ID NO: 77814 - protein, 312 aa, Leptospira neocaledonica
  misc_feature (1)..(312): tr|A0A2M9ZVW9|A0A2M9ZVW9_9LEPT tRNA epoxyqueuosine(34) reductase QueG OS=Leptospira neocaledonica OX=2023192 G N=queG PE=4 SV=1
MLLESKELLDELKDITETNGFQLFGVGPASVPSEDKENILHWVGEGRHGNMDWYPKNMNLRLELEGLGFKPESVIALGALYNDPEYENLDLPYRFSRYAMGEDYHSVLRKKASGLLEFLKKKFPNQKFRQGVDSLPVPEKILAREAGLGWIGKNTNLIHEEYGSFFFISLIFTDLPLSFVSVQAKDRCGTCRACIDSCPTGALEPYKIDARKCISYKTIEDRSENVDSLHGWVYGCDICQEICPWNQVKARKKGWKTEMGEFKIRDFFKKENLSDLDEKEFKTYFRDSAVSRISYKQMRRNLTVWERDSSKS

SEQ ID NO: 77815 - protein, 312 aa, Leptospira noguchii
  misc_feature (1)..(312): tr|M6VLB3|M6VLB3_9LEPT Epoxyqueuosine reductase OS=Lept ospira noguchii OX=28182 GN=queG PE=4 SV=1
MIESKEIISEFKTLIEGSGFDLYGICEAKIPEKDRENILLWVKEGNHGKMEWYPKNMDLRLDFKNLGFNPQSVIVLGIIYKDPEYEEVQKGMSFRFSKYAIGEDYHRVLKRHAKPIIQAFKKKYPNHHFRQGVDSLPVPEKVLARLAGIGWNGKNTNLIHPEIGSFFFITVILTDLPVYTVRVQVKDRCGTCTACIDACPTGALKPYKIDAGKCISHHTLEDLSEEIPNTYGWLAGCDICQDVCPWNRVKAFKKGVQTRLEEFKVRSYLKENPESILTLNEEEFQKTFSDSAISRMNFKMYQRNVNKIKKKI

SEQ ID NO: 77816 - protein, 312 aa, Leptospira noguchii
  misc_feature (1)..(312): tr|V6GT69|V6GT69_9LEPT Epoxyqueuosine reductase OS=Lept ospira noguchii str. Cascata OX=1193054 GN=queG PE=4 SV =1
MIESKEIISEFKTLIEGSGFDLYGICEAKIPEEDRENILLWVNEGNHGKMEWYPKNMDLRLDFKNLGFDPQSVIILGIIYKDPEYEEVQKEMSFRFSKYAIGEDYHRVLKRHAKPIIQALRKKYPNHHFRQGVDSLPVPEKVLARLAGLGWNGKNTNLIHPEIGSFFFITVILTDLPIYTVRVQVKDRCGTCTACIDACPTGALKPYQIDAGKCISHHTLEDLSEEIPDTYGWLAGCDICQDVCPWNRVKAFKKGVQTRLEEFKVRSYLKENPESILTLNEEEFQKTFSDSAISRMNFKMYQRNVNKIKKKI

SEQ ID NO: 77817 - protein, 327 aa, Leptospira noumeaensis
  misc_feature (1)..(327): tr|A0A4R9I1L7|A0A4R9I1L7_9LEPT tRNA epoxyqueuosine(34) reductase QueG OS=Leptospira noumeaensis OX=2484964 GN= queG PE=4 SV=1
MTNPVYQIRSQIKTICEKEGFSLVGFAEAKIPNADREHLDQWIQEERFGNMDWFAKDHAVGIRNDFQNLGLAPRSVICLGFVYRSSEGETILSQMESKVSRYALGSDYHLILKEKGNRILKILREKFPGFKFRQSVDSLPIAEKILTKESGIVWQGKNTNLIHPKLGSYFFLSTILTDLDLGGPEPEEIITDHCGSCRKCLDVCPTGALEEYQIDARKCISYLTIEDRSETEATESFLKWERKGWVYGCDLCQEVCPWNANVAKRNKVETTEPEFLPRSFWTDPEFLEKKSLTKEEFNEYFKDSPIERIGFEIWNRNLQQREKKESN

SEQ ID NO: 77818 - protein, 326 aa, Leptospira ognonensis
  misc_feature (1)..(326): tr|A0A4R9K929|A0A4R9K929_9LEPT tRNA epoxyqueuosine(34) reductase QueG OS=Leptospira ognonensis OX=2484945 GN=q ueG PE=4 SV=1
MDAFQPEIIKQLCIDSGFDLVGFAKPILPDFHREYLLSWVRDQKFGKMTWFPKEQSMEIRTDFRHLGFKPASMICLGMVYRSEWGESTLETLDSKVSRYALGEDYHEVLRKKAEPILRYLRQAFPKNYFRQSVDTLPIMEKVFAVKAGIGWMGKNTNVIHSELGSYFFISTILTDCPWLVVEPVPTDHCGSCTSCLDACPTGALTAPYQLDASLCISHHTIEDRDPIFETGVELFGWQYGCDICQEVCPWNQTKAKRNQIETKSQELLPKGIFAKVSGSLDLEMSEEDFRHHFKQTSIYRIGVDAWNRNVKKLREKRGDQSIKEAK

SEQ ID NO: 77819 - protein, 327 aa, Leptospira perdikensis
  misc_feature (1)..(327): tr|A0A4R9JI16|A0A4R9JI16_9LEPT tRNA epoxyqueuosine(34) reductase QueG OS=Leptospira perdikensis OX=2484948 GN= queG PE=4 SV=1
MTNPIYQIRSQIKTICEAEGFSLVGFTEAKIPNSDRKHLDEWIQEERFGEMVWFAKDHAVGIRNDFQNLGFVPKSVICLGFIYRSSQGEELLSQMESKVSRYALGSDYHLILKEKGNRILKTLREKFSGFKFRQSVDSLPVAEKILTRESGIVWQGKNTNLIHPKLGSYFFLSTILTDLELGGPDPEEIITDHCGSCRKCLDVCPTNALEAYQIDARKCISYLTIEDRKETEATDSFLEWDRKGWVYGCDLCQEVCPWNANVAKRNEVETSENEFLPRSFWTDPNFLEKESLTKQEFDVYFKDSPIERIGFEIWNRNLKQKKIKEAN

SEQ ID NO: 77820 - protein, 309 aa, Leptospira perolatii
  misc_feature (1)..(309): tr|A0A2M9ZMN4|A0A2M9ZMN4_9LEPT tRNA epoxyqueuosine(34) reductase QueG OS=Leptospira perolatii OX=2023191 GN=qu eG PE=4 SV=1
MVLESKELLPDLEKIAFQNGFQLVGAAKALVPNSDKKNILQWVQEGRFGTMNWYPKNMNLRLELEGLGFSPESVLVLGAVYYDEDSEAKLDRSKFRFSRYAMGEDYHSVLRKRTKSLLEVLRTRFPENQFRHGVDSLPVPEKVLAREAGIGWIGKNTNLIHEDFGSFFFLSTIFTDLPLRIESTVAKDRCGTCDLCIRACPTSALEPYRIDARKCISYRNIEDKSEEATSLHGWLYGCDICQEVCPWNRVKAKSRKVRTAIPEFKPKAHFIEEPEKLLRLTEDEFTSFFSDSAVLRIGFKKYRRNIENL

SEQ ID NO: 77821 - protein, 318 aa, Leptospira putramalaysiae
  misc_feature (1)..(318): tr|A0A4R9L283|A0A4R9L283_9LEPT tRNA epoxyqueuosine(34) reductase QueG OS=Leptospira putramalaysiae OX=2484984 GN=queG PE=4 SV=1
MIESKELISELSPLIEECGFDFYGISEAVIPETDRKNILTWVQEGKHGKMDWYPKNMDLRLHFKNLGFEPKSVIALGTLYNDLDYDTISKTMSFRFSRYAIGEDYHRVLRRMANPLLQELRKKFPSNQFRQGVDSLPISEKVLAREAGLGWQAKNTNLIHPEFGSYFFISVILTDLPISVAKISVKDRCGTCNACIDACPTNALAPYQIDAGKCISHHTLEDRSEKIPNTFGWIAGCDICQDVCPWNQVKARKKGIQTGREELKSRPIFKESPESILDLDQDGFESIFGDSAISRMNFKMFRRNVELAKEWALENKTF

SEQ ID NO: 77822 - protein, 321 aa, Leptospira ryugenii
  misc_feature (1)..(321): tr|A0A2P2E1Q8|A0A2P2E1Q8_9LEPT Putative iron-sulfur clu ster-binding protein OS=Leptospira ryugenii OX=1917863 GN=LPTSP4_23550 PE=4 SV=1
MSIDQLSENDLHFKEFETLAYTQGFDLVGYTNWSITDEEKNYISKWVLDGKHGDMDWFAKPQSMEIRLEGKHLGFKPERVICLGMLYRSQTAEILSKTAKYKVSRYALGRDYHTVIRRQAKPLLQHLKTRHPGFHFRLSVDSLPIPEKAFARKSGIGWMGKNTNLIHPKLGSYFFLSTILTDLPFSYEPDMITDHCGSCRACMDACPTQALVAPYQLDASLCISHHNIESKKPMGEGNRERASWLYGCDICQEVCPWNAKVAERNGVETRVLDYAPKSIFTDPNQAVSKPMSPEEFQEIFSDSAIYRIGVDKWNENIKLVL

SEQ ID NO: 77823 - protein, 312 aa, Leptospira saintgironsiae
  misc_feature (1)..(312): tr|A0A2M9YF45|A0A2M9YF45_9LEPT tRNA epoxyqueuosine(34) reductase QueG OS=Leptospira saintgironsiae OX=2023183 GN=queG PE=4 SV=1
MLLESKELLDELKDIAEMNGFQLFGVGPASVPSGDKENILHWVGEGRHGNMDWYPKNMNLRLELEGLGFKPESVIALGALYNDPEYENLDLPYRFSRYAMGEDYHSVLRKKASGLLEFLKKKFPNQKFRQGVDSLPVPEKILAREAGLGWIGKNTNLIHEEYGSFFFISLIFTDLPLSFVSIQAKDRCGTCRACIDSCPTGALEPYKIDARKCISYKTIEDRSENVDSLHGWIYGCDICQEICPWNGVKARKKGWKTEIGEFKIRDLFKKENLSDLDEKEFKMYFQDSAVSRISYKQMKRNLSVWERDSSKS

SEQ ID NO: 77824 - protein, 310 aa, Leptospira santarosai
  misc_feature (1)..(310): tr|A0A2P1QXK5|A0A2P1QXK5_9LEPT Epoxyqueuosine reductase OS=Leptospira santarosai OX=28183 GN=XB16_3331 PE=4 SV =1
MIESKEIISEFKTLIESSGFDLYGICDAKIPQEDKENILAWVREGKHGKMDWYPKNMDLRLNFKNLGFDPLSAIVLGTVYNDPEYDEVRKGMSFRFSRYAIGEDYHRVLRRLAKSLIQELKKKYPNHRFRQGVDSLPVPEKVLARLAGLGWKAKNTNLIHPDFGSFFFITVILTDLPIYTTQIQVKDRCGTCTACIDACPTGALKPYQIDAGKCISHHTLEDPSEKISDTHGWLAGCDICQDVCPWNRVKANKNGIRTNVEEFKVRPYFKVNSDSILSLNEREFNEYFFDSAISRMSFKMYLRNLKMLKR

SEQ ID NO: 77825 - protein, 310 aa, Leptospira santarosai
  misc_feature (1)..(310): tr|M6UUP9|M6UUP9_9LEPT Epoxyqueuosine reductase OS=Lept ospira santarosai str. ZUN179 OX=1049985 GN=queG PE=4 S V=1
MIESKEIISEFKTLIESSGFDLYGICDAKIPQEDKENILTWVREGKHGKMDWYPKNMDLRLNFKNLGFDPLSAIVLGTVYNDPEYDEVRKGMSFRFSRYAIGEDYHRVLRRLAKSLIQELKKKYPNHRFRQGVDSLPVPEKVLARLAGLGWKAKNTNLIHPDFGSFFFITVILTDLPIYTTQIQVKDRCGTCTACIDACPTGALKPYQIDAGKCISHHTLEDPSEKISDTHGWLAGCDICQDVCPWNRVKANKNGIRTNVEEFKARSYFKANSDSLLSLNEREFNEYFFDSAISRMSFKMYLRNLKMLKR

SEQ ID NO: 77826 - protein, 310 aa, Leptospira sarikeiensis
  misc_feature (1)..(310): tr|A0A4R9K184|A0A4R9K184_9LEPT tRNA epoxyqueuosine(34) reductase QueG OS=Leptospira sarikeiensis OX=2484943 GN =queG PE=4 SV=1
MVLESKELLNELKAIASENGFQLFGVADAQIPDPDKENILHWVEEGRHGNMNWYPRNMNLRLELEGLGFKPQSVIALGALYNDPEYENLDLTYRFSRYAMGEDYHSVLRKKASALMEFLQNSFPNQKFRQGVDSLPVPEKILAREAGIGWIGKNTNLIHEEYGSFFFISLIFTDLPLRSASLIAKDRCGTCTACIDSCPTAALSPYKIDARKCISYKTIEDRSESVENLHGWIYGCDICQEVCPWNQVKARKKGWKTEIQEFKIRDLFKQQGSLEKLEENEFRERFEDSAVNRVSYKQFRRNLETNRREK

SEQ ID NO: 77827 - protein, 309 aa, Leptospira selangorensis
  misc_feature (1)..(309): tr|A0A4R9FXK7|A0A4R9FXK7_9LEPT tRNA epoxyqueuosine(34) reductase QueG OS=Leptospira selangorensis OX=2484982 G N=queG PE=4 SV=1
MLLESKELLNELKDIAETNGFQLFGVGPASVPSADKENILHWVGEGRHGNMDWYPKNMNLRLELEGLGFKPESVIALGALYNDPEYENLDLPYRFSRYAMGEDYHSVLRKKASELLEFLKKKFPNQKFRQGVDSLPVPEKILAREAGLGWIGKNTNLIHEEYGSFFFISLIFTDFPLSFVSVQAKDRCGTCRACIDSCPTGALEPYKIDARKCISYKTIEDRSENVDSLHGWVYGCDICQEICPWNGVKARKKGWKTEIGEFKIRDLFKKENLSDLDEKGFKIYFQDSAVNRISYFQLKRNLKVVRREK

SEQ ID NO: 77828 - protein, 309 aa, Leptospira selangorensis
  misc_feature (1)..(309): tr|A0A5F2C776|A0A5F2C776_9LEPT tRNA epoxyqueuosine(34) reductase QueG OS=Leptospira selangorensis OX=2484982 G N=queG PE=4 SV=1
MLLESKELLNELKDIAETNGFQLFGVGPASVPSADKENILHWVGEGRHGNMDWYPKNMNLRLELEGLGFKPESVIALGALYNDPEYENLDLPYRFSRYAMGEDYHSVLRKKASDLLEFLKKKFPNQKFRQGVDSLPVPEKILAREAGLGWIGKNTNLIHEEYGSFFFISLIFTDLPLSFVSVQAKDRCGTCRACIDSCPTGALEPYKIDARKCISYKTIEDRSENVDSLHGWVYGCDICQEICPWNGVKARKKGWKTEIGEFKIRDLFKKENLSDLDEKGFKMYFQDSAVNRISYFQLKRNLKVVRREK

SEQ ID NO: 77829 - protein, 316 aa, Leptospira semungkisensis
  misc_feature (1)..(316): tr|A0A4R9FR32|A0A4R9FR32_9LEPT tRNA epoxyqueuosine(34) reductase QueG OS=Leptospira semungkisensis OX=2484985 GN=queG PE=4 SV=1
MVLESKELLSDLRNIASANGFQLFGVAKAFVPKSDQENILHWVQEGRHGKMDWFPKNMNLRLELEGLGFKPESVIALGALYNDPEYDALNLPYRFSRYAMGEDYHSVLRKKAADLLDFLRKNYPNQKFRQGVDSLPVPEKILAREAGLGWIGKNTNLIHEEYGSFFFISLIFTDLPLQYAASIAKDRCGTCRACIDSCPTGALEPYRIDARKCISYKTIEDRSETVDSLHGWVYGCDICQEICPWNQVKARKKGWKTEIEEFKIRDLFKKDKLSTLEEKEFKASFKDSAVSRISYKQMKRNLSSVTGLKPESPDNL

SEQ ID NO: 77830 - protein, 330 aa, Leptospira sp.
  misc_feature (1)..(330): tr|A0A2M8HQ12|A0A2M8HQ12_9LEPT tRNA epoxyqueuosine(34) reductase QueG OS=Leptospira sp. OX=178 GN=queG PE=4 SV =1
MNNNIIKFESVSEIQNSLHSIAIEAGFEMIGFTEARISEKDQTNIQSFIDNNYYGSMKWFPERQNIRLRFENLGFPIASCIVLGMVYKPSEESVKSCEVILDSISKYAWGQDYHQVLKDKAKPILEFLRSQFPNYKFRQAVDSLPIPEKILARDAGLGWIGKHTILINSNYGSYFFLTVILSEKVLHLIDTEKIAFKMPSKDRCGTCTACIDACPTNAIVNAYELDSNLCISHNTIELKDPSFDEATKNHGWVYGCDICQDVCPWNKTVARKKNIHSKIEEFKPIKFFSESSEIFHELDEQDFEHVFKDSAILRIGYKNWNRNIQQKDTF

SEQ ID NO: 77831 - protein, 310 aa, Leptospira sp.; identical to SEQ ID NO: 77765
  misc_feature (1)..(310): tr|M6E7Z7|M6E7Z7_9LEPT Epoxyqueuosine reductase OS=Lept ospira sp. serovar Kenya str. Sh9 OX=1242991 GN=queG PE =4 SV=1

SEQ ID NO: 77832 - protein, 318 aa, Leptospira stimsonii
  misc_feature (1)..(318): tr|A0A5E8TMQ5|A0A5E8TMQ5_9LEPT tRNA epoxyqueuosine(34) reductase QueG OS=Leptospira stimsonii OX=2202203 GN=qu eG PE=4 SV=1
MIESKELISELSPLIEECGFDFYGISEAVIPETDRKNILTWVQEGKHGKMDWYPKNMDLRLHFKNLGFEPKSVIALGTLYNDLDYDTISKTMSFRFSRYAIGEDYHRVIRRMANPLLQELRKKFPSNQFRQGVDSLPISEKVLAREAGLGWQAKNTNLIHPEFGSYFFISVILTDLPISVAKIPVKDRCGTCNACIDACPTNALAPYQIDAGKCISHHTLEDRSEKIPNTFGWIAGCDICQDVCPWNQVKARKKGIQTGREELKSRPIFKESPESILDLDQDGFESIFGDSAISRMNFKMFRRNVELAKEWALKNKTF

SEQ ID NO: 77833 - protein, 318 aa, Leptospira stimsonii
  misc_feature (1)..(318): tr|A0A396Z7H9|A0A396Z7H9_9LEPT tRNA epoxyqueuosine(34) reductase QueG OS=Leptospira stimsonii OX=2202203 GN=qu eG PE=4 SV=1
MIESKEIISELSPLIEECGFDFYGISEAVIPETDRKNILTWVQEGKHGKMDWYPKNMDLRLHFKNLGFEPKSVIALGTLYNDLDYDTISKTMSFRFSRYAVGEDYHQVLRRMANPLLQELRKKFPSNQFRQGVDSLPISEKVLAREAGLGWQAKNTNLIHPEFGSYFFISVILTDLPISVAKIPVKDRCGTCNACIDACPTNALAPYQIDAGKCISHHTLEDRSEKIPNTFGWIAGCDICQDVCPWNQVKARKKGIQTEREELKTRPIFKENPESILDLDQDGFERNFGDSAISRMNFKMFRRNVELAKEWALKKETF

SEQ ID NO: 77834 - protein, 325 aa, Leptospira terpstrae
  misc_feature (1)..(325): tr|N1VM40|N1VM40_9LEPT Epoxyqueuosine reductase OS=Lept ospira terpstrae serovar Hualin str. LT 11-33 = ATCC 70 0639 OX=1257025 GN=queG PE=4 SV=1
MTNPIYQIRSQIKTICEKEGFSLVGFAEAKIPASDLEHLEEWILENRFGNMTWFAKDHAVGIRNRFENLGLAPRSVICLGFVYRSNEGEQVVSQMESKVSRYALGSDYHSVLKEKGNRILKTLRSEFPGHKFRQSVDSLPIAEKILTRESGIVWQGKNTNLIHPTLGSYFFLSTILTDLELGGPDPEEIVTDHCGSCRKCLDVCPTGALEEYKIDARKCISYLTIEDRETSEISESFLQWDRKGWVYGCDLCQEVCPWNANVAKRNRVETTEPKFLPRAFWTDPEFTEKTHLTKQEFGAYFQDSPIERIGFEIWNRNLQQRDTNE

SEQ ID NO: 77835 - protein, 323 aa, Leptospira tipperaryensis
  misc_feature (1)..(323): tr|A0A1D7UXJ6|A0A1D7UXJ6_9LEPT Epoxyqueuosine reductase OS=Leptospira tipperaryensis OX=2564040 GN=A0128_10675 PE=4 SV=1
MIESKEIISELSPLIEECGFDLFGICEAVIPEEDQKNILTWVQEGKHGKMDWYPKNMDLRLHFKNLGFEPKSVIALGTLYNDPEYDIFCKTMSFRFSRYAIGEDYHEVLRKLAKPLLSELRKKFPNHQFRQGVDSLPVSEKVLAREAGLGWKAKNTNLIHPELGSFFFITVILTDLPISVANVAVKDRCGTCTACIDSCPTGALVPYQIDAGKCISHHTLEDRSSMIPNTFGWIAGCDICQDVCPWNDVKARKKGIQTRREEFKTRSIFKEDPNSILDLDERGFEKTFGDSAISRMNFSMFRRNVELSKIDISSREENSKKEH

SEQ ID NO: 77836 - protein, 320 aa, Leptospira vanthielii
  misc_feature (1)..(320): tr|A0A4R9LIG2|A0A4R9LIG2_9LEPT tRNA epoxyqueuosine(34) reductase QueG OS=Leptospira vanthielii OX=293085 GN=qu eG PE=4 SV=1
MTNPIYQIRSQIKTICTAEGFSLVGFAEAKIPNSDLDHLDEWIRENRFGNMAWFAKDHAVGIRNRFENLGLVPKSVVCLGFVYRSSQGEEVVSQMESKVSRYALGSDYHIVLKEKGNRILKTLRTEFPDYKFRQSIDSLPIAEKILTRESGIVWQGKNTNLIHPTLGSYFFLSTILTNLELGGSDPEEIVTDHCGSCRKCLDVCPTGALEEYKIDARKCISYLTIEDREKTEATDSFLQWDRKGWVYGCDLCQEVCPWNANVAKRNQVETTEPKFLPRAFWTDPQFTSKESLTEQEFGDLFKDSPIERIGVKIWNRNLKK

SEQ ID NO: 77837 - protein, 320 aa, Leptospira vanthielii
  misc_feature (1)..(320): tr|N1WG98|N1WG98_9LEPT Epoxyqueuosine reductase OS=Lept ospira vanthielii serovar Holland str. Waz Holland = AT CC 700522 OX=1218591 GN=queG PE=4 SV=1
MTNPIYQIRSQIKTICTAEGFSLVGFAEAKIPNSDLDHLDEWIRESRFGNMAWFAKDHAVGIRNRFENLGLVPKSVVCLGFVYRSSQGEEVVSQMESKVSRYALGSDYHIVLKEKGNRILKTLRTEFPDYKFRQSIDSLPIAEKILTRESGIVWQGKNTNLIHPTLGSYFFLSTILTDLELGGSDPEEIVTDHCGSCRKCLDVCPTGALEEYKIDARKCISYLTIEDREKTEATDSFLQWDRKGWVYGCDLCQEVCPWNANVAKRNQVETTEPKFLPRAFWTDPQFTSKESLTEQEFGDLFKDSPIERIGVKIWNRNLKK

SEQ ID NO: 77838 - protein, 310 aa, Leptospira weilii
  misc_feature (1)..(310): tr|A0A514W0W3|A0A514W0W3_9LEPT tRNA epoxyqueuosine(34) reductase QueG OS=Leptospira weilii OX=28184 GN=queG PE =4 SV=1
MIESKEIISEFKTLIESSGFDLYGICDAKIPQEDKENILTWVQEGKHGKMDWYPKNMDLRLNFKNLGFDPLSVIVLGAIYNDPEYGEVSKGMLFRFSRYAIGEDYHRVLRRLAKSVIRELRKKYPNHRFRQGVDSLPVPEKVLARLAGLGWKAKNTNLIHPDFGSFFFITVILTDLPIYTTQIQVKDRCGTCTACIDACPTGALKPYQIDAGKCISHHTMEDPSEKISDTHGWLAGCDICQDVCPWNRVKADKKGVRTNVEEFKVRSYFKGNSDFLLSLNEREFEEYFFDSAISRMSFKMYQRNIKMIKR

SEQ ID NO: 77839 - protein, 310 aa, Leptospira weilii
  misc_feature (1)..(310): tr|M6QFP2|M6QFP2_9LEPT Epoxyqueuosine reductase OS=Lept ospira weilii str. UI 13098 OX=1088542 GN=queG PE=4 SV= 1
MIESKEIISEFKTLIESSGFDLYGICDAKIPQEDKENILTWVREGKHGKMDWYPKNMDLRLNFKNLGFDPLSVIVLGAIYNDPEYGEVSKGMSFRFSRYAIGEDYHRVLRRLAKSVIRELRKKYPNHRFRQGVDSLPVPEKVLARLAGLGWKAKNTNLIHPDFGSFFFITVILTDLPIYTTQIQVKDRCGTCTACIDACPTGALKPYQIDAGKCISHHTMEDPSEKISDTHGWLAGCDICQDVCPWNRVKADKKGVRTNVEEFKVRSYFKENSDSLLSLNEREFEEYFFDSAISRMSFKMYQRNIKMIKR

SEQ ID NO: 77840 - protein, 320 aa, Leptospira wolbachii
  misc_feature (1)..(320): tr|R9A8E0|R9A8E0_9LEPT Epoxyqueuosine reductase OS=Lept ospira wolbachii serovar Codice str. CDC OX=1218599 GN= queG PE=4 SV=1
MTNPIYQIRSQIKTICEAEGFSFVGFAEAKIPDSDLKHLDQWIRENRFGNMTWFAKDHAVGIRNRFENLGLAPKSVVCLGFVYRSTQADEVVSRMESKVSRYALGSDYHIVLKDKGNRILKTLRTEFPGNKFRQSIDSLPVAEKILTRESGIVWQGKNTNLIHPTLGSYFFLSTILTDLELGGPVPEEIVTDHCGSCRKCLDVCPTGALEEYKMDARKCISYLTIEDREETEATDSFLQWDRQGWVYGCDLCQEVCPWNANVAKRNGVETKEPEFLPRTFWTDPQFTEKEFLTKEEFDSYFKDSPIERVGFEIWNRNLKQ

SEQ ID NO: 77841 - protein, 310 aa, Leptospira wolffii
  misc_feature (1)..(310): tr|A0A2M9ZDE5|A0A2M9ZDE5_9LEPT tRNA epoxyqueuosine(34) reductase QueG OS=Leptospira wolffii OX=409998 GN=queG PE=4 SV=1
MVFESKELLTELREIAGREGFQLFGAAPAIVPESDKEKIRLWVEEGRHGGMEWYPRNMPLRLELQGLGFKPETVLVFGALYSDTEYENLRLPFRFSRYAMGEDYHSVLRKRGAAVIDRLKALFPGNRFRQGVDSLPVPEKVLAREAGIGWVGKNTNLLNEEFGSFFFLTVLFTDLPLQIANLPAKDRCGTCTACIDACPTDALEPYRIDSRKCISYKTIEDRSEEIAGLHGWAYGCDICQEVCPWNRIKAKKNDRKTEILEFKIRDIFKEEGKLENLNETEFRERFRDSAVSRISYSQFRRNLDAVKREK

SEQ ID NO: 77842 - protein, 310 aa, Leptospira wolffii
  misc_feature (1)..(310): tr|S3VTV7|S3VTV7_9LEPT Epoxyqueuosine reductase OS=Lept ospira wolffii serovar Khorat str. Khorat-H2 OX=1193069 GN=queG PE=4 SV=1
MVFESKELLTELREIAGREGFQLFGAAPAIVPESDKEKIRLWVEEGRHGSMEWYPRNMPLRLELEGLGFKPETVLVFGALYSDTEYENLRLPFRFSRYAMGEDYHSVLRKRGAAVIDRLKALFPGNRFRQGVDSLPVPEKVLAREAGIGWVGKNTNLLNEEFGSFFFLTVLFTDLPLQIANLPAKDRCGTCTACIDACPTDALEPYRIDSRKCISYKTIEDRSEEVAGLHGWAYGCDICQEVCPWNRIKAKKNDRKTEILEFKIRDIFKEEGKLENLNESEFRERFRDSAVSRISYSQFRRNLDTVKREK

SEQ ID NO: 77843 - protein, 323 aa, Leptospira yanagawae
  misc_feature (1)..(323): tr|A0A4V3JM65|A0A4V3JM65_9LEPT tRNA epoxyqueuosine(34) reductase QueG OS=Leptospira yanagawae OX=293069 GN=que G PE=4 SV=1
MTTHSPYQSQIKSLCTKEGFSFVGFTRAMLPEKDLSFLETWISEKRFGNMEWFAKEHAIAIRNRFENLGFVPRSAICLGFVYRSSEGETLLSQMERKVSRYALGTDYHIVLRNKGNRILKELRKLFPTNQFRQSVDSLPIAEKILTRESGVVWQGKHTNLIHPKLGSYFFLSIILTDLELGETPIEETTTDHCGSCRRCLDVCPTNALEPYQLDASKCISYLTIEDRMENEVTESFLEWDRKGWVYGCDLCQEVCPWNEGIAKRNQVETNEPSFLPREFWNDPSFLSKEFLSEGEFTEYFEKTPIERIGVSIWNRNQVNKKNS

SEQ ID NO: 77844 - protein, 323 aa, Leptospira yanagawae
  misc_feature (1)..(323): tr|A0A5E8HF39|A0A5E8HF39_9LEPT Epoxyqueuosine reductase OS=Leptospira yanagawae serovar Saopaulo str. Sao Paul o = ATCC 700523 OX=1249483 GN=queG PE=4 SV=1
MTTHSPYQSQIKSLCTKEGFSFVGFTRAMLPEKDLSFLETWISEKKFGNMDWFAKEHAIAIRNRFENLGFVPRSAICLGFVYRSSEGETLLSQMERKVSRYALGTDYHIVLRNKGNRIIKELRKIFPTNQFRQSVDSLPIAEKILTRESGVVWQGKHTNLIHPKLGSYFFLSIILTDLELGETPIEETTTDHCGSCRRCLDVCPTNALEPYQLDASKCISYLTIEDRMENEVTESFLEWDRKGWVYGCDLCQEVCPWNEGIAKRNQVETNEPSFLPREFWNDPSFLSKEFLSEEEFKGYFEKTPIERIGVSIWNRNQVEKKDS

SEQ ID NO: 77845 - protein, 310 aa, Leptospira yasudae
  misc_feature (1)..(310): tr|A0A418A9W8|A0A418A9W8_9LEPT tRNA epoxyqueuosine(34) reductase QueG OS=Leptospira yasudae OX=2202201 GN=queG PE=4 SV=1
MIESKEIISEFKTLIERSGFDMYGICDAKIPQEDRENILTWVAEGRHGKMEWYPKNMDLRLDFKNLGFEPRSVLALGTIYNDPDYDDVAETMSFRFSRYAVGEDYHRVLRRLAKPILQELKRKYPNHHFRQGVDSLPVPEKVLARRAGLGWKAKNTNLIHPDFGSFFFITVILTDLPIVSAQIEQKDRCGTCTACIDACPTQALEPYRIDAGKCISHHTLEDSSPEISATHGWVAGCDICQDVCPWNRVKARKKGIRTRLEEFRVRSIFRENPDSLLDLNESEFKNNFSDSAISRMSFSMYQRNAKMAKK

SEQ ID NO: 77846 - protein, 326 aa, Leptospiraceae bacterium
  misc_feature (1)..(326): tr|A0A2E5S734|A0A2E5S734_9LEPT Epoxyqueuosine reductase OS=Leptospiraceae bacterium OX=2026757 GN=CMF59_19715 PE=4 SV=1
MSREAGFDLYGFTYASISESDRTNLSAFARDNEANDLHWFNRHLNLRTHPSDILPGAISVLMLGVIYRHPEMDSAVEQARAKISRYAAGKDYHLVLRKKAARLADHFFEENKEVLPGLKYRITTDSAPVPEKILARNAGLGWQGKNTNLIHPEKGSYFFLTAVFLNAELEGAKGESPLDSAGNLEESGDLFRPANFDRCGSCRQCLDACPTGALEPYRIQADRCLSYWTIEAREDMPPEIAQNTKGWVFGCDICQEVCPYNRGAKGRKQITNEKDFFPRARLLGWLKKPENPAEEELWQSLSVSSPLKRPGQERFRKSWLQANTSS

SEQ ID NO: 77847 - protein, 342 aa, Leptospirillum ferriphilum
  misc_feature (1)..(342): tr|A0A094X8Y0|A0A094X8Y0_9BACT Epoxyqueuosine (OQ) redu ctase QueG OS=Leptospirillum ferriphilum OX=178606 GN=L ptCag_2423 PE=4 SV=1
MRKKPDRETLLPGEAAPDKPEDDLSRARRILGETLVEFPCAAVLSDPPARPDFPRLLEWLERGDHGRMEWMRRRPERRRSLGEGYPGYRSIVIALLPVAGKGDPVHVFGTSVRIARYAEGPDYHQVFLERFRRIIERIRPLLDSGDRPLVKPDHGALLEKSLAMEAGLGVLGKNTLLINPLLGSHFTIGSLLLKTPLASITGPFSEFSPCGNCTRCLEACPTNAFRGPYSLDARRCLSYLTIEAPEDDEREVRRTDGEDWLFGCDVCQDTCPHNSSRSRREMPGRETSFSEKRVVNHPEDLIEWVRTNPSMDRVSLDTLRERVQEITSVKSGRISGLPKRSD

SEQ ID NO: 77848 - protein, 342 aa, Leptospirillum ferriphilum
  misc_feature (1)..(342): tr|A0A059XT00|A0A059XT00_9BACT (Fe-S)-binding protein O S=Leptospirillum ferriphilum YSK OX=1441628 GN=Y981_012 20 PE=4 SV=1
MKNKLDGDNLLTGEQAPDEPEEDLSRARRILGETLVEFPCAAVLSDPPDRPDFPRLLEWLERGDHGRMDWMKRRPERRRSLGEGYPGYRSVVIALLPVAGKGEPVHVFGTSVRIARYAEGPDYHQVFLERFRRVIERIRPLLDSGDRPLVKPDHGALLEKSLAMEAGLGTLGKNTLLINPLLGSHFTIGSLLLKTPLASVKGPFSGFSPCGNCTRCLDACPTNAFRGPYRLDARRCLSYLTIEEPEDDERALRRTSGEDWLFGCDVCQDTCPHNGSRSRREMSGREPFLSEKRVVNHPEDLIEWVRTNPSMGRVSLDTLRERVQEITSVKSGRISGFPKRRD

SEQ ID NO: 77849 - protein, 360 aa, Leptospirillum ferrodiazotrophum
  misc_feature (1)..(360): tr|C6HWP4|C6HWP4_9BACT Probable iron-sulfur cluster bin ding protein OS=Leptospirillum ferrodiazotrophum OX=412 449 GN=UBAL3_80630077 PE=4 SV=1
MPCGCSSFQTDGWRRSLRHFLKGSPSSNSRICRMELRTPSETSPGSGALMEALALAMDQEFPAWGILCDPEAAPEWAYFQEWLKDGFHGKLDYMARSAHRRQKLSLAYPGLRTLVIALLFHGSGQSEKSQSPDTTSHDRFAKIARYAVGPDYHRLFEEAFGRVITAITPFLPSGETPLIKVDHGALLEKSLARRAGLGAIGKNTLLIRPGQGSYFTLGSLLLSTPLPSRIDGYGSTEICGGCRRCLDACPTGALVEPFRLDARRCLSYLTIERPSDDPLELRKKFGGEWFFGCDICQEVCPYNATPSHAEIEDEGRLLPVSASSGELKGFRGRNGALSRVSLTRLEYRLREIRETESPED

SEQ ID NO: 77850 - protein, 257 aa, Leptospirillum ferrooxidans
  misc_feature (1)..(257): tr|I0IL35|I0IL35_LEPFC Putative iron-sulfur cluster bin ding protein OS=Leptospirillum ferrooxidans (strain C2- 3) OX=1162668 GN=LFE_0262 PE=4 SV=1
MSFLERNPHRRRSISDGYPGYRTAVLALLPSDKKLPIPETAAIKVRVARYAVGEDYHCVFEERFKSVLNEIRPLLQKGDKPLIKPDHGAILEKSLAQQAGLGRIGRHTLLIHRKMGTRFTIGVLLLKTPFSSWRPPLEDFMPCGSCTLCLDSCPTEAFSGPFRLDARKCLSYLTIESPKSENPGKIPVDVAQNWIFGCDICQEVCPYNAPSGAFSGGEAIVRSPTDLIRLVKENPSLQRAGFPALWKRYEEIRGQSG

SEQ ID NO: 77851 - protein, 342 aa, Leptospirillum sp.; identical to SEQ ID NO: 77847
  misc_feature (1)..(342): tr|B6AMD5|B6AMD5_9BACT Probable iron-sulfur cluster bin ding protein OS=Leptospirillum sp. Group II '5-way CG' OX=419541 GN=CGL2_11277278 PE=4 SV=1

SEQ ID NO: 77852 - protein, 342 aa, Leptospirillum sp.
  misc_feature (1)..(342): tr|A0A0K0WJT3|A0A0K0WJT3_9BACT (Fe-S)-binding protein O S=Leptospirillum sp. Group II 'CF-1' OX=1660083 GN=ABH1 9_01115 PE=4 SV=1
MKNKLDGDNLLTGEQAPDEPEEDLSRARRILGETLVEFPCAAVLSDPPDRPDFPRLLEWLERGDHGRMDWMKRRPERRRSLGEGYPGYRSVVIALLPVAGKGEPVHVFGTSVRIARYAEGPDYHQVFLERFRRVIERIRPLLDSGDRPLVKPDHGALLEKSLAMEAGLGTLGKNTLLINPLLGSHFTIGSLLLKTPLASITGPFSGFSPCGNCTRCLDACPTNAFRGPYRLDARRCLSYLTIEEPEDDERALRRTTGEDWLFGCDVCQDTCPHNGSRSRREMSGRETFLSEKRVVNHPDDLIEWVRTNPSMGRVSLDTLRERVQEITSVKSGRISGFPKRRD

SEQ ID NO: 77853 - protein, 361 aa, Leptothrix cholodnii
  misc_feature (1)..(361): tr|B1Y406|B1Y406_LEPCP Epoxyqueuosine reductase OS=Lept othrix cholodnii (strain ATCC 51168 / LMG 8142 / SP-6) OX=395495 GN=queG PE=3 SV=1
MSDLPIDAPALLEQLQEWARTLGFSQIGVADVDLASAEPGLTAWLAAGFHGDMQYMAAHGLKRARPAELIPGTVRVITARLDYLPRDTPPDWREHERARQQSPGEAVISIYARGRDYHKVLRQRLQRLADRIAQAVGPFGHRVFCDSAPVLEVELASRSALGWRGKHTLLLDRAAGSMFFLGEIYVDLALPPTPPVTPHCGQCSACIDVCPTRAIVAPYRLDARRCISYLTIEDDGPIPIELRAAIGNRIYGCDDCQLICPWNKYAQRSPLADFDARAPLVSATLLQLWGWDEAAFLRHTEGSAIRRIGHRRWRRNLAVALGNAWRETGDAAIAAALQSALPEPDDMLAEHIGWALAQRAA

SEQ ID NO: 77854 - protein, 382 aa, Leptothrix mobilis
  misc_feature (1)..(382): tr|A0A4Q7LG63|A0A4Q7LG63_9BURK Epoxyqueuosine reductase OS=Leptothrix mobilis OX=47994 GN=queG PE=3 SV=1
MSTCPSDLQRPDATLLARVSQQLRGWAGALGFSQIGVADVDLASAEPGLLAWLQAGFHGQMHYMAAHGLRRARPAELVPGTVRVLSVRADYLPRDTPEDWRDRERTRLSRPDEAVVSVYARGRDYHKVVRHRLQQLSDRIAAEIGPHGHRVFCDSAPVLEVELARRAAIGWRGKHTLLLDRGHGSMFFLGEIYVDLALPVTPVLAGKADEHGPVDVQGSCGSCTACLSACPTQAIVAPYRLDARRCISYLTIEHDGPIPTELRSSMGNRIYGCDDCQLACPWNKYAQVSALPDFDVRAPFVAPTLLALWDWDEATFLHRTEGSAIRRIGHTRWRRNLAIALGNAWRETGDAAIAAALQSAIDAGLDDAVLAEHLAWALAQRA

SEQ ID NO: 77855 - protein, 358 aa, Leucothrix pacifica
  misc_feature (1)..(358): tr|A0A317CQ23|A0A317CQ23_9GAMM Epoxyqueuosine reductase OS=Leucothrix pacifica OX=1247513 GN=queG PE=3 SV=1
MAKFTSHQAQAAFVRQLEEWGHELGFQQLGVSNVDLSDAESQLWNWIDQQHHGEMTWMSSHGLKRSRPDLLEPNTRSIISVRMDYLPPQSADAEMVLNHPELGYISRYALGRDYHKVLKKRLQRLANKIQHEIGEFGYRVFVDSAPVLEKPIAVKAGLGWVGKHSNILNRDAGSWFFLGEIYTDLELPETGSVQEHCGSCTACLDVCPTQAIVAPYDVDARRCISYLTIELKGAIPIEFRKAMGNRIYGCDDCQLICPWNRFAQETVENDYQVRNGLDSEQLLVLFSWSEAEFLEKMQGSPIRRIQFDRWQRNIAIALGNAPYHPNIVKALESQQPNASEMVVEHINWAIRQHVEKLD

SEQ ID NO: 77856 - protein, 359 aa, Leucothrix sp.
  misc_feature (1)..(359): tr|A0A317CBG9|A0A317CBG9_9GAMM Epoxyqueuosine reductase OS=Leucothrix sp. IMCC9719 OX=1481894 GN=queG PE=3 SV= 1
MANLMSQSERDTLLHQLEEWGQSLGFQQVGISNTNLGEAEAQLHDWLDKGHHGDMGWMASHGLKRSRPELLETGTRSIISVRMDYLPPENTDPEMVLNHPELGYISRYALGRDYHKVMRARLKKLAHKMQEAVGDFGFRVFVDSAPVLEKPIAVKAGLGWVGKHSNILNREAGSWFFLGEIYTDLVLPESEPQTDHCGSCTACIDVCPTQAIIAPYVVDARRCISYLTIELDGAIPVEFREAMGNRIYGCDDCQLICPWNRFAQETHETDYQVRHDLDHEHLLTLFAWTEQDFLDKMQGSAVRRIGFKRWQRNIAVALGNAPPNDNIINVLIAARPSSDDIVKEHIDWAIEQQQKKYAN

SEQ ID NO: 77857 - protein, 379 aa, Levilinea saccharolytica
  misc_feature (1)..(379): tr|A0A0P6YMG1|A0A0P6YMG1_9CHLR 4Fe-4S ferredoxin-type d omain-containing protein OS=Levilinea saccharolytica OX =229921 GN=ADN01_00590 PE=4 SV=1
MSFEDDVKAEAFHLGFSLCGLAAAQPQAQHAAVYEDWLAAGHHAQMGYLAAESARLRRADPSLTLPGVRTVLTVGLPYPNPARAAAPADGRLRGRTAAYSWGQDYHDRIPPRLNQLAVFLETRLGLPLAHRAYTDTGPLLERAWGQQAGLGWFGKNSCLIHPRGGSAFLLGELLLDVELQPDVPWEADRCGSCTRCLDACPTGCILPNRTLDARRCLSYWTIENKGLIPVELRPSLGNWVFGCDICQQVCPWNQHAAPSQVDAAFDFTPEEAFPDLLEALSLSPVDFNRSFRRTPLARTKRRGFLRNAAVALGNLGDPAAAPALIHTLENEPEPLVRAHAAWALGQLHHPRVRPALEHAQLTDPDPSVRLEAAGALAAL

SEQ ID NO: 77858 - protein, 309 aa, Lewinella agarilytica
  misc_feature (1)..(309): tr|A0A1H9CGQ4|A0A1H9CGQ4_9BACT Epoxyqueuosine reductase OS=Lewinella agarilytica OX=478744 GN=queG PE=3 SV=1
MSPAQLSTLVKQTALDAGFSFVGVAKAGPMEEEARHLEEWLRQGRHGSMHWMENHFDKRVDPTKLVPGAKSVVSLLYNYFPEDDRPSQEAPKISRYAYGEDYHKVVRAKLREVVQRVEESIGSPIDGRVFVDSAPVLERDWARRAGVGWTGKNTLLINPKAGSYFFLAEIISDLNLAPDQEIKDYCGTCTACIDACPTEAISPEGYLLDGSKCISYLTIELREAIPEEFAGRMEGWAFGCDICQEVCPWNRFSSPHKEPAFNAHPDLPEMSSREVREMTEEVFRRVFQKSAVKRTKFTGLRRNIDFLDV

SEQ ID NO: 77859 - protein, 316 aa, Lewinella marina
  misc_feature (1)..(316): tr|A0A2G0CK14|A0A2G0CK14_9BACT Epoxyqueuosine reductase OS=Lewinella marina OX=438751 GN=queG PE=3 SV=1
MNPTQLATLIKTTAYDLGFGFVGIARAERMEPEEARLEAWLNAGHHGTMRWMENHFDKRVDPTKLVPGARSVVSLLYNYFPADDTPSREAPKLARYAYGEDYHRVVRGKLRELVARLEESIGAPIDGRVFVDSAPVLERDWAARAGTGWTGKNTLLLNPKAGSYFFLAEIISDLAPATDTGIRDHCGTCTRCIEACPTEAISPAGYVVDGSRCISYLTIELREAIPEEFRGRMEGWAFGCDICQEVCPWNRFSTPHREPAFEPHPDLPGMGEREWREMTEEVFRRVFQKSAVKRTKFSGLRRNIDFLAEGTDPVED

SEQ ID NO: 77860 - protein, 307 aa, Lewinella nigricans
  misc_feature (1)..(307): tr|A0A2D0NE66|A0A2D0NE66_9BACT Epoxyqueuosine reductase OS=Lewinella nigricans DSM 23189 = NBRC 102662 OX=1122 177 GN=queG PE=3 SV=1
MKTRHTHLIRQEAARLGFAFVGIARAERLDEEATRLEQWLQADMNGKMQYMENHFEKRVDPTKLVEGAKSVITLMYNYYTDREQSDPAAPKLSKYAYGKDYHYVIKHKLKDLLHFIREEIGEVDGRCFVDSAPVLERDWAKRSGVGWVGRNTLLIHPKAGSYYFLAELILDLDLVYDHPIKDYCGTCTRCIEACPTDAIAPAGYLVDGSKCISYFTIELREALPEEYRGRFENWMFGCDICQEVCPWNRFAKPHEEEAFEPHPDLLEMSKEEWYELTEEVFREVFRGSAVKRTKYAGLKRNIAFLRE

SEQ ID NO: 77861 - protein, 309 aa, Lewinella sp.
  misc_feature (1)..(309): tr|A0A180ES26|A0A180ES26_9BACT Epoxyqueuosine reductase OS=Lewinella sp. 4G2 OX=1803372 GN=queG PE=3 SV=1
MSLTNAHIKKLVFDLGFSFIGVAKAERMTEEEARLEEWLNQGKHGTMQWMENHFDKRVDPTKLVPGAKTVISLLYNYFPEDDGPSLEAPKISRYAYGKDYHHVIKGKLKHLVWQIEEALGAPLDGRVFVDSAPVLERDWAKRAGVGWTGKNTLLINPKAGSYYFLAELISDLDVEPDQRIKDYCGTCTACIDACPTEAISPQGYIVDGSKCISYLTIELREAIPEEFKGRMEGWAFGCDICQEVCPWNRFSTPHREPDFLPHPDLPGMSARETREMTEEVFRRVFQKSAVKRTKFSGLRRNIDFLDPEL

SEQ ID NO: 77862 - protein, 310 aa, Lewinella sp.
  misc_feature (1)..(310): tr|A0A562YUR4|A0A562YUR4_9BACT Epoxyqueuosine reductase OS=Lewinella sp. W8 OX=2528208 GN=queG PE=3 SV=1
MSPQFTAQNLKQLAYDLGFTHVGIARAEPMEEEARRLEEWLNRGHHGTMRWMENHFDKRTDPTKLVPGAKTVVSLLYNYFPKDESPSETAPKISRYAYGEDYHRVIRAKLRELVHRVEEKLGATLEGRVFVDSAPVLERDWARRAGVGWVGKNTLLINPRSGSYYFLAEIISDLDLPADTAIRDHCGTCTRCIEACPTEAISPGGYVVDGSKCISYLTIELKEAIPESFRGQMEGWAFGCDICQEVCPWNRFSTPHHEPAFEPHPDLPGMQEGDWRELTEEVFRRVFRKSAVKRTKFSGLRRNLNFLSDE

SEQ ID NO: 77863 - protein, 313 aa, Lewinella xylanilytica
  misc_feature (1)..(313): tr|A0A2S6I9S4|A0A2S6I9S4_9BACT Epoxyqueuosine reductase OS=Lewinella xylanilytica OX=1514080 GN=queG PE=3 SV=1
MDPTSLANLIKQTAYDLGFGFVGIARAERMEPEERRLEAWLDAGHHGQMHWMENHFDKRVDPTKLVPGAKSVVSLLYNYFPADDTPSREAPKVARYAYGEDYHKVVRGKLRELTGRLEEAIGSPIDGRVFVDSAPVLERDWAARAGAGWIGKNTLLLNPKAGSYFFLAEIISDLQPATDSAIRDHCGTCTRCIDACPTDAISPQGYLVDGSKCISYLTIELKEAIPEEFRGRMEGWAFGCDICQEVCPWNRFSTPHREPAFEPHADLPGMGPREWTEMTEDVFRRVFQKSAVKRTKFTGLRRNIDFLDKGGSD

SEQ ID NO: 77864 - protein, 306 aa, Lewinellaceae bacterium
  misc_feature (1)..(306): tr|A0A2C6CPD5|A0A2C6CPD5_9BACT tRNA epoxyqueuosine(34) reductase QueG OS=Lewinellaceae bacterium SD302 OX=2014 804 GN=queG PE=4 SV=1
MSPKAFIQQLATEQGFLHVGFARAEFMEPEARQLESWLNQGRHGKMSWMENYFDKRVDPTKLVPGAKTVITFLYNYFPEDDTPSQEAPKIARYAYGQDYHHVIKGKLRTIIEAVREEYGEIDGRAFVDSAPVLERDWAKRSGSGWVGKNTLLLRQGVGSYFFLAELIVDLEVDPDGPVTDHCGSCTRCIDACPTEAISPQGYLLDGSKCISYLTIELKEAIPEEFKDRMEGWAFGCDICQEVCPWNRFSKAHSEPAFLPHPDLPAMSPAERKEMTEEVFRRVFRKSAVKRAKFVGLRRNIDFLGET

SEQ ID NO: 77865 - protein, 382 aa, Lihuaxuella thermophila
  misc_feature (1)..(382): tr|A0A1H8H978|A0A1H8H978_9BACL Epoxyqueuosine reductase OS=Lihuaxuella thermophila OX=1173111 GN=queG PE=3 SV= 1
MRPAELKQKLIDRAKEIGIDKIGFASADPFIELKARLIEHRKKGYESGFEEPDIEKRVRPDLSLPEAKTIIAIALAYPSKLKNPPRSEPGAYRGIFCRASWGEDYHHVLRDKLNRLEAYLHEWVPEARTKIMVDTGALSDRAVAERAGIGWSGKNTSIITEEFGSWVYLGEMITDVYIPADQPVTDGCGDCNLCIEACPTGALVQPGQLNSRSCIAYLTQTKGFLPEEYRSKIGNRLYGCDTCQTVCPKNRKVHFDHHEEFQPDPEKVKPLLKPLLSMSNRQFKETFGQMAGSWRGKKPIQRNAILALAHFKDQTAIPDLTELLHNDPRPVIRGTAAWALGKIGGEEAKKALITAAQNEKDEEVRKEIIKGMELLGQEKIYH

SEQ ID NO: 77866 - protein, 354 aa, Limimaricola cinnabarinus
  misc_feature (1)..(354): tr|A0A2G1MDN5|A0A2G1MDN5_9RHOB Epoxyqueuosine reductase OS=Limimaricola cinnabarinus OX=1125964 GN=queG PE=3 S V=1
MNQGAALKTRLREAALGEGFAEMGICRPDAIPEAAARLATYVEEGRHGQMGWMEERMHWRGDPAALWPKARSVIMLAEAYTPRHDPLDVLEHPDRAAISVYAHGRDYHDLVKKRLKRVGRWLLEQCPEEEIKVFVDTAPVMEKPLAQAAGLGWQGKHTNLLGRTVGNWVFLGAIFTTVELPVDAPAREKCGSCTRCLDICPTGAFPAPFQLDARRCISYLTIEHKGPVPEEFREALGNRIYGCDDCLAICPWNKFAQEATEMRYFGKVDAPPLAELAKLDDASFREMFSGSPIKRIGRDRFLRNVAYAIGNSGDPGLLPTARNLAAEPDPTLAEAGQWAVRRLEAAANGASSVP

SEQ ID NO: 77867 - protein, 354 aa, Limimaricola cinnabarinus
  misc_feature (1)..(354): tr|U3AAQ4|U3AAQ4_9RHOB Epoxyqueuosine reductase OS=Limi maricola cinnabarinus LL-001 OX=1337093 GN=queG PE=3 SV =1
MVTDPGLKDRLREAALGEGFAEMGICRPDSIPEAAGRLATYVDEGRHGQMDWMEERMHWRGDPAALWPEARSVIMLAEAYTPRHDPLEVLEQRDRAAISVYAHGRDYHDLVKKRLKRVGRWLLEQCPDEQIKVFVDTAPVMEKPLAQAAGLGWQGKHTNLLGRTVGNWVFLGAIFTTVDLPVDAPAVEKCGSCTRCLDICPTNAFPAPFQLDARRCISYLTIEHKGPVPEEFREALGNRIYGCDDCLAVCPWNKFAQEATEMRYFGKVDAPPLADLAKLDDATFREMFSGSAIKRIGRDRFLRNVAYAIGNSGDRGLLGVARDLAAEADPVLAEAGQWAVRRLEGAEKAARSSS

SEQ ID NO: 77868 - protein, 353 aa, Limimaricola hongkongensis
  misc_feature (1)..(353): tr|A0A017HHJ8|A0A017HHJ8_9RHOB Epoxyqueuosine reductase OS=Limimaricola hongkongensis DSM 17492 OX=1122180 GN= queG PE=3 SV=1
MTPASLKDRLRETALAEGFAEMGICRPDAIPEAAGRLATYVEEGRHGQMGWMEERMHWRGDPAALWPEARSVIMLAEAYTPRHDPLEVLGHPDRAAISVYAHGRDYHDLVKKRLKRVGRWLLEQLPEEQIKVFVDTAPVMEKPLAQAAGLGWQGKHTNLLGRTVGNWVFLGAIFTTAELPVDAPAREKCGSCTRCLDICPTRAFPAPFQLDARRCISYLTIEHKGPVPEEFREALGNRIYGCDDCLAVCPWNKFAQDATEMRYFGKVDAPPLADLARLDDAAFREMFSGSPIKRIGRDRFLRNVAYAIGNSGDPGLLPTARDLAAEPDPVLAEAGQWAVRRLEGQGDGASSLS

SEQ ID NO: 77869 - protein, 346 aa, Limimaricola pyoseonensis
  misc_feature (1)..(346): tr|A0A1G7EV44|A0A1G7EV44_9RHOB Epoxyqueuosine reductase OS=Limimaricola pyoseonensis OX=521013 GN=queG PE=3 SV =1
MDAPTLKTRLRDTALAEGFAEMGVCRPDAIPEAAGRLGAFVGEGRHGQMGWMAERMHWRGDPAALWPEARSVVMLAEAYTPRHDPLEVLGRRDHAAISVYAHGRDYHDLVKKRLKRVGRWLLEQCPGEEIKVFVDTAPVMEKPLAQAAGLGWQGKHTNLLGRTVGNWVFLGAIFTTVELPADAPAAEKCGSCTRCLDICPTNAFPAPFQLDARRCISYLTIEHKGPVPEEFREALGNRIYGCDDCLAVCPWNKFAQEATEMRYFGKVAAPRLADLARLDDAGFREMFSGSPIKRIGRDRFLRNVCYAIGNSGDRTLLPVLAPLRAEPDPALSDAARWATARLEGRG

SEQ ID NO: 77870 - protein, 354 aa, Limimaricola soesokkakensis
  misc_feature (1)..(354): tr|A0A1X6YPC6|A0A1X6YPC6_9RHOB Epoxyqueuosine reductase OS=Limimaricola soesokkakensis OX=1343159 GN=queG PE=3 SV=1
MNQGAALKTRLREAALGEGFAEMGICRPDAIPEAAGRLATYVEEGRHGQMGWMEERMGWRGNPAALWPEARSVIMLAEAYTPRHDPLEVLGQRDRAAISVYAHGRDYHDLVKKRLKRVGRWLLEQCPDEQIKVFVDTAPVMEKPLAQAAGLGWQGKHTNLLGRTVGNWVFLGAIFTTVELPVDAPAAEKCGSCTRCLDICPTNAFPAPFQLDARRCISYLTIEHKGPVPEEFREALGNRIYGCDDCLAVCPWNKFAQEATEMRYFGKVDAPPLADLARLDDAAFREMFSGSPIKRIGRDRFLRNVAYAIGNSGDPSLLPVARDLAAEPDPVLAEAGQWAVRRLDGKGGGASSLS

SEQ ID NO: 77871 - protein, 377 aa, Limimonas halophila
  misc_feature (1)..(377): tr|A0A1G7SK25|A0A1G7SK25_9PROT Epoxyqueuosine reductase OS=Limimonas halophila OX=1082479 GN=queG PE=3 SV=1
MADTDPKAAIRTQALELGFDAVGFTEADLGEQARENLHAYLARGHHGDMGWLADTAERREHPRALWDDARSVVVLGLNYGPAHNPLTVLELPDRGAISVYAQNRDYHDLVKKRLKRLARWMHETLGAQVKVFVDTAPVMEKPLAERAGVGWQGKHTNLVSRPLGSWLFLGEVFTDLDLEPDAPEGDHCGSCRRCLDVCPTNAFPAPYRLDATRCISYLTIEHKGHIPREFRAPMGNRIYGCDDCLAVCPWNKFAKPTDETALWGRVELRAPRLRDLVNLDDAGFRQVFSASPIKRLGRNRFVRNVLIAIGNSGQPALVPEVRARLDDNSALVRAMAVWALARLADARTVEQEARRRLAVEDDAEVRAEWRMELGEPV

SEQ ID NO: 77872 - protein, 147 aa, Limnobacter sp.
  misc_feature (1)..(147): tr|A0A350FT25|A0A350FT25_9BURK tRNA epoxyqueuosine(34) reductase QueG (Fragment) OS=Limnobacter sp. OX=2003368 GN=DCX50_04360 PE=4 SV=1
MQAHQEQENWALLQRVAKTQGLGCMGVSDTHLQACEPHLQTWLNQGMHGEMAYMERHGLNRLNADTLFPGAIRIVSLRVPYVPETTLNQPDATTFTEKTLMEIEAHNKPYVSLYARGRDYHKVIRQRLKRFADAVNSEVGGFGFRVA

SEQ ID NO: 77873 - protein, 361 aa, Limnobacter sp.
  misc_feature (1)..(361): tr|A6GSM2|A6GSM2_9BURK Putative iron-sulfur cluster-bin ding protein OS=Limnobacter sp. MED105 OX=391597 GN=LME D105_15833 PE=4 SV=1
MQAHQEQENWALLQRVAKAQGLGCMGVSDTHLQACEPHLQAWLNQGMHGEMAYMERHGLKRLNTDTLFPGAIRIVSLRVPYVPETTLNQPDAATFTEKTLSEIEARDTPYVSLYARGRDYHKVIRQRLKRFADAVNSEVAGFGFRVAVDSAPTAEVEIARKAGLGWRGKHTLLIHPDEGSLFFLGEVFTNMPLPLSGEFGKNHCGTCNSCMTACPTQAIVKPYQVDARLCISYLTIEHDSEIPLELRPLVGTRIYGCDDCQLACPWNKFAKPAQYADFNPRAEFEKPDWFAMMRWTEEEFLKLTEGSAIRRIGYKRFRRNLAVAAGNSVEVMGIREALLGMRKTADAFLMEHIDWALSRLD

SEQ ID NO: 77874 - protein, 379 aa, Limnobaculum parvum
  misc_feature (1)..(379): tr|A0A2Y9U0N2|A0A2Y9U0N2_9ENTR Epoxyqueuosine reductase OS=Limnobaculum parvum OX=2172103 GN=queG PE=3 SV=1
MSHPLDLNLLAQHIKQWGQALGFQQVGICDTDLSLEEPRLQAWLDKQYHGDMAWMARYGMMRARPHELEPGTLRVISVRMNYLPPHASFAKSLADPNIGYISRYALGRDYHKVLRQRLKNLGEKIQQHCENLHFRPFVDSAPMMERPLAAKAGIGWTGKHSLIINREAGSWFFLGELLVDIPLPVDQPVEEECGRCIACMTLCPTGAIVEPYIVDARRCISYLTIELEGSIPEELRPLMGNRIYGCDDCQMGCPWNRIAPLTEEQDFLPRSTLHHTALLELYAWDEATFLSKTEGSPVRRIGYFRWLRNISVALGNAPYQAEIIEALEQRKNLYAIVDEHIEWALTRQWEKREQRGVEVRAPKQLRLIRSVEKGLPRDA

SEQ ID NO: 77875 - protein, 408 aa, Limnochorda pilosa
  misc_feature (1)..(408): tr|A0A0K2SJ27|A0A0K2SJ27_9FIRM Epoxyqueuosine reductase OS=Limnochorda pilosa OX=1555112 GN=LIP_1175 PE=4 SV=1
MSLEEELKAEGRRLGFHRVGIAPASELARARALLQSQAEQGTYPAFTHPDAALRTDPSRWLEGARSVVAVALAYPHPPRSAPSDGSPRGLVARYACFEDYHPVIEEGLRKLMALLARRAGRPVRWRLLVDTGPAVDRAVAEKAGLGGVGKNGCLFVNGAGSWVVLGEAVTDVALTPDEPVSLDCGTCNRCVEACPTGALEPYRVDPRLCISEATQLRGPLPGERRESLGRYVWGCDICQQVCPWNRDVDPEGALLDPLPQVGPNPSLLELLTLTRQGFRERFAHSALNWRDEKVLQRNAAYALGNLRRASTVPALAERLVADPSPTVRGAAAWALGRIATARAVEALAAALVTECDRGVRRELEDALRVARSSPSPPSKPRRHPARAPGRRGSESPPRPAPAPPGSRC

SEQ ID NO: 77876 - protein, 357 aa, Limnohabitans curvus
  misc_feature (1)..(357): tr|A0A315EVJ4|A0A315EVJ4_9BURK Epoxyqueuosine reductase OS=Limnohabitans curvus OX=323423 GN=queG PE=3 SV=1
MQALGQTLGFSQIAVAPLDLSSAEPHLQHWLAQNFHGSMDYMARHGLKRARPAELVPGTLSVLTARMNYLPRDTAEGWQDAEWQRLRNPAEAVVSVYARGRDYHKVLRNRLDTLAQQIDTLLIDTLKPNGFEYRAFTDSAPVMEAELATRSGQGWRGKHSLVLNREAGSMFFLGEIFLNVALPASESTSAHCGQCTACMDVCPTQAIVAEGLVDARRCISYLTIEHEGSIDVALRPLMGNHIYGCDDCQLICPWNKFAQASSLPDFDVRAGLVGQGMARLLAWTEAEFLRYTEGSPIRRIGHVRWLRNLAVAAGNALRQADDATLRQALQVHLSHSSDVVREHVQWALAQSDRLRAV

SEQ ID NO: 77877 - protein, 359 aa, Limnohabitans parvus
  misc_feature (1)..(359): tr|A0A315FIL3|A0A315FIL3_9BURK Epoxyqueuosine reductase OS=Limnohabitans parvus II-B4 OX=1293052 GN=queG PE=3 SV=1
MDLLELWPQIQIWARELGLSQIGVTGIDLTSAEPGLQAWLAAGFHGSMGYMASHGLKRARPAELQPGTVSVITARMDYLPQGSPPDWLARETARSLQPGEAVVSLYARGRDYHKVLRSRLQKLQDRIAQAIGPFGHRVFTDSAPVLEAELATRSGLGWRGKHTLVLSREAGSMFFLGELFVDFALPETPAVSAHCGQCTACMDLCPTKAIVGPYRLDARRCISYLTIEHAGPIDEALRPLIGNRIYGCDDCQLACPWNKFAQVSPLPDWQAREGLGAGSLVQLMAWSEAEFLCRTEGSAIRRIGHARWLRNLALAAGNALASEVITAPERQALQQALAVHLVHTDPVVQEQVSWSLAQV

SEQ ID NO: 77878 - protein, 359 aa, Limnohabitans planktonicus
  misc_feature (1)..(359): tr|A0A2T7UHT9|A0A2T7UHT9_9BURK Epoxyqueuosine reductase OS=Limnohabitans planktonicus II-D5 OX=1293045 GN=queG PE=3 SV=1
MDLLELWPQIQIWARELGLSQIAVTGIDLSSAEPGLQAWLAAGFHGSMGYMASHGMKRARPAELVPGTVSVITARMDYLPQDTPPDWLAHETARSLQPGEAVVSVYARGRDYHKVLRSRLQKLQDRIAEAIGPFGHRVFTDSAPVLEAELATRSGLGWRGKHTLVLSREAGSMFFLGELFVDFALPETPAVSAHCGQCTACMDLCPTQAIVGPYRLDARRCISYLTIEHAGPIDEALRPLIGNRIYGCDDCQLACPWNKFAQVSALPDWQPRDGLKASSIVSLMRWDEAEFLRRTEGSAIRRIGHDRWLRNLALAAGNALASMGMNTEDRLALQQALTTHAAHPDPVVQEQVAWSLAKV

SEQ ID NO: 77879 - protein, 446 aa, Limnohabitans sp.
  misc_feature (1)..(446): tr|A0A5C7ZHS7|A0A5C7ZHS7_9BURK Epoxyqueuosine reductase OS=Limnohabitans sp. OX=1907725 GN=queG PE=3 SV=1
MGLHHRIGRTFDAAPHAAGAQQVAHESGLARTQIAAQLDAGVASARPFGQVRRERASPPLRGLFVRPVQRPYGLAFYNGRVALAHQRFDPLVLWPQIQGWAHGLGLSQIGVTGIDLRDAEPGFQAWLKMGFHGGMDYMASHGIKRARPAELVPGTVSVITVRMDYLPQGTPDDWVAQEQARQERPEEAVVSVYARGRDYHKVLRARLQKLADRIAAVVGPFGHRVFTDSAPVLEAELATRSGLGWRGKHTLVLSREAGSMFFLGELFVDFDLPPTEPVSAHCGQCSACLQVCPTQAIVAPYRLDARRCISYLTIEHEGLIPHELRPLIGNRVYGCDDCQLVCPWNKFAKVHALPDWQPREGLTGSAIATLLSWSEAEFLRRTEGSAIRRIGHVRWLRNLALAAGNALRSGQLSPAQQEALREALLARRDHPDEVVREQVAWSLALR

SEQ ID NO: 77880 - protein, 354 aa, Limnohabitans sp.
  misc_feature (1)..(354): tr|A0A315BKU3|A0A315BKU3_9BURK Epoxyqueuosine reductase OS=Limnohabitans sp. WS1 OX=1100726 GN=queG PE=3 SV=1
MWPQIQVWAGELGLSQIGVTGIDLSSAEPGLSAWLEAGFQGSMHYMAAHGLKRARPAELVPGTVSVITARMDYLPEGTTSDWVSRETARSLQPGEAVVSIYARGRDYHKVLRSRLQKLQDRIAQAIGPFGHRVFTDSAPVLEAELASRSGLGWRGKHTLILSREAGSMFFLGELFVDFALPETPAATAHCGQCTACMDLCPTQAIVGPYRLDARRCISYLTIEHAGPIDEALRPLIGNRIYGCDDCQLACPWNKFAQVNALPDWQPREGLGASSIVQLMAWSEAEFLGRTEGSAIRRIGHARWLRNLALAAGNALASAGLTALDRHALHQALSTHAGHPDPVVQEQVVWSLGSA

SEQ ID NO: 77881 - protein, 306 aa, Limnoraphis robusta
  misc_feature (1)..(306): tr|A0A0F5Y7A1|A0A0F5Y7A1_9CYAN Epoxyqueuosine reductase OS=Limnoraphis robusta CS-951 OX=1637645 GN=queG PE=3 SV=1
MYPPVQAHQVKQQAITLGFHKVGIATVVEPKAEVERLQAWLNQGYQAEMAWMANPRRQDIRQVMPEVQSVICVALNYYTPDERREGAEYGKISRYGWGRDYHKVMHQKLKAFSNWLQAQGEGIQARYYADTGPISDKVWAQRAGIGWIAKNSNVITREYGSWVFLGEVLTNLELTPDSPHTEHCGTCTRCIEACPTNAITEPFVVDANRCIAYHTIENRAEQLPENIDLNGWVAGCDICQDVCPWNQRFAKETDVEAFQPYPGNIDPKLSELAELSEEEWNEQFTASALRRIKPQMWRRNAKKNLL

SEQ ID NO: 77882 - protein, 309 aa, Limnospira indica; identical to SEQ ID NO: 74607
  misc_feature (1)..(309): tr|H1WBW1|H1WBW1_9CYAN Epoxyqueuosine reductase OS=Limn ospira indica PCC 8005 OX=376219 GN=queG PE=3 SV=1

SEQ ID NO: 77883 - protein, 319 aa, Limnothrix rosea
  misc_feature (1)..(319): tr|A0A1Q4R839|A0A1Q4R839_9CYAN Epoxyqueuosine reductase OS=Limnothrix rosea IAM M-220 OX=454133 GN=queG PE=3 S V=1
MDKQTQRIKAQGLALGFHKIGIAAIAPVDTENLERLNRWLDKGFQADMAWMASPKRQDIRRCLPEVKSVIAVALNYYTDHQHSADPAIAKISRYGWGRDYHRVLTKRLKAFCHWLSIEFPADQHRFYVDTGPVQDKIWAERAGLGWQAKNSNVITREYGSWVFLGEILTTLELTPDKPHTNHCGTCTRCLDACPTGAIAKPYVVDANRCIAYHTIENRAEDLPETIKPHLQNWVAGCDICQDVCPWNQRFAKETDIPDFQPYPKNLAPKLTELAEITDEEWGDRLIGSALRRIKPSMWRRNAKANLEAQQKTSPRDGEG

SEQ ID NO: 77884 - protein, 401 aa, Limnothrix sp.
  misc_feature (1)..(401): tr|A0A372DT77|A0A372DT77_9CYAN Epoxyqueuosine reductase OS=Limnothrix sp. CACIAM 69d OX=1890733 GN=queG PE=3 S V=1
MDTTALEYDPAVGGSSPVAIARRNTYQVKTKALALGFHQVGIAAISSEYPPLPSAVSALQRWLDRGFAAEMKWMAAPKRFDAREFMPEARSVICVALNYYSPEQRPLEQRPLNPSFSQAESAIEPAQAQPQLDQPQLDQPQFGKIARYAWGRDYHRVLETRLKALAQWLVTLDPRAQSRWAVDSSPVQDKAWAQEAGLGWIGKNGNLITRQYGSWVFLGELFTTLELLPDRPHTSHCGTCTRCLEACPTGAIPEPFVVDANRCIAYHTIENRAETLPPAIVENLQGWVAGCDICQDVCPWNQRFAQPTDIEDFRPRSGVVAPRLDQLAQLSDDAWDQAFRGSALRRIKPAMWRRNARASLKLDPNVSLQASSLSPPRSADSPPDRPIDPSMDPQLDSESHP

SEQ ID NO: 77885 - protein, 308 aa, Lishizhenia tianjinensis
  misc_feature (1)..(308): tr|A0A1I7B424|A0A1I7B424_9FLAO Epoxyqueuosine reductase OS=Lishizhenia tianjinensis OX=477690 GN=queG PE=3 SV= 1
MSKEKHTRLIKEKARELGFFFCGISKADFLEEEAPRLEKWLNNQRHGKMNYMENHFDKRLDPRLLVDGAKSVVSLLLNYYPSEKQAENTYKISKYAYGQDYHHIIKDKLKEFFQYLQDEIGEVGGRVFVDSAPVMDKAWAKKSGLGWIGKNSNLINTKAGSFFFIAELILDLELQEDGPIKDFCGTCTRCIDACPTEAIVAPYVVDGSKCISYLTIELKDEILPSEFKGKMDDWMFGCDVCQDVCPWNRFSKPHNTKAFDPHENLLKMNKADWEDLTEEVYRELFKKSAVKRTKFNGVQRNVSFLKSS

SEQ ID NO: 77886 - protein, 408 aa, Listeria aquatica
  misc_feature (1)..(408): tr|W7BJ94|W7BJ94_9LIST YhbA protein OS=Listeria aquatic a FSL S10-1188 OX=1265818 GN=MAQA_06753 PE=4 SV=1
MNLEQLKVDIQAYATEIGIQKIGFTTADPFLFLKERLEIAEKEDVLTGFEHPVLEERVYPDRIFTEPKSIIAIALSYPSKLKASPVSRKESRRGVFARASWGIDYHTILREKLALLETFIKKRVPEAVMKSMVDTGELSDVAVAERAGIGARGKNTLLLTKEYGSWVYLGEMITNLAFPSDKPIGDLCGDCNQCIKACPTGSLLGEGKMNPKICLSYLTQTKGFLEDEYREVLHNRLYGCDTCQVVCPYNRGKDFHLHEAMEPDPELVRPELKPLLKISNREFKEKFGNMAGSWRGKKPIQRNAIIVLARYKDKTAVEPLIDCLKNDPRPVIRGTSAWALAKIGGKEAEQAIFEALTVEQDQEALLELEKAKKNHRNKVKKNYAKSCCTLSTRNPCKHREHFTDVCRN

SEQ ID NO: 77887 - protein, 376 aa, Listeria booriae
  misc_feature (1)..(376): tr|A0A099W8I1|A0A099W8I1_9LIST Epoxyqueuosine reductase OS=Listeria booriae OX=1552123 GN=queG PE=3 SV=1
MDMKQLKQDIIQYANEIGIQKIGFASADPFLELKARLEVAVKEDVLTGFEHPNIDERVYPDLIFDEPRSIIAIALAYPSKMKEEPVSRREARRGVFSRASWGTDYHTVLREKLAKLETFITELVPEARFKSMVDTGELSDVAVAERAGLGWRGKNTLLISPEFGSFIYLGEMVTNLPLAPDKPMGDLCGDCNKCVEACPTGSLLGEGKMNPKICLSYLSQTKGFLDEKYRDVLHNRLYGCDTCQVVCPYNRGHDFHFHEAMEPDPELVKPELKPLLSISNKEFKAKFGPMAGSWRGKKPIQRNAIIVLARYKDKTAVPELIRCMTEDTRPVIRGTAAWALGKIGGEEAKEALQVAHDEDNEVLAEITRAKNLIGIR

SEQ ID NO: 77888 - protein, 374 aa, Listeria cornellensis
  misc_feature (1)..(374): tr|W7BWZ7|W7BWZ7_9LIST YhbA protein OS=Listeria cornell ensis FSL F6-0969 OX=1265820 GN=PCORN_05673 PE=4 SV=1
MNELKQDIIEYADEIGIQKIGFASADPFLELKTRLDVAAKEDVLTGFEHPNIDERVYPDLIFKEPRSIIAIALAYPSKMKNGPVSRKEARRGVFSRASWGTDYHTVLREKLTLLEAFIVERVPEARFKSMVDTGEFSDVAVAERAGLGSRSKNTLLITPEFGSFVYLGETLTNLPLAPDKPMGDLCGDCNKCVEACPTGSLLGEGKMNPKICLSYLSQTKGFLDEKYRDVLHNRLYGCDTCQVVCPYNRGHDFHFHEAMEPDPELVKPELKPLLSISNKEFKEKFGPMAGSWRGKKPIQRNAIIVLARYKDKTAVPELIRCMTEDPRPVIRGTAAWALGKIGGADAEQALMQAHDDDAEVLAEMTRAKNLIGVR

SEQ ID NO: 77889 - protein, 378 aa, Listeria fleischmannii
  misc_feature (1)..(378): tr|A0A0J8GCX3|A0A0J8GCX3_9LIST YhbA protein OS=Listeria fleischmannii 1991 OX=1430899 GN=X560_1880 PE=4 SV=1
MDVKKLKAEIIQYATEIGVQKIGFTTADPFLFLKERLEVAEKEGVLTGFEHPVLDERVYPDLIFEEPKSIIAIALAYPSKLKESPTSKRESRRGVFARASWGIDYHTILREKLALIEAFILERVKDAKMKSMVDTGELSDVAVAERAGIGARGKNTLLITKEFGSWVYLGEMLTNIAFPPDTPETDLCGDCNKCVEACPTNSLLGEGAMNPKICLSYLTQTKGFLEEEYREVLHNRLYGCDTCQVVCPYNRGRDFHLHKEMEQDGNLVRPELKPLLHISNREFKEKFGSMAGSWRGKKPIQRNAIIILARYKDKTAIPDLIGCLNHDTRPVIRGTAAWALAKIGGKDAEVAILNAWEKEKDEEVKIEIERAKKIIGVG

SEQ ID NO: 77890 - protein, 378 aa, Listeria fleischmannii; identical to SEQ ID NO: 77889
  misc_feature (1)..(378): tr|A0A2X3GR88|A0A2X3GR88_9LIST Epoxyqueuosine reductase OS=Listeria fleischmannii subsp. fleischmannii OX=1671 902 GN=queG PE=4 SV=1

SEQ ID NO: 77891 - protein, 378 aa, Listeria floridensis
  misc_feature (1)..(378): tr|W7BTI5|W7BTI5_9LIST YhbA protein OS=Listeria floride nsis FSL S10-1187 OX=1265817 GN=MFLO_12621 PE=4 SV=1
MNLEELKQEIIDYAAQVGIQKIGFTTADPFLFLKERLLIAEKEGILTGFEHPVIDERVYPDQIFHEPRSIIAIALSYPSKLKEPPVSKRGSRRGVFARASWGTDYHTILREKLVLLEKFITERVPDAKMKSMVDTGELSDVAVAERSGIGARGKNTLLLTEDYGSFVYLGEMITNLAFPPDKPIGDLCGDCNQCVKACPTGSLLGEGKMNPKICLSYLTQTKGFLEEEYREVLHNRLYGCDTCQVVCPYNRGKDFHLHPEMEPDPELVRPELKPLLTISNRDFKEKFGDMAGSWRGKKPIQRNAIIVLARYKDKTAVSLLIDCLTNDPRPVIRGTSAWALAKIGGEAAEQALNEALQTETDLEVLAELDHAKNIIETR

SEQ ID NO: 77892 - protein, 379 aa, Listeria grandensis
  misc_feature (1)..(379): tr|W7B959|W7B959_9LIST YhbA protein OS=Listeria granden sis FSL F6-0971 OX=1265819 GN=PGRAN_07014 PE=4 SV=1
MQNIDMNDLKQDIIAYADEIGIQKIGFASADPFLELKARLEVAAKEDVLTGFEHPNIDERVYPDLIFKEPRSIIAIALAYPSKMKNEPVSRKEARRGIFSRASWGTDYHTVLREKLTLLEAFIAERVPDARFKSMVDTGEFSDVAVAERAGIGWRGKNTLLISPEFGSFIYLGEMLTNLPLASDKPMGDLCGDCNKCVEACPTGSLLGEGKMNPKICLSYLSQTKGFLDEKYRDVLHNRLYGCDTCQSVCPYNRGHDFHFHEAMEPDPELVKPELKPLLSISNKEFKQKFGPMAGSWRGKKPIQRNAIIVLARYKDKTAVPELIRCMTEDPRPVIRGTAAWALGKIGGEEAEQALLRAEEQDTEVLAEITRAKNLIGAR

SEQ ID NO: 77893 - protein, 384 aa, Listeria grayi
  misc_feature (1)..(384): tr|A0A448QEC6|A0A448QEC6_LISGR Epoxyqueuosine reductase OS=Listeria grayi OX=1641 GN=queG PE=3 SV=1
MTTQTPIDYEQLKQEIIAYSKTIGIQKIGFTTAEPFLFLKKRLEKAKEEDVLTGFEHPNIDERVYPELIFEAPQSIIAIALAYPSKLKESPVSKREARRGVFARASWGTDYHTILREKLALLEAFIQEKVPEAKFKSMVDTGELSDVAVAERAGIGWRGKNTLLITPEYGSFVYLGEMITNLAFPADQPMEDLCGSCNQCVKACPTGSLLGEGRMNPKICLSYLTQTKDMLPEEYREKIHNRLYGCDTCQVVCPFNRGHDFHLHEEMEPDPELVRPELKPLLSLSNKEFKEKFGKMAGSWRGKKPLQRNALLILARYKDQTAIPDIIQCLEKDPRPVIRGTAAWSLAKIGGKEAKTAVYRANQVEENEEVQAEIKRAIQIIETR

SEQ ID NO: 77894 - protein, 384 aa, Listeria grayi
  misc_feature (1)..(384): tr|D7V0S6|D7V0S6_LISGR Epoxyqueuosine reductase OS=List eria grayi DSM 20601 OX=525367 GN=queG PE=3 SV=1
MTTQTPIDYEQLKQEIIAYSKTIGIQKIGFTTAEPFLFLKKRLEKAKEEDVLTGFEHPNIDERVYPELIFEAPQSIIAIALAYPSKLKESPVSKREARRGVFARASWGTDYHTILREKLALLEAFIQEKVPEAKFKSMVDTGELSDVAVAERAGIGWRGKNTLLITPEYGSFVYLGEMITNLAFPADQPMEDLCGSCNQCVKACPTGSLLGEGKMNPKICLSYLTQTKDMLPEEYREIIHNRLYGCDTCQVVCPFNRGHDFHLHEEMEPDPELVRPELKPLLSLSNKEFKEKFGKMAGSWRGKKPLQRNALLILARYKDQTAVPDIIQCLEKDPRPVIRGTAAWSLAKIGGKEAKIAIYRANQVEENEEVQAEIKRAIQIIETR

SEQ ID NO: 77895 - protein, 379 aa, Listeria innocua
  misc_feature (1)..(379): tr|A0A473HFK8|A0A473HFK8_LISIO Epoxyqueuosine reductase OS=Listeria innocua OX=1642 GN=queG PE=3 SV=1
MIVKPESNYAALKEELIAYAHEIGIQKIGFTTADPFLFLKERLLEAEALDLFTGFEHPVIDERVYPELIFKEPQSIIAIALAYPSKLKEAPTSKKEARRGVFARASWGIDYHTVLREKLALLEQFLSERLPDVRMKSMVDTGELSDVAVAERAGIGWRGKNTLLITPEFGSWVYLGEMITNIPFEPDTPASDLCGSCNQCVKACPTGSLLGEGKMNPKICLSYLTQTKDFLDEKYREVLHNRLYGCDTCQVVCPYNRGHDFHFHEEMEPDPELVRPELKPLLHISNRAFKEQFGDMAGSWRGKKPIQRNAIIILARYKDKTAVPDLIDCLENDPRPVIRGTAGWALRKIGGEQAEEAVQKALQNEQDEQVLQELTAIPN

SEQ ID NO: 77896 - protein, 380 aa, Listeria innocua
  misc_feature (1)..(380): tr|Q92D84|Q92D84_LISIN Epoxyqueuosine reductase OS=List eria innocua serovar 6a (strain ATCC BAA-680 / CLIP 112 62) OX=272626 GN=queG PE=3 SV=1
MMIVKPESNYAALKEELIAYAHEIGIQKIGFTTADPFLFLKERLLEAEALDLFTGFEHPVIDERVYPELIFKEPQSIIAIALAYPSKLKEAPTSKKEARRGVFARASWGIDYHTVLREKLALLEQFLSERLPDVRMKSMVDTGELSDVAVAERAGIGWRGKNTLLITPEFGSWVYLGEMITNIPFEPDTPASDLCGSCNQCVKACPTGSLLGEGKMNPKICLSYLTQTKDFLDEKYREVLHNRLYGCDTCQVVCPYNRGHDFHFHEEMEPDPELVRPELKPLLHISNRAFKEQFGDMAGSWRGKKPIQRNAIIILARYKDKTAVPDLIDCLENDPRPVIRGTAGWALRKIGGEQAEEAVQKALQNEQDEQVLQELTAIPN

SEQ ID NO: 77897 - protein, 377 aa, Listeria ivanovii
  misc_feature (1)..(377): tr|G2ZDT8|G2ZDT8_LISIP Putative YhbA protein OS=Listeri a ivanovii (strain ATCC BAA-678 / PAM 55) OX=881621 GN= LIV_0877 PE=4 SV=1
MDTEPNYSKLKKELIAYAHEIGIQKIGFTTADPFLFLKERLLESEALDLFTGFEHPIIDERVYPELIFQEPQSIIAIALAYPSKLKEAPISKKEGRRGVFARASWGIDYHTILREKLALLETFLAERLPDVRMKSMVDTGELSDVAVAERAGIGWRGKNTLLITPEYGSWVYLGEMITNIPFEPDQPASDLCASCNQCVKACPTGSLLGEGKMNPKICLSYLTQTKDFLDEKYREVLHNRLYGCDTCQVVCPYNRGHDFHFHEEMEPNPELVRPELKPLLKISNRAFKEQFGDMAGSWRGKKPIQRNAIIILARYKDKTAVPDLIECLQNDPRPVIRGTAGWALRKIGGDEAEKAIEKALQIEQDEQVLQELAAMPN

SEQ ID NO: 77898 - protein, 377 aa, Listeria ivanovii
  misc_feature (1)..(377): tr|A0A097BBY5|A0A097BBY5_LISIV Iron-sulfur cluster-bind ing protein OS=Listeria ivanovii subsp. londoniensis OX =202752 GN=JL58_04900 PE=4 SV=1
MDTEPNYSKLKKEFIAYAYEIGIQKIGFTTADPFLFLKERLLESEALDLFTGFEHPVIDERVYPELIFQEPQSIIAIALAYPSKLKEAPVSKKEGRRGVFARASWGIDYHTILREKLALLETFLAERLPDVRMKSMVDTGELSDVAVAERAGIGWRGKNTLLITPEYGSWVYLGEMITNIPFEPDQPASDLCASCNQCVKACPTSSLLGEGKMNPKICLSYLTQTKDFLDEKYREVLHNRLYGCDTCQVVCPYNRGHDFHFHEEMEPNPELVRPELKPLLKISNRAFKEQFGDMAGSWRGKKPIQRNAIIILARYKDKTAIPDLIECLQNDPRPVIRGTAGWALRKIGGDEAEKAIEEALQIEQDAQVLQELTAIPN

SEQ ID NO: 77899 - protein, 378 aa, Listeria kieliensis
  misc_feature (1)..(378): tr|A0A3D8TTP9|A0A3D8TTP9_9LIST Iron-sulfur cluster-bind ing protein OS=Listeria kieliensis OX=1621700 GN=UR08_0 1385 PE=4 SV=1
MDLEQLKADIQAYATEIGIQKIGFTTADPFLFLKERLEIAEKEDVLTGFEHPVLEERVYPDRIFNEPKSIIAIALSYPSKLKMSPVSRKEARRGVFARASWGIDYHTILREKLALLEAFIKERVPDAVMKSMVDTGELSDVAVAERAGIGARGKNTLLITKEYGSWVYLGEMITNLAFPPDEPIGDLCGDCNQCVKACPTGSLLGEGKMNPKICLSYLTQTKDFLEEEYREVLHNRLYGCDTCQVVCPYNRGKDFHFHEAMEPDPELVRPELKPLLKISNREFKEKFGDMAGSWRGKKPIQRNAIIVLARYKDKTAIEPLIDCLTNDPRPVIRGTSAWALAKIGGEKAEQAIHKALTVEEEEEVLMELENAKKIIETK

SEQ ID NO: 77900 - protein, 379 aa, Listeria monocytogenes
  misc_feature (1)..(379): tr|A0A5D5DT26|A0A5D5DT26_LISMN Epoxyqueuosine reductase OS=Listeria monocytogenes OX=1639 GN=queG PE=3 SV=1
MIVKSTSNYAALKEELIAYAHEIGIQKIGFTTADPFLFLKERLLEAEALDLFTGFEHPVIDERVYPELIFKEPQSIIAIALAYPSKLKEAPVSKKGARRGVFARASWGIDYHTVLREKLALLETFLSERLPDVRMKSMVDTGELSDVAVAERAGIGWRGKNTLLITPEYGSWVYLGEMITNIPFEPDTPASDLCGSCNQCVKACPTGSLLGEGKMNPKICLSYLTQTKDFLDEKYREVLHNRLYGCDTCQVVCPYNRGHDFHFHDEMEPDPELVRPELKPLLHISNRAFKEQFGDMAGSWRGKKPIQRNAIIILARYKDKTTVPDLIDCLQNDPRPVIRGTAGWALRKIGGSDAEKAVEQALQTEQDEQVLQELTAIPN

SEQ ID NO: 77901 - protein, 379 aa, Listeria monocytogenes
  misc_feature (1)..(379): sp|Q8Y8H0|QUEG_LISMO Epoxyqueuosine reductase OS=Lister ia monocytogenes serovar 1/2a (strain ATCC BAA-679 / EG D-e) OX=169963 GN=queG PE=3 SV=1
MVVKQKADYAALKEELIAYAYEIGIQKIGFTTADPFLFLKERLLEAEALDLFTGFEHPVIEERVYPELIFKEPQSIIAIALAYPSKLKEAPVSKKGARRGVFARASWGIDYHTVLREKLALLETFLIERLPDVRMKSMVDTGELSDVAVAERAGIGWRGKNTLLITPEYGSWVYLGEMITNIPFEPDTPASDLCGSCNQCVKACPTGSLLGEGKMNPKICLSYLTQTKDFLDEKYREVLHNRLYGCDTCQVVCPYNRGHDFHFHEEMEPDPELVRPELKPLLHISNRAFKEQFGDMAGSWRGKKPIQRNAIIILARYKDKTAVPDLIDCLQNDPRPVIRGTAGWALRKIGGRDAEEAVERALQTEQDVQVLQELTAIPN

SEQ ID NO: 77902 - protein, 374 aa, Listeria riparia
  misc_feature (1)..(374): tr|W7D5T2|W7D5T2_9LIST Epoxyqueuosine reductase OS=List eria riparia FSL S10-1204 OX=1265816 GN=queG PE=3 SV=1
MKQLKQDIIQYANEIGIQKIGFASADPFLELKARLEVAVKEDVLTGFEHPNIDERVYPDLIFDAPRSIIAIALAYPSKMKEEPVSRKEARRGVFSRASWGTDYHTVLREKLAKLETFITELVPEARFKSMVDTGELSDVAVAERAGLGWRGKNTLLISPEFGSFIYLGEMVTNLPLAPDKPMGDLCGDCNKCVEACPTGSLLGEGKMNPKICLSYLSQTKGFLDEKYRDVLHNRLYGCDTCQVVCPYNRGHDFHFHEAMEPDPELVKPELKPLLSISNKEFKAKFGPMAGSWRGKKPIQRNAIIVLARYKDKTAVPELIRCMTEDTRPVIRGTAAWALGKIGGEEAKEALQKAHDEDKEVLAEIMRAKNLIGIR

SEQ ID NO: 77903 - protein, 379 aa, Listeria rocourtiae
  misc_feature (1)..(379): tr|A0A4R6ZSM7|A0A4R6ZSM7_9LIST Epoxyqueuosine reductase OS=Listeria rocourtiae OX=647910 GN=DFP96_101388 PE=4 SV=1
MRNIGMNELKQDIIDYAAEIGIQKIGFASADPFLELKTRLEAAVKEAVLTGFEHPNIDERVYPERIFNEPRSIIAIALAYPSKMKNEPVSKKEARRGVFSRASWGTDYHTVLREKLALLEAFIEKRVPEARFKSMVDTGELSDVAVAERAGLGWRGKNTLLITPEFGSFVYLGETLTNLPLVPDKPMGDLCGDCNKCVEACPTGSLLGEGKMNPKICLSYLSQTKGFLDEKYRAVLHNRLYGCDTCQVVCPYNRGHDFHFHEAMEPNPELVKPELKPLLSISNKEFKEQFGPMAGSWRGKKPIQRNAIIVLARYKDKTAVPELIRCMKEDPRPVIRGTAAWALGKIGGREAELALREAYDDDAEVLTEITRAKNLIGVR

SEQ ID NO: 77904 - protein, 377 aa, Listeria seeligeri
  misc_feature (1)..(377): tr|A0A5B8A8R3|A0A5B8A8R3_LISSE Epoxyqueuosine reductase OS=Listeria seeligeri OX=1640 GN=queG PE=3 SV=1
MTTKTDYTILKKELIAYAHEIGIQKIGFTTADPFLFLKERLLKAEALDLFTGFEHPVIDERVYPELIFKEPQSIIAIALAYPSKLKEAPISKKKGRRGVFARASWGIDYHTILREKLALLETFLAERLPEVRMKSMVDTGELSDVAVAERAGIGWRGKNTLLITPEYGSWVYLGEMITNIPFEPDQPASDLCGSCNQCVKACPTGSLLGEGKMNPKICLSYLTQTKDFLDEKYREVLHNRLYGCDTCQVVCPYNRGHDFHFHEEMEPDPELVRPQLKPLLKISNRAFKEQFGDMAGSWRGKKPIQRNAIIILARYKDKTAIPDLIDCLQNDPRPVIRGTAGWALLKIGGTEAEQAVQKALQTEEDEQVRKELTAIPN

SEQ ID NO: 77905 - protein, 377 aa, Listeria seeligeri
  misc_feature (1)..(377): tr|E3ZNR3|E3ZNR3_LISSE Putative iron-sulfur cluster-bin ding protein OS=Listeria seeligeri FSL N1-067 OX=702453 GN=NT03LS_1091 PE=4 SV=1
MTTKTDYTILKKELIAYAHEIGIQKIGFTTADPFLFLKERLLKAEALDLFTGFEHPVIDERVYPELIFKEPLSIIAIALAYPSKLKEAPISKKEGRRGVFARASWGIDYHTILREKLALLETFLAERLPEVRMKSMVDTGELSDVAVAERAGIGWRGKNTLLITPEYGSWVYLGEMITNIPFEPDQPASDLCGSCNQCVKACPTGSMLGEGKMNPKICLSYLTQTKDFLDEKYREVLHNRLYGCDTCQVVCPYNRGHDFHFHEEMEPNPELVRPQLKPLLKISNRAFKEQFGDMAGSWRGKKPIQRNAIIILARYKDKTAIPDLIDCLQNDPRPVIRGTAGWALLKIGGTEAEQAVNEALQTEEDEQVRKELTAIPN

SEQ ID NO: 77906 - protein, 374 aa, Listeria sp.
  misc_feature (1)..(374): tr|A0A3N9TRV4|A0A3N9TRV4_9LIST tRNA epoxyqueuosine(34) reductase QueG OS=Listeria sp. SHR_NRA_18 OX=2269046 GN =queG PE=4 SV=1
MNGLKQDIIEYADEIGIQKIGFASADPFLELKTRLEVAAKEDVLTGFEHPNIDERVYPDLIFKEPRSIIAIALAYPSKMKNEPVSRKEARRGVFSRASWGTDYHTVLREKLMLLETFITERVPEARFKSMVDTGEFSDVAVAERAGLGSRAKNTLLITPEFGSFVYLGETLTNLPLAPDKPMGDLCGDCNKCVEACPTGSLLGEGKMNPKICLSYLSQTKGFLDEKYREVLHNRLYGCDTCQVVCPYNRGHDFHFHEAMEPNPELVKPELKPLLSISNKEFKEKFGPMAGSWRGKKPIQRNAIIVLARYKDKTAVPELIRCMTEDPRPVIRGTAAWALGKIGGADAEQALMQAHDDDAEVVAEMTRAKNLIGVR

SEQ ID NO: 77907 - protein, 374 aa, Listeria weihenstephanensis
  misc_feature (1)..(374): tr|A0A1S7FYL5|A0A1S7FYL5_9LIST Iron-sulfur cluster-bind ing protein OS=Listeria weihenstephanensis OX=1006155 G N=UE46_06195 PE=4 SV=1
MNELKQEIIRYAREIDIQEIGFASADPFLELKTRLEVAAKEDVLTGFEHPNIDERVYPELIFKEPRSIIAIALAYPSKMKNEPVSRKEARRGLFSRASWGTDYHTVLREKLDLLEAFIRERVPEARFKSMVDTGEFSDVAVAERAGIGWRGKNTLLISPEFGSFTYLGETLTNLPIAPDKPMGDLCGDCNKCVEACPTGSLLGEGKMNPKICLSYLSQTKGFLDEKYRDVLHNRLYGCDTCQVVCPYNRGHDFHFHEAMEPDPELVKPELKPLLSISNKEFKEKFGPMAGSWRGKKPIQRNAIIVLARYKDKTAVPELIRCMTEDPRPVIRGTAAWALGKIGGADAEQALLEVQEDDVEVLAEITRAKNLIGVR

SEQ ID NO: 77908 - protein, 379 aa, Listeria weihenstephanensis
  misc_feature (1)..(379): tr|W7CH29|W7CH29_9LIST YhbA protein OS=Listeria weihens tephanensis FSL R9-0317 OX=1265845 GN=PWEIH_14329 PE=4 SV=1
MQNIDMNELKQEIIRYAREIDIQEIGFASADPFLELKTRLEVAAKEDVLTGFEHPNIDERVYPELIFKEPRSIIAIALAYPSKMKNEPVSRKEARRGLFSRASWGTDYHTVLREKLDLLEAFIRERVPEARFKSMVDTGEFSDVAVAERAGIGWRGKNTLLISPEFGSFTYLGETLTNLPIAPDKPMGDLCGDCNKCVEACPTGSLLGEGKMNPKICLSYLSQTKGFLDEKYRDVLHNRLYGCDTCQVVCPYNRGHDFHFHEAMEPDPELVKPELKPLLSISNKEFKEKFGPMAGSWRGKKPIQRNAIIVLARYKDKTAVPELIRCMTEDPRPVIRGTAAWALGKIGGADAEQALLEVQEDDVEVLAEITRAKNLIGVR

SEQ ID NO: 77909 - protein, 377 aa, Listeria welshimeri
  misc_feature (1)..(377): tr|A0AH49|A0AH49_LISW6 Epoxyqueuosine reductase OS=List eria welshimeri serovar 6b (strain ATCC 35897 / DSM 206 50 / SLCC5334) OX=386043 GN=queG PE=3 SV=1
MKPEPNYTLLKKELIAYAHEIGIQKIGFTTADPFLFLKERLLEAEALDLFTGFEHPIINERVYPELIFKEPQSIIAIALAYPSKLKEAPVSKKGARRGVFARASWGIDYHTILREKLALLETFLSERLPGVRMKSMVDTGELSDVAVAERAGIGWRGKNTLLITPEYGSWLYLGEMITNIPFEPDTPASDLCGSCNQCVKACPTGSLLGEGKMNPKICLSYLTQTKDFLDEKYREVLHNRLYGCDTCQVVCPYNRGHDFHFHEEMEPNPELVRPELKPLLRISNRAFKEQFGDMAGSWRGKKPIQRNAIIILARYKDKTAVPDLIDCLQNDPRPVIRGTAGWALRKIGGEAAEEAVREALQTEQDEQVLQELTAIPN

SEQ ID NO: 77910 - protein, 376 aa, Listeriaceae bacterium
  misc_feature (1)..(376): tr|A0A099W4W0|A0A099W4W0_9LIST Iron-sulfur cluster-bind ing protein OS=Listeriaceae bacterium FSL A5-0209 OX=14 97679 GN=EP56_12670 PE=4 SV=1
MDMNGLKQDIIEYADEIGIQKIGFASADPFLELKTRLEVAAKEDVLTGFEHPNIDERVYPDLIFKEPRSIIAIALAYPSKMKNEPVSRKEARRGVFSRASWGTDYHTVLREKLMLLETFITERVPEARFKSMVDTGEFSDVAVAERAGLGSRAKNTLLITPEFGSFVYLGETLTNLPLAPDKPMGDLCGDCNKCVEACPTGSLLGEGKMNPKICLSYLSQTKGFLDEKYREVLHNRLYGCDTCQVVCPYNRGHDFHFHEAMEPNPELVKPELKPLLSISNKEFKEKFGPMAGSWRGKKPIQRNAIIVLARYKDKTAVPELIRCMTEDPRPVIRGTAAWALGKIGGADAEQALMQAHDDDAEVVAEMTRAKNLIGVR

SEQ ID NO: 77911 - protein, 342 aa, Litoreibacter albidus
  misc_feature (1)..(342): tr|A0A1H2WJS8|A0A1H2WJS8_9RHOB Epoxyqueuosine reductase OS=Litoreibacter albidus OX=670155 GN=queG PE=3 SV=1
MSLKDKLQAQALAEGFAKMGVCRPDAIPQAPERLKAYVDDGRHGQMGWMAERMTWRANPAALWPEARSVIMLAEVYTPDQDPLEILTHRDSAAISVYAQNKDYHDLVKKRLKRVGRWLIEQAEDVEIKVFVDTAPVMEKPLAAAAGLGWQGKHTNLLSRDLGNWFFLGAIFTTLELDPDIAQTDNCGSCTACLDICPTSAFPAPFQLDARRCISYLTIEHKGPVAEDLRERMGNHIYGCDDCLAVCPWNKFAQDATEMRYAARDELRAPKLADLAGLDDAEFRLKFSGSPIKRIGRDRFIRNVLYAIGNSGNPALVAHAQQHLNDPDVAVADAARWAVERLS

SEQ ID NO: 77912 - protein, 342 aa, Litoreibacter arenae
  misc_feature (1)..(342): tr|S9QCN4|S9QCN4_9RHOB Epoxyqueuosine reductase OS=Lito reibacter arenae DSM 19593 OX=1123360 GN=queG PE=3 SV=1
MTLKDQLRDKALAEGFSKMGVCRPDAIPAAPDRLVDYVDAGRHGQMGWMAERMNWRGNPAALWPEARSVIMLAEVYTPDHDPLETLTLRDRAAISVYAQNRDYHDIVKKRLKRVGRWLIEQAEAVEIKVFVDTAPVMEKPLAQAAGLGWQGKHTNVLSRDLGNWFFLGAIFTTLELDPDTAQTDNCGTCRACLDICPTQAFPAPFQLDARRCISYLTIEHKGPIDEELRGKMGNRIYGCDDCLAVCPWNKFAQEATELRYEARDDLRAPELAELAALDDAAFRAKFSGSPIKRIGRDRFIRNVLYAIGNSGQPELASAARTHLNDPDPAVSDAARWAVERLT

SEQ ID NO: 77913 - protein, 324 aa, Litoreibacter ascidiaceicola
  misc_feature (1)..(324): tr|A0A1M5BYR3|A0A1M5BYR3_9RHOB Epoxyqueuosine reductase OS=Litoreibacter ascidiaceicola OX=1486859 GN=SAMN0544 4273_106201 PE=4 SV=1
MGICTPDAIPQAPDRLSSYVDEGRHGQMGWMAERMTWRGDPSALWPEARSVIMLAEVYSPDHDPLETLKLRDRAAVSVYAQNRDYHDIVKKRLKRVGRWLIDQAEGVEIKVFVDTAPVMEKPLAQAAGLGWQGKHTNVLSRDLGNWFFIGAIFTTVELEPDQAQTDNCGTCRACLDICPTDAFPAAFQLDARRCISYLTIEHKGPIDEELRGKLGNRIYGCDDCLAVCPWNKFAKDATELRYAARDDLRAPALSELVALDDAAFRAKFSGSPIKRIGRDRFIRNVLYAIGNSENAELVNSARAHIHDSDPTIADAARWAVKRLS

SEQ ID NO: 77914 - protein, 342 aa, Litoreibacter halocynthiae
  misc_feature (1)..(342): tr|A0A4R7LDM6|A0A4R7LDM6_9RHOB Epoxyqueuosine reductase OS=Litoreibacter halocynthiae OX=1242689 GN=queG PE=3 SV=1
MSLKDRLKQQALAEGFAKMGICTPDAIPQAPDRLNTYVDEGRHGQMGWMAERMTWRGNPSALWPEARSVIMLAEVYSPDHDPLETLKLRDRAAVSVYAQNRDYHDIVKKRLKRVGRWLIDQAEGVEIKVFVDTAPVMEKPLAQAAGLGWQGKHTNVLSRDLGNWFFLGAIFTTVELEPDQAQTDNCGTCRACLDICPTDAFPAAFQLDARRCISYLTIEHKGPVDEELRSRLGNRIYGCDDCLAVCPWNKFAKDATELRYAARDDLRAPALSELVALDDAAFRAKFSGSPIKRIGRDRFIRNVLYAIGNSEDAKLVNSALAHIHDSDPTIADAARWAVNRLS

SEQ ID NO: 77915 - protein, 342 aa, Litoreibacter janthinus
  misc_feature (1)..(342): tr|A0A1I6G0R7|A0A1I6G0R7_9RHOB Epoxyqueuosine reductase OS=Litoreibacter janthinus OX=670154 GN=queG PE=3 SV=1
MSLKDRLRSQALAEGFSKMGVCKPDAIPEAPERLAAFVEKGLHGQMAWMSERMTWRGNPSALWPEARSVIMLAEVYTPDHDPLESLKLRDRAAISVYAQNRDYHDMVKKRLKRVGRWLIDQAEGAEIKVFVDTAPVMEKPLAQAAGLGWQGKHTNLLARDLGNWFFLGAIFTTVEIDPDTAQTDNCGSCRACLDICPTSAFPAPFQLDARRCISYLTIEHKGPVDLELRSKLGNRIYGCDDCLAVCPWNKFAQDAQEVRYAARDDLRAPYLEELSQLTDTAFRERFSGSPIKRIGRDRFVRNVLYAIGNSQRPELIDAARNLSDDRDPTVADAARWAVERLI

SEQ ID NO: 77916 - protein, 324 aa, Litoreibacter meonggei
  misc_feature (1)..(324): tr|A0A497WLI1|A0A497WLI1_9RHOB Epoxyqueuosine reductase OS=Litoreibacter meonggei OX=1049199 GN=BCF46_2254 PE= 4 SV=1
MGICRPDAIPQASNRLNTYVDEGRHGQMGWMAERMAWRGSPEALWPEARSVIMLAEVYSPDHDPLETLKLRDRAVISVYAQNRDYHDIVKKRLKRVGRWLIDQAEGAEIKVFVDTAPVMEKPLAQAAGLGWQGKHTNILSRDLGNWFFLGAIFTTVELDPDTAQTENCGTCRACLDVCPTDAFPAPFQLDARRCISYLTIEHKGPIDEDLRGKLGNHIYGCDDCLAVCPWNKFAQNATELRYAARDDLRAPALAELVALNDVEFRAKFSGSPIKRIGRDRFIRNVLYAIGNSATPALIEAARAHTNDPDPTIADAARWAVERLT

SEQ ID NO: 77917 - protein, 343 aa, Litoreibacter ponti
  misc_feature (1)..(343): tr|A0A2T6BP26|A0A2T6BP26_9RHOB Epoxyqueuosine reductase OS=Litoreibacter ponti OX=1510457 GN=queG PE=3 SV=1
MSLKDRLRDVALAEGFSKMGVCRPDAIPLAGDRLKRFIDEGRHGEMSWMAERMAWRGDPQALWPEARSIIMLAEVYTPDHDPLDTLTLRDRAAISVYAQNRDYHDLVKKRLKRVGRWLLEQARGEKIKVFVDTAPVMEKPLAQAAGLGWQGKHTNLLARDLGNWFFLGAIFTTVKLDPDIPEDENCGSCRACLDICPTDAFPAPFQLDARRCISYLTIEHKGPVAPELRAKMGNRIYGCDDCLAVCPWNKFAQDATEIRYAAREDLRAPNLGELASLDDAGFRTKFSGSPIKRIGRDRFVRNVLYAIGNSQTPALAEAARRLTDDPDPTVAEAAQWAIERLAS

SEQ ID NO: 77918 - protein, 325 aa, Litoreibacter sp.
  misc_feature (1)..(325): tr|A0A5B8I8Y8|A0A5B8I8Y8_9RHOB tRNA epoxyqueuosine(34) reductase QueG OS=Litoreibacter sp. LN3S51 OX=2599296 G N=queG PE=4 SV=1
MGVCRPDAVPEIAERLRDFVAKGRHGQMQWMSERMNWRGDPSELWPEARSVIMLAEPYTPEHDPLEVLSHPDRAAISVYAQNRDYHDVVKKRLKRLGRWLLEQVDNEQIKVFVDTAPVMEKPLAAAAGLGWQGKHTNLLGRDLGSWFFLGSIFTTVELPVDEPARENCGSCRACLDVCPTDAFPAPFQLDARRCISYLTIEHKGPVDLDLREKLGNRIYGCDDCLGVCPWNKFAAESREVKYAAREDLTSPKLAELATLDDTEFRARFSGSPIKRIGRDRFVRNVLYAIGNSGEPSLRPIAQSLTSDPDETVADAARWAVTRLNG

SEQ ID NO: 77919 - protein, 363 aa, Litoricolaceae bacterium
  misc_feature (1)..(363): tr|A0A520S661|A0A520S661_9GAMM Epoxyqueuosine reductase OS=Litoricolaceae bacterium OX=2510333 GN=queG PE=3 SV =1
MGKSWHQSNEVLAKLEAKAHELGFTSLGITDTNVSEHVSFLDAWLESGFHGSMKWLEQHLDLRKDPTRLVEGTQRVISVRLDYLPENTNCIDILNDPDKAYISRYALGRDYHKLMRKRLKHLGDWLTEEIQPHGFRVFSDSAPILEKHLAEKAGLGWIGKHTLLLSRRAGSWFFLGELLTDCPLPLTQTTEQPRCGSCTACLDVCPTNAFPEPYQLDATKCISYLTIEHKGSIPEELRAPMGNRVFGCDDCQLFCPWNRYASIGDPAFAPRHALDDQSLIDLFQWSEEEFLLKTEGNPLRRAGYVKFLENIAIGLGNSASHIGKAIQILELKHGMHGAVLDEHIDWAVSRLRNQASESERGNA

SEQ ID NO: 77920 - protein, 381 aa, Litoricolaceae bacterium
  misc_feature (1)..(381): tr|A0A520SCP3|A0A520SCP3_9GAMM Epoxyqueuosine reductase OS=Litoricolaceae bacterium OX=2510333 GN=queG PE=3 SV =1
MDASWHQSDQVLDRLREKALELGFTAIGVTDPDVSQHVSFLEHWLESGFHGSMEWFERHLDLRKDPTQLVPGTQRVISVRLDYLPENIDCNDILNDPDMAYISRYALGRDYHKLMRKRLKHLGDWFSNEIAPHGFRVFSDSAPLLEKHLAEKAGLGWIGKHTLLLSRSAGSWFFLGELLTDFPLPVSDEHEEARCGSCTACLDICPTSAFPAPYQLDATKCISYLTIEHKGPIPEALRAPMGNRVFGCDDCQLVCPWNRYAAIGDPAFHPRHALDRQPLCELFGWTEAEFLMKTEGSPLRRAGYVKFLENLAIGLGNSHSDTERVIQTLGTKLGQHGPTLDEHILWAIAALQRRASENALGNASARQSNHAHQQAPDAGQI

SEQ ID NO: 77921 - protein, 441 aa, Litorilinea aerophila
  misc_feature (1)..(441): tr|A0A540VF78|A0A540VF78_9CHLR DUF1730 domain-containin g protein OS=Litorilinea aerophila OX=1204385 GN=FKZ61_ 12475 PE=4 SV=1
MPTDSLTQAIKREARRLGFDDCRALPVQTAPHADFFEAWLAAGRAGEMTYLERHQEKRRQPALLASPKTPPFQTMLVLTVNYYQFDLPPSLRDDPSRGIIASYAWGDDYHEIMRPLLYELDAFIRTQTGRASLGKALVDTGPVLERDWAQQAGVGFMGKNCCLIHPRDGSWLFLATLLIPERLTYDPPPQALPPHEPTAQAVMAGLPPDQVYGRWYLSPPETPERSVVATCGRCTRCLDACPTAAFVGPYHLDPQRCISYWTIEARGPIPRALRARFGNRIFGCDICQEVCPWNRRLSRQTPLLKGLEAHADRIAPPLLEGFAAETPYWLQPAAFAEHFRHSPILRAGRAGMLRNVCVALGNWGAVEAIPALGQALQDPEPLPRGHAAWALGRIAARHPHSQARSLLAAALETEADPWVQEEIHLALSTPSLADGLSPVLH

SEQ ID NO: 77922 - protein, 400 aa, Litorilituus sediminis
  misc_feature (1)..(400): tr|A0A4P6P694|A0A4P6P694_9GAMM Epoxyqueuosine reductase OS=Litorilituus sediminis OX=718192 GN=queG PE=3 SV=1
MTTTAINYQELAEKIKRWGQELGFSQVGISDIDLSAHEPAFLRWLEQGYHGNMDYMARHGLMRTRPDELVPGTLRVISVRLNYLPQNAQFSKILKDKNLAYISRYALGRDYHKLMRKRLQQLGQKIAQHCQSFNCRPFVDSAPVLERPLAEKAGLGWQGKHTLLLNKEAGSWFFLGELFVDIPLPVSQNDYAINASKHSDETVRSNDCGSCVACIKICPTKAIVEPYVVDARRCISYFTIESPEAIPVELRPLMGNRIYGCDDCQLICPWNKYAKLTELEDFQARENLDHVSLLSLFAWTEEYFLNKLQGSPIRRIGYQSWLRNIAVALGNAPYSEDIVTALNSKQDVANDMVKEHISWALEQQMIKRAAIAAEQQSQSANHRLTLRLIRSIEKGLPRDA

SEQ ID NO: 77923 - protein, 400 aa, Litorilituus sp.
  misc_feature (1)..(400): tr|A0A502KZF1|A0A502KZF1_9GAMM Epoxyqueuosine reductase OS=Litorilituus sp. RZ04 OX=2491017 GN=queG PE=3 SV=1
MTTSSINYLELAEKIKCWGKELGFSQLGITDIDLSSHEEALKRWLANGYHGNMDYMAKHGLMRARPAELVPGTTRVICVRLDYLPQDAQFAKTLKDKNAAYVSRYALGRDYHKLMRKRLQQLGKKISTHCEAFNCRPFVDSAPVLERPLAEKAGLGWVGKHTLLLNKEAGSWFFLGELFIDIPLPITQIDSDLDKESTNKKTAEKSGCGACVACIKICPTNAIVEPYVVDAKRCISYFTIESPDPIPVELRPLMGNRIYGCDDCQLICPWNKYAKLTPEQDFQARHQLDNVSLLTLFSWTEEDFLSKLEGSPIRRIGYDSWLRNIAVALGNAPYSQTIVNTLIEKKGAVNDLVAEHIDWALTQQEHKKGLEQAQIEKQQVNHRLTNRLIRSIEKGLTRDA

SEQ ID NO: 77924 - protein, 348 aa, Litorimicrobium taeanense
  misc_feature (1)..(348): tr|A0A1H9CB55|A0A1H9CB55_9RHOB Epoxyqueuosine reductase OS=Litorimicrobium taeanense OX=657014 GN=SAMN04488092 _103191 PE=4 SV=1
MSLKPRIVQQALAEGFDACRICRPWDVPDVPERLGQFLAAGRHGQMGWMAERVAWRGNPAALWPEARSVIMLAESYTPAHDPLAVLQQRDRGAISVYAQNRDYHDLVKKRLKRLARWLIAEAGGEVKVFVDTAPVPEKPLGQAAGLGWQGKHTNLVSRGLGSWFFLGSVFTTLELPEDTAEADHCGSCRNCLDICPTGAFPAPYQLDARRCISYLTIEHHGPVDESLRALMGNRIYGCDDCLAVCPWNKFAVEARELRYHAREALLAPRLAELAGLDDAGFRAFFSGSPIKRIGRDRFVRNVLYAIGNSGDPGLVVVAQGLIEDADATVVDAAKWAVERLQNTANGPE

SEQ ID NO: 77925 - protein, 352 aa, Litorimonas taeanensis
  misc_feature (1)..(352): tr|A0A420WDT1|A0A420WDT1_9RHOB Epoxyqueuosine reductase OS=Litorimonas taeanensis OX=568099 GN=DES40_1933 PE=4 SV=1
MVHRPTSSQHPHWHKRALKLGFTEPYILDLSQFGHMAGHRLNDFIEKKRHGSMTWMEETAQRRAHPQSLWPEAKSAIVFGMNYGPDIDPLLTLDLADRATISVYARGRDYHDVMKGRLKEIAGLIARDTQADVKIFVDTAPLMEKPIAEASGLGWQGKHTNLVSRNYGSWLFLGTILSAAELTPTPTEIDHCGSCRACLDICPTDAFPAPYQLDARLCISYLTIEHAGAIDEALRERMGNRIYGCDDCLAACPWNKFAVLGQETKLAAREDLMAPQLADLAQLGETEFRRKFAGSPIKRIGWLRFLRNVLYAIGNSGDARLTVSATPYLDHTDPVVREAAQWAANKLSYNVN

SEQ ID NO: 77926 - protein, 354 aa, Loktanella atrilutea
  misc_feature (1)..(354): tr|A0A1M4YVT2|A0A1M4YVT2_9RHOB Epoxyqueuosine reductase OS=Loktanella atrilutea OX=366533 GN=queG PE=3 SV=1
MGLKEDLSAFAVTSGFAKIGICRPDAVPEAAARLAAFVDAGRHGQMGWMAERMAWRGDPTALWPEARSVIMLAESYTPDVDPLAVLSLRDRAAISVYAQGRDYHDVVKKRLKAVGRWLIDRVPGAEIKVFVDTAPVMEKPLAQAAGLGWQGKHTNLLGRDLGNWIFLGAIFTTVDMEPDAASVGHCGSCTACLDICPTQAFPAPYQLDARRCISYLTIEHRGPVDAELRPLMGNRIYGCDDCLAVCPWNKFAVDGRDARLAARGDLRAPPLTELAGLDDTAFRTRFSGSPIKRIGRDRFVRNVCYAIGNSGNPALAEVLRPLTTDADPAVADAAIWALAHLQKDDPCAPQLSSP

SEQ ID NO: 77927 - protein, 354 aa, Loktanella fryxellensis
  misc_feature (1)..(354): tr|A0A1H8DP20|A0A1H8DP20_9RHOB Epoxyqueuosine reductase OS=Loktanella fryxellensis OX=245187 GN=queG PE=3 SV=1
MDLTADLRAFATQAGFAKVGICRPDAAPDTAGRLADFVAAGRHGQMGWMAERMAWRGDPTALWPEARSVIMLAESYAPDVDPLAVLEERDRAAISVYAQGRDYHDVVKARLKVVGRWLIDRVPGTEIKVFVDTAPVMEKPLAQAAGLGWQGKHTNLLGRDLGNWVFLGAIFTTALLDVDQPEVSHCGSCTACLDICPTQAFPAPYQLDARRCISYLTIEHRGPVDIALRPALGNRVYGCDDCLAVCPWNKFAVAGRDARLAARDDLRAPALDSLLGLDDAAFRARFSGSPIKRIGRDQFVRNVCYAAGNSGNRRLVAVLAPLTTDADPAVADAARWAIQRLTPVNPVEDNPWTA

SEQ ID NO: 77928 - protein, 358 aa, Loktanella salsilacus
  misc_feature (1)..(358): tr|A0A1I4F8F5|A0A1I4F8F5_9RHOB Epoxyqueuosine reductase OS=Loktanella salsilacus OX=195913 GN=queG PE=3 SV=1
MGLKADLCAFALEAGFAKVGVCRPGAVPETAERLAAFVDAGRHGQMGWMAERMAWRGDPTALWPQARSVIMLAENYAPDVDPLAVLAHRDRAAISVYAQGRDYHDVVKKRLKVVGRWLIDQVPGAEIKVFVDTAPVMEKPLAQAAGLGWQGKHTNLLARDLGNWVFLGAIFTTVDLEPDEAEVGHCGSCTACLDVCPTQAFPAPYQLDARRCISYLTIEHSGPVDPDLRAKMGNRIYGCDDCLAVCPWNKFAVQGRDARLAARDDLRAPPLAELAALDDAAFRLRFSGSPIKRIGRNRFVRNVCYAIGNSGNPALAQVLTPLMTDADATVADAASWALAQLGLEPPCDLPPLSPSSQQ

SEQ ID NO: 77929 - protein, 342 aa, Loktanella sp.
  misc_feature (1)..(342): tr|A0A0N8W3K2|A0A0N8W3K2_9RHOB Epoxyqueuosine reductase OS=Loktanella sp. 1ANDIMAR09 OX=1700845 GN=queG PE=3 S V=1
MKQRLIGFAQEAGFAAVGVCRPDAVPELPERLQAFVAAGMHGQMGWMAERMVWRADPTALWPAARSVIMLAEPYTPAHDPLAVLETRDRAAISVYAQNRDYHDVVKKRLKRVGRWLIEKVPEAEIKVFVDTAPVMEKPLAQAAGLGWQGKHTNLLSRDLGNWFFLGAIFTTVDLASDVAETSHCGSCTACLDICPTGAFPAPYRLDARRCISYLTIEHKGPVDAALRPLMGNRIYGCDDCLAVCPWNKFAHEGRDAKLAARDELISPPLADLAGLDDAGFRALFSGSPIKRIGRDRFVRNVAYAIGNSGDQTLIAAVSPLVDDLDAAVADAARWAISRLKED

SEQ ID NO: 77930 - protein, 348 aa, Loktanella sp.
  misc_feature (1)..(348): tr|A0A0F4RNQ3|A0A0F4RNQ3_9RHOB Epoxyqueuosine reductase OS=Loktanella sp. S4079 OX=579483 GN=queG PE=3 SV=1
MKDRLISYAQEAGFAKVGICRPDAVPEIAERLAAFVEAGMHGQMAWMADRMHWRGNPAALWPEAKSVIMLAEPYTPEHDPLEVLQYPDKAAISVYAQGRDYHDVVKKRLKRVGRWLIEQSPGTEIKVFVDTAPVMEKPLAQAAGLGWQGKHTNVLGRDLGSWFFLGAIFTTLELEPDTPEVSHCGSCTACLDVCPTSAFPAPYQLDARRCISYLTIEHKGPVDPVLRGMLGNRIYGCDDCLGVCPWNKFAKEGRDAKYAARADLVAPPLGELAALDDTSFRARFSGSPIKRIGRDRFVRNVAYAIGNSGDQNLIGAVARLVDDDDPTVADAARWALNQLSSEAPRRSE

SEQ ID NO: 77931 - protein, 322 aa, Longibacter salinarum
  misc_feature (1)..(322): tr|A0A2A8CXZ3|A0A2A8CXZ3_9BACT Epoxyqueuosine reductase OS=Longibacter salinarum OX=1850348 GN=queG PE=3 SV=1
MPGFDASAQLDLTLRLKAEARRLGFDDCGISSAEPLDEEARRLEQWLLEGRYATMEWMANHFDKRTDPTQLVEGAQSVISVLHNYYQPDPPEASDGRGKISRYAWGDDYHEVMKDKLYRLYQWLQEEVGTDVNGRAFVDSAPVMDKAWAARSGLGWQGKNTLLLNREMGSYFFLGELIVDVPLTPDAPVPDSCGSCTRCLDACPTDALYEPYALDASRCISYLTIEHRGFDVPDEIREELHNWIFGCDICQQVCPWNKFSRPTQEPRYEAREDVRDTDLHDWVEMNLDAFEKRFQGTPVTRAGYEGFQRNVRNAMAKLESTS

SEQ ID NO: 77932 - protein, 302 aa, Longilinea arvoryzae
  misc_feature (1)..(302): tr|A0A0S7BG05|A0A0S7BG05_9CHLR Protein containg 4Fe-4S double cluster binding domain OS=Longilinea arvoryzae O X=360412 GN=LARV_00381 PE=4 SV=1
MNEIVRHGDKAALFPIHHLQDLKRDVEGLKANAELNSFQQFIVNDLYHLDEPQDFGARSILIVASPQPSLLRLFFTLEGKRIQALLPASYADKNRSHLRVEDYLRACLAANGRHIQYAPRLPHKLSAVHSGLARYGRNNITFVEGFGSFLNLNTFFTDIACPEDPWREIRAMDACTHCQACQKACPTGAIIAERFLIDNQRCLTYFNEAGGEYEFPAWMDPGVHHTLYGCLRCQMICPQNQPYLAREGGTIEFDAAETAILMQGKPLECLPEGLRLKVDGLEMAEYLSGIPRNLRSLAAKTD

SEQ ID NO: 77933 - protein, 376 aa, Longilinea arvoryzae
  misc_feature (1)..(376): tr|A0A0S7BIV9|A0A0S7BIV9_9CHLR Epoxyqueuosine reductase OS=Longilinea arvoryzae OX=360412 GN=LARV_02159 PE=4 S V=1
MQIRNWIKAEAASLGFPFFGITDLTPPPHLDVFRDWIAAGRHAGMDYLGRGVSLDKRSDPRQILPGAKSIITLAMPYAPSLDSTVEQSQPAGRIASYAWGMDYHEVIPARLNDLAERISEHLGCPVARRAYTDTGPILERDLAQRAGLGWAGKNSCLIHPRRGSYFFLAELFLDIELEPDKPIAIDRCGSCRRCIDACPTGCICEDRTLDAGRCVSYLTIENKGPIPVDLRPRIGNRVFGCDICQQVCPWNRFAVDNEIDPTFQPRPGIPAPSLLPELQLDARAFNRKFQLSPVKRAKRRGYLRNVCIALGNSHNPAALPALKEILQAEPEALIRGAAAWALAEIDPVNARSALEIALRVEPDAIVCQEIKAALEK

SEQ ID NO: 77934 - protein, 323 aa, Longimonas halophila
  misc_feature (1)..(323): tr|A0A2H3NLL4|A0A2H3NLL4_9BACT Epoxyqueuosine reductase OS=Longimonas halophila OX=1469170 GN=queG PE=3 SV=1
MPQFGRHAQQRTARALKAEAARLGFDACGISTAEPLDEEARRLEQWLLEGRHGTMHWMERHFDKRIDPTRLVPGAESVISVLHNYYQPDTQHDEAATTGKISRYAWGDDYHDVLKERLYLLLHWLEEHVGQSVHGRAFVDSAPVLDKAWAARSGLGWQGKHSNLLNRDMGSFFFIGEIIVDVPLPADHPVEDFCGSCTRCVDACPTDAIYQPYAVDATRCISYLTIEHGGDDVPGAISSDMQNWIFGCDICQDVCPWNKFKEPTTEPRYQPRDGMSDTDLRDWVELELEEFRERFSGSPVTRATYEGFQRNVRTALKNVTDDA

SEQ ID NO: 77935 - protein, 300 aa, Lucifera butyrica
  misc_feature (1)..(300): tr|A0A498R9G7|A0A498R9G7_9FIRM Epoxyqueuosine reductase queg OS=Lucifera butyrica OX=1351585 GN=LUCI_2019 PE=4 SV=1
MKQKLREFCRSIGIDAVGIAPAGPYKELEVMLRNRRELGLYTELEEQDLAKRIDPHCTLPGVQSVIVCLFPYYTGDIAGANLPRYAYGRDYHNLVRKKLEQIGAFLTDRIPGFIYQAFVDTGPLADRYLAYLAGLGFYGLNSHIITDRYGSYVVIGYLLNNYPFSPDQPQERVCRQCGRCIRACPGQVILGNYRIDPRGCRSYLTQKKGELTEEERRILQRTNLLFGCDVCQEVCPHNQEIELTSLPEFRQDLFGCLNGGELDRFSNREFKEKYGDRAFSWRGKGILLRNWRYLKAGQDV

SEQ ID NO: 77936 - protein, 382 aa, Lujinxingia litoralis
  misc_feature (1)..(382): tr|A0A328C9Y7|A0A328C9Y7_9DELT tRNA epoxyqueuosine(34) reductase QueG OS=Lujinxingia litoralis OX=2211119 GN=q ueG PE=4 SV=1
MSSPNAQERAQLREAIDQEARRLGFSACAVIPAERLPSARSYQEWLREGRHGSMDYMEKYQPLRVDPRVLEEGTTSVVVLLTNYHQGSDRFEGGLRVARYAHGDDYHDFLWDRMRELAAFIHAETGVEVATRPAVDSAPLLERDLARMAGLGWVGKNALLIRQGLGSFTIISEILVAMDLGERARSAADRCGRCTRCLDACPTGAIVSPHIIDARRCISYLTIELRGPIPRRLRPLIGDHVFGCDICQTVCPWNRRAPMSEDPGFSPREAYRTLSPMELLGFDHARYVEVFRRSPMKRAKLAGLKRNAAVVVGNSGERRHVAQLGSYMAAEESALVRSHIAWALGRLGGELAIEALREARVRESEPAVLEEIEHALQMTSRG

SEQ ID NO: 77937 - protein, 358 aa, Luminiphilus syltensis
  misc_feature (1)..(358): tr|B8KW59|B8KW59_9GAMM Epoxyqueuosine reductase OS=Lumi niphilus syltensis NOR5-1B OX=565045 GN=queG PE=3 SV=1
MDATVNERQIEQLVPTLRQWAAELGFQQLGITGIDLSEHEAVLERWLAAGYHGDMTYMARHGTKRSRPSELVPGTCSILSLRMDYDPPAVPADQVLARSDRGFISRYALGRDYHKLMRNRLSKLAKRIESELDGGQFRAFVDSAPVLERGIAENAGLGWIAKNTMLINEKAGSWFFLGEIYTSIPFPTDPAKTEKHCGSCRACLDVCPTAAFVGPYVLDARRCISYLTIEHPGSIDPELRSLMGNRIYGCDDCQLVCPWNKFAQTSSETDFAPRHQLDDAALVDLLAWDETTFEEKTLGSPIRRIGHERWLRNIAIALGNATTSDDIVNALKSRSDHPSALVREHVAWALAQHQVSSP

SEQ ID NO: 77938 - protein, 325 aa, Lunatimonas lonarensis
  misc_feature (1)..(325): tr|R7ZXU7|R7ZXU7_9BACT Epoxyqueuosine reductase OS=Luna timonas lonarensis OX=1232681 GN=queG PE=3 SV=1
MALPEQHAAIVKQTAKRLGFDFCGIAEAGFLEEEAPKLEAWLSRNYHGQMGYMANHFDKRLDPTRLVEGAKSVVSLIYNYFPEERLPEGEEDYKIAKYAYGNDYHFVIKEKLRGFLESLCTEIGEVDGRAFVDSAPVMERQWAQRSGLGWLGKNSLLLNRQMGSFFFLAELIIDLPLAPDDPMVKDYCGTCTRCIDACPTEAIVEAGVVDGSRCISYYTIELKEELPTAVKGKFENWIFGCDICQDVCPWNRFASPHGEQEFLLHPLLKEFGKKDWEEMTRDTFGRVFKQSALKRTKWDGLMRNVKFMQEKSPQDDLGASDKLSG

SEQ ID NO: 77939 - protein, 354 aa, Luteibacter pinisoli
  misc_feature (1)..(354): tr|A0A4Y5Z0E9|A0A4Y5Z0E9_9GAMM Epoxyqueuosine reductase OS=Luteibacter pinisoli OX=2589080 GN=queG PE=3 SV=1
MPASTDIDYAALADDIKRWAGELGFADAGIAGTDLGHDEAYLERWLADGHHGEMDYMARHGTRRSRPAELEPGTLRVISVRMDYIPPGTANAWDVIHDTDKAYIARYALGRDYHKVMRNRLQKLASRITERVGDFAYRAYVDSAPVLEKALARNAGLGWIGKHTVLINKRAGSYFFLGELYTNLPLPVDAPASAHCGSCRKCIDICPTQAIVAPYRLDARRCISYLTIELKGSIPEELRAPMGNRVFGCDDCQLICPWNKFAQDATEPDFAPRHSLDGPRLVELFAWTEEEFLSRTEGMAIRRTGYEGWLRNLAVGLGNAPTSTDVVTSLRARENDPSPVVQEHVAWALARHNG

SEQ ID NO: 77940 - protein, 355 aa, Luteibacter rhizovicinus
  misc_feature (1)..(355): tr|A0A4R3YHJ2|A0A4R3YHJ2_9GAMM Epoxyqueuosine reductase OS=Luteibacter rhizovicinus OX=242606 GN=queG PE=3 SV= 1
MSAPDPTMIDYAALALDIKRWARELGFADVGISGTALGHDEAYLERWLADGHHGEMDYMARHGTRRSRPAELEPGTLRVVSVRMDYVPPGTRDAWDVIGDGEAAYVARYALGRDYHKLMRNRLQKLAERIGQAIGDFGYRAYVDSAPVLEKALARNAGLGWIGKHTVLINKRAGSYFFLGELYTDLPLPADEPASAHCGSCRRCIDICPTQAIVAPYRLDARRCISYLTIELRGSIPEEFRAPMGNRIFGCDDCQLICPWNKFAQEAVEPDFAPRHSLDGPKLVDLFAWSEDEFLKRTEGMAIRRTGYEGWLRNIAVGLGNAPTSDVVVDALRARADDPSAIVREHVAWALSRHG

SEQ ID NO: 77941 - protein, 358 aa, Luteibacter rhizovicinus
  misc_feature (1)..(358): tr|A0A0G9HE02|A0A0G9HE02_9GAMM Epoxyqueuosine reductase OS=Luteibacter rhizovicinus DSM 16549 OX=1440763 GN=qu eG PE=3 SV=1
MSAPPSIDYAILATDIKAWARELGFADVGISGTDLGNDEAYLERWLADGHHGEMEYMSRHGTRRSRPAELEPGTLRVVSVRMDYIPPGTANAWEVINDGDKAYVARYALGRDYHKVMRNRLQKLAARIGERIGDFGYRAYVDSAPVLEKALARNAGLGWIGKHTVVINKRAGSYFFLGELYTDLPLPVDEPATAHCGSCRRCIDICPTQAIVAPYRLDARKCISYLTIELKGSIPEELRAPIGNRIFGCDDCQLICPWNKFAQEATEPDFAPRHSLDGPKLVDLFAWTEAEFLSRTEGMAIRRTGYEGWLRNLAVGLGNAPTSTEILTALEARADDPSDVVREHVAWARAQHALRSSS

SEQ ID NO: 77942 - protein, 356 aa, Luteibacter sp.
  misc_feature (1)..(356): tr|A0A1T5FJP1|A0A1T5FJP1_9GAMM Epoxyqueuosine reductase OS=Luteibacter sp. 22Crub2.1 OX=1283288 GN=queG PE=3 S V=1
MPATTDTDYAALATDIKRWARELGFADVGIAGPDLGHDEAYLERWLADGHHGEMDYMARHGTRRSRPAELEPGTLRVVSVRMDYIPPGTSNAWDVVNDGEKAYIARYALGRDYHKVMRNRLQKLAAKIGERIGDFGYRAYVDSAPVLEKALARNAGLGWIGKHTVLINKRAGSYFFLGELYTDLPLPVDEPASAHCGSCRRCIDICPTQAIVAPYRLDARKCISYLTIELKGSIPEELRASIGNRVFGCDDCQLICPWNKFAQDATEPDFAPRHSLDGPRLVDLFAWSEQEFLSRTEGMAIRRTGYEGWLRNLAVGLGNAPTTDEVVAALRARTGDPSPVVREHVAWALGRHASAT

SEQ ID NO: 77943 - protein, 357 aa, Luteibacter sp.
  misc_feature (1)..(357): tr|A0A1K1QIH5|A0A1K1QIH5_9GAMM Epoxyqueuosine reductase OS=Luteibacter sp. UNCMF366Tsu5.1 OX=1502758 GN=queG P E=3 SV=1
MPAPPSIDYAALAADIKQWARELGFADVGIAGTDLGNDEAYLERWLADGHHGEMDYMARHGTRRSRPAELEPGTLRVISLRMDYTPPGVPNAWDVIRDGEKAYVARYALGRDYHKLMRNRLQKLASRIEERIGEFKYRAYVDSAPVLEKAIARNAGLGWIGKHTVLINKRAGSYFFLGELYTDLPLPLDAPASAHCGSCRRCIDICPTQAIVAPYRLDARRCISYLTIELKGSIPVELREPMGNRVFGCDDCQLICPWNKFAQEAAEPDFAPRHSLDGPKLVELFAWSEEEFLSRTEGMAIRRTGYEGWLRNLAVGLGNAPASDEILSALNARADHPSPMVREHVAWALEQQMRRTH

SEQ ID NO: 77944 - protein, 368 aa, Luteibacter yeojuensis
  misc_feature (1)..(368): tr|A0A561GW40|A0A561GW40_9GAMM Epoxyqueuosine reductase OS=Luteibacter yeojuensis OX=345309 GN=queG PE=3 SV=1
MPAPTDIDYAALALDIKRWARELGFADVGIAGTELGDDEAYLERWLADGHHGEMDYMARHGTRRSRPAELEPGTLRVVSVRMDYVPPGTANAWNVIHDSEKAYIARYALGRDYHKLMRNRLQKLAARITERIGDFAYRAYVDSAPVLEKALARNAGLGWIGKHTVVINKRAGSYFFLGELYTDLPLPVDEPASAHCGSCRRCIDICPTQAIVAPYRLDARKCISYLTIELKGSIPEALRAPMGNRVFGCDDCQLICPWNKFAQDATEPDFAPRHSLDGPKLVELFAWSEEEFLSRTEGMAIRRTGYEGWLRNLAVGLGNAPTSGEVVDALRARADHPSALVREHVAWALSRHGSHQPSSRTGSAPTLG

SEQ ID NO: 77945 - protein, 355 aa, Luteibacter yeojuensis
  misc_feature (1)..(355): tr|A0A0F3K8E0|A0A0F3K8E0_9GAMM Epoxyqueuosine reductase OS=Luteibacter yeojuensis OX=345309 GN=queG PE=3 SV=1
MPAATDIDYAALARDIKRWALELGFADAGIAGTDLGHDEAYLQRWLADGHHGEMDYMARHGTRRSRPAELESGTLRVVSVRMDYIPPGTANAWDVINDGDKAYIARYALGRDYHKVMRNRLQKLASMITGRIGDFAYRAYVDSAPVLEKALARNAGLGWIGKHTVVINKRAGSYFFLGELYTNLPLPVDEPATAHCGSCRRCIDICPTQAIVAPYQLDARKCISYLTIELKGSIPEALRAPMGNRVFGCDDCQLICPWNKFAQEATEPDFAPRHSLDRPKLVELFAWSEAEFLARTEGMAIRRTGYEGWLRNLAVGLGNAPTSAEVVDALRARADDASGVVREHVAWALRRHAGA

SEQ ID NO: 77946 - protein, 310 aa, Luteibaculum oceani
  misc_feature (1)..(310): tr|A0A5C6VIV4|A0A5C6VIV4_9FLAO Epoxyqueuosine reductase OS=Luteibaculum oceani OX=1294296 GN=queG PE=3 SV=1
MDLLKSTRTQTVKQIAADLGFDFCGISKAEQLQEEAKGLELWLKKGFHGDMSYMERNFDKRIDPRILVPGAKSVISLLLNYYPSEKQREDSKYKISKYAYGRDYHKVIKKKLKHFLHAITEQIGEVGGRIFVDSAPVMDKAWAKKSGLGWIGKNTNLINKGSGSFFFIAELILDLDLEPDGPIKDYCGTCTKCIDACPTDALIQPYQIDGSKCISYLTIELKENIPNNFKGKMDDWAFGCDVCQDVCPWNRFSTPHKTEDLRANKERIQISDRGWEEMTEELFEELFKGSAIKRTQYRGIKRNIGFLKNS

SEQ ID NO: 77947 - protein, 358 aa, Luteimonas aestuarii
  misc_feature (1)..(358): tr|A0A4R5U441|A0A4R5U441_9GAMM Epoxyqueuosine reductase OS=Luteimonas aestuarii OX=453837 GN=queG PE=3 SV=1
MSVPASPSTPADPAALALRIKSLARESGFQRCGIAGIELGEDEAHLRSWLANGLYGSMDWMARHGDKRSRPQELVPGTLRVVSVGLDYGQDEDEAWRTLADGSRAYVARYALGRDYHKLMRNRLQKLADRIAGEIGPFGHRVFVDSAPVLERALARNAGLGWIGKHTCLIDRDGGSWFFLGELYVDLPLPIDPPASAHCGTCARCIDICPTQAIVAPHRLDARRCIAYLTIEHEGAIDEALRPAIGNRIFGCDDCQLVCPWNKFARRTDEPDFRARNRLDEASLAELFAWDEDEFLRRTEGSAIRRSGHARWLRNLAIALGNAPATREVIDALQSRRDWPDPVVREHIEWALRRHGMP

SEQ ID NO: 77948 - protein, 356 aa, Luteimonas cucumeris
  misc_feature (1)..(356): tr|A0A562LAT8|A0A562LAT8_9GAMM Epoxyqueuosine reductase OS=Luteimonas cucumeris OX=985012 GN=queG PE=3 SV=1
MESPIARPDHRQLALRIKQLSRELGFQRCGISDIDLGADEAYLREWLAQGLYGSMEWMARHGDKRSRPQELIPGTVRVISVGLDYGRDDDDAAWQNLANGERAYVARYALGRDYHKLMRQRLQQLADRIAAETGPFGHRVFVDSAPVLERALARNAGLGWIGKHTCLIDKEGGSWFFLGEIYIDLPLPTDAAATAHCGTCMRCIDICPTQAIVAPHRLDARRCISYLTIEHEGAIPEDLRPLIGNRIFGCDDCQLVCPWNKFAKRSDEPDFRARNDLDRATLAQLFAWDEDEFLRRTEGSAIRRSGHERWLRNIAVALGNAPTAPEVVAALKSREHDGNAVVREHVAWALSQHAAS

SEQ ID NO: 77949 - protein, 359 aa, Luteimonas marina
  misc_feature (1)..(359): tr|A0A5C5UBG7|A0A5C5UBG7_9GAMM Epoxyqueuosine reductase OS=Luteimonas marina OX=488485 GN=queG PE=3 SV=1
MSTPAARARLPDPATLALRIKALAREAGFGRCGIAGVELGEDEAFLRTWLAQGLYGTMDWMARHGDKRSRPQELVPGTLRVISVGLDYGQDPDQAWRTLDDGERAYVARYALGRDYHKLMRHRLQKLADRVAAEVGPFGHRVFVDSAPVLERALARNAGLGWIGKHTCLIDRDGGSWFFLGEIYVDLPLPVDPPASAHCGTCVRCIDVCPTQAIVAPHRLDARRCISYLTIEHEGSIDEALRPLIGNRIFGCDDCQLVCPWNKFARRTDEPDFRARNNLDQATLAELFAWSEDEFLQRTEGSPIRRSGHSRWLRNIAVALGNAPTSPEVVAALRSRSDAADPVVREHVEWALRRHEART

SEQ ID NO: 77950 - protein, 333 aa, Luteimonas sp.
  misc_feature (1)..(333): tr|A0A290XI74|A0A290XI74_9GAMM Epoxyqueuosine reductase OS=Luteimonas sp. 100111 OX=2006110 GN=queG PE=3 SV=1
MGFQRCGIAGIDLREDEAHLRDWLAHGLYGTMDWMARHGDMRARPAELLPGTVRVISVGLDYGRNDDDSAWDTLADGSRAYVARYALGRDYHKLMRNRLQKFAHRIAEEIGPFGHRVFVDSAPVLERALARNAGLGWIGKHTCLIDRNGGSWFFLGEIYVDVPLPVDPPASAHCGTCVRCIEVCPTRAIVAPHRLDARRCIAYLTIEHEGAIDASLRPLIGNRIFGCDDCQLVCPWNKFARRTDEPDFRARNHLDTASLAELFAWDEDEFLQRTEGSPIRRSGHRRWLRNLAVALGNAPGTPEVIAALRSRRRSGDALVDEHVEWALARHGVA

SEQ ID NO: 77951 - protein, 367 aa, Luteimonas sp.
  misc_feature (1)..(367): tr|A0A5C5U683|A0A5C5U683_9GAMM Epoxyqueuosine reductase OS=Luteimonas sp. YD-1 OX=2599615 GN=queG PE=3 SV=1
MPAASADIRDLRATARWVRELARDAGFQRCGISGVDLEGDERHLRDWLAQGLHGGMGWMARHGDLRARPAELVPGTVRVISVGLDYGQDPDQAWATLADGERAYVARYALGRDYHKLMRRRLQRLADRIAERIGPFGHRVFVDSAPVLERALARDAGLGWIGKHTCLIDRDGGSWFFLGEIYVDLPLPVDEPASAHCGTCVRCIEVCPTRAIVAPHRLDARRCISYLTIEHEGPIDEELRPLIGNRIFGCDDCQLACPWNKFARRTDEPDFRARNRLDEATLDELFAWSEEEFLCRTEGSAIRRSGYRRWLRNIAVALGNAPTTPRVVAALQSRRDHEDAVVREHVDWALRRHEARGVAPGTVPATR

SEQ ID NO: 77952 - protein, 361 aa, Luteimonas terrae
  misc_feature (1)..(361): tr|A0A4R5UC92|A0A4R5UC92_9GAMM Epoxyqueuosine reductase OS=Luteimonas terrae OX=1530191 GN=queG PE=3 SV=1
MKPSVATAVSADAAPAALAARIKAIAGEMGFQRCGIAGIDLREDEAHLRDWLAEGLYGTMDWMARHGDMRARPAELLPGTVRVISVGLDYGRNDDDSAWDTLADGSRAYVARYALGRDYHKLMRNRLQKFAHRIAGEIGPFGHRVFVDSAPVLERALARDAGLGWIGKHTCLIDRNGGSWFFLGEIYVDVALPIDPPATAHCGTCVRCIDVCPTRAIVAPHRLDARRCIAYLTIEHEGAIDASLRPLIGNRIFGCDDCQLVCPWNKFAKRTDEPDFRARNDLDTASLADLFAWDEDEFLSRTEGSPIRRSGHRRWLRNLAVALGNAPGTPETIAALRARRHSGDALVDEHVEWALGLHGVA

SEQ ID NO: 77953 - protein, 352 aa, Luteitalea pratensis
  misc_feature (1)..(352): tr|A0A143PSL5|A0A143PSL5_9BACT Epoxyqueuosine reductase OS=Luteitalea pratensis OX=1855912 GN=queG PE=4 SV=1
MLSLDALRAHALTLGFDLCGVAQVQQVARLDYLREWVAKGYAGDLHYVMRSADARIEPERVLPGARSAIVTGTIYHTEAPLSRDREAPGIANIARYAWGEDYHQVLGRRQHLLIGWLKEHADGAFDAVGYVDTGPVQEKALAAAAGLGWIGKHTCLINQELGSWLFLSVILTTLDLPAGSSVPDRCGTCTRCLDVCPTNAIVEPYVVDATRCLSYITIESHEGIAPAQRDWVGSQVYGCDLCQDVCPWNTGVTVTEDPVWVARPLWNQATLAGLWRATDEQLQVAIRHSPMYRTKVWRIRRNLALAIAASGDPAAHAALFEQRDPVIDPSLAHAVVIEHVAWARTRIEQLRR

SEQ ID NO: 77954 - protein, 307 aa, Lutibacter agarilyticus
  misc_feature (1)..(307): tr|A0A238VSC6|A0A238VSC6_9FLAO Epoxyqueuosine reductase OS=Lutibacter agarilyticus OX=1109740 GN=queG PE=3 SV= 1
MKLQQTYSKLIKQEAYRLGFESCGISKAVFLEEEASNLESWLKKGHQGEMHYLENYFDKRLDPRLLVDNAKSVISLSFNYFPEEQQQNNSYKLAKYAYGEDYHHILKSKLKELTSFIQNQIGEVNGRAFVDSAPVMERAWAQKSGLGWRGKNSLLIQKNKGSFFFLAELILDLELEYDTPFKTNHCGSCTKCIDACPTNAILPNNTVNGSQCISYFTIELKNELPASVKGKFEDWMFGCDICQDVCPWNRFSTPHSEEKLNPHPDLLAMNKQDWEEITEEIFKKVFQKSAVKRTKFLGLKRNISFLK

SEQ ID NO: 77955 - protein, 308 aa, Lutibacter maritimus
  misc_feature (1)..(308): tr|A0A1I6RFU0|A0A1I6RFU0_9FLAO Epoxyqueuosine reductase OS=Lutibacter maritimus OX=593133 GN=queG PE=3 SV=1
MKNLQTYSHLIKQEAKRSGFESCGISKADFLEKEASNLENWLKNGFHGKMNYMENYFDKRLDPRLLLDDAKSVISLSYNYFPKELQNNDTYKIAKYAYGEDYHHIIKGKLKELTFFIENLIGQVNGRAFVDSAPVLERAWAEKSGVGWRGKNSLLLQKNKGSFFFLAELILDVELAYDNPFKADHCGTCTKCIDACPTNAILPNNTIDGSKCISYFTIELKDEIPTSMKRKFEDWMFGCDICQDVCPWNRFSKPHSEEKFKPHPDLFSMSKNDWQEITEEVFQIIFKKSAVKRTKFAGLVRNISFLKD

SEQ ID NO: 77956 - protein, 308 aa, Lutibacter oceani
  misc_feature (1)..(308): tr|A0A3D9RTZ4|A0A3D9RTZ4_9FLAO Epoxyqueuosine reductase OS=Lutibacter oceani OX=1853311 GN=queG PE=3 SV=1
MNKLQTYSNLIKQESKRLGFESCGIAKADFLQEEASNLEQWLKNGYHGKMQYMENYFDKRLDPRLLVDDAKTVISLSFNYFPKEIQDDSTYKIAKYAYGEDYHHVLKAKLKELIFFIKQTIGEINGRAFVDSAPVLERAWAQKAGLGWQGKHSLLIQKNKGSFFFLAELILDVELAYDNPFSTDHCGTCTKCIDACPTEAILQNNTVDGSKCISYFTIELKDEIPPSMHGKFEDWMFGCDICQDVCPWNRFSKPHSEEKFNSHPDLLLMTKNDWQEITETVFKTVFNKSAVKRTKFSGLNRNIQFLKD

SEQ ID NO: 77957 - protein, 308 aa, Lutibacter oricola
  misc_feature (1)..(308): tr|A0A1H2S509|A0A1H2S509_9FLAO Epoxyqueuosine reductase OS=Lutibacter oricola OX=762486 GN=queG PE=3 SV=1
MKAAKESYSVLIKQEAKRLGFESCGVAKAEFLEEEASNLEQWLKNGFHGEMKYMENHFDKRLDPRLLVEGAKSVISLSFNYFPEEIQNKETFKVAKYAYGEDYHQIIKAKLNELAFFIQNEIGEVNGRAFVDSAPVMERAWAQKSGLGWIGKHSLLIQKNKGSFFFLAELILDLELETDTPFKTDHCGNCTKCIDACPTEAILPNNTVDGSKCISYFTIELKDEIPSSVKGKFENWMFGCDICQDVCPWNRFSTPHSEKKFKPHPDLLSMTKNDWEEITEDVFKKVFKKSAVKRTKFVGLQRNISFLK

SEQ ID NO: 77958 - protein, 309 aa, Lutibacter sp.
  misc_feature (1)..(309): tr|A0A4Q1IR31|A0A4Q1IR31_9FLAO Epoxyqueuosine reductase OS=Lutibacter sp. HS1-25 OX=2485000 GN=queG PE=3 SV=1
MVKNLQRYANLIKQEAKRLGFESCGIAKADFLQEEASNLEQWLKNGFHGNMQYMENYFDKRLDPRLLVDGAKSVISLSFNYFPKEIQNNKTYKVAKYAYGEDYHHVLKSKLTALTFFIQNTIGQVNGRAFVDSAPVLERAWAQKSGLGWRGKHSLLIQKNKGSFFFLAQLILDVDLAYDAPFTTNHCGTCTKCVDACPTKAILPNNTVNGSKCISYFTIELKDEIPSAFKNKFEDWMFGCDICQDVCPWNRFSKPNFEDKFKPHQSLLSFGKPEWEEITSEIFNTIFKKSAVKRTKYAGLVRNISFLKK

SEQ ID NO: 77959 - protein, 312 aa, Lutibacter sp.
  misc_feature (1)..(312): tr|A0A1D8P8L3|A0A1D8P8L3_9FLAO Epoxyqueuosine reductase OS=Lutibacter sp. LPB0138 OX=1850246 GN=queG PE=3 SV=1
MAKLNQYQKYSNLIKTEAKRIGFSTCGIAKATFLEEEAPKLEQWLKNGYHGEMKYMENHFDMRLDPRLLVNGAKSVISLSYNYFPEKEQNLDSYKIAKYAYGQDYHHVVKSKLKELLNFIQEQIGEVNGRAFVDSAPILERSWAEKAGLGWNGKHSLLIQKELGSYFFLAELILDLELDYDQPFQTDHCGTCTKCIDACPTEAILANNTIDGSKCISYFTIELKNEIPSEVKGQFEDWMFGCDICQDVCPWNRFSKPHNEPLFNPQPELLDMTKSDWEEITEDVFRKVFKKSAVKRTKFTGLQRNIKFIKNT

SEQ ID NO: 77960 - protein, 388 aa, Lutibaculum baratangense
  misc_feature (1)..(388): tr|V4RKT4|V4RKT4_9RHIZ Epoxyqueuosine reductase OS=Luti baculum baratangense AMV1 OX=631454 GN=queG PE=3 SV=1
MPTSTSETIDRDALKARLIEDALAEGFDLVRVMRPDAVPETAARLDHFLREGRHGEMEWMARTADRRRQPSALWGDARSVAMLGLNYGPEGDPLPQLAERAKGYISVYARGDDYHDLIKKRLKSVARRFAETAGADVKVFVDTAPVMEKPLAAAAGLGWQGKHTNLLSRTYGNWLFLGAIFTNAELEPDAPESDHCGSCRACLDACPTDAFPVPYQLDARRCISYLTIEHSGPIPREFREAVGNRIYGCDDCLAVCPWNKFAKEGREAKLAARDTLNMPDLEDLAELDDASFRALFTKSPIKRIGVKRFLRNVLISIGNSGDEALVRTARRRLDDESPLVRGAAVWALSRLMPGDELRALAGLRMGGETDADVLEEWRMALADGAPAA

SEQ ID NO: 77961 - protein, 347 aa, Lutimaribacter litoralis
  misc_feature (1)..(347): tr|A0A521ATT0|A0A521ATT0_9RHOB Epoxyqueuosine reductase OS=Lutimaribacter litoralis OX=1010611 GN=SAMN06265173 _101361 PE=4 SV=1
MEQALKDKLLAQARAEGFDACRICAPDAIGQVPDRLTAFLDAGRHGQMRWMEERAGWRGNPAALWPEARSVIMLGESYTPAHDPLAVLGQPDCGAISVYAQNRDYHDLVKKRLKRLARWLIAEGGGEVKVFVDTAPVAEKPLGQAAGLGWQGKHTNLVSRELGSWFFIGSVFTTLDLPVDATERDHCGSCTACQVACPTAAFPAPYQLDARRCISYLTIEHHGPVDVELRGLLGNRIYGCDDCLAACPWNKFAVEAREIRYHARPELVAPKLAELAVLDDAGFRAFFSGSPIKRIGRNRFVRNVLYAIGNSGDVALLAIAQGLCEDEDVTVADAARWAVGQLSATQR

SEQ ID NO: 77962 - protein, 343 aa, Lutimaribacter pacificus
  misc_feature (1)..(343): tr|A0A1H0E749|A0A1H0E749_9RHOB Epoxyqueuosine reductase OS=Lutimaribacter pacificus OX=391948 GN=queG PE=3 SV= 1
MKDDLKSRLIAQARAEGFDLTRICRPDAVPEVPARLAAFLAHGYHGQMGWLADRAAWRGDPAALWPEARSVIVLGESYTPEEDPLAGLETPDRGVISVYARNRDYHDLVKKRLKRLARWLIAEGGGEVKVFVDTAPVPEKPLGQAAGLGWQGKHTNLVSRDLGSWFFIGSVFTTLALEPDAPETDHCGSCRACLDACPTDAFPAPYRLDARRCISYLTIEHKGPVDEELRAKMGNRIYGCDDCLAACPWNKFAVAARELHYHARPDLVDPPLAELAALDDAGFRARFSGSPIKRVGRDRFVRNVLYAIGNSGDAALRPAAQALVDDPDATVAEAARWAVARLG

SEQ ID NO: 77963 - protein, 343 aa, Lutimaribacter saemankumensis
  misc_feature (1)..(343): tr|A0A1G8N876|A0A1G8N876_9RHOB Epoxyqueuosine reductase OS=Lutimaribacter saemankumensis OX=490829 GN=queG PE= 3 SV=1
MKDDLKSRMIAQARSEGFDLARICRPDAVPEVPERLAGFLARGYHGQMEWLADRTHWRGNPAALWPQARSVIMLGESYTPHTDPLAGLETPDRGVISVYARNRDYHDLVKKRLKRLARWLIAEGGGEVKVFVDTAPVPEKALGQAAGLGWQGKHTNLVSRDLGNWFFIGSVFTTIDLEPDTPEIDHCGSCRACLDACPTDAFPAPYQLDARRCISYLTIEHKGPVDEELRAKMGNRIYGCDDCLAACPWNKFAVEARELRYRARPDLIDPPLAELAQLDDAGFRARFSGSPIKRIGRDRFVRNVLYAIGNSGDPALRAATQALVDDPDPSVADAARWAVARLG

SEQ ID NO: 77964 - protein, 249 aa, Lutispora thermophila
  misc_feature (1)..(249): tr|A0A1M6CAY6|A0A1M6CAY6_9CLOT Epoxyqueuosine reductase QueG (Queuosine biosynthesis) OS=Lutispora thermophila DSM 19022 OX=1122184 GN=SAMN02745176_00679 PE=4 SV=1
MNIKDELIELIKKSVAESEERDFYRQPLIGFSSANDPLFKNIKNNAGLQHLYPQDILPEAKTVVSFFIPFSESVVSSNRVGDTVSIEWAESYVKTNKLINDISENMIDFLVQFGIKAATVKATHNFDEKTLTSGWSHRSAAYVAGLGKFGVNRMLITKAGSAGRYGTVIMSQEIFPDERTEEEYCLYYKNGSCLKCVKACPVDALSIDGFNRFQCYNRLLDISQQFTDIGLCDVCGKCVVSCPVAIIDK

SEQ ID NO: 77965 - protein, 296 aa, Lutispora thermophila
  misc_feature (1)..(296): tr|A0A1M6BF77|A0A1M6BF77_9CLOT Epoxyqueuosine reductase OS=Lutispora thermophila DSM 19022 OX=1122184 GN=SAMN0 2745176_00439 PE=4 SV=1
MKNNLIMFCNSIGIENVGIAPAEYYNDFGVIWKNQLDKNYVSGFEEKDIEKRLNPKLTLEDAKSVIVCLFPYYTGTEEHSNISKYVYGIDYHKIAIKKLETISDFLKSTIEGFQYKAFVDNGPLSDRHVAYRAGLGFLGINSHLITDKYGSFVFIGYIINNYPFEPDKPQDRTCYLCFNCVRNCPGQCILGDFTINPLRCKSYITQKKRDLTKEDIGILKKHRLIWGCDVCQDVCPHNKNVQKTTIKEFRENLTYNIDCEELKQMSNKEFIRRYGDRAFSWRGKAILIRNHQLINE

SEQ ID NO: 77966 - protein, 308 aa, Lyngbya aestuarii
  misc_feature (1)..(308): tr|U7QB84|U7QB84_9CYAN Epoxyqueuosine reductase OS=Lyng bya aestuarii BL J OX=1348334 GN=queG PE=3 SV=1
MHPPVQTNQVKQQALTLGFHKVGIASVIEPIAEVERLQAWLNQGYQAEMAWMANPRRQDIRQVMPEVQSVICVALNYYTPHERREGAEYGKISRYGWGRDYHKVMHKKLKAFSTWLQAQGEGIQARYYADTGPISDKVWAQRAGIGWIAKNSNLITREYGSWVFLGEVLTNLELTPDSPHTEHCGTCTRCIEACPTDAITEPFVVDANRCIAYHTIENRAEQLPENIELKGWVAGCDICQDVCPWNQRFAQETDVEAFQPYPGNIAPKLSELAELSEEKWNEQFTASALRRIKPQMWQRNARKNLKEL

SEQ ID NO: 77967 - protein, 314 aa, Lyngbya confervoides; identical to SEQ ID NO: 77173
  misc_feature (1)..(314): tr|A0A0C1YMR8|A0A0C1YMR8_9CYAN Epoxyqueuosine reductase OS=Lyngbya confervoides BDU141951 OX=1574623 GN=queG P E=3 SV=1

SEQ ID NO: 77968 - protein, 308 aa, Lyngbya sp.
  misc_feature (1)..(308): tr|A0YYQ3|A0YYQ3_LYNSP Epoxyqueuosine reductase OS=Lyng bya sp. (strain PCC 8106) OX=313612 GN=queG PE=3 SV=1
MHSSVQANQVKQQAITLGFHKVGIASVIEPKAEVERLQAWLNQGYQADMAWMANPRRQDIRQVMPEVCAVICVALNYYTPHERPEGAEYGKISRYGWGRDYHKVMHQKLKAFSNWLQAQGEGIQARYYADTGPISDKVWAQRAGIGWISKNSNLITREYGSWVFLGEILTNLELTPDSPHTEHCGTCTRCIEACPTDAITEPFVVDANRCIAYHTIENRAEQLPENIELKGWVAGCDICQDVCPWNQRFAQETDVEAFQPYPGNIAPKLSELAELSEEKWNEQFTASALRRIKPKMWQRNARKNLKEL

SEQ ID NO: 77969 - protein, 377 aa, Lysinibacillus acetophenoni
  misc_feature (1)..(377): tr|A0A285UDQ3|A0A285UDQ3_9BACI Epoxyqueuosine reductase OS=Lysinibacillus acetophenoni OX=614649 GN=SAMN058778 42_10723 PE=4 SV=1
MSIEQLQNDLIDYAKSIGVDKIGFTSASPFNELKNRLKRQQELGFQSGFEESDIEKRTEPTRLLDDAESIIAIALAYPSKMEDAPTGKKGARRGIFARASWGIDYHVALRERLKLLEEWLVERVPGVKFKSMVDTGELVDRAVAERAGIGWSGKNCSIITPEFGSYVYLGEMITNIPFAPDTPIENECGDCTLCLDVCPTGALVDAGQLNAKSCVAFLTQTKDFLPDEFRAKIGNRIYGCDTCQTVCPKNKGKINWIHEEFKPDPEIAKPLLQPLLNLSNREFKSQFGHVSGSWRGKKPIQRNAIIALAHFKEEAAVPDLIDIMKKDERPVMRGTAAWAIGKIGGPLAEEALIDARDKEKDEQVLLEIEKGLKLLTV

SEQ ID NO: 77970 - protein, 376 aa, Lysinibacillus boronitolerans
  misc_feature (1)..(376): tr|A0A0A3IZP6|A0A0A3IZP6_9BACI Iron-sulfur cluster-bind ing protein OS=Lysinibacillus boronitolerans JCM 21713 = 10a = NBRC 103108 OX=1294264 GN=CD31_04075 PE=4 SV=1
MNIHDLQRDFVAYAMSIGVDKIGFTTAAPFTELKNRLRRQQELGYQSGFEESDIEKRTEPLQLLDEAESIIAIAVAYPSRMQNAPIGKKGARRGIFCRASWGVDYHTALRERLKLLSAWLEKQVEGVRIESMVDTGALVDRAVAERAGIGWSGKNCSIITPEFGSYVYLGELITNIPFAPDKPMEDECGDCRLCLDVCPTGALIQGGQLDAQRCIAFLTQTKGTLPDEFRSHIGNRLYGCDTCQTVCPKNKGKINWIHEEFVPDPELAKPLLTPLLTISNREFKAKFGHVSGSWRGKKPIQRNAILALAHFKEEAAIPDLIALLHKDDRPVIRGTAAWALGKIGGDTAQTALHEAEATEQDEEVLSEIYKGLQFFK

SEQ ID NO: 77971 - protein, 377 aa, Lysinibacillus chungkukjangi
  misc_feature (1)..(377): tr|A0A318THA8|A0A318THA8_9BACI Epoxyqueuosine reductase OS=Lysinibacillus chungkukjangi OX=1202712 GN=BJ095_12 528 PE=4 SV=1
MKIDQLQKDLIDYAKSIGVDKIGFTHASPFHEMKNRLKRQQQLGYQSGFEESDIEKRTEPKLLLESAESIIAIALAYPSKMQDAPTGKKGARRGIFARASWGVDYHVAVRERLNLIEEWLKERIPNVQTKSMVDTGELVDRAVAERAGIGWSGKNCSIITPEFGSYVYLGEMITNIPFKPDIPIEDECGDCRLCLDVCPTGALVEGGQLNSQRCVAFLTQTKDFLPDEFRKELGNRIYGCDTCQTVCPKNKGKSNWIHEEFKPDPELVKPLLQPILQMSNKEFKSRFGYMSGSWRGKKPIQRNAIIALAHFKEESAVPDLIAIMNKDERPVMRGTAAWAIGKIGGADAEEALKKALVVEQDEEVLSEIEKGLKLLAT

SEQ ID NO: 77972 - protein, 377 aa, Lysinibacillus composti
  misc_feature (1)..(377): tr|A0A3N9URY0|A0A3N9URY0_9BACI Epoxyqueuosine reductase OS=Lysinibacillus composti OX=720633 GN=queG PE=3 SV=1
MNVQQLQTDLIEYARSIGVDKIGFTTASPFNELKNRLKRQQELGYQSGFEESDIEKRTEPLRLLDSAQSIIAIALAYPSKMENAPTGKKGERRGIFARASWGIDYHVAVRERLQLIEEWLEQRVPGVKLKSMVDTGELVDRAVAERAGIGWSGKNCSIITPEFGSYVYLGELITNIPFEPDEPIENECGDCTLCLDVCPTGALVQPGQLNAQHCVAFLTQTKDFMPDEFRGEIGNRIYGCDTCQTVCPKNKRKFNWIHDEFKPDPELAKPLLKPLLNISNKEFKSKFGPMSGSWRGKKPIQRNAIIALAHFKEQDAVPDLVELMKKDERPVIRGTAAWAVGKIGGPLAEQALRTALEKEKDVEVLKEIEKGLLLIKS

SEQ ID NO: 77973 - protein, 376 aa, Lysinibacillus contaminans
  misc_feature (1)..(376): tr|A0A0M8QGG2|A0A0M8QGG2_9BACI Iron-sulfur cluster-bind ing protein OS=Lysinibacillus contaminans OX=1293441 GN =AEA09_00965 PE=4 SV=1
MNIRELQSEFVAYAQSIGVDKIGFTTAAPFTELKNRLRRQQELGYQSGFEEADIDKRTEPLQLLDGAESIVAIAVAYPSRMQDAPVGKKGARRGIFCRASWGIDYHTALRERLTLLKDWLEERIEGVRIESMVDTGALVDRAVAERAGIGWSGKNCSIITPEFGSYVYLGELITNIPFAPDTPMEDECGDCRLCLDVCPTGALIEGGQLDSQRCIAFLTQTKGSLPDEFRSHIGNRLYGCDTCQTVCPKNKGKINWIHEEFKPDPELAKPLLVPLLTISNREFKEKFGHVSGSWRGKKPIQRNAIFALAHFKEEAAVPDLVALLEKDSRPVIRGTAAWALGKIGGDVAEAALLTAKDKEQDEEVLVEIDKGLQFFS

SEQ ID NO: 77974 - protein, 376 aa, Lysinibacillus endophyticus
  misc_feature (1)..(376): tr|A0A494Z030|A0A494Z030_9BACI tRNA epoxyqueuosine(34) reductase QueG OS=Lysinibacillus endophyticus OX=197849 0 GN=queG PE=4 SV=1
MIAQLQKDLIEYAKSIGVDKIGFTHASPFQELKNRLKRQQELNYQSGFEESDIELRTEPHRLLEGAESIIAIALAYPSKMEEAPTGKKGARRGIFARASWGIDYHVAVRERLQLIEEWLRERVPNVTLKSMVDTGELVDRAVAERAGIGWSGKNCSIITPEFGSYVYLGEMITNIPFQPDNPIENECGDCRLCLDVCPTGALVEAGQLNSKRCVAFLTQTKDFLPDEFRAKIGNRIYGCDTCQTVCPKNKGKINWIHDEFKPDPELAKPLLQPLLNISNKEFKAKFGPMSGSWRGKKPIQRNAIIALAHFKEEAAVPDLIEILKKDERPVMRGTAAWAIGKIGGPLAEEALLAAREKESDSDVLAEIEKGLLLLEV

SEQ ID NO: 77975 - protein, 376 aa, Lysinibacillus fusiformis
  misc_feature (1)..(376): tr|A0A2I0UWL8|A0A2I0UWL8_9BACI tRNA epoxyqueuosine(34) reductase QueG OS=Lysinibacillus fusiformis OX=28031 GN =queG PE=4 SV=1
MNIHDLQRDFVAYAMSIGVDKIGFTTAAPFTELKNRLRRQQELGYQSGFEESNIEKRTEPLQLLNEAESIVAIAVAYPSRMQNAPVGKKGARRGIFCRASWGVDYHTAIRERLKLLSAWLEEHVEGVRIESMVDTGALVDRAVAERAGIGWSGKNCSIITPEFGSYVYLGELITNIPFAPDKPMEDECGDCRLCLDVCPTGALIQGGQLNAQRCIAFLTQTKGLLPDEFRNHIGNRLYGCDTCQTVCPKNKGKINWMHEEFMPDPELAKPLLTPLLTISNREFKAKFGHVSGSWRGKKPIQRNAILALAHFKEEAAIPDLIDVLQKDERPVIRGTAAWALGKIGGEIAQSALHEAEVTEQDEEVLSEIHKGLQFFQ

SEQ ID NO: 77976 - protein, 376 aa, Lysinibacillus fusiformis
  misc_feature (1)..(376): tr|D7WVV3|D7WVV3_9BACI 4Fe-4S ferredoxin-type domain-co ntaining protein OS=Lysinibacillus fusiformis ZC1 OX=71 4961 GN=BFZC1_16390 PE=4 SV=1
MNIHDLQRDFVAYAMSIGVDKIGFTTAAPFTELKNRLRRQQELGYQSGFEESDIQKRTEPLQLLDEAESIVAIAVAYPSRMQNAPIGKRGARRGIFCRASWGVDYHTALRERLKLLSAWLEEHVKGVRIESMVDTGALVDRAVAERAGIGWSGKNCSIITPEFGSYVYLGELITNIPFAPDKPMEDECGDCRLCLDVCPTGALIQGGQLDAQRCIAFLTQTKGTLPDEFRSHIGNRLYGCDTCQTVCPKNKGKINWIHEEFMPDPELAKPLLTPLLTMTNREFKGKFGHVSGSWRGKKPIQRNAILALAHFKEEAAIPDLIALLHKDDRPVIRGTAAWALGKIGGDTAQTALHEAEATEQDEEVLSEIYKGLQFFK

SEQ ID NO: 77977 - protein, 377 aa, Lysinibacillus halotolerans
  misc_feature (1)..(377): tr|A0A3M8H5T0|A0A3M8H5T0_9BACI tRNA epoxyqueuosine(34) reductase QueG OS=Lysinibacillus halotolerans OX=136847 6 GN=queG PE=4 SV=1
MIIEQLQKELIEYATSIGVDKIGFTHASPFHEMKNRLKRQQELQYQSGFEEPDIEKRTEPRLLLNSAESIIAIALAYPSKMEDAPVGKKGSRRGIFARASWGVDYHVAVRERLNLIEQWLKNRVPDVQTKSMVDTGELVDRAVAERAGIGWSGKNCSIITPEFGSYVYLGEMITNIPFIPDTPIENECGDCTLCLDVCPTGALVNPGQLNSKRCVAFLTQTKDFLPDEFRKEIGNRIYGCDTCQTVCPKNKGKMNWIHEEFKPEPELAKPLLKPLLHMSNKEFKAKFGYMSGSWRGKKPIQRNAIIALAHFKEQSAVPDLIEIMDKDERPVMRGTAAWAIGKIGGSDAEQALLKAREKETDEEVLKEIEKGLTLLKA

SEQ ID NO: 77978 - protein, 376 aa, Lysinibacillus macroides
  misc_feature (1)..(376): tr|A0A0M9DJR7|A0A0M9DJR7_9BACI Iron-sulfur cluster-bind ing protein OS=Lysinibacillus macroides OX=33935 GN=ADM 90_11705 PE=4 SV=1
MNIHDLQRDFVAYAISIGVDKIGFTTAAPFTELKNRLRRQQELGYQSGFEESDIEKRTEPLQLLEEAQSIVAIAVAYPSRMQNAPVGKKGARRGIFCRASWGVDYHTALRERLALLSAWLEERVEGIRIQSMVDTGALVDRAVAERAGIGWSGKNCSVITPEFGSYVYLGELITNIPFAPDQPMEDECGDCRLCLDVCPTGALIEGGQLNAQRCIAFLTQTKGMLPDEFRSHIGNRLYGCDTCQTVCPKNKGKINWIHEEFQPDPELAKPLLTPLLTISNREFKSRFGHISGSWRGKKPIQRNAILALAHFKEEAAVPDLIVLLQKDERPVIRGTAAWALGKIGGEQAQAALHEAEVMEQDEEVLAEIQKGLQFFY

SEQ ID NO: 77979 - protein, 378 aa, Lysinibacillus manganicus
  misc_feature (1)..(378): tr|A0A0A3IYN2|A0A0A3IYN2_9BACI Iron-sulfur cluster-bind ing protein OS=Lysinibacillus manganicus DSM 26584 OX=1 384049 GN=CD29_02950 PE=4 SV=1
MSIEQLQLDLIDYAKSIGVDKIGFTSASPFNELKNRLKRQQELGYQSGFEESDIDKRTEPIKLLDGAESIIAIALAYPSKMEDAPTGKKGARRGIFARASWGIDYHVALRERLKLLEEWLVERVPGVKFKSMVDTGELVDRAVAERAGIGWSGKNCSIITPEFGSYVYLGEMITNIPFAQDSPIENECGDCRLCLDVCPTGALVEAGQLNAKSCVAFLTQTKDFLPDEFRGKIGNRVYGCDTCQTVCPKNKGKINWIHDEFKPDPEIAKPLLQPLLHMSNKEFKSKFGHVSGSWRGKKPIQRNAIIALAHFKEEAAVPDLINIMKKDERPVMRGTAAWAIGKIGGPLAEDALVGAKDVEKDEEVLKEIEKGLMLVMER

SEQ ID NO: 77980 - protein, 376 aa, Lysinibacillus mangiferihumi
  misc_feature (1)..(376): tr|A0A4U2Z7B2|A0A4U2Z7B2_9BACI tRNA epoxyqueuosine(34) reductase QueG OS=Lysinibacillus mangiferihumi OX=11308 19 GN=queG PE=4 SV=1
MNIHDLQREFVAYAMSIGVDKIGFTTAAPFTELKNRLRRQQELGFQSGFEESDIEKRTEPLQLLEGAESIVAIAVAYPSKMKDAPAGKKGARRGIFCRASWGVDYHTALRQRLALLKAWLEERVRNVRIESMVDTGALVDRAVAERAGIGWSGKNCSIITPEFGSYVYLGELVTNIPFAPDKPMEEECGECRLCLDVCPTGALIEGGQLNSQRCIAFLTQTKGYLPDEFRSHIGNRLYGCDTCQTVCPKNKGKINWIHEEFKPDPELAKPLLTPLLTISNREFKAKFGHVSGSWRGKKPIQRNAILALAHFKEEAAVPDLIELLEKDERPVIRGTAAWALGKIGGEQAENALLAAQDQEQDEEVLVEINKGLQFFS

SEQ ID NO: 77981 - protein, 381 aa, Lysinibacillus massiliensis
  misc_feature (1)..(381): tr|A0A0A3IVN5|A0A0A3IVN5_9BACI Epoxyqueuosine reductase OS=Lysinibacillus massiliensis 4400831 = CIP 108448 = CCUG 49529 OX=1211035 GN=queG PE=3 SV=1
MNIEQLQQQLIEYASSIGVDKIGFTTASPFNELKNRLKRQQELGYQSGFEESDIDKRTEPIRLLDNAESIIAIALAYPSKMEDAPSGKKGARRGIFARASWGIDYHVAVRERLQLIEVWLQEKVPNVQLKSMVDTGELVDRAVAERAGIGWSGKNCSIITPEFGSYVYLGEMITNIPFAPDTPIENECGDCTLCLDVCPTGALVNPGQLNAQRCVAFLTQTKDYLPDEFRAKIGNRIYGCDTCQTVCPKNKGKMNWIHDEFKPDPEIAKPLLQPLLNMSNKEFKATFGYVSGSWRGKKPIQRNAIIALAHFKEQSAVPDLIDIMKKDERPVMRGTAAWAIGKIGGPLAEDALLNALEREKDEAVIHEIHKGMRLLKAETKA

SEQ ID NO: 77982 - protein, 375 aa, Lysinibacillus odysseyi
  misc_feature (1)..(375): tr|A0A0A3IJB9|A0A0A3IJB9_9BACI Epoxyqueuosine reductase OS=Lysinibacillus odysseyi 34hs-1 = NBRC 100172 OX=122 0589 GN=queG PE=3 SV=1
MRIADLQAQLIEYAKSIGVDKIGFATASPFHELKNRLRRQQELGFQSGFEESDIELRTEPLRLLDGAESIIAIAIAYPSKMKDAPAGKKGERRGIFCRASWGIDYHVAVRERLQLIEAWLAERVPDVRIKSMVDTGELVDRAVAERAGIGWNGKNCSIITPEFGSYVYLGELITNIPFEPDTPIEDECGDCTLCLDVCPTGAIVAPGQLNSQRCIAYLTQTKGFLPDEFRGKIGNRLYGCDTCQTVCPKNKGKANWIHEEFTPDPEVAKPLLSPLLSISNKEFKAKFGHVSGSWRGKKPIQRNAILALAHFKEQSAIPELIDVMKKDERPVIRGTAAWALGKIGGHEAQLALQGAKERETDAEVLTEIEKGLALL

SEQ ID NO: 77983 - protein, 372 aa, Lysinibacillus saudimassiliensis
  misc_feature (1)..(372): tr|A0A078MAJ3|A0A078MAJ3_9BACI Epoxyqueuosine reductase OS=Lysinibacillus saudimassiliensis OX=1461583 GN=queG PE=4 SV=1
MRVHQLQRELIAYAKEIGIDKIGFTTAEPFVKLKDRLYTQQKLGYASGFEERDIALRTEPLKLLPTAQSIIAIAVAYPSRMTEHVAGKKGERRGIFCRASWGTDYHTVLRERLAKLEAWLCERVPEAELSSMVDTGALVDRAVAERAGIGWSGKNCSIITPEFGSYVYLGEMLTNIPFIADEPIEDACLDCRLCLDVCPTTALVAPGQLDAQRCIAYLTQTKQEMPLEFRKHIGNRVYGCDTCQTVCPKNKGKTNMWHEEFKPEPALVKPLLEPLLTISNREFKEQYGDMSGSWRGKKPIQRNAMLALAHFKEQSALPALQKILFEDSRPDIRATAAYAISEITEDTVILEQARERETDEAVLREIARILGE

SEQ ID NO: 77984 - protein, 377 aa, Lysinibacillus sinduriensis
  misc_feature (1)..(377): tr|A0A0A3HWY0|A0A0A3HWY0_9BACI Iron-sulfur cluster-bind ing protein OS=Lysinibacillus sinduriensis BLB-1 = JCM 15800 OX=1384057 GN=CD33_09465 PE=4 SV=1
MKIEQLQSELIEYAKSIGVDKIGFTHASPFHEMKNRLKRQQQLGYQSGFEESDIEKRTEPLLLLDSAESIISIALAYPSKMEDAPTGKKGARRGIFARASWGVDYHVAVRERLKLLEEWLRERVQHVQTKSMVDTGELVDRAVAERAGIGWSGKNCSIITPEFGSYVYLGEMITNIPFKPDTPMEDECGECRLCLDVCPTGALIEGGQLNSQRCVAFLTQTKDFLPDEFRKELGNRIYGCDTCQTVCPKNKGKSNWIHDEFKPDPELAKPLLQPLLQMSNKEFKSKFGYMSGSWRGKKPIQRNAIIALAHFKEQSAIPDLIAIMNKDERPVMRGTAAWAIGKIGGPHAEEALRKAKAVEKDEEVLREIDKGLKLLIS

SEQ ID NO: 77985 - protein, 377 aa, Lysinibacillus sp.
  misc_feature (1)..(377): tr|A0A2S1H5X2|A0A2S1H5X2_9BACI tRNA epoxyqueuosine(34) reductase QueG OS=Lysinibacillus sp. 2017 OX=2169540 GN =queG PE=4 SV=1
MKVDQLQAELIEYAQSIGVDKIGFTTSAPFHELKNRLRRQQELGYQSGFEESDVELRTEPLKLLDNAESIVAIAVAYPSRMQDAPQGKKGERRGIFCRASWGVDYHTAVRERLQLLEAWLAERVPDVKVKSMVDTGELVDRAVAERAGIGWSGKNCSIITPEFGSYVYLGEIMTNIPFAPDTPMEDGCGDCNLCMDVCPTGAIVAPGQLNSQRCIAFLTQTKGFLPDEFRAKIGNRLYGCDTCQTVCPKNKGKLNWIHDEFTPDPELAKPLLQPLLSISNKEFKAKFGHVSGSWRGKKPIQRNAILALAHFKEEAAMPDLIDVLQKDERPVLRGTAAWAIGKIGAENAQEVLITAKAKEQDEEVLAEIEKGLAFLSR

SEQ ID NO: 77986 - protein, 376 aa, Lysinibacillus sp.
  misc_feature (1)..(376): tr|A0A0P7L012|A0A0P7L012_9BACI Epoxyqueuosine reductase OS=Lysinibacillus sp. ZYM-1 OX=1681184 GN=AO843_11015 PE=4 SV=1
MNIHDLQRDFVAYAMSIGVDKIGFTTAAPFTELKNRLRRQQELGYQSGFEESDIEKRTEPLQLLDEAESIVAIAVAYPSRMQNAPIGKKGARRGIFCRASWGVDYHTALRERLKLLSAWLEEHVEGVRIESMVDTGALVDRAVAERAGIGWSGKNCSIITPEFGSYVYLGELITNIPFAPDKPMEDECGECRLCLDVCPTGALIQGGQLDAQRCIAFLTQTKGTLPDEFRNHIGNRLYGCDTCQTVCPKNKGKINWIHEEFMPDPELAKPLLTPLLTISNREFKTKFGHVSGSWRGKKPIQRNAILALAHFKEEAAIPDLIDLLNKDDRPVIRGTAAWALGKIGGEQANFALLEAVADEQDEEVLNEIRKGLQFFQ

SEQ ID NO: 77987 - protein, 376 aa, Lysinibacillus sphaericus
  misc_feature (1)..(376): tr|A0A2X0Z2T1|A0A2X0Z2T1_LYSSH Iron-sulfur cluster bind ing protein OS=Lysinibacillus sphaericus OX=1421 GN=que G PE=4 SV=1
MNIHDLQRDFVAYAMSIGVDKIGFTTAAPFTELKNRLRRQQELGYQSGFEESDIQKRTEPLQLLDEAESIVAIAVAYPSRMQNAPIGKRGARRGIFCRASWGVDYHTALRERLKLLSTWLEEHVKGVRIESMVDTGALVDRAVAERAGIGWSGKNCSIITPEFGSYVYLGELITNIPFAPDKPMEDECGDCRLCLDVCPTGALIQGGQLDAQRCIAFLTQTKGTLPDEFRSHIGNRLYGCDTCQTVCPKNKGKINWIHEEFIPDPELAKPLLTPLLTITNREFKGRFGHVSGSWRGKKPIQRNAILALAHFKEEAAIPDLIALLHKDDRPVIRGTAAWALGKIGGDTAQTALHEAEATEQDEEVRSEIYKGLQFFK

SEQ ID NO: 77988 - protein, 376 aa, Lysinibacillus sphaericus
  misc_feature (1)..(376): tr|R7ZJF2|R7ZJF2_LYSSH 4Fe-4S ferredoxin-type domain-co ntaining protein OS=Lysinibacillus sphaericus OT4b.31 O X=1285586 GN=H131_01668 PE=4 SV=1
MNIHDLQREFVAYAMSIGVDKIGFTTAAPFTELKNRLRRQQELGYQSGFEESDIEKRTEPFQLLAGAESIVAIAVAYPSRMQDAPVGKKGSRRGIFCRASWGVDYHTALRERLKLLSAWLEERVEGVRIESMVDTGALVDRAVAERAGIGWSGKNCSIITPEFGSYVYLGEIITNLPFAPDTAMEDECGDCRLCLDVCPTGALIAGGQLDSQRCIAFLTQTKGTLPDEFRSHIGNRLYGCDTCQTVCPKNKGKINWIHEEFKPNPEIAKPLLVPLLTISNRDFKDKFGHVSGSWRGKKPIQRNAILALAHFKEEIAVPDLVSLLEKDERPVIRGTAAWALGKIGGEQAERALLAAKGTEQDDEVLVEINKGLQFFS

SEQ ID NO: 77989 - protein, 376 aa, Lysinibacillus tabacifolii
  misc_feature (1)..(376): tr|A0A4U2XBC5|A0A4U2XBC5_9BACI tRNA epoxyqueuosine(34) reductase QueG OS=Lysinibacillus tabacifolii OX=1173107 GN=queG PE=4 SV=1
MNIHDLQREFVAYAMSIGVDKIGFTTAAPFTELKNRLRRQQELGFQSGFEESDIEKRTEPLQLLEGAESIVAIAVAYPSKMKDAPTGKKGARRGIFCRASWGVDYHTALRQRLALLKAWLEERVSNVRIESMVDTGALVDRAVAERAGIGWSGKNCSIITPEFGSYVYLGELVTNIPFAPDKPMEDECGECRLCLDVCPTGALIEGGQLNSQRCIAFLTQTKGYLPDEFRSHIGNRLYGCDTCQTVCPKNKGKINWIHEEFKPDPELAKPLLTPLLTISNREFKTKFGHVSGSWRGKKPIQRNAILALAHFKEEAAVPDLIELLEKDERPVIRGTAAWALGKIGGEQAENALLAAQDQEQDEEVLVEINKGLQFFS

SEQ ID NO: 77990 - protein, 379 aa, Lysinibacillus telephonicus
  misc_feature (1)..(379): tr|A0A3S0JT85|A0A3S0JT85_9BACI Epoxyqueuosine reductase OS=Lysinibacillus telephonicus OX=1714840 GN=queG PE=3 SV=1
MKIESLQSELIEYAKSIGVDKIGFTHASPFNELKNRLKRQQELGYQSGFEESDIEKRTEPIRLLNSAESIIAIALAYPSKMKDAPVGKKGSRRGIFARASWGIDYHVAVRERLKLIEEWLKERVPTVQVKSMVDTGELVDRAVAERAGIGWSGKNCSIITPEFGSYVYLGEMITNIPFAPDDPIENECGDCTLCLDVCPTGALVEAGQLNAQRCVAFLTQTKDFLPDEFRTEIGNRIYGCDTCQTVCPKNKGKTNWIHEEFKPDPELAKPLLQPLLKISNKEFKAKFGSMSGSWRGKKPIQRNAIIALAHFREQSAVPDLIDVMKKDERPVMRGTAAWAIGKIGGPLAEEALSKAYEQESDEDVLREIEKGIKLLNVSL

SEQ ID NO: 77991 - protein, 376 aa, Lysinibacillus varians
  misc_feature (1)..(376): tr|X2GSB0|X2GSB0_9BACI Iron-sulfur cluster-binding prot ein OS=Lysinibacillus varians OX=1145276 GN=T479_19810 PE=4 SV=1
MNIHDLQREFVAYAMSIGVDKIGFTTAAPFTELKNRLRRQQELGFQSGFEESDIEKRTEPLQLLEGAESIVAIAVAYPSKMKDAPTGKKGARRGIFCRASWGVDYHTALRQRLALLKAWLEERVSNVRIESMVDTGALVDRAVAERAGIGWSGKNCSIITPEFGSYVYLGELVTNIPFAPDKPMEDECGECRLCLDVCPTGALIEGGQLNSQRCIAFLTQTKGYLPDEFRSHIGNRLYGCDTCQTVCPKNKGKINWIHEEFKPDPELAKPLLTPLLTISNREFKTKFGHVSGSWRGKKPIQRNAILALAHFKEEAAVPDLIELLEKDERPVIRGTAAWALGKIGGEQAANALLAAQDQEQDEEVLVEINKGLQFFS

SEQ ID NO: 77992 - protein, 376 aa, Lysinibacillus xylanilyticus
  misc_feature (1)..(376): tr|A0A0K9F0P1|A0A0K9F0P1_9BACI Iron-sulfur cluster-bind ing protein OS=Lysinibacillus xylanilyticus OX=582475 G N=ACZ11_23125 PE=4 SV=1
MNIHDLQREFVAYAMSIGVDKIGFTTAAPFTELKNRLRRQQELGYQSGFEESDIEKRTEPLQLLEGAESIVAIAVAYPSRMQDAPVGKKGSRRGIFCRASWGVDYHTALRERLKLLSAWLEERIEGARIESMVDTGALVDRAVAERAGIGWSGKNCSVITPEFGSYVYLGELITNIPFAPDKPMEDECGDCRLCLDVCPTGALIEGGQLDSQRCIAFLTQTKGMLPDEFRTHIGNRLYGCDTCQTVCPKNKGKINWIHEEFKPDPELAKPLLVPLLTISNRDFKEKFGHVSGSWRGKKPIQRNAISALAHFKEEAAVPDLVALLEKDERPVIRGTAAWALGKIGGEQSQSALLKAKGKEQDEEVLVEINKGLQFFN

SEQ ID NO: 77993 - protein, 376 aa, Lysinibacillus xylanilyticus
  misc_feature (1)..(376): tr|A0A2M9PZ03|A0A2M9PZ03_9BACI tRNA epoxyqueuosine(34) reductase QueG OS=Lysinibacillus xylanilyticus OX=58247 5 GN=queG PE=4 SV=1
MNIHDLQREFVAYAMSIGVDKIGFTTAAPFTELKNRLRRQQELGYQSGFEESDIEKRTEPLQLLEGAESIVAIAVAYPSRMQDAPVGKKGSRRGIFCRASWGVDYHTALRERLKLLSAWLEERIEGARIESMVDTGALVDRAVAERAGIGWSGKNCSVITPEFGSYVYLGELITNIPFAPDKPMEDECGDCRLCLDVCPTGALIEGGQLDSQRCIAFLTQTKGMLPDEFRTHIGNRLYGCDTCQTVCPKNKGKINWIHEEFKPDPELAKPLLVPLLTISNRDFKEKFGHVSGSWRGKKPIQRNAILALAHFKEEAAVPDLVALLEKDERPVIRGTAAWALGKIGGEQSQSALLKAKGKEQDEEVLVEINKGLQFFN

SEQ ID NO: 77994 - protein, 376 aa, Lysinibacillus xyleni
  misc_feature (1)..(376): tr|A0A285T6M6|A0A285T6M6_9BACI Epoxyqueuosine reductase OS=Lysinibacillus xyleni OX=614648 GN=SAMN05880501_109 70 PE=4 SV=1
MIAQLQKDLVEYAKSIGVDKIGFTHASPFQELKNRLKRQQELNYQSGFEESDIDLRTEPNRLLDGAESIIAIALAYPSKMEEAPTGKKGARRGIFARASWGIDYHVAVRERLQLIEEWLKERVPTVQLKSMVDTGELVDRAVAERAGIGWSGKNCSIITHEFGSYVYLGEMITNIPFAPDTPIENECGECRLCLDVCPTGALVDAGQLNSKKCVAFLTQTKDFLPDEFRAKIGNRIYGCDTCQTVCPKNKGKINWIHDEFKPDPELAKPLLQPLLNLSNKEFKAKFGAMSGSWRGKKPIQRNAIIALAHFKEEAAVPDLIAIMKKDERPVMRGTAAWAIGKIGGPLAEEALLAAREREMDSEVVAEIEKGLTLLNV

SEQ ID NO: 77995 - protein, 358 aa, Lysobacter aestuarii
  misc_feature (1)..(358): tr|A0A507ZVH3|A0A507ZVH3_9GAMM Epoxyqueuosine reductase OS=Lysobacter aestuarii OX=1706195 GN=queG PE=3 SV=1
MTPSTAPAPLDPDAIAARVRALAKDLGFQRCGISAIELDEDEAHLRSWLAEGLYGSMEWMARHGDKRARPAELVPGTVRVISVGLDYGRNDGDEAWDTLADGERAYVARYALGRDYHKLMRQRLQRLADRVAADIGPFGHRVFVDSAPVLERALARNAGLGWIGKHTCLIDKDGGSWFFLGEIYVDLPLPVDPPASAHCGSCTRCIDVCPTAAIIAPNRLDARRCISYLTIEHEGAIPEALRKPIGNRIFGCDDCQLVCPWNKFARRSDEPDFRARNNLDRATLPELFAWDEAEFLRRTEGSAIRRSGHERWLRNIAVALGNAPGTPEVVAALQSRREDASALVREHVAWALAQHGGA

SEQ ID NO: 77996 - protein, 380 aa, Lysobacter antibioticus
  misc_feature (1)..(380): tr|A0A0S2F9I6|A0A0S2F9I6_9GAMM Epoxyqueuosine reductase OS=Lysobacter antibioticus OX=84531 GN=queG PE=3 SV=1
MRRFYTCRIVSQSDTRPTSPLPASADAPGSAPDYAALALRIREIAREFGFQRCGISGIELAEDEAYLLDWLEQGLHGSMDWMARHGGLRARPDELLPGTLRVISVGLDYGRRDDEDAWVTLADGERAYVARYALGRDYHKLMRQRLQRLADRLAELVGPFGHRVFVDSAPVLERALARNAGLGWIGKHTCLIDKDGGSWFFLGEIYVDLPLPIDRPASAHCGTCTRCIDICPTQAIVAPHRLDARRCISYLTIEHEGPIPVELRAPIGNRIFGCDDCQLVCPWNKFAKRNDEPDFRARNDLDRASLAQLFAWDEAEFLRRTEGSAIRRSGHERWLRNIAVALGNAPGSDEVIAGLRSRREHPSEIVREHVEWALARHGVR

SEQ ID NO: 77997 - protein, 375 aa, Lysobacter capsici
  misc_feature (1)..(375): tr|A0A290ZZT9|A0A290ZZT9_9GAMM Epoxyqueuosine reductase OS=Lysobacter capsici OX=435897 GN=queG PE=3 SV=1
MGRFYTCRIVSPPTARPTPPDPPPAAPDYVALAARIRAIAREFGFQRCGISGIELAQDEAHLLDWLAQGLHGSMDWMARHGELRARPNDLLPGTVRVISVGLDYGRRDDEDAWITLADGERAYVARYALGRDYHKLMRQRLQRLAERLAEVVGPFGHRVFVDSAPVLERALARNAGLGWIGKHTCLIDKDGGSWFFLGEIYVDLPLPVDTPATAHCGTCTRCIDICPTQAIIAPHRLDARRCIAYLTIEHEGAIPIELRPAIGNRIFGCDDCQLVCPWNKFAQRTDEPDFRARNDLDRASLSQLFAWDEAEFLQRTEGSAIRRSGHERWLRNIAVALGNAPATPEVIAALRTRSEHASEVVREHVAWALARHDAA

SEQ ID NO: 77998 - protein, 383 aa, Lysobacter capsici
  misc_feature (1)..(383): tr|A0A108U6L7|A0A108U6L7_9GAMM Epoxyqueuosine reductase OS=Lysobacter capsici AZ78 OX=1444315 GN=queG PE=3 SV= 1
MEVSAVADMGRFYTCRIVSPPTARPTPPDPPPAAPDYVALAARIRAIAREFGFQRCGISGIELAQDEAHLLDWLAQGLHGSMDWMARHGELRARPNDLLPGTVRVISVGLDYGRRDDEDAWITLADGERAYVARYALGRDYHKLMRQRLQRLAERLAEVVGPFGHRVFVDSAPVLERALARNAGLGWIGKHTCLIDKDGGSWFFLGEIYVDLPLPVDTPATAHCGTCTRCIDICPTQAIIAPHRLDARRCIAYLTIEHEGAIPIELRPAIGNRIFGCDDCQLVCPWNKFAQRTDEPDFRARNDLDRASLSQLFAWDEAEFLQRTEGSAIRRSGHERWLRNIAVALGNAPATPEVIAALRTRSEHASEVVREHVAWALARHDAA

SEQ ID NO: 77999 - protein, 368 aa, Lysobacter concretionis
  misc_feature (1)..(368): tr|A0A0A0ENS6|A0A0A0ENS6_9GAMM Epoxyqueuosine reductase OS=Lysobacter concretionis Ko07 = DSM 16239 OX=1122185 GN=queG PE=3 SV=1
MPATPTDAGCEPADPAALARRIRELAREFGFQRCGISGIDLGEDEAHLRDWLAQGLYGSMEWMARHGDARSRPAELIPGTLRVISVGLDYGRRDDQEAWQTLADGERAYVARYALGRDYHKLMRQRLQRLATRIAEVVGPFGHRVFVDSAPVLERALARNAGLGWIGKHTCLIDKDGGSWFFLGEIYLDLPLPVDAPASTHCGTCTRCIDVCPTQAITAPYRLDARRCISYLTIEHDGPIPLELREPIGNRIFGCDDCQLVCPWNKFAKRTDEPDFRARNNLDEASLAELFAWTEAEFLQRSEGSAIRRSGHQRWLRNIAVALGNAPTTPEVVAALESRRDSDDPLVREHVEWALERHGVPNGPAARG

SEQ ID NO: 78000 - protein, 350 aa, Lysobacter daejeonensis
  misc_feature (1)..(350): tr|A0A0A0EXC7|A0A0A0EXC7_9GAMM Epoxyqueuosine reductase OS=Lysobacter daejeonensis GH1-9 OX=1385517 GN=queG PE =3 SV=1
MAPRLRELAHEAGFQHFGIAGIELDADEVHLRDWLAKGLHGSMGWMAHHGDKRSRPDELIPGTLRVISVGLDYGRRDDAEAWQTLADGERAYVARYALGRDYHKLMRQRLQKLAERIATEIGPFGYRVFVDSAPVLERALARNAGLGWIGKHTCLIDRDGGSWFFLGEIYVDLPLPVDPPATAHCGTCTRCIEVCPTQAIVAPYRLDARRCISYLTIEHDGAIPEELRVPMGNRIFGCDDCQLVCPWNKFAKRSDEPDFRARNNLDQASLAELFAWTEDEFLRRTEGTAIRRSGHERWLRNIAVALGNAPTSPEVVAALESRREHDSALVREHVAWALQRHDTKRESAGQ

SEQ ID NO: 78001 - protein, 354 aa, Lysobacter defluvii
  misc_feature (1)..(354): tr|A0A0A0M8V1|A0A0A0M8V1_9GAMM Epoxyqueuosine reductase (Fragment) OS=Lysobacter defluvii IMMIB APB-9 = DSM 18 482 OX=1385515 GN=N791_08565 PE=3 SV=1
GASDPAALASRIRELAREGGFQRCGITGIDLAEDEAHLADWLGRGLYGTMEWMARHGRMRARPAELLPGTLRVISVGLDYGRRDDVEAWETLGDGERAYVARYALGRDYHKMMRQRLQRLADRIAELIGPFGHRVFVDSAPVLERALARNAGLGWIGKHTCLIDKDGGSWFFLGEIYVDVPLPVDAPATHHCGTCTRCIDVCPTGAIVAPYRLDARRCISYLTIEHDGPIPEEFRAPIGNRIFGCDDCQLVCPWNKFARRSDEPDFRARNNLDEASLAELFAWTEDEFLTRTEGSAIRRSGHRRWLRNIAVALGNAPTTPGVLAALESRRDDADELVREHVAWALSQHPKPATP

SEQ ID NO: 78002 - protein, 354 aa, Lysobacter dokdonensis
  misc_feature (1)..(354): tr|A0A0A2WMK6|A0A0A2WMK6_9GAMM Epoxyqueuosine reductase OS=Lysobacter dokdonensis DS-58 OX=1300345 GN=queG PE= 3 SV=1
MPSQPAPEGSVLAGQIRALARDLGFQRVGIAGVDLDQDEGHLRDWLAQGLYGSMDWMARHGDKRSRPGELVPGTVRVISVGLDYAQDDEFAWRTLADGERAYVARYALGRDYHKLMRNRLQTLADRIAALVGPFGHRVFVDSAPVLERALARNAGLGWIGKNTCLIDRDAGSWFFLGEVFVDIPLPIDPPASAHCGSCRRCIDVCPTQAIVAPNRLDARRCISYLTIEHEGSIDPELRPLMGNRIFGCDDCQLICPWNKFAKRTDEPDFRARNNLDTATLPELFAWSEDDFLRRTEGSAIRRSGYARWLRNIAVALGNAPTTPEVLRALESRRDVEDPVVREHVAWAIARHASR

SEQ ID NO: 78003 - protein, 359 aa, Lysobacter enzymogenes
  misc_feature (1)..(359): tr|A0A1T3VLA3|A0A1T3VLA3_LYSEN Epoxyqueuosine reductase OS=Lysobacter enzymogenes OX=69 GN=queG PE=3 SV=1
MPGPAGRPAPDYAALARRIRALAREFGFQRCGISGVELGEDEAYLLDWLERGLHGSMDWMARHGELRARPAQLLPGTVRVISVGLDYGRRDDEEAWATLADGERAYVARYALGRDYHKLMRQRLQRLAERLAELVGPFGHRVFVDSAPVLERALARNAGLGWIGKHTCLIDKDGGSWFFLGEIYVDLPLPVDAPASAHCGTCVRCIDVCPTQAIVAPHRLDARRCIAYLTIEHDGAIPLELREPIGNRIFGCDDCQLVCPWNKFAKRSDEPDFRARNDLDRATLAQLFAWEEDEFLRRTEGSAIRRSGHERWLRNIAVALGNAPTTPEVIAALRSRLQHPSELVREHVQWALAKHETSL

SEQ ID NO: 78004 - protein, 396 aa, Lysobacter enzymogenes
  misc_feature (1)..(396): tr|A0A0S2DIS0|A0A0S2DIS0_LYSEN Epoxyqueuosine reductase OS=Lysobacter enzymogenes OX=69 GN=queG PE=3 SV=1
  misc_feature (376)..(382): Xaa can be any naturally occurring amino acid
MPGFYTCRIVSQIDASPSSPLPGPAGRPAPDYAALARRIRALAREFGFQRCGISGVELGEDEAYLLDWLERGLHGSMDWMARHGELRARPAQLLPGTVRVISVGLDYGRRDDEEAWATLADGERAYVARYALGRDYHKLMRQRLQRLAERLAELVGPFGHRVFVDSAPVLERALARNAGLGWIGKHTCLIDKDGGSWFFLGEIYVDLPLPVDAPASAHCGTCVRCIDVCPTQAIVAPHRLDARRCIAYLTIEHDGAIPLELREPIGNRIFGCDDCQLVCPWNKFAKRSDEPDFRARNDLDRATLAQLFAWEEDEFLRRTEGSAIRRSGHERWLRNIAVALGNAPTTPEAIAALRSRLQHPSELVREHVQWALAKHXXXXXXXRSYRVFGRKRRTAP

SEQ ID NO: 78005 - protein, 363 aa, Lysobacter gummosus
  misc_feature (1)..(363): tr|A0A0S2G8J0|A0A0S2G8J0_9GAMM Epoxyqueuosine reductase OS=Lysobacter gummosus OX=262324 GN=queG PE=3 SV=1
MSQPDARPTSPAAAPDYAALAARIRQIAREFGFQRCGISGIELAQDEAYLLDWLDQGLHGSMDWMARHGDLRARPSALLPGTLRVISVGLDYGRRDDEDAWATLADRERAYVARYALGRDYHKLMRQRLQRLADRLAEVVGPFGHRVFVDSAPVLERALARNAGLGWIGKHTCLIDKDGGSWFFLGEIYVDLPLPVDTPATAHCGTCTRCIDICPTQAIVAPHRLDARRCIAYLTIEHEGAIPIELRPAIGNRIFGCDDCQLVCPWNKFAQRTDEPDFRARNDLDKATLTQLFAWDEAEFLQRTEGSAIRRSGHERWLRNIAVALGNAEDSPEVVAALRARREDPSEVVREHVAWALARHGVA

SEQ ID NO: 78006 - protein, 354 aa, Lysobacter lycopersici
  misc_feature (1)..(354): tr|A0A516V2C5|A0A516V2C5_9GAMM Epoxyqueuosine reductase OS=Lysobacter lycopersici OX=1324796 GN=queG PE=3 SV=1
MPETAAKPDYPALALRFKALAREHGFQRCGISGIELAADESHLRDWLSRGLYGTMDWMARHGEKRTRPAELVPGTLRVFSVGLDYGQDEAAAWDNLRDGERAYVARYALGRDYHKLMRNRLQKLADEIAGEIGPFGHRVFVDSAPVLERALARDAGVGWIGKHTCLIDKDGGSWFFLGEIYLDLPLAVDPPATEHCGTCTRCIEICPTQAIVAPHRLDARRCISYLTIEHEGSIAEELRPLIGNRIFGCDDCQLVCPWNKFAKRTDEPDFRARNDLDRATLAELFAWSEDEFLQRTEGSAIRRSGHDRWLRNIAVALGNAPKSESVIAALQSRREDPSPIVREHVEWALRRHGS

SEQ ID NO: 78007 - protein, 352 aa, Lysobacter maris
  misc_feature (1)..(352): tr|A0A508AXV9|A0A508AXV9_9GAMM Epoxyqueuosine reductase OS=Lysobacter maris OX=1605891 GN=queG PE=3 SV=1
MAERVRELAREFGFQRCGIAGIELGEDETHLRSWLAEGLYGSMDWMARHGDKRSRPSALIPGTLRVISVGLDYGRNDGEEAWDTLADGERAYVARYALGRDYHKLMRQRLQRMAERLAVEVGAFGHRVFVDSAPVLERALARNAGLGWIGKHTCLIDKDGGSWFFLGEIYVDLPLPIDPPASAHCGTCTRCIDICPTRAIVAPNRLDARRCIAYLTIEHEGAIPEPLREPIGNRIFGCDDCQLVCPWNKFARRTDEPDFRARNDLDRASLAELFAWDEDEFLRRTEGSAIRRSGHERWLRNIAVALGNAPTTPEVLAALASRRDHPSALVREHVEWALARHAKEADLPQGRP

SEQ ID NO: 78008 - protein, 365 aa, Lysobacter maris
  misc_feature (1)..(365): tr|A0A2U9THW7|A0A2U9THW7_9GAMM Epoxyqueuosine reductase OS=Lysobacter maris OX=1605891 GN=queG PE=3 SV=1
MNTAAAPDVDYAALAERVRELAREFGFQRCGIAGIELGEDETHLRSWLAEGLYGSMDWMARHGDKRSRPSALIPGTLRVISVGLDYGRNDGEEAWDTLADGERAYVARYALGRDYHKLMRQRLQRMAERLAIEVGAFGHRVFVDSAPVLERALARNAGLGWIGKHTCLIDKDGGSWFFLGEIYVDLPLPIDPPASAHCGTCTRCIDICPTRAIVAPNRLDARRCIAYLTIEHEGAIPEPLREPIGNRIFGCDDCQLVCPWNKFARRTDEPDFRARNDLDRASLAELFAWDEDEFLRRTEGSAIRRSGHERWLRNIAVALGNAPTTPEVLAALASRRDHPSALVREHVEWALARHAKEADLPQGRP

SEQ ID NO: 78009 - protein, 354 aa, Lysobacter pythonis
  misc_feature (1)..(354): tr|A0A3M2I3F0|A0A3M2I3F0_9GAMM Epoxyqueuosine reductase OS=Lysobacter pythonis OX=2483112 GN=queG PE=3 SV=1
MPAPRADIALLTTRIREEAASLGFTRFGISGVALGEDESHLRSWLAEGLHGTMQWMAAHGDKRSRPDELIPGTLSVISVGLDYGREHEEAWATLEDGERAYVARYALGRDYHKLMRNRLQKLAARIAEVIGPFGHRVFVDSAPVLERALARNAGLGWIGKHTCLIDKDGGSWFFLGELYVDFDLPASAPATHHCGTCTRCIDICPTRAIIAPYRLDARRCISYLTIEHAGAIPEEFRAAIGNRIFGCDDCQLICPWNKFAKRADEPDFRVRNGLDRATLVELFAWSEDEFLRRTEGSAIRRSGHERWLRNIALALGNAPRTPEVAVSLRSRRDHPSELVREHVAWALARHGIAD

SEQ ID NO: 78010 - protein, 370 aa, Lysobacter ruishenii
  misc_feature (1)..(370): tr|A0A562LY98|A0A562LY98_9GAMM Epoxyqueuosine reductase OS=Lysobacter ruishenii OX=686800 GN=queG PE=3 SV=1
MARFYTAVAVSPLPTPAALADTDFDALASRIRTFAREAGFQHFGITGIELTGDEDHLRDWLAKGLHGSMGWMAQHGDKRSRPDELIPGTLRVVSVGLDYGRRDDEEAWQTLADGERAYVARYALGRDYHKLMRQRLQKLAERIAEEVGPFGYRVFVDSAPVLERALARNAGLGWIGKHTCLIDRDGGSWFFLGEIYLDLPLPVDPPATAHCGTCTRCIDICPTQAIIAPNRLDARRCISYLTIEHDGPIPEALRAPMGNRIFGCDDCQLVCPWNKFAKRTDEPDFRARNNLDQASLAELFAWSEEEFLRRTEGTAIRRSGHERWLRNIAVALGNAPSTPQVIAALQSRRDHDSAVVREHVEWALKRHGID

SEQ ID NO: 78011 - protein, 365 aa, Lysobacter silvestris
  misc_feature (1)..(365): tr|A0A2K1PYW7|A0A2K1PYW7_9GAMM Epoxyqueuosine reductase OS=Lysobacter silvestris OX=1645665 GN=queG PE=3 SV=1
MRGFYTSRIVSTPASPVLHDSQRLRRQIDALARARGFQRFGISGIELGEDIAHLEHWLVQGRHGDMAWMERNHDKRSAPESLVPGTLRVICVGMDYGQPPDAAWATLDDGERAYVARYALGRDYHKLMRKRLQQLADDVAAVIGPLGHRVFVDSAPVLERALARNAGLGWIGKHTCLIDKDGGSWFFLGELFVDLDLPVDVPATNHCGTCTRCIDICPTQAIVAPYQLDARRCIAYLTIEHEGAIDEALRPLIGNRIFGCDDCQLVCPWNKFARRNDEPDFRARNALDTATLPQLFAWSEDEFLQRSEGSTIRRSGYRRWRRNIAVALGNAPSTPEVIAALESARNEQDELVAEHVRWALAQHLR

SEQ ID NO: 78012 - protein, 356 aa, Lysobacter soli
  misc_feature (1)..(356): tr|A0A3D8VK92|A0A3D8VK92_9GAMM Epoxyqueuosine reductase OS=Lysobacter soli OX=453783 GN=queG PE=3 SV=1
MPDSAPDYGALAARVRELAREFGFQRCGITGVELGEDEAYLREWLAQGLYGSMDWMARHGDLRARPDELHPGTVRVISVGLDYGRDSDEAWATLDDSERAYVARYALGRDYHKLMRQRLQRLADRIAEVVGPFGHRVFVDSAPVLERALARNAGLGWIGKHTCLIDKDGGSFFFLGEIYVDLPLPVDVPASAHCGTCRRCIDVCPTQAIVAPYRLDARRCIAYLTIEHEGAIPEDLRAPIGNRIFGCDDCQLICPWNKFAQRTDEPDFRVRNDLDKATLVDLFAWSEEEFLQRTEGSAIRRSGHERWLRNIAVALGNARSTPDVIGALRARRESASPMVREHIEWALRRHGADDAA

SEQ ID NO: 78013 - protein, 418 aa, Lysobacter sp.
  misc_feature (1)..(418): tr|A0A522Y5F8|A0A522Y5F8_LYSSP Epoxyqueuosine reductase OS=Lysobacter sp. OX=72226 GN=queG PE=3 SV=1
MRPARPAPSGRARPARPAPLFPACVLNRHRTVRHRRASHDFILRVVDALDSSLAPAPDLAGIVHRVRTHAWAMGFQRCGISGVELGEDESHLADWLGRGLYGSMEWMARHGLTRARPAELIPGTVRVISVGLDYGRRDDTEAWQTLDDGERAYVARYALGRDYHKLMRGRLQKLADRLAAEVGPFGHRVFVDSAPVLERALARNAGLGWIGKHTCLIDRDGGSWFFLGEIYIDMPLPVDQPATAHCGTCTRCIDICPTAAILAPHRLDARRCISYLTIEHEGSIDVALRPLIGNRIFGCDDCQLVCPWNKFAKRTDEPDFRARNRLDTATLSDLFAWTAEEFLARTEGSAIRRSGHARWLRNIAIALGNAPSTPSVLAALQSRQHTEDAMVREHVEWAMSQHAARNTSGRANRTVNVR

SEQ ID NO: 78014 - protein, 371 aa, Lysobacter sp.
  misc_feature (1)..(371): tr|A0A3M8SUZ9|A0A3M8SUZ9_9GAMM Epoxyqueuosine reductase OS=Lysobacter sp. ZS60 OX=1327343 GN=queG PE=3 SV=1
MLQPSHTRTPPTAPDVDHVALARRIRELAREFGFQRCGISGIELGADELHLRDWLSQGLYGSMEWMARHGELRARPQELIPGTLRVISVGLDYGRNDDDSAWQTIADGERAYVARYALGRDYHKLMRQRLQKLADRIADVVGPFGHRVFVDSAPVLERALARNAGLGWIGKHTCLIDKDGGSWFFLGEIYVDLPLPVDVPASAHCGTCMRCIDICPTRAITAPHRLDARRCISYLTIEHEGSIPPDLREPMGNRIFGCDDCQLVCPWNKFAKRNDEPDFRARNDLDKATLAQLFAWDEDEFLRRTEGSAIRRSGHERWLRNIAVALGNAPTTPDVLAALESRREHASALVREHVQWALQRHREKTQDVPQA

SEQ ID NO: 78015 - protein, 361 aa, Lysobacter spongiicola
  misc_feature (1)..(361): tr|A0A1T4MQV2|A0A1T4MQV2_9GAMM Epoxyqueuosine reductase OS=Lysobacter spongiicola DSM 21749 OX=1122188 GN=queG PE=3 SV=1
MSAPAPNQPQADPAELAGRIRELAADLGFQRCGISGVDLGEDEAHLLDWLARGLHGSMDWMARHGSARSRPAELLPGTLRVISVGLDYGRRDDEEAWQTLADGERAYVARYALGRDYHKLMRQRLQKLADRIAELVGPFGYRAFVDSAPVLERALARNAGLGWIGKHTCLIDRDGGSWFFLGEIYVDLPLPVDAPATSHCGTCTRCIDVCPTGAITAPYRLDARRCISYLTIEHDGAIPEELRKPIGNRIFGCDDCQLACPWNKFAKRTDEPDFRVRNNLDEASLPELFAWTEEEFLQRTEGSAIRRSGHRRWLRNIAVALGNAPTTPAVLDALDARRDNPDGLVREHVEWALRQHREREC

SEQ ID NO: 78016 - protein, 354 aa, Lysobacter tolerans
  misc_feature (1)..(354): tr|A0A1N6VPY1|A0A1N6VPY1_9GAMM Epoxyqueuosine reductase OS=Lysobacter tolerans OX=1604334 GN=queG PE=3 SV=1
MHAPNADIDQLIARIREEAASLGFTRFGVSGIELNEDAEHLRRWLKEGLHGTMQWMAAHGDKRMRPEELIPGTVSVISVGLDYGRDHDEAWATIEDGERAYVARYALGRDYHKLMRSRLQKLAERIEAIIGPFGHRVFVDSAPVLERALARNAGLGWIGKHTCLIDKDGGSWFFLGELYVDFALPASSPATNHCGSCRRCIDICPTQAIVAPYRLDARRCISYLTIEHEGSIPEKFRVPMGNRIFGCDDCQLVCPWNKFAERFDEPDFRTRNDLDRATLADLFAWDEAEFLRRTEGSAIRRSGHERWLRNIAIALGNAPTTPDVIAALQSRQDHPSAIVREHVQWGLMRHDAGE

SEQ ID NO: 78017 - protein, 317 aa, Macellibacteroides sp.
  misc_feature (1)..(317): tr|A0A1C2BSR8|A0A1C2BSR8_9PORP Epoxyqueuosine reductase OS=Macellibacteroides sp. HH-ZS OX=1857568 GN=queG PE= 3 SV=1
MNLEQKIKEEALRLGFAACGIAELAPADSEAAYFDTWLANGMHADMTFMENYRNVRLDPTGLLEGARSIISVALNYYPACLQPQDVPQLAYYAYGRDYHYVIKEKLNELVDYIRREVNINARCFTDSAPILERYWAWKAGLGWIGKNTHLIIPGKGSYFFLGEIVTDLALIPDRPMESMCGKCTRCMESCPTKAIEAPRTLNAGKCISYLTIENRNEIPEKLAPLIGNRIYGCDTCQQVCPWNRFARPTTEESFMMKDELAEMTADKWYALSREQYTRIFKGSAVKRAKYEGLLRNIANYKAINFRKEEEQNTNTYK

SEQ ID NO: 78018 - protein, 374 aa, Macrococcus bohemicus
  misc_feature (1)..(374): tr|A0A4R5XXC9|A0A4R5XXC9_9STAP tRNA epoxyqueuosine(34) reductase QueG OS=Macrococcus bohemicus OX=1903056 GN=q ueG PE=4 SV=1
MYQQLKQEIIEYSKTIGIDAIGFTTADPFESLRPKLEAYYANNYDSGFEKGTIEERINPRLSLPEAQSIIAIAVGYPNKLPNAPKSIRGARRGIFARASWGIDYHTLLNKRLELLVAFIKERFPEAKMMNMVDTGVLSDRAVAERAGLGYAAKNGFILNKDLGTWTYLGEILVSIPFEPDHPVIDSCLDCTICIDRCPTGALLGNGQLDSNKCISFLTQTKGFMPDEYRGKIGNRLYGCDTCQQVCPKNRGINTTHEDIELEPENLKPLLVPLLKMTNKTFKAEFGHLAGAWRGKKPIQRNAILALAHFKEIDAIRDLKEVAESDPRPEIKGTAYWAIGQISRDEIDYLKARYEKEIDNDVKLEILKSIESVEK

SEQ ID NO: 78019 - protein, 374 aa, Macrococcus bohemicus
  misc_feature (1)..(374): tr|A0A328A5Z2|A0A328A5Z2_9STAP tRNA epoxyqueuosine(34) reductase QueG OS=Macrococcus bohemicus OX=1903056 GN=q ueG PE=4 SV=1
MYQQLKQEIIEYSKTIGIDAIGFTTADPFESLRPKLEAYYANNYDSGFEKGTIEERINPRLSLPEAQSIIAIAVGYPNKLPNAPKSIRGARRGIFARASWGIDYHTLLNKRLELLVAFIKERVPEAKTMNMVDTGVLSDRAVAERAGLGYAAKNGFILNKDLGTWTYLGEILVSIPFEPDHPVIDSCLDCTICIDRCPTGALLGNGQLDSNKCISFLTQKKGFMPDEYRGKIGNRLYGCDTCQQVCPKNRGINTTHEDIELEPENLKPLLVPLLKMTNKTFKAEFGHLAGAWRGKKPIQRNAILALAHFNEIDAIPDLKEVAESDPRPEIKGTAYWAIGQISRDEIDYLKARYEKEIDNDVKLEILKSIESVEK

SEQ ID NO: 78020 - protein, 377 aa, Macrococcus bovicus
  misc_feature (1)..(377): tr|A0A4R6C113|A0A4R6C113_9STAP tRNA epoxyqueuosine(34) reductase QueG OS=Macrococcus bovicus OX=69968 GN=queG PE=4 SV=1
MSQTLKEEIIAYSKTIGIDAIGFTTAEPFEELRPKLEAYYAKGYASGFEESDIELRIDPRKSMASAESIIAIAVGYPNKLPGTPKSTRGERRGMFARSSWGMDYHSLLRKRLQLLEAFIKSRLPEAECLSMVDTGVLSDRAVAERAGLGYAAKNGFILNRKLGTWTYLGELLTSIKLPPDAPVLDSCLDCTICIDRCPTGALVGNGQLNSQKCISFLTQTKGFLPDEYRSKIGNRLYGCDTCQQVCPKNRGIHTTHDDIILEPLKLKPLLEPLLTMSNKMFKNEYGHLAGSWRGKKPVQRNAIIALAHFKEESAVPTLKEVAVKDERPVIKGTAYWAIGQIAGEAERPFLEERYRMEEDAAVKNEILKGLEEITHVN

SEQ ID NO: 78021 - protein, 377 aa, Macrococcus brunensis
  misc_feature (1)..(377): tr|A0A4R6BAW4|A0A4R6BAW4_9STAP tRNA epoxyqueuosine(34) reductase QueG OS=Macrococcus brunensis OX=198483 GN=qu eG PE=4 SV=1
MSQTLKEEIIAYSKTIGIDAIGFTTAEPFEELRPKLEAYYAKGYASGFEESDIELRINPRKSVASAESIIAIAVGYPNRLPGAPKSVRGERRGMFARSSWGMDYHSLLRKRLQLLEAFIKSRVPEAECLSMVDTGVLSDRAVAERAGLGYAAKNGFILNKELGTWTYLGELLTSIKLPPDAPVLDSCLDCTICIDRCPTGALVGNGQLNSQKCISFLTQTKGFLPDEYRSKIGNRLYGCDTCQQVCPKNRGINTTQDDIILEPLKLKPLLEPLLTMSNKMFKNEYGYLAGSWRGKKPIQRNAIIALAHFKEESAVPTLKEVAVKDERPVIKGTAYWALGRIAGEAARPFLEERYRMEEDREVKNEILKGLEEIIHVN

SEQ ID NO: 78022 - protein, 373 aa, Macrococcus canis
  misc_feature (1)..(373): tr|A0A4V3BGC8|A0A4V3BGC8_9STAP tRNA epoxyqueuosine(34) reductase QueG OS=Macrococcus canis OX=1855823 GN=queG PE=4 SV=1
MNEQLKQEIIAYSKTIGIDAIGFTTAEPFHELRPKLEAYYSSGYASGFEKGSIEERIDPKLSLPEAESIIAIAVGYPNKLPNAPKSIRGARRGIFARASWGIDYHTLLNKRLSLLEAFILERVPDAKVMNMVDTGVLSDRAVSERAGLGYAAKNGFILNKALGTWTYLGEMLISIPFTPDDAVIDSCLDCTICIDRCPTGALLGDGQLDSNKCISFLTQTKGFMPDEYRGKIGNRLYGCDTCQQVCPKNRGINTMHDDIELEPETLKPLLVPLLKMNNKQFKNEFGHLAGAWRGKKPIQRNAILALAHFKEIDAIDDLKEIAENDVRPEIKGTAYWALGQMSSSTHDYLRERYTQETDNDVKIEILKSLGSVE

SEQ ID NO: 78023 - protein, 373 aa, Macrococcus canis
  misc_feature (1)..(373): tr|A0A4P9CK85|A0A4P9CK85_9STAP tRNA epoxyqueuosine(34) reductase QueG OS=Macrococcus canis OX=1855823 GN=queG PE=4 SV=1
MNEQLKQEIIAYSKTIGIDAIGFTTAEPFHELRPKLEAYYSSGYASGFEKGSIEERIDPKLSLPEAESIIAIAVGYPNKLPNAPKSIRGARRGIFARASWGIDYHTLLNKRLSLLEAFILERVPDAKVMNMVDTGVLSDRAVAERAGLGYAAKNGFILNKTLGTWTYLGEMLISIPFPPDHPVIDSCLDCTICIDRCPTGALLGDGQLDSNKCISFLTQTKGFMPDEYRGKIGNRLYGCDTCQQVCPKNRGINTMHDDIELEPETLKPLLVPLLKMNNKQFKNEFGHLAGAWRGKKPIQRNAILALAHFKEIDAIDDLKEIAENDVRPEIKGTAYWALGQMSSSTHDYLRERYTQETDNDVKIEILKSLGSVE

SEQ ID NO: 78024 - protein, 377 aa, Macrococcus carouselicus
  misc_feature (1)..(377): tr|A0A4R6BRV0|A0A4R6BRV0_9STAP tRNA epoxyqueuosine(34) reductase QueG OS=Macrococcus carouselicus OX=69969 GN= queG PE=4 SV=1
MSQALKEEIIAYSKTIGIDAIGFTTAEPFEELRPKLEAYYAKGYASGFEESDIELRIDPRKSMNAAETIIAIAVGYPNKLPDAPKSLRGERRGMFARSSWGMDYHSLLRKRLQRLEAFIRSRVPEAECLSMVDTGVLSDRAVAERAGLGYAAKNGFILNKELGTWTYLGELLTSIKLPPDAPVLDSCLDCTICIDRCPTGALVGNGQLNSQKCISFLTQTKGFLPDEYRTKIGNRLYGCDTCQQVCPKNRGINTTHDDIILEPLKLKPLLEPLLTMSNKMFKNEYGHLAGSWRGKKPIQRNAIIALAHFKEETAVPTLKEVAVKDERPVIKGTAYWAIGHIAGEAERPFLEERYHLEEETEVKSEILKGLEEITHVN

SEQ ID NO: 78025 - protein, 373 aa, Macrococcus caseolyticus
  misc_feature (1)..(373): tr|A0A2N0VPJ3|A0A2N0VPJ3_9STAP tRNA epoxyqueuosine(34) reductase QueG OS=Macrococcus caseolyticus OX=69966 GN= queG PE=4 SV=1
MNEQLKQEIIAYSKTIGIDAIGFTTAEPFHELRPKLEAYYNSGYASGFEKGSIEERIDPKLSLPEAQSIIAIAVGYPNKLPNAPKSMRGARRGIFARASWGIDYHTLLNRRLSLLEAFILERVPDAKVMNMVDTGVLSDRAVAERAGLGYAAKNGFILNKTLGTWTYLGEMLISIPFTPDHPVIDSCLDCTICIDRCPTGALLGDGQLDSNKCISFLTQTKGFMPDEYRGKIGNRLYGCDTCQQVCPKNRGINTTHDDIELEPQTLKPLLVPLLKMNNKEFKNEFGHLAGAWRGKKPIQRNAILALAHFKEIDAIDDLKEVAENDVRPEIKGTAYWALGQISMSTHDYLRERYTQETDNDVKIEILKSLGSVE

SEQ ID NO: 78026 - protein, 373 aa, Macrococcus caseolyticus
  misc_feature (1)..(373): tr|A0A5E8SGS9|A0A5E8SGS9_9STAP tRNA epoxyqueuosine(34) reductase QueG OS=Macrococcus caseolyticus subsp. homin is OX=1891096 GN=queG PE=4 SV=1
MNEQLKQEIIAYSKTIGIDAIGFTTAEPFHELRPKLEAYYNSGYASGFEKGSIEERIDPKLSLPEAQSIIAIAVGYPNKLPNAPKSMRGARRGIFARASWGIDYHTLLNRRLSLLEAFILERVPDAKVMNMVDTDVLSDRAVAERAGLGYAAKNGFILNKTLGTWTYLGEMLISIPFTPDHPVIDSCLDCTICIDRCPTGALLGDGQLDSNKCISFLTQTKGFMPDEYRGKIGNRLYGCDTCQQVCPKNRGINTTHDDIELEPQTLKPLLVPLLKMNNKQFKNEYGHLAGAWRGKKPIQRNAILALAHFKEIDAIDDLKEVAENDVRPEIKGTAYWALGQISMSTHDYLRERYTQETDNDVKIEILKSLGSVE

SEQ ID NO: 78027 - protein, 374 aa, Macrococcus epidermidis
  misc_feature (1)..(374): tr|A0A327ZQ36|A0A327ZQ36_9STAP tRNA epoxyqueuosine(34) reductase QueG OS=Macrococcus epidermidis OX=1902580 GN =queG PE=4 SV=1
MYQKLKQEIIEYSKTIGIDAIGFTTAEPFESLRPKLEAYYANNYDSGFEKGTIEERINPKLSLPEAQSIIAIAVGYPNKLPNAPKSIRGARRGIFARASWGIDYHTLLNKRLELLVAFIKERVPEAQTMNMVDTGVLSDRAVAERAGLGYAAKNGFILNKDLGTWTYLGEILVSIPFEPDHPVIESCLDCTICIDRCPTGALLGNGQLDSNKCISFLTQTKGFIPDEYRSKIGNRLYGCDTCQQVCPKNRGINTTHEDIELEPEKLKPLLVPLLKMTNKTFKAEFGHLAGAWRGKKPIQRNAILALAHFKEIDAVPDLKEVAESDPRPEIKGTAYWAIGQMSHDEIDYLKARYEKETDNDVKLEILKSIESVEK

SEQ ID NO: 78028 - protein, 374 aa, Macrococcus goetzii
  misc_feature (1)..(374): tr|A0A2G5NUC1|A0A2G5NUC1_9STAP tRNA epoxyqueuosine(34) reductase QueG OS=Macrococcus goetzii OX=1891097 GN=que G PE=4 SV=1
MYQKLKQEIIEYSKTIGIDAIGFTTAEPFESLRPKLEAYYANNYDSGFEKGTIEERINPKLSLPEAQSIIAIAVGYPNKLPNAPKSIRGARRGIFARASWGIDYHTLLNKRLELLVAFIKERVPEAQTMNMVDTGVLSDRAVAERAGLGYAAKNGFILNKDLGTWTYLGEILVSIPFEPDHPVIDSCLDCTICIDRCPTGALLGNGQLDSNKCISFLTQTKGFMPDEYRSKIGNRLYGCDTCQQVCPKNRGINTTHEDIELEPEKLKPLLVPLLKMTNKTFKSEFGHLAGAWRGKKPIQRNAILALAHFKEIDAVPDLKEVAESDPRPEIKGTAYWAIGQISHDEIDYLKARYEKETDNDVKLEILKSIESVEK

SEQ ID NO: 78029 - protein, 374 aa, Macrococcus goetzii
  misc_feature (1)..(374): tr|A0A4R6CA11|A0A4R6CA11_9STAP tRNA epoxyqueuosine(34) reductase QueG OS=Macrococcus goetzii OX=1891097 GN=que G PE=4 SV=1
MYQKLKQEIIEYSKTIGIDAIGFTTAEPFESLRPKLEAYYANNYDSGFEKGTIEERINPKLSLPEAQSIIAIAVGYPNKLPHAPKSIRGARRGIFARASWGIDYHTLLNKRLELLVAFIKERVPEAVTMNMVDTGVLSDRAVAERAGLGYAAKNGFILNKDLGTWTYLGEILVSIPFEPDHPVIDSCLDCTICIDRCPTGALLGNGQLDSNKCISFLTQSKGFMPDEYRGKIGNRLYGCDTCQQVCPKNRGINTTHEDIELEPEKLKPLLVPLLKMTNKTFKAEFGHLAGAWRGKKPIQRNAILALAHFKEIDAVPDLKEVAESDPRPEIKGTAYWAIGQMSHDEIDYLKARYEEETDNDVKLEILKSIESVEK

SEQ ID NO: 78030 - protein, 374 aa, Macrococcus hajekii
  misc_feature (1)..(374): tr|A0A4R6BLQ3|A0A4R6BLQ3_9STAP tRNA epoxyqueuosine(34) reductase QueG OS=Macrococcus hajekii OX=198482 GN=queG PE=4 SV=1
MSVALKNDIIAFSKTIGIDAIRFTTAEPFEELRPKLIDYFSKGYASGFEESDIELRIDPKKSLASAETIIAIAVGYPNKLPDAPKSVRGGRRGIFARASWGMDYHSLLRKRLEQLEAFIRERVPEAECMSMVDTGVLSDRAVAERAGLGYAAKNGFILNKELGTWTYLGELLISIKLPPDAPVLDSCLDCTICIDRCPTGALVGNGQLNSQKCISFLTQTKGFMPDEYRSKIGNRLYGCDTCQQVCPKNRGINTTHSDIVLEPLKLKPLLEPLLTMSNKMFKNEYGDLAGSWRGKKPIQRNAILALAHFKEESALPVLKEVAVNDERPVIKGTAYWAIGRIAGAGEKGFLDERFEVEQDPEVKNEILKGLEEIY

SEQ ID NO: 78031 - protein, 378 aa, Macrococcus lamae
  misc_feature (1)..(378): tr|A0A4R6BSX9|A0A4R6BSX9_9STAP tRNA epoxyqueuosine(34) reductase QueG OS=Macrococcus lamae OX=198484 GN=queG P E=4 SV=1
MSEQLKQEIIEYSRTIGIDAIGFTTAEPFEELRPKLEEYYMKGYASGFESSDIELRVNPKKSLPSARSIIAIAVGYPNRLPDAPKSTRGERRGMFARSSWGMDYHSLLRKRLTLLQSFIEERVPHAECLSMVDTGVLSDRAVAERAGLGYAAKNGFILNDKLGTWTYLGELLTSIPLPPDQPVIDSCLDCTICVDRCPTGALVGNGQLNAQKCISFLTQMKGFLPDEYRGKIGNRLYGCDTCQQVCPRNRGINTQQDDIILEPLKLKPLLEPLLTISNKMFKNEFGHLAGSWRGKKPIQRNAIIALAHYKETASIPTLKKVAVEDERPVIKGTAYWAIGRIAGQMEAPFLMERYNIEEDIEVRNEILKGLEEIEHVIN

SEQ ID NO: 78032 - protein, 372 aa, Macrococcus sp.
  misc_feature (1)..(372): tr|A0A4Q1AZR2|A0A4Q1AZR2_9STAP tRNA epoxyqueuosine(34) reductase QueG OS=Macrococcus sp. DPC7161 OX=2507060 GN =queG PE=4 SV=1
MENLKQEIINYSKTIGISAIGFTTAEPFEDLRPILEAYYANNYQSGFEPDDIEARIDPKLSMPNAQSIIAIAVGYPNKLKDAPASKRGARRGIFARASWGIDYHSLLRNRLNLLEAFIKERVPEAECLSMVDTGVLSDRSVAERAGLGYSAKNGFVLNENLGTWTYLGEMLVNLPFEPDTPVVDSCYDCTICIDKCPTGALVGNGQLDSKKCISFLTQTKGMIADEYRYKIGNRLYGCDTCQQVCPKNKGINVLQDDIQLEPEILKPLLRPLLTISNKDFKSTYGHLAGSWRGKKPIQRNAILALAHFKDDTAIEDLKHVAINDVRIEIKATAYWAIGQIMGDAEKGFLMNRYEIESDELVKEEILKGLEVN

SEQ ID NO: 78033 - protein, 351 aa, Magnetococcales bacterium
  misc_feature (1)..(351): tr|A0A2E3C457|A0A2E3C457_9PROT Epoxyqueuosine reductase OS=Magnetococcales bacterium OX=2026759 GN=queG PE=3 S V=1
MLVPMTDQPATTQKDAILAKALELGFDVAKVGTPISMKRYLDEWLELGYHGEMAWMKDRAHLRADPKALWPEVESIIAVGLNYGPDHNPLENLEHKNQGNISVYARGDDYHDVLKKRLKQLGRWMAETYNCELKVFVDTAPVMEKPLAANAGLGWQGKHTNVVSKVFGSWLFLGIVYTTLKLPADKPKPDHCGSCRKCLDVCPTKAFPKPYQLDARRCISYLTIENKGAIPLEFRKAMGNCIYGCDDCLSVCPWNKFAKESQTMALHAREELAGPSLDELLTLDDTSFRALFRKSPIKRIGVNRFLRNVLVACGNSGNTALIPQIETFLNHEDPVLQEMAQWALAELKQAT

SEQ ID NO: 78034 - protein, 387 aa, Magnetococcus marinus
  misc_feature (1)..(387): tr|A0L843|A0L843_MAGMM 4Fe-4S ferredoxin-type domain-co ntaining protein OS=Magnetococcus marinus (strain ATCC BAA-1437 / JCM 17883 / MC-1) OX=156889 GN=Mmc1_1627 PE= 4 SV=1
MLPISHTQCTHQSHELKEEIRSKALEMGFDSVAFAPPTPPPHHECLDAWLAAGGHGDMAWMARNQERRVDPAQLMPGLATIMVVGVNYQPDPTLLTTLHKPAKGYISAYARNKDYHDILKKRLKALAQWLEKRLGHAHEGRLFVDTAPLLERPVAAHSGLGWQGKNSMLVSRHYGCWLFLGEFFLSLALPADACEPDHCGQCRRCQQACPTGALDRPYWLLAPDCLAYWTIETDLPIPHALRRAMGNRVYGCDDCVMVCPFNRFGAPTQDPLLQPQDGGQEPDLLMLAQLTEETFRSMFRQSPVKRSGRIRLQRNVAVALGNWGSAEAIAMLNQLLTHEHPLVRGHAVWGLGEHRHHIAVAEALQQAWRVEADGYVRQELARLCQGV

SEQ ID NO: 78035 - protein, 382 aa, Magnetococcus massalia
  misc_feature (1)..(382): tr|A0A1S7LH83|A0A1S7LH83_MAGMO Uncharacterized protein OS=Magnetococcus massalia (strain MO-1) OX=451514 GN=MA GMO_2127 PE=4 SV=1
MTQCTQQHVELKEEIRAKALELGFDQVGFAPPKPPPHHEKLPQWLAQEGAGDMAWLANNQARRMDPNTLMQGLACILVVGVNYQPVEDLEQQLGQVDEGYISAYARGRDYHELMKKKLKALGRWLQERLGGEHEGRVFVDTAPVLERPMAALSGVGWQGKNTMLVSRQFGCWMFLGEFFLSLPLLPDRVEQDHCGSCNRCQVACPTGALERPYWLLAPDCLAYWSIETDLPIPHAMRRAMGNRIYGCDDCVRVCPFNRFGEPTQQSHYQTPEHRQHLKLVDLVALDDAQFRQLFRQSPVKRSGVMRLQRNVAVALGNWRSEEAVEPLIRLLGHAHPIVRGHAVWGLGEHKKTPSAMAALSVFAEQETDHYVCEELARLNLAQ

SEQ ID NO: 78036 - protein, 367 aa, Magnetofaba australis
  misc_feature (1)..(367): tr|A0A1Y2K4T8|A0A1Y2K4T8_9PROT Putative iron-sulfur clu ster binding protein OS=Magnetofaba australis IT-1 OX=1 434232 GN=MAIT1_04113 PE=4 SV=1
MAWMANHAERRADPRLLMDNLGVVMVLGVNYKPDGDLMEELSHGENAYISAYARNNDYHDILKKRTKALARWLAERLGQPMDGRVFVDTAPVLERPLAAQSGIGWQGKNTMLASRKFGCWLFLAEYFIALPLPPDQVEEDHCGECDRCQRACPTGALDDPYRMDARQCLAYWSIESSGVIPQKFRRLMGNRIYGCDDCIVVCPFNRFADMTRESDFVARDALKDREMISLMFARDADFREALRKTPIKRLGFSKFIRNLAIGLGNWGRESGERSAFDLLLALLDHESPMARAHAAWGVGECVAYAEEGMAALRQKLAQEPDAQAREEMRSALYLLAARNGARALMQSEPLVEVELGLDGAAPDGAAP

SEQ ID NO: 78037 - protein, 347 aa, Magnetospira sp.
  misc_feature (1)..(347): tr|W6K590|W6K590_MAGSQ Epoxyqueuosine reductase OS=Magn etospira sp. (strain QH-2) OX=1288970 GN=queG PE=3 SV=1
MTTSHRNQRDNIRAKALDLGFDACGFARAQSRAEDRDALRSYINQGRHMDMAWMADTADRRVDPRALWSEAKTVIALGMNYGPGHDPRDLYRHSDRGAVSVYARGKDYHDVVKKRLKALARWIHETFEAEVKVFVDTAPVMEKPLARQAGLGWIGKHTNLVSRDYGSWLFLGEVFTTLELPADRHMPDHCGSCDACVRACPTDALNVPYQMDTGRCLSFLNIEAKTPLPEAFRSLAGSRIYGCDDCLSACPWNKFQKPTNETALLPRAELTAPRLADLAQLDDAGFRKLFAGSPVKRVGRDRFLHNVLIALGNGGDQESRPVIDALLDDPSDLVRDAAGWAKARLPD

SEQ ID NO: 78038 - protein, 351 aa, Magnetospirillum caucaseum
  misc_feature (1)..(351): tr|M2ZVW3|M2ZVW3_9PROT Epoxyqueuosine reductase OS=Magn etospirillum caucaseum OX=1244869 GN=queG PE=3 SV=1
MSGTDVKSLIRAKALELGFSDVGFARAQGLPEWKASLDAYVAEGRHGTMEWMAETAERRADPQVLWPEARSVIVLGTNYAPSGDPLKLTRLPERGNISVYARNRDYHDMVKRRLKALGRWMAEAWGAQLKVFVDTAPVMEKPLAVQAGLGWRGRHTNIVSRRFGSWLFLAEVFTTMEIEPDAPEADRCGSCRACVEACPTHALDGEGRIDARRCISYLTIESKSPIPEDLRPDLGNRLYGCDDCMAVCPWDKFAPPTREADFLPRVELTAPKLADLARLDEEGFREVFTASPVKRAGYERFMAGVMIAIGNSGRHDLAREAERRRDDPSPLIRDAARWAVSVLGGQGPGKL

SEQ ID NO: 78039 - protein, 341 aa, Magnetospirillum gryphiswaldense
  misc_feature (1)..(341): tr|A4U5K9|A4U5K9_9PROT Epoxyqueuosine reductase OS=Magn etospirillum gryphiswaldense OX=55518 GN=queG PE=3 SV=1
MKAKIRAKALELGFDAVGFAPAVADPAWRAALDQYVAEGRHGGMGWMAERMDQRANPQGLWAEVRSVVTLGSNYAPAGDALALLEQGDRGNISVYARGKDYHDVVKKRLKVLARWMVDNLGGDLKVFVDTAPVMEKPIAARSGLGWQGRHTNVVSRDFGSWLFLGEIYTTLDLPPDPVQADHCGSCRACVDACPTGALDGQGRIEPRRCISYLTIEHQGAIDPELRSRLGNRIYGCDDCMAACPWNKFAPATTDPDYLPRMEMQAPRLADLASLDDPGFRQVFAGSPVKRIGLDRLLRNVLVAMGNSGDRRLLPAARGLMAHQNPSVAESAAWAVEKLSSP

SEQ ID NO: 78040 - protein, 341 aa, Magnetospirillum gryphiswaldense
  misc_feature (1)..(341): tr|V6F0M3|V6F0M3_MAGGM Epoxyqueuosine reductase OS=Magn etospirillum gryphiswaldense (strain DSM 6361 / JCM 212 80 / NBRC 15271 / MSR-1) OX=431944 GN=queG PE=3 SV=1
MKAKIRAKALELGFDAVGFAPAVADPAWRAALDQYVAEGRHGGMGWMAERMDQRASPQGLWAEVRSVVTLGSNYAPAGDALALLEQGDRGNISVYARGKDYHDVVKKRLKALARWMVDNLGGDLKVFVDTAPVMEKPIAARSGLGWQGRHTNVVSRDFGSWLFLGEIYTTLDLPPDPVQADHCGSCQACVDACPTGALDGQGRIEPRRCISYLTIEYQGAIDPELRSRLGNRIYGCDDCMAACPWNKFAPATTDPDYLPRMEMQAPRLDDLASLDDPGFRQVFAGSPVKRIGLDRLLRNVLVAMGNSGDRRLLPAARALLTHQNPSVAESASWAVEKLSSP

SEQ ID NO: 78041 - protein, 340 aa, Magnetospirillum kuznetsovii
  misc_feature (1)..(340): tr|A0A364P1Y8|A0A364P1Y8_9PROT tRNA epoxyqueuosine(34) reductase QueG OS=Magnetospirillum kuznetsovii OX=20538 33 GN=queG PE=4 SV=1
MKDAIRAKALDLGFAEIRFAAAEAPARWGEDLADYVADGRHGDMAWMEETVERRSAPRALWPEARSIIVLGTNYAPKGDPLAVTRLPDRGNISIYARNRDYHDTVKKRLKALGRWMAETWGCDLKVFVDTAPVMEKPLAEAAGLGWRGRHTNLVSRRWGSWLFLSEIFTTLEIEPDRPEPDHCGSCHACVDACPTGALDGAGHIEPRRCISYLTIETKSEIPAELRPMMGNRIYGCDDCLAACPWNKFATPAVEPDFLPRVELTAPRLADLAQLDEAGFREVFAASPVKRAGRDRFVANVLIAVGNSGRKDLIAVAQALRDDSSPLVRAMADWAVSALGR

SEQ ID NO: 78042 - protein, 360 aa, Magnetospirillum magneticum
  misc_feature (1)..(360): tr|Q2W991|Q2W991_MAGSA Epoxyqueuosine reductase OS=Magn etospirillum magneticum (strain AMB-1 / ATCC 700264) OX =342108 GN=queG PE=3 SV=1
MSGADAKSLIRDDDVKAAIRRRALDLGFSDVGFARAQGLPEWKADLDAYLADGRHGTMGWMAETADRRADPQVLWPDAKSVIVLGTNYAPSGDPLKLTHLPERGNISVYARNRDYHDLLKRRLKALGRWMAETWGGELKVFVDTAPVMEKPLAAQGGLGWRGRHTNIVSRRFGSWLFLAEVFTTLEIEPDAPEADHCGSCRACVEACPTRALDGEGRIDPRRCISYLTIESKSPIPEDLRPGLGNRLYGCDDCMAACPWNKFAPPTTEPDFLPRVELTAPRLADLVQLDEAGFREVFTASPVKRAGYERLMAGVLIAAANGGQTDLLAEAERRRDDPSPLIQDAARWAVSVLGGQGPGEL

SEQ ID NO: 78043 - protein, 350 aa, Magnetospirillum magnetotacticum
  misc_feature (1)..(350): tr|A0A0C2V296|A0A0C2V296_MAGMG Epoxyqueuosine reductase OS=Magnetospirillum magnetotacticum MS-1 OX=272627 GN= queG PE=3 SV=1
MSADVKALIRAKALELGFSDVGFARAQGLAQWKADLDAYLAEGRHGTMDWMAETAARRADPQILWPEARSVIVLGTNYAPAGDALKLTRMPERGNISVYARNRDYHDLLKRRLKALGRWMAETWDCQLKVFVDTAPVMEKPLAAQTALGWRGRHTNIVSRRFGSWLFLGEVFTTLEIAPDLPEADHCGSCRACVDACPTQALDGEGRIDARRCISYLTIESKAPVPEDLRPGLGNRLYGCDDCMAACPWNKFAPPTTERDFLPRVELTAPKLADLVLLDEEGFREVFTASPVKRAGYERFMAGVLMAIANGGQVGLLNEAERRQNDLSPLIRDAARWAVLLLRGQDPGKL

SEQ ID NO: 78044 - protein, 347 aa, Magnetospirillum marisnigri
  misc_feature (1)..(347): tr|A0A178MDJ2|A0A178MDJ2_9PROT Epoxyqueuosine reductase OS=Magnetospirillum marisnigri OX=1285242 GN=queG PE=3 SV=1
MEEGDSPKSLIRAKALELGFSAVGFAAATLPARFGDDLAAYVAEGRHGDMAWMAETLDRRSSPAALWPEARSAIVLGTNYAPGYDPLAATRQPDRGNISVYARNRDYHDTVKKRLKALGRWLAQTWGCELKVFVDTAPLMEKPLAEQAGLGWRGRHTNIVSRRWGSWLFLSEILTTLEVEPDPPETDHCGSCRACVDACPTGALDGDGRIEPRRCISYLTIEAKADIADELRPLMGNRIYGCDDCLAACPWNKFATPTVEPDFLSRVELGFPRLADLAGLDEAAFREVFTASPVKRAGRDRLVASVLVAVGNSGRPDLAEVARRLQQDASSQVRAMADWALRRLGFA

SEQ ID NO: 78045 - protein, 329 aa, Magnetospirillum moscoviense
  misc_feature (1)..(329): tr|A0A178MMY9|A0A178MMY9_9PROT Epoxyqueuosine reductase OS=Magnetospirillum moscoviense OX=1437059 GN=queG PE= 3 SV=1
MGGVDAKSEIRAKALELGFDAVGFASAHTDPAWRDALNRFVADGRHGTMGWMAERMDQRASPQALWPDVRSVIVLGTNYAPADGAGLAPADRATISVYARGRDYHDTVKKRLKALGRWLAERTGQPLKVFVDTAPVMEKPLAARSGIGWQGRHTNIVSRRFGSWLFLAEIYTPLELEPDPPEPDHCGSCRACETACPTGALEGGKIEPRRCISYLTIEHQGDIAPELAGLMGNRVYGCDDCMAACPWNKFAPPTREADFSPRIELTMPRLTDLAELDDSSFREVFSGSPVKRIGIARMARNVRIALDNQISVGGLDLRDAPGGDDRQDD

SEQ ID NO: 78046 - protein, 346 aa, Magnetospirillum sp.
  misc_feature (1)..(346): tr|A0A522X4P1|A0A522X4P1_9PROT tRNA epoxyqueuosine(34) reductase QueG OS=Magnetospirillum sp. OX=31872 GN=queG PE=4 SV=1
MKDSIRAKAQELGFSAVGFAPATGDPAWAADLAGYLADGRHGDMGWMAESAERRVSPRALWPEARSVIVLGTNYTPKGDPLDLTRRPERGNVSVYARNRDYHDTVKKRLKALGRWLAGQYGCDLKVFVDTAPVMEKPLAELAGLGWRGRHTNIVSRRWGSWLFLAEIFTSLEIAPDPPEHDRCGSCRACVDACPTGALDGEGHIEPRRCISYLTIEAKDAIAAGLRPLMGNRVYGCDDCLAACPWNKFAMPTAEPDFLPRVELTAPLLADLAQLDEADFRQVFTASPVKRAGRERFIASVLIAIGNSGRNDLAAVAARLRDDPSSLVRVMADWAVSTLAGEGAGQL

SEQ ID NO: 78047 - protein, 351 aa, Magnetospirillum sp.
  misc_feature (1)..(351): tr|A0A0U5MKF7|A0A0U5MKF7_9PROT Epoxyqueuosine reductase OS=Magnetospirillum sp. XM-1 OX=1663591 GN=queG PE=3 S V=1
MTGADIKAAIRAKALELGFSDVGFARAQALPEWKACLETYVAEGRHGDMEWMAETAERRADPQVLWPEARSVIVLGTNYAPAGDPLKLTRMPERGNVSVYARNRDYHDLVKRRLKALGRWMAERWGCELKVFVDTAPVMEKPLAAQGGLGWRGRHTNIVSRRFGSWLFLAEVFTTLEIEPDPPETDHCGSCRACVEACPTQALDGEGRIDARRCISYLTIESKSPVPEELRPGLGNRLYGCDDCMAACPWNKFAPPTREPDFLPRVELTAPKLADLARLDEAAFREVFTASPVKRAGYERFMAGVMIAVGNSGRDDLGSEAERRRDDPSPLIRDAARWALSVLGRQGPGKL

SEQ ID NO: 78048 - protein, 343 aa, Magnetovibrio blakemorei
  misc_feature (1)..(343): tr|A0A1E5QBZ1|A0A1E5QBZ1_9PROT Epoxyqueuosine reductase OS=Magnetovibrio blakemorei OX=28181 GN=queG PE=3 SV=1
MATSAHDKDTIRAKALELGFDTVGFAPAKLDAHHGENLKTYIEQGRHATMAWMEGRHEQRVSPDALWPDAKSVIVLGVNYGPRTDPIAIHELTDRAAISVYAQGKDYHDVVKKRLKALGRWLVEEFACEIKVFVDTAPVMEKPLAQLAGVGWQGKHTNVVSREFGSWLFLGEVFTTLDLKPDAPEVDHCGTCTACLDACPTGAIQPYQMDARKCISYLTIEHKGPIDEDLMVNMGNHVYGCDDCLAACPWTKFSVLHTEPNFLPRVELTAPRLADIAGLGEEEFRQVFAGSPIKRTRRNALVRNALIAIANAHKPHSREIAQSLLNDLNETVRHTARWALERL

SEQ ID NO: 78049 - protein, 369 aa, Magnetovibrio sp.
  misc_feature (1)..(369): tr|A0A2E3KZ58|A0A2E3KZ58_9PROT Epoxyqueuosine reductase OS=Magnetovibrio sp. OX=2024836 GN=queG PE=3 SV=1
MNEHAVSDIKDRIRDQALREGFDAVGFTSATADQKDREGWRAFVKKGWHGDMDWLAQDDGRRGNLQAMMPDAKTAIVLAANYGPSSDPLAALESTCHGAISVYAQSARDYHDVLKKRLKSLGRWLTETEGGDLKVFVDTAPVMEKPLAQRAGIGWQGKHSNLVSRAFGSWLFLGEIVTTLEIAPDLPEADHCGSCRACMNVCPTDAIPAPYRLDATRCISYLTIEHKGAIAPELMTRMGNHIYGCDDCLAVCPWNKFAETTSDPAFLPRAELVAPRLEDLADLDDARFRELFAGSPIKRTGRNRFLRNVLIAMANSGDRNLKPLAQQLASDVSELVAETARWALAELSLPDDEVNDEAGAAGLSSSSVT

SEQ ID NO: 78050 - protein, 361 aa, Magnetovibrio sp.
  misc_feature (1)..(361): tr|A0A2E3P691|A0A2E3P691_9PROT Epoxyqueuosine reductase OS=Magnetovibrio sp. OX=2024836 GN=queG PE=3 SV=1
MSPTAPDLLKRRLIDAAKALGFDAVGVTDTRAAPRDRQALEAFLKAGHHGDMAWMADGPRGAVRGDPEAMVPGARTAIVLARNYGPPGDPMNIPGQPDKGAVSVYAQGKDYHDVIKKRLKQLARWLQAEAAQGRDTPPDVRVFVDTAPLMEKPLAQRAGIGWQGKHTNLVSRTHGSWLFLGEILTTLELPSDRPEADHCGSCDACLRACPTDAFPAPYRLDATRCISYLTIEHKDAIAPDLMARMGNHVYGCDDCLAACPWNKFAHPTDEPAFAPRPGLDGPRLADLARLDDAAFREMFTGSPVKRTGRDRFLRNVMIAVGNSGDPTLVPVAADLSADASDLVAGAARWAYERLNAAKAQR

SEQ ID NO: 78051 - protein, 252 aa, Maledivibacter halophilus
  misc_feature (1)..(252): tr|A0A1T5M1P0|A0A1T5M1P0_9CLOT Epoxyqueuosine reductase QueG (Queuosine biosynthesis) OS=Maledivibacter haloph ilus OX=36842 GN=SAMN02194393_03721 PE=4 SV=1
MNKKVKELIYKYVKEYSEKKEIKTKWGQPIVKFSDANDKMFIKLKEIVSPTHGLPKDFLEDAKTVISYFIPFDPSVANSNIKGKYSSKKWAQAYVETNDLIFNLNKYIKKEFEALNYKSSIIPATHNFNENSLISDWSHRHVGYIAGLGKFGLNNMLITDKGCCGRVGSIITNLKIEPTKRSDKEYCLYKSKGICKKCVKRCVNDALKVDSFDRHKCYEILLYNDKLHFDLGLTDACGKCCVSLPCSFTNPV

SEQ ID NO: 78052 - protein, 378 aa, Maledivibacter halophilus
  misc_feature (1)..(378): tr|A0A1T5LIR6|A0A1T5LIR6_9CLOT Epoxyqueuosine reductase OS=Maledivibacter halophilus OX=36842 GN=SAMN02194393_ 02911 PE=4 SV=1
MIFKEEIIKYSKEIGIDLIGFTESEIFHDLEAILRKREKKNLLSGFEEQNIDKRINPHLTLENSHTIIVIGMSYYVNEGDITSKDSNKPTGNVSKSSWGRDYHLVLKSKMKMLVEYIEKKTKDFQYEYFTDTGPLVDRYLAYKAGIGWYGKNNCIITKEYGSWIFIGYILSNLEININMEESKNEGCLNCNNCIKACPTGALMENQLYNPKLCISYLTQTKEDIDYKLREKMGKSLYGCDICQLVCPYNSNKTTTHKEFIPVGDNYKPNLLGLLKLSNKEFKKRFEKAALNWRGNKIIKRNALIALGNSGDKDMVKYLVEYLNSPSIMIKKYTAWAIIRLDRKKGKKILDKHLEKEKDIEMNEEIKKLYNYYLRNLHN

SEQ ID NO: 78053 - protein, 369 aa, Malikia granosa
  misc_feature (1)..(369): tr|A0A2S9K4H1|A0A2S9K4H1_9BURK Epoxyqueuosine reductase OS=Malikia granosa OX=263067 GN=queG PE=3 SV=1
MQAWGRELGFSQIGVAAVDLSSAEPGLQAWLEQGFHGDMHYMAAHGLKRARPAELLPGTLSVVTARMDYLPRDTPAGWQAVEWQRHDDPAQGLVSLYARGRDYHKVLRQRLQQLADRMAAQLGPFGHRVFTDSAPVLEVELASRSGLGWRGKHTLTLSRDAGSMFFLGEIFVDRALPATAPASAHCGQCSACLDACPTQAIVAPYRLDARRCISYLTIEHGGPIPPEFRPLLGNRIYGCDDCQLACPWNKFAQRAVLPDFDARTQLTGRGLLELFGWSEEQFLRQTEGSPIRRIGHERWRRNLAVALGNALRAAGMADGSDPADQAASVESSTSAAASLKAELRAALQAAIDDPSALVREHVTWALAQS

SEQ ID NO: 78054 - protein, 360 aa, Malikia spinosa
  misc_feature (1)..(360): tr|A0A2S9KDH2|A0A2S9KDH2_9BURK Epoxyqueuosine reductase OS=Malikia spinosa OX=86180 GN=queG PE=3 SV=1
MQAWGRELGFSQIGVAAVDLSAAEPGLLAWLEQGFHGDMHYMAAHGVKRARPAELLPGTLSVITARMDYLPRATPAGWQAVEWQRHDDPGQGLVSLYARGRDYHKVLRQRLQQLADRMAEQLGPFGHRAFTDSAPVLEVELASRSGLGWRGKHTLTLSRDAGSMFFLGEIFVDRALPATEPASAHCGQCRACLDACPTQAIIAPYRLDARRCISYLTIEHGGPIPLEFRPLLGNRIYGCDDCQLACPWNKFAQRAVLPDFDARAPLTGRGLIELFGWSEEQFLRQTEGSPIRRIGHERWRRNLAVALGNALRTAGSTDGSDPADSAAASVKAELRAALQAAMDDPSELVREHVAWALTQS

SEQ ID NO: 78055 - protein, 358 aa, Maliponia aquimaris
  misc_feature (1)..(358): tr|A0A238KEC1|A0A238KEC1_9RHOB Epoxyqueuosine reductase OS=Maliponia aquimaris OX=1673631 GN=queG_2 PE=3 SV=1
MQDLTERLKREAAEVGFAACRVCRPGDVPQVMERLENFLARGYHGQMGWMAERVQWRGAPQVLWPEARSVVMLAENYGPDEDPLAVLEARDRAAISVYAQNRDYHDVVKKKLKRLARWLIAEGGGARHGKAVDPDTLGTPQVKVFVDTAPVPEKPLAQAAGLGWQGKHTNLVSRELGSWLFLGCIFTTLELAVDGAERDHCGSCRACLDICPTEAFPAPYQLDVRRCISYLTIEHKGPVDEALRPRLGNRIYGCDDCLAVCPWNKFARRAEEVKYHARDDLRAPPLAELAGLDDAAFRARFSGSPIKRIGRDRLVRNVCYAIGNSGSAALRPVVQALCEDADPAVRDAARWAVSRLAN

SEQ ID NO: 78056 - protein, 223 aa, Maliponia aquimaris
  misc_feature (1)..(223): tr|A0A238K9Q9|A0A238K9Q9_9RHOB Epoxyqueuosine reductase OS=Maliponia aquimaris OX=1673631 GN=queG_1 PE=4 SV=1
MTAGRLAQIDDTAHAAGLRVRGALHPGPDDGAPEGTGTLLLLGPDEPCFWPVFTAAPEYRYGAPDPLDRWSKRVIGALATEWGGTAIFPSDGPPYAPFLTWALASGRAWSSPVGMLVQDAAGLFISYRGAVALPARLDLPPPAAKPCDACPRPCETACPVGALAPGQMYDVARCKAHLRRPEGMECRHGGCLVRRACPVAKDFERLPQQSAFHMAAFLGDPVP

SEQ ID NO: 78057 - protein, 349 aa, Mameliella alba
  misc_feature (1)..(349): tr|A0A0B3S8A1|A0A0B3S8A1_9RHOB Epoxyqueuosine reductase OS=Mameliella alba OX=561184 GN=queG PE=3 SV=1
MRELTERLKDEARDIGFAQARICRPGDVPEVMGRLRAFLDRGYHGQMDWLADRVHWRGAPDVLWPEARSVIMLSENYGPEHDPLEVLDRRDRAAISVYAQHRDYHDVVKKRLKRLARWLIAEAGGEVKVFVDTAPVPEKPLAQAAGLGWQGKHTNLVSRELGSWLFLGCVFTTLELEVDGAERDHCGSCRACLDICPTGAFPAPYQLDARRCISYLTIEHKGPVDEALRPALGNRIYGCDDCLAVCPWNKFARRAEEVKYHARPDLLAPPLADLAVLDDAAFRARFSGSPIKRIGRDRMVRNTCYAIGNSGRPELRPVVQSLCEDADPAVRDAARWAVLRLGSELGDGR

SEQ ID NO: 78058 - protein, 355 aa, Mameliella sp.
  misc_feature (1)..(355): tr|A0A2E9I0I8|A0A2E9I0I8_9RHOB Epoxyqueuosine reductase OS=Mameliella sp. OX=1924940 GN=queG PE=3 SV=1
MVDLTERLKREALDVGFADCRICRPGDVPEVMARLRGFLDKGYHGQMGWLSERVHWRGAPDVLWPEAQSVIMLAENYGPDDDPLAVLEVRDRAAISVYARNRDYHDVVKKRLKRLGRWLIDSAGGEIKVFVDTAPVPEKPLAQAAGLGWQGKHSNLVSRQLGSWLFLGCVFTTLELTPDGAERDHCGSCRACLDICPTNAFPAPYQVDARRCISYLTIEHKGPVDEGLRPGLGNRIYGCDDCLAVCPWNKFARRAEEVKYHARDDLVAPPLADLAMLDDAGFRARFSGSPIKRIGRDRFVRNVCYAIGNSGLPTLIPSVQALCEDTDEAVRDAARWAVLRLQAGVSGLSGKQDGR

SEQ ID NO: 78059 - protein, 379 aa, Mangrovibacter phragmitis
  misc_feature (1)..(379): tr|A0A1B7L1Y3|A0A1B7L1Y3_9ENTR Epoxyqueuosine reductase OS=Mangrovibacter phragmitis OX=1691903 GN=queG PE=3 S V=1
MSQPFVLDELVQKIKQWGKELGFQQVGICDTDLSASEPALQEWLDKQYHGEMEWMARHGMMRARPHELLPGTLRVISVRMNYLPTGAAFASTLKNPQLGYVSRYALGRDYHKLLRQRLKQLGERIREHCTELNFRPFVDSAPLLERPLAEKAGLGWTGKHSLILNKEAGSFFFLGELLVDIPLPVDKPVEEGCGRCVACMTICPTQAIVAPYTVDARRCISYLTIELEGAIPEELRPLMGNRIYGCDDCQLICPWNRFSQLTDEADFSPRKALHTPELLALFAWDETHFLKVTEGSAIRRIGHLRWLRNIAVALGNAPWESSVLDALEQRKGEHPLLDEHIEWAIAQQLAKREALSVTVSSAQQQRLVRAIEKGLSRDA

SEQ ID NO: 78060 - protein, 379 aa, Mangrovibacter plantisponsor
  misc_feature (1)..(379): tr|A0A317PJL0|A0A317PJL0_9ENTR Epoxyqueuosine reductase OS=Mangrovibacter plantisponsor OX=451513 GN=queG PE=3 SV=1
MSQPFVLGELAQKIKQWGKELGFQQVGICDTDLSASEPALQAWLDKQYHGEMEWMARHGMMRARPHELLPGTLRVISVRMNYLPTGAAFASTLKNPRLGYVSRYALGRDYHKLLRQRLKQLGERIREHCTELNFRPFVDSAPLLERPLAVKAGLGWTGKHSLILNKEAGSFFFLGELLVDIPLPVDQPVEEGCGRCVACMTMCPTQAIVAPYTVDARRCISYLTIELEGAIPEEFRPLMGNRIYGCDDCQLICPWNRFSQLTDEADFSPRKALHTPELLALFAWDEAHFLKVTEGSAIRRIGHLRWLRNIAVALGNAPWESAVLDALEQRRGEHPLLDEHIEWAIAQQLAKREALSVTVSSAQQQRLVRAIEKGLSRDA

SEQ ID NO: 78061 - protein, 379 aa, Mangrovibacter sp.
  misc_feature (1)..(379): tr|A0A071M0W2|A0A071M0W2_9ENTR Epoxyqueuosine reductase OS=Mangrovibacter sp. MFB070 OX=1224318 GN=queG PE=3 S V=1
MSQPFVLGELAQKIKQWGKELGFQQVGICDTDLSASEPALQAWLDKQYHGEMEWMARHGMMRARPHELLPGTLRVISVRMNYLPTGAAFASTLKNPRLGYVSRYALGRDYHKLLRQRLKQLGERIREHCTELNFRPFVDSAPLLERPLAEKAGLGWTGKHSLILNKEAGSFFFLGELLVDIPLPVDQPVEEGCGRCVACMTMCPTQAIVAPYTVDARRCISYLTIEYEGVIPEEFRPLLGNRIYGCDDCQLICPWNRFSQLTDEADFSPRKALHTPELLELFAWDETRFLKVTEGSAIRRIGHLRWLRNIAIALGNAPWESAVLNALEQRRGEHPLLDEHIEWAIAQQLAKREALSVTVSSAQQQRLVRAIEKGLSRDA

SEQ ID NO: 78062 - protein, 306 aa, Mangrovibacterium diazotrophicum
  misc_feature (1)..(306): tr|A0A419W8F6|A0A419W8F6_9BACT Epoxyqueuosine reductase OS=Mangrovibacterium diazotrophicum OX=1261403 GN=queG PE=3 SV=1
MDKHERIKQKAVELGFLACGISAAGYLVDEKERLRSWLAEGMNGEMEYMARNHEKRLDPRLLHEGTKSVISVLLNYYPKERQLDPEAPVLSKYAYGTDYHFVLKDKLNELLKFIHDEIGPCNGRAFVDSAPVLDKAWAVRSGLGWIGKNTNLISVEHGSFFFIGELLVDLELKTDDRIVSNHCGNCTRCIDACPTKAIVAPYVVDARRCISYQTIEQRGEIDKTLEGQFKDRVFGCDICQDVCPWNLKSEPHEEPAFDPHPRLMELSRLDWQNMDESLFAELFRKSAVMRTKYSGLMRNLKFIGKS

SEQ ID NO: 78063 - protein, 310 aa, Mangrovibacterium marinum
  misc_feature (1)..(310): tr|A0A2T5BYI3|A0A2T5BYI3_9BACT Epoxyqueuosine reductase OS=Mangrovibacterium marinum OX=1639118 GN=queG PE=3 S V=1
MDKREQREKIKRKALELGFLACGISAATYLTGEKDRLERWLAEGMNGEMEYMARNREKRLDPRLLHEGTKSVISVLLNYSPKEKQLDPQAPVLSKYAYGTDYHFVLKDKLKELLAFIHEAVAPCNARAFVDSAPVLDKAWAVRAGLGWIGKNTNLISVEHGSFFFIGELLIDLELEPDERMVSNHCGNCTRCIDACPTKAIVAPYVVDARRCISYQTIEQRGEIDESLKGQFNDRVFGCDICQDVCPWNLKAEPHDEAAFDPPPRLMELTRQEWQTMDEALFSRLFRKSAVKRTKYSGLMRNLKFLESED

SEQ ID NO: 78064 - protein, 307 aa, Mangrovimonas sp.
  misc_feature (1)..(307): tr|A0A1V1ZGT5|A0A1V1ZGT5_9FLAO Epoxyqueuosine reductase OS=Mangrovimonas sp. DI 80 OX=1779330 GN=queG PE=3 SV= 1
MKLLQSYTKSIKNEAKRLGFLSCGISRAGFLEDEAPRLEQWLNSNMYGEMRYMENHFDKRLDPTKLVEGSKSVISLLLNYFPEKTQEDTSFKLSKYAYGTDYHFVIKDKLKQLLEFINEEIGEVNGRAFVDSAPVLDKAWAAKSGLGWIGKNSNLLTKQVGSFYFVAELIVDLELEYDAPTTDHCGSCTACIDACPTEAIVNPYVVDGSKCISYFTIELKDNIPTEFKGKFDHWMFGCDVCQDVCPWNRFSKPHSEPLFNPHQDLLSMTKKDWEEITEETFNKVFKKSAVKRTKLAGLKRNIQFLKD

SEQ ID NO: 78065 - protein, 307 aa, Mangrovimonas sp.
  misc_feature (1)..(307): tr|A0A3R9NXJ6|A0A3R9NXJ6_9FLAO Epoxyqueuosine reductase OS=Mangrovimonas sp. HN-E26 OX=2494697 GN=queG PE=3 SV =1
MNDKQHYTKLIKTEAKRLGFLSCGISKAEFLETEAPRLEKWLNNNMNGEMRYMENHFDKRLDPTKLVEGSKSVISLLLNYFPSETQNSESFKLSKYAYGTDYHFVIKDKLKSLLQFIQEGIGEVSGRAFVDSAPVLDKAWAAKSGLGWIGKHSNLLTQQVGSFYFIAELIIDLELDYDTPTTNHCGTCTACIDACPTEAIVEPYVVDGSKCISYLTIELKENIPTEFKDKMDDWMFGCDVCQDVCPWNRFSKPHSEPLFNPHPELLDMSKKDWEEITEDTFRKVFKKSAVKRTKFSGLTRNIDFLKD

SEQ ID NO: 78066 - protein, 306 aa, Mangrovimonas yunxiaonensis
  misc_feature (1)..(306): tr|A0A084TME7|A0A084TME7_9FLAO Epoxyqueuosine reductase OS=Mangrovimonas yunxiaonensis OX=1197477 GN=queG PE=3 SV=1
MGKEHYSALIKSEAKRLGFMSCGISKAAFLEEEAPRLENWLNEQKHGQMGYMENHFDKRLDPTKLVEGSKSVVSLLLNYYPTETQPTESYKLSKYAYGTDYHFVIKDRLKQLLQFIQEEIGEVNGRAFVDSAPVLDKAWASKSGLGWIGKHSNLLSKQVGSFFFIAELIIDLELEYDTPTTNHCGTCTACIDACPTEAIVAPYVVDGSKCISYLTIELKDSIPSEFKGKMDDWMFGCDVCQDVCPWNRFSKPHQEPLFNPHPELLDMTKRDWEEITEETFRKVFKKSAVKRTKFSGLQRNIQFIKH

SEQ ID NO: 78067 - protein, 308 aa, Maribacter aquivivus
  misc_feature (1)..(308): tr|A0A1M6LYB8|A0A1M6LYB8_9FLAO Epoxyqueuosine reductase OS=Maribacter aquivivus OX=228958 GN=queG PE=3 SV=1
MSIDIKSKWTNSIKTEAKRLGFLSCGISKSDFLEEEAPRLEKWLNKNMNGEMSYMANHFDKRLDPRLLVEGSKSVISLLLNYYPEETQTDDSYKISKYAYGQDYHHIIKTKLRQLQEFITEEIGEVNGRAFVDSAPVLDKAWAAKSGLGWIGKNSNLLTQQVGSFYFIAELIVDLELEYDNAVTDHCGTCTACIDACPTQAIVDPYVVDGSKCISYFTIELKNELPNEMKGSFDDWMFGCDVCQDVCPWNRFSKPHKEPLFNPNPDLLSMTKKDWEEITVDVFQKVFKKSAVKRTKFDGLTRNIEFLK

SEQ ID NO: 78068 - protein, 308 aa, Maribacter arcticus
  misc_feature (1)..(308): tr|A0A1T5AWU1|A0A1T5AWU1_9FLAO Epoxyqueuosine reductase OS=Maribacter arcticus OX=561365 GN=queG PE=3 SV=1
MSIDIKSKWTNSIKAEAKRLGFLSCGISKSDFLEEEAPRLEKWLKNNMHGEMGYMANHFDKRLDPRLLVEGSKSVISLLLNYFPDETQVADSYKISKYAYGQDYHHIIKSKLKQLQEFITEEIGEVNGRAFVDSAPVLDKAWAAKSGLGWIGKNSNLLTQQVGSFYFIAELIVDIELEYDHKVTDHCGTCTACLDACPTQAIVEPYVVDGSKCISYFTIELKNELPIDVKGSFDDWMFGCDVCQDVCPWNRFSKPHKEPLFNPNPELLSMTKKDWEEITEDVFQKVFKKSAVKRTKFSGLTRNIEFLK

SEQ ID NO: 78069 - protein, 309 aa, Maribacter caenipelagi
  misc_feature (1)..(309): tr|A0A4R7DGN3|A0A4R7DGN3_9FLAO Epoxyqueuosine reductase OS=Maribacter caenipelagi OX=1447781 GN=queG PE=3 SV=1
MSIDIKSKWTNSIKTEAKRLGFLSCGISKSDFLEEEAPRLEKWLNKNMNGEMSYMANHFDKRLDPRLLVESSKSVISLLLNYYPEETQIEDSYKISKYAYGQDYHHIIKTKLRQLQEFITEEIGDVNGRAFVDSAPVLDKAWAAKSGLGWIGKNSNLLTQQVGSFYFIAELIVDIELEYDHAVTDHCGTCTACIDACPTQAIVDPYVVDGSKCISYFTIELKNELPNEMKDSFDDWMFGCDVCQDVCPWNRFSKPHNEPLFNPNPDLLSMTKKDWEEITVDVFQKVFKKSAVKRTKFEGLTRNIDFLKV

SEQ ID NO: 78070 - protein, 309 aa, Maribacter cobaltidurans
  misc_feature (1)..(309): tr|A0A223VBA8|A0A223VBA8_9FLAO Epoxyqueuosine reductase OS=Maribacter cobaltidurans OX=1178778 GN=queG PE=3 SV =1
MSNQTKYTKMIKTEAKRLGFLSCGISKADFLEEDAPRLEKWLKQGMHGEMGYMANHFDKRLDPRLLVDGAKSVISLLLNYYPSQEQRDDTYKISKYAYGQDYHHVIKSKLRQLHEFILEKIGEVNGRAFVDSAPVLDKAWAAKSGLGWIGKNSNLLTKEVGSFYFIAELIIDLELEYDTPVTDHCGTCTACIDACPTQAIVEPYVVDGSKCISYFTIELKNEIPKEFHGKMDEWMFGCDVCQDVCPWNRFSKSHNEPLFDPKPELLSMSKKDWEEITEDVFKKIFKKSAVKRTKFSGLKRNIEFLRKDS

SEQ ID NO: 78071 - protein, 308 aa, Maribacter dokdonensis
  misc_feature (1)..(308): tr|A0A1H4MVR6|A0A1H4MVR6_9FLAO Epoxyqueuosine reductase OS=Maribacter dokdonensis OX=320912 GN=queG PE=3 SV=1
MTLNLKQKNSNLIKTEAKRLGFLSCGISKADFLEEEAPRLEKWLNNNMHGEMSYMANHFDKRLDPRKLVEGSKSVISLLLNYFPEKTQREDSYKISKYAYGQDYHHIIKGKLRQLQEFITEEIGEVHGRAFVDSAPVLDKAWAAKSGLGWVGKNSNLLTQQVGSFYFIAELIVDIDLEYDHAVTDHCGTCTACLDACPTQAIVEPYVVDGSKCISYFTIELKNELPNEMKGSFDDWMFGCDVCQDVCPWNRFSKPHNEPLFNPHPELLSMTKKDWEEITVDVFQKVFKKSAVKRTKYGGLTRNIEFLK

SEQ ID NO: 78072 - protein, 308 aa, Maribacter flavus
  misc_feature (1)..(308): tr|A0A5B2TVQ3|A0A5B2TVQ3_9FLAO Epoxyqueuosine reductase OS=Maribacter flavus OX=1658664 GN=queG PE=3 SV=1
MNRSILSQRIKTEAKRLGFLSCGISRAEFLEQEAPRLERWLKKNMHGEMGYMANHFDKRLDPRLLVDGAKSVISLLLNYFPQETQEKDTFKVSKYAYGEDYHHVIKGKLRQLHDFISEEIGEVKGRAFVDSAPVLDKAWAAKSGLGWIGKNSNLLTKKVGSFYFIAELIIDLELDYDTPVTDHCGTCTACIDACPTQAIIEPYVVDGSKCISYLTIELKNEIPTEFQAKMDDWIFGCDVCQDVCPWNRFSKPHKEPLFNPHPELLSMTKKDWEEITEDVFKKVFKKSAVKRTKFSGLKRNIEFLQKES

SEQ ID NO: 78073 - protein, 308 aa, Maribacter orientalis
  misc_feature (1)..(308): tr|A0A1H7QXW9|A0A1H7QXW9_9FLAO Epoxyqueuosine reductase OS=Maribacter orientalis OX=228957 GN=queG PE=3 SV=1
MSIDIKSKWTNSIKTEAKRLGFLSCGVSKSDFLEEEAPRLEKWLNNNMHGEMGYMENHFDKRLDPRLLVEGSKSVISLLLNYFPEETQVADTYKISKYAYGQDYHHIIKSKLKQLQEFITEEIGEVNGRAFVDSAPVLDKAWAAKSGLGWIGKNSNLLTQQVGSFYFIAELIVDIELEYDHAVTDHCGTCTACLDACPTQAIVEPYVVDGSKCISYFTIELKNELPIDVKGSFDDWMFGCDVCQDVCPWNRFSKPHKEPLFNPNPELLSMTKKDWEEITEDVFQKVFKKSAVKRTKFEGLSRNIKFLK

SEQ ID NO: 78074 - protein, 306 aa, Maribacter polysiphoniae
  misc_feature (1)..(306): tr|A0A316DZB6|A0A316DZB6_9FLAO Epoxyqueuosine reductase OS=Maribacter polysiphoniae OX=429344 GN=queG PE=3 SV= 1
MNFASKHTQLIKTEAKRLGFLSCGISKAAFLEEEAPRLETWLNKNMNGEMQYMENHFDKRLDPTKLVEGSKSVISLLLNYYPEDKQKEGTYKVSKYAYGQDYHHIIKSKLRQLQEFITTEIGEVDGRAFVDSAPVLDKAWAAKSGLGWIGKHSNLLTQKVGSFYFIAELIVDLELDYDHPVTDHCGSCTACIDACPTQAIVEDRVVDGSKCISYFTIELKNGIPAQFQGKFDDWMFGCDVCQDVCPWNRFSRAHNEPLFNPHPDLLSNDKKDWEEITQEVFNTIFKKSAVKRTKFSGLKRNIQFLK

SEQ ID NO: 78075 - protein, 306 aa, Maribacter sp.
  misc_feature (1)..(306): tr|A0A3C0GEZ9|A0A3C0GEZ9_9FLAO Epoxyqueuosine reductase OS=Maribacter sp. OX=1897614 GN=queG PE=3 SV=1
MDIKSKWTHSIKTEAKRLGFLSCGISKADFLEEEAPRLEKWLNNNMHGEMSYMANHFDKRLDPRKLVEGSKSVISLLLNYYPENTQLEDSYKISKYAYGQDYHHIIKGKLRQLQEFITEEIGEVHGRAFVDSAPVLDKAWAAKSGLGWVGKNSNLLTQQVGSFYFIAELIVDIDLEYDHAVTDHCGTCTACLDACPTQAIVEPYVVDGSKLISYFTIELKNELPNEMKGSFDDWMFGCDVCQDVCPWNRFSKPHNEPLFNPHPELLSMTKKDWEEITVDVFQKVFKKSAVKRTKYGGLTRNIEFLK

SEQ ID NO: 78076 - protein, 306 aa, Maribacter sp.
  misc_feature (1)..(306): tr|A0A1B7ZFU0|A0A1B7ZFU0_9FLAO Epoxyqueuosine reductase OS=Maribacter sp. T28 OX=1836467 GN=queG PE=3 SV=1
MDIKQKWTNSIKTEAKRLGFLSCGVSKANFLEEEAPRLEKWLKKNMNGEMSYMANHFDKRLDPTKLVEGSKSVISLLLNYYPEESQNEDSYKISKYAYGQDYHHIIKVKLRQLQEFISEEIGEVNGRAFVDSAPVLDKAWAAKSGLGWIGKNSNLLTQQVGSFYFIAELIVDIDLEYDHIVTDHCGTCTACLDACPTQAIVEPYVVDGSKCISYFTIELKNELPNEMKGSFNDWMFGCDICQDVCPWNRFSKPHNEPLFNPNPELLSMTKKDWEEITEDVFQKVFKKSAVKRTKFSGLTRNIDFLK

SEQ ID NO: 78077 - protein, 308 aa, Maribacter spongiicola
  misc_feature (1)..(308): tr|A0A4R7K6I0|A0A4R7K6I0_9FLAO Epoxyqueuosine reductase OS=Maribacter spongiicola OX=1206753 GN=queG PE=3 SV=1
MTLNLKQKNSDLIKTEAKRLGFLSCGISKADFLEVEAPRLEKWLNNNMNGEMSYMANHFDKRLDPRLLVEGSKSVISLLLNYYPEETQTDDSYKISKYAYGQDYHHIIKAKLRQLQEFITEEIGEVDGRAFVDSAPVLDKAWAAKSGLGWIGKNSNLLTQQVGSFYFIAELIVDLELEYDHAVTDHCGTCTACIDACPTQAIVDPYVVDGSKCISYFTIELKNELPNELKGSFDDWMFGCDVCQDVCPWNRFSKPHNEPLFNPDPDLLSMTKKDWEEITVDVFQKVFKKSAVKRTKFDGLVRNIKFLK

SEQ ID NO: 78078 - protein, 308 aa, Maribacter stanieri
  misc_feature (1)..(308): tr|A0A1I6I9U7|A0A1I6I9U7_9FLAO Epoxyqueuosine reductase OS=Maribacter stanieri OX=440514 GN=queG PE=3 SV=1
MSIDIKSKWTNSIKAEAKRLGFLSCGISKSDFLEEEAPRLEKWLNKNMNGEMSYMANHFDKRLDPRLLVEGSKSVISLLLNYYPEETQTDDSYKISKYAYGQDYHHIIKSKLRQLQEFITEEIGEINGRAFVDSAPVLDKAWAAKSGLGWIGKNSNLLTQQVGSFYFIAELIVDIELEYDHAVTDHCGTCTACLDACPTQAIVEPYVVDGSKCISYFTIELKNELPSEMKGSFDDWMFGCDVCQDVCPWNRFSKPHNEPLFNPNPDLLSMTKKDWEEITVDVFQKVFKKSAVKRTKYDGLTRNIDFLK

SEQ ID NO: 78079 - protein, 308 aa, Maribacter ulvicola
  misc_feature (1)..(308): tr|A0A1N6R4G6|A0A1N6R4G6_9FLAO Epoxyqueuosine reductase OS=Maribacter ulvicola OX=228959 GN=queG PE=3 SV=1
MSIDIKHKWTNSIKTEAKRLGFLSCGVSKADFLEEEAPRLEKWLNNNMNGEMSYMANHFDKRLDPRKLVEGSKSVISLLLNYYPEETQTEDSYKISKYAYGQDYHHVIKTKLRQLQEFISEEIGEVNGRAFVDSAPVLDKAWAAKSGLGWIGKHSNLLTQRVGSFYFIAELIVDLELEYDHAVTDHCGTCTACIDACPTQAIVEPYVVDGSKCISYFTIELKNELPNEMKGSFDDWMFGCDVCQDVCPWNRFSKPHNEPLFNPNPDLLSMTKKDWEEVTEEVFRKVFQKSAVKRTKYSGLTRNIDFLK

SEQ ID NO: 78080 - protein, 307 aa, Maribacter vaceletii
  misc_feature (1)..(307): tr|A0A495EBB9|A0A495EBB9_9FLAO Epoxyqueuosine reductase OS=Maribacter vaceletii OX=1206816 GN=queG PE=3 SV=1
MIDIKEKHSALIKEEAKRLGFLSCGISKADFLEEEAPRLEKWLQENRHGQMQYMENHFDKRLDPRLLVEGSKSVVSLLLNYFPEEQQNTNSYKISKYAYGNDYHHVIKSKLKELQNFINTEIGEVGGRAFVDSAPVLDKAWAAKSGLGWIGKHSNLLTQQVGSFYFIAELILDIDLAYDAKVTDHCGTCTACIDACPTQAIVEPYKVDGSKCISYLTIELKNEMPSEFQNKMDDWMFGCDVCQDVCPWNRFSKPHSEPLFNPHPELLSMNKKDWEEVTEDVFKKVFQKSAVKRTKFSGLQRNIKFLK

SEQ ID NO: 78081 - protein, 360 aa, Maribius pelagius
  misc_feature (1)..(360): tr|A0A1H8FRS2|A0A1H8FRS2_9RHOB Epoxyqueuosine reductase OS=Maribius pelagius OX=387096 GN=queG PE=3 SV=1
MAGRTPEYLQTSDEDAAMKAELAAFAAEAGFVKMGVCRPDAIPEAAGRLRAFLDDGHHGQMGWMAERTGWRGDPAALWPAARSVVMLAESYTPGHDPLEDLEDGTRGAVSVYAQGRDYHDVVKKRLKRVGRWLLDRAGAGAEIKVFVDTAPVMEKPLAQAAGLGWQGKHTNLLGRDLGNWVFLGAIFTTVALPPDPPEAEHCGSCTRCLDICPTDAFPAPFRLDARRCISYLTIEHRGPVDEALRPGLGNRIYGCDDCLAVCPWNKFATAARDMRLAPQPGRRAPDLATLARLDDAGFRAMFAGSPIKRIGRDRMVRNVCYAIGNSGAPHLSQSVAPLTQDPDPAVADAARWARMRLAQN

SEQ ID NO: 78082 - protein, 361 aa, Maribius salinus
  misc_feature (1)..(361): tr|A0A1M6DLX5|A0A1M6DLX5_9RHOB Epoxyqueuosine reductase OS=Maribius salinus OX=313368 GN=queG PE=3 SV=1
MAGRPPEYFQTSDEGAAALKAELAAFAAEAGFVKMGVCRPDAIPEAAGRLRAFLDDGHHGQMGWMTERTGWRGDPAALWPAARSVVMLAESYTPGHDPLEDLEDGTRGAVSVYAQGRDYHDVVKKRLKRVGRWLLDRAGPGAEIKVFVDTAPVMEKPLAQAAGLGWQGKHTNLLGRDLGNWVFLGAIFTTVALPPDPPEAEHCGSCTRCLDICPTDAFPAPFRLDARRCISYLTIEHRGPVDEALRPGLGNRIYGCDDCLAVCPWNKFATAARDMRLAPQPGRRAPELATLARLDDAGFRAMFAGSPIKRIGRDRMVRNVCYAIGNSGAPHLSQSVAPLTQDPDPAVADAARWARMRLAQN

SEQ ID NO: 78083 - protein, 377 aa, Maricaulis maris
  misc_feature (1)..(377): tr|A0A495D2Q1|A0A495D2Q1_9RHOB Epoxyqueuosine reductase OS=Maricaulis maris OX=74318 GN=queG PE=3 SV=1
MNGQDLKSLALELGFSTARICRADEAWSAGERLAEYVADGHHGSMAWMEETLERRQHPTAMWADAKSAVVVGLNYGPEQDPLPLLERRSEGVVSVYAQNADYHDLLKKRLKHLARAFAEKTGKQVKVFVDTAPLMEKPLAEKAGVGWQGKHTNLVSREFGSWLFLGVMLTEAELEPDEAERDTCGSCRACLDICPTRAFPSPYRIDARRCISYLTIEHKGVIAEEFRKPMGNRIYGCDDCLAVCPWNKFAQTSVETAFHPRPELKGPLLAELAALDDAAFRQVFTASPVKRIGRDRFVRNVMIAVGNSGDPALLATVEAGLEDASALVRGMAVWALAQLDPGRARTRAERDAEAEGDEAVRAEWRAVSRSGDQTVSY

SEQ ID NO: 78084 - protein, 372 aa, Maricaulis maris
  misc_feature (1)..(372): tr|Q0ATH3|Q0ATH3_MARMM Epoxyqueuosine reductase OS=Mari caulis maris (strain MCS10) OX=394221 GN=queG PE=3 SV=1
MDADATLSLALELGFSTARICRADEAWAAGDRLAEYVADGHHGSMAWMEETLERRQHPTAMWPEAKSAVVVGLNYGPEQDPLPLLERRSEGVVSVYAQNGDYHDLLKKRLKHLARAFAGKTGKQVKVFVDTAPLMEKPLAEKAGIGWQGKHTNLVSREFGSWLFLGVMLTEAELEPDEAERDTCGSCRACLDICPTNAFPQPYRLDARRCISYLTIEHKGVIPVEYRQPMGNRIYGCDDCLAVCPWNKFAQTSTEMAFHPRPELKGPLLAELAALDDAAFRQVFTASPVKRIGRDRFVRNVMIAIGNSGDHELVSVVEAALDDGSALVRGMAVWALGQLSPLRVSEMHEMKVAAEPDLDVVTEWQALSQKIS

SEQ ID NO: 78085 - protein, 374 aa, Maricaulis salignorans
  misc_feature (1)..(374): tr|A0A1G9WBR3|A0A1G9WBR3_9RHOB Epoxyqueuosine reductase OS=Maricaulis salignorans OX=144026 GN=SAMN04488568_12 42 PE=4 SV=1
MDADTVKSLALASGFTEARICRADDAWTAGERLAEFVAQGQHGSMAWMEDTLARRQHPTAMWPDAKSAVVVGLNYGPDIDPLAALERKSEGVISVYARNTDYHDLMKKRLKHFARAFVDKTGAEVKVFVDTAPLMEKPLAAKSGMGWQGKHTNLVSREHGSWLFLGVMLTAAELEPDAPETDHCGSCTSCLDICPTKAFPGPYKLDARRCISYLTIEHKGPIPLEFRAAMGNRIYGCDDCLAVCPWNKFAAVTAEMAFHPRPELKGPLLSELAALDDESFRQVFTASPVKRIGRGRFVRNVMIAIGNSQDLTLLPAVRANVQDEDAMVRGAAIWALSQLAPQEAHALAMAGSGDEADAGVLSEWRSVLAADAAG

SEQ ID NO: 78086 - protein, 374 aa, Maricaulis sp.
  misc_feature (1)..(374): tr|A0A2E2XSV7|A0A2E2XSV7_9RHOB Epoxyqueuosine reductase OS=Maricaulis sp. OX=1486257 GN=queG PE=3 SV=1
MHADTVKSLATGLGFTDVRICRADEAWEAGERLAQFVGEGLHGSMAWMEDTLERRKHPTAMWPDAKSAVVVAMNYGPGFDPLPLLERRSEGVISVYARNADYHDVMKKRLKHLARAFAQDTGEDVKVFVDTAPLMEKPLAGKAGMGWQGKHTNLVSREHGSWLFLGVMLTTADLEPDAAETDHCGSCRACLDICPTNAFPAPYRLDARRCISYLTIEHKGPIPEEFREPMGNRIYGCDDCLAVCPWNKFAAVAEETAFHPRPELKGPLLAELAALDDAEFRQVFTASPVKRIGRNRFLRNVLIAIGNSGDAALIPVVLDRLEDAAAEVRGMAVWALARLDPEGAVREAEARANTEADPHVREEWARVNKKLTSG

SEQ ID NO: 78087 - protein, 377 aa, Maricaulis sp.
  misc_feature (1)..(377): tr|A0A1Q8FIB6|A0A1Q8FIB6_9RHOB Epoxyqueuosine reductase OS=Maricaulis sp. W15 OX=1772333 GN=queG PE=3 SV=1
MNGQDLKSLALELGFSTARICRADEAWSAGERLAEYVADGHHGSMAWMEETLERRQHPTAMWADAKSAVVVGLNYGPEQDPLPLLERRSEGVVSVYAQNADYHDLLKKRLKHLARAFAEKTGKQVKVFVDTAPLMEKPLAEKAGVGWQGKHTNLVSREFGSWLFLGVMLTEAELEPDEAERDTCGSCRACLDICPTRAFPSPYRIDARRCISYLTIEHKGVIAEEFRKPMGNRIYGCDDCLAVCPWNKFAQTSVETAFHPRPELKGPLLAELAALDDAAFRQVFTASPVKRIGRDRFVRNVMIAVGNSGDPALLTTVEAGLEDASALVRGMAVWALAQLDPGRARTRAERDAEAEGDEAVRAEWRAVSRSGDQTVSY

SEQ ID NO: 78088 - protein, 361 aa, Marichromatium gracile
  misc_feature (1)..(361): tr|A0A4R4AA48|A0A4R4AA48_MARGR Epoxyqueuosine reductase OS=Marichromatium gracile OX=1048 GN=queG PE=3 SV=1
MTRALDPHEALELATRIKGWGMALGFQQVGITDTGLQRAEQRLLDWLDAGHHGKMDYMARHGRRRARPAELVPGTLRIVSVRMDYHPEPHEDPATLSDPARAFVSRYALGRDYHKLIRRRLQRLADQITETIGPFGYRAFVDSAPVMEKPLAEQAGLGWIGKHTNLINPRAGSWFFLGELFTDLPLPLDTPLRSHCGHCSACLEVCPTAAIIAPYRLDARRCISYLTIEHPGPIPLALRPALGNRIYGCDDCQQVCPWNRFARATAETDFLPRQGLDRATLITLIGWDEPTFLERTSGSAIRRIGHGRWLRNLAVALGNADPSPAALTALIRWRDHPDPMVREHIDWALARQREHGARDGW

SEQ ID NO: 78089 - protein, 360 aa, Marichromatium purpuratum
  misc_feature (1)..(360): tr|W0DYK9|W0DYK9_MARPU Epoxyqueuosine reductase OS=Mari chromatium purpuratum 984 OX=765910 GN=queG PE=3 SV=1
MRRALDPHEALELATRIKGWGMALGFQQVGITETGLQRAEQRLLDWLDAGHHGEMDYMARHGRRRARPAELVPGTLRIVSVRMDYHPEPREDPATLSDPARAFVSRYALGRDYHKLIRRRLQRFADRITETIGPFGYRAFVDSAPVMEKPLAEQAGLGWIGKHTNLINPRAGSWFFLGELFTDLPLPLDTPLRSHCGHCSACLEVCPTAAIIAPYRLDARRCISYLTIEHPGPIPLALRPALGNRIYGCDDCQQVCPWNRFARATAETDFLPRQGLDRATLITLIGWDEPTFLERTSGSAIRRIGHGRWLRNLAVALGNAAPSPAALTALTRWRDHPDPMVREHIDWALARQREHSARDG

SEQ ID NO: 78090 - protein, 373 aa, Unknown
  misc_feature (1)..(373): tr|A0A0C1RDI7|A0A0C1RDI7_9ACTN Uncharacterized protein OS=marine actinobacterium MedAcidi-G1 OX=1550399 GN=MB5 2_00925 PE=4 SV=1
MSLEVNNDLGYEYFEKISKLAPKLGLSALGVTNADPFLETRIEIERRKEKELHGGMQFTFRNPERSTTPKMIMKDAKSLIVGALRTPAPRLETVSSEALRIAAYARKDYYSVLREALTEISEILKKDGWKAQVVADENSLVDRAAAIRAGIGWHGKNGNVLIPGQGSWFVLGSIVTNVELPLSEKVQQDCGVCKRCIDACPTGAIIEPGVVDARKCIAWLVQAPGIIPHEYRESIEHRIYGCDDCQEVCPEGREERNSDGEPEIKADYLASEILEAEDEELLDRFSSWYIAERNPRYLKRNALVSIGNSKETENELFKALLTEYLLNSDSLLRSHAVWASIRLGHKELVDLVKNDSDPLVVNEIMLAKAEGHL

SEQ ID NO: 78091 - protein, 387 aa, Unknown
  misc_feature (1)..(387): tr|A0A0C1RQ82|A0A0C1RQ82_9ACTN 4Fe-4S ferredoxin-type d omain-containing protein OS=marine actinobacterium MedA cidi-G3 OX=1550402 GN=MB55_04870 PE=4 SV=1
MQVPNLEDIKLVAKNAGLDDLSVTGVEPLKEARLAIEDRKRQGLHAGMHFTYGNPERATDPSQLFEGAQSVLVALRSYKSASVEGFDLRSPETEISVDGPEGSVASYVCSDEYGMLRQGLMKVVSYLESFGARAEVVMDDNRLADRAIAAKAGLGWLGRNTMLLHPDLGSWTVIGSVVTDIAFKQEVEKVPDGCGTCRRCSVDCPTGAIDEFGVLDANRCLAWLLQAKGIFPRQYRTALGDRLYGCDDCQVLCPVNDTAIEGARAAVPREAKVDIVALLHSSDDELMNQYGHWYIPRRRPEYLRRNALVVLGNSQSGDDPEVERVLANCLASTHALVRSHAVWAALRLGKRHLIGPDEMRSLTENDPEGLVRTELEEWGILADPVSS

SEQ ID NO: 78092 - protein, 321 aa, Unknown
  misc_feature (1)..(321): tr|A0A1Q3GGW5|A0A1Q3GGW5_9BACT Epoxyqueuosine reductase OS=marine bacterium AO1-C OX=1905359 GN=queG PE=3 SV=1
MNSIQVQKHTTLIKQKARELGFESCGVSKAEFLEEEAPRLETWLKEKMQGEMAYMANHFDKRLDPRLLVDGAKSVVSLLYNYFPKEDLAKGNGQKQNPEEESYKISKYAYGRDYHFVIKDKLKALFEFIQEEIGEVGGRVFVDSAPVMDKAWANKSGLGWIGKHSNLINRQVGSFFFIAELIIDLELTPDAPIKDYCGTCTRCVDACPTDAIVEPYVVDGSRCISYFTIELKEEIPTTVKGQFENWIFGCDICQDVCPWNRFSKPHQEPLFEPHPDLRNMRKQDWEEITEEVFRELFRKSAVKRTKLKGLKRNIRFVSSPE

SEQ ID NO: 78093 - protein, 365 aa, Unknown
  misc_feature (1)..(365): tr|A0Z0Q1|A0Z0Q1_9GAMM Epoxyqueuosine reductase OS=mari ne gamma proteobacterium HTCC2080 OX=247639 GN=queG PE= 3 SV=1
MWVCQNAQMTPNETKPDALATIRSQLHQWAQELGFQQLGITGVDLKQHEGYLQKWLDAGYQGDMHYMTRHGLTRARPAELIPGTCTVLTLRMDYLPESAADPESVLSQNDRAYISRYALGRDYHKLMRHRLARLAKKIDAELASGQYRAFVDSAPVLERALAEQSGLGWIAKNTMLINERAGSWFFLGEIYTDIPFTTDAPKTVKHCGSCTACLDICPTQAFVAPHVLDARKCISYLTIEHQGSIDPALRPLMGNRIYGCDDCQLVCPWNKFAQPTAEADFAPRHNLDDEALIHLFAWTDQEFETRMQGSPIRRIGHERWLRNIAIALGNATTTPDIITALNQRRNHPSPLVREHVSWALSQHHA

SEQ ID NO: 78094 - protein, 363 aa, Unknown
  misc_feature (1)..(363): tr|B7RW26|B7RW26_9GAMM Epoxyqueuosine reductase OS=mari ne gamma proteobacterium HTCC2148 OX=247634 GN=queG PE= 3 SV=1
MSSQGGSQITLPEPEALLAKIRLWADELGFQQLGVSDVDLGEHESYLQKWLDAGYHGSMEYMARHGNKRSRPAELVPDTCRVISLRMDYLADHSAMEVLASSEKAYISRYTLGRDYHKLIRKRLAQLAARIEKEITGGQFRAFVDSAPVLERAIAEQAGLGWIAKNTMLINPDAGSWFFLGEIYTDLPLPETRSQESKHCGTCTACLDLCPTDAFVGPFELDARRCISYLTIEHHGSIDPELRPLMGNRVFGCDDCQLVCPWTKFAQETGESDFKARHGLANAELVELFLWDKETYLSRTEGSAIRRIGHERWLRNLAVGLGNGPASNEAIAALRSRSEFPSELVREHVEWALGQLEAKSAGV

SEQ ID NO: 78095 - protein, 347 aa, Marinibacterium profundimaris
  misc_feature (1)..(347): tr|A0A225NML4|A0A225NML4_9RHOB Epoxyqueuosine reductase OS=Marinibacterium profundimaris OX=1679460 GN=queG PE =3 SV=1
MDPVAFRHSLKARALEEGFVAMGVCRPDAVPEVPERLRAFLEAGYHGQMGWLADRVTWREDPAALWPEARSIVMLAESYAPDSDPLPLLERRQEGVTSAYARGRDYHDIVKKRLKRVGRWLIDEAARQGETAQIKVFVDTAPVSEKALGQAAGLGWQGKHTNLLSRDWGNWCFLGAIFTTLELPADAPEVDHCGSCRLCQDICPTRAFPEPYRLDARRCISYLTIEHKGPVDEALRPLLGNRIYGCDDCLAVCPWNKFAQAASDLRYDGQATAPLGELAMLDDAGFRARFSGSPIKRIGRDRFVRNVLYAIGNSGKPRLADTARALLSDPDETVAEAARWAIARLDG

SEQ ID NO: 78096 - protein, 377 aa, Mariniblastus fucicola
  misc_feature (1)..(377): tr|A0A5B9PCN6|A0A5B9PCN6_9PLAN Epoxyqueuosine reductase OS=Mariniblastus fucicola OX=980251 GN=queG PE=4 SV=1
MNTAQLTQSLKQEAKRLGFDFAAVTAALAPDGFSRLDSWVERGFHGEMDYLETRREAYQHPAGVLPAVRSVMMLGMSYHVDVASLPQQPGLGRVARYAWGQGDYHDFLHRKLKQLCRFAREAGDGIAIRGVVDTAPLLEREFAQLAGMGWHAKNTMLINRELGSWFLIAAVLTDAELEIDTPMSTSHCGTCTACLDACPTDAFVEPGTLDATKCISYLTIEHRSPIPIELRSQMGDWILGCDVCQDVCPWNNKAKVSSQEVFQPVEALRPLNLHDLFRMDDDQFRVQFRKTPLWRPKRRGILRNAAITLGNMPSGEGLESLAIGINDDEPLVRGACVWAIGQHLETFGSQAMELLRNRRTIECDADVQTELDLAMQS

SEQ ID NO: 78097 - protein, 369 aa, Marinicauda algicola
  misc_feature (1)..(369): tr|A0A4S2H0D1|A0A4S2H0D1_9RHOB Epoxyqueuosine reductase OS=Marinicauda algicola OX=2029849 GN=queG PE=3 SV=1
MSTLTDTSRLKALAREIGFDAVRIARADEGWEAGERLKRYVGEGRHGTMAWMEETLERRVHPTAMWPEARSAVVVGLNYGPGTDPLDILQRKDRAAISVYAQNRDYHDLIKKRLKRLAREFHRETGHGVKVFVDTAPLMEKPLAHRSGLGWQGKHTNLVSREHGSWLFLGVMLTEAELTPDAPEADHCGSCRACLDICPTDAFPNPYEIDARRCISYLTIEHKGTIAEEFRGPMGNRIYGCDDCLAVCPWNKFASATAETAFHPREELTAPKLIGLAGLDDAGFRALFAASPVKRIGRDRFVRNVLIALGNSADPEAVPVVVERLGDDSALVRAMAVWALKRLDPERFQAEREKRRESERDADVRAEWT

SEQ ID NO: 78098 - protein, 378 aa, Marinicauda pacifica
  misc_feature (1)..(378): tr|A0A4S2HBQ5|A0A4S2HBQ5_9RHOB Epoxyqueuosine reductase OS=Marinicauda pacifica OX=1133559 GN=queG PE=3 SV=1
MTATLTDTDAIKALAREIGFDAVRIARADEAWEAGERLREYVGEGRHGSMAWMEETLDRRVHPNAMWPEAKSAVVVGLNYGPDHDPLVILEQSDRAAISVYAQNRDYHDLIKKRLKRLARAFHQETGHGVKVFVDTAPLMEKPLAHKSGLGWQGKHTNLVSREHGSWLFLGVMLTEAALEPDETETDHCGSCRACLDICPTNAFPAPYQIDARRCISYLTIEHKGPIPREFRAPMGNRIYGCDDCLAVCPWNKFASRTQETAFHPRESLTAPRLADLAALDDTAFRELFTASPIKRIGRDRFVRNVLIALGNSHGPESLAAIRARLDDDSALVRGAAVWALGRLDPEAFEALKTEALAREESGEVREEWQAGPQGQLS

SEQ ID NO: 78099 - protein, 375 aa, Marinicauda sp.
  misc_feature (1)..(375): tr|A0A2U2BWK5|A0A2U2BWK5_9RHOB Epoxyqueuosine reductase OS=Marinicauda sp. WD6-1 OX=2135793 GN=queG PE=3 SV=1
MPEAAESYDAAGVKALAREVGFDVARIARADTEWDAGERLRQFVGEGRHGEMAWMETTLERRVHPTAMWPDAKSAVVVGLNYGPAHDPLAVLERPDEAAISVYAHNADYHDLMKKRLKRLAREFHQASGHEVKVFVDTAPLMEKPLAERAGLGWRGKHTNLVSREHGSWLFLGVMLTAAELDPDAAEIDHCGSCRACLDVCPTDAFPAPYQLDARRCISYLTIEHAGPIPHEFREAMGNRIYGCDDCLAVCPWNKFASVSRETKLHARPELLDAQLADLAELDDAAFREVFSGSPIKRIGRDRFVRNVLIAIGNSADAGLVPTIVARLDDDSALVRGAAVWALARLDANRFAIERGARLPDEEETTVRAEWEAEA

SEQ ID NO: 78100 - protein, 374 aa, Marinicaulis flavus
  misc_feature (1)..(374): tr|A0A2S7K478|A0A2S7K478_9PROT Epoxyqueuosine reductase OS=Marinicaulis flavus OX=2058213 GN=queG PE=3 SV=1
MTKTADDIAARIRALAGECGFDAVGFTPAALPDSFRERLMRFLALGRHGEMGWLEARAGERAHPQSLWKDAKSVIMLGMNYGPDHDPMAALEQKSSGVLSVYAHNRDYHDLVKKRLKRAARALAEETGAEVKVFVDTAPVMEKPLAARAGIGWQGKHTNLVSREFGSWLFLGAIFTTLELAPDEAERDHCGTCRNCLDICPTNAFPAPYQLDATRCISYLTIEHQGPIPRELRKAMGNRIYGCDDCLAVCPWNKFAQRARESAFHAREDLSRPLLSELAGLDDAAFRTKFSGSPVKRTGRNRFVRNVLIAIGNSGDERLSDCAETLIEDESPLVRGAAVWALAQLRPGDIEDLRARYHAQEDDAEVRAEWEAAG

SEQ ID NO: 78101 - protein, 372 aa, Marinicella litoralis
  misc_feature (1)..(372): tr|A0A4R6XS60|A0A4R6XS60_9GAMM Epoxyqueuosine reductase OS=Marinicella litoralis OX=644220 GN=queG PE=3 SV=1
MVIHLATILPVNQQQEHIDYQQLKANIKAWAKESGFQQAGISDVNLKQAGEHLKNWLKKQHHADMEYMHKHGEKRYQPEALVPGTLSVISVRLDYMQTSLTPYEELTKQVSKAAISRYALGRDYHKVIRNKLKKLVAKISAEIGPFGHRVFTDSAPVMEKAIAEKAGLGWIGKHSNLINSKAGSYFFLGEIYTDLPLEPDRKQSFHCGSCTQCIQDCPTDAIIAPFQVDASRCISYLTIENHGPIPEEFRKAMGNRIYGCDDCQVVCPWNKFTQNTAEPDFAPRHHLDDSELLELFLWDEETFLQNTAGSPIRRIGYQSWQRNLAVGMGNSKPHANIIEALKQKVNSASPMVKEHIEWALTELSKQTSTPIA

SEQ ID NO: 78102 - protein, 312 aa, Marinifilaceae bacterium
  misc_feature (1)..(312): tr|A0A434AG24|A0A434AG24_9BACT Epoxyqueuosine reductase OS=Marinifilaceae bacterium T3-2 S1-C OX=2487017 GN=qu eG PE=3 SV=1
MNLTLSAKSNLIKDKAYELGFDLCGIAKADFLADEKEHFLSWLGKEYHGEMGYMANNIEKRLDPRLLVENTKSIVVVGLNYYPDKVQTDPEAPVIAKYAYGKDYHFVMKDRLNQLLDFINTDIGEIQGCAFVDSAPVLEHAWAKRAGLGWIGKNSLLLNRKIGSFLFLGELLIDMELEYENPVDADFCGGCNRCVRACPTGAITEPYVVNGSKCISYFTIELKGDIPSEMKGKFQNRVFGCDICQDVCPWNRMAKPHNIDEFTPNPNLLALSKSNWYQLDAHQFGEIFKKSAVKRTKFNGIQRNLDFLSSEE

SEQ ID NO: 78103 - protein, 310 aa, Marinifilum breve
  misc_feature (1)..(310): tr|A0A2V3ZUG2|A0A2V3ZUG2_9BACT Epoxyqueuosine reductase OS=Marinifilum breve OX=2184082 GN=queG PE=3 SV=1
MDLTLTAKSNLIKTKAHELGLDLCGIVKAEFLENEKENFLLWLDKGYHGEMGYMANNIEKRLDPRLLVENTKSIVVVGLNYYPKEQQKDVEAPVIAKYAYGKDYHFVLKDRLNQLFEYINTEIGEVSGRAFVDSAPVLEHAWAKRAGLGWIGKNSLLINRKIGSFLFLGELFLDIELEYENPTYADFCGGCNRCVRSCPTGAITEPYVVNGSKCISYYTIELKGDIPVEAKEKIQNRVFGCDICQDVCPWNRMAKPHSVPDFEPNPDLLSMSKEDWQNMDAHKFGEIFRNSAVKRTKFKGIKRNLDFLDL

SEQ ID NO: 78104 - protein, 311 aa, Marinifilum flexuosum
  misc_feature (1)..(311): tr|A0A419WXD1|A0A419WXD1_9BACT Epoxyqueuosine reductase OS=Marinifilum flexuosum OX=1117708 GN=queG PE=3 SV=1
MNLTLTAKSNLIKSKAKEFGLDLCGIVKADFLEDEKENFLSWLDKGYHGEMGYMANNVEKRLDPRLLVENTKSIVVVGLNYFPKEQQKDPEAPVIAKYAYGKDYHFVLKDRLNQLFEYINTEIGEVSGRAFVDSAPVLEHAWAKKAGLGWIGKNSLLINRKMGSFLFLGELLLDMELEYENPTYADFCGGCNRCVRSCPTGAITEPYVVNGSKCISYYTIELKGDIPEEAKGKFENRVFGCDICQDVCPWNRMSKPHSVTDFEPNPDLLSMSKEDWQDMNAHKFGEIFRNSAVKRTKFKGIKRNLDFLKGE

SEQ ID NO: 78105 - protein, 307 aa, Mariniflexile fucanivorans
  misc_feature (1)..(307): tr|A0A4R1RRJ8|A0A4R1RRJ8_9FLAO Epoxyqueuosine reductase OS=Mariniflexile fucanivorans OX=264023 GN=queG PE=3 S V=1
MNNKQQHTNLIKTEAKRLGFLSCGISKAEFLEAEAPRLENYLNKNMHGEMQYMENHFDKRLDPTKLVENSKSVISLLLNYYPSETQNKESFKLSKYAYGTDYHFVIKNRLKTLLNFIQYEIGDVHGRAFVDSAPVLDKAWAAKSGLGWIGKHSNLITQQVGSFYFIAELIIDLELEYDTITTDHCGSCTKCIDACPTQAIIEPYVVDGSKCISYFTIELKENIPSSFKGKFEDWMFGCDICQDVCPWNRFSKAHAEPLFNPHPELLSMSKKEWNEITEDVFRKIFKDSAVKRTKFSGLKRNINFLNE

SEQ ID NO: 78106 - protein, 309 aa, Mariniflexile sp.
  misc_feature (1)..(309): tr|A0A385BQ17|A0A385BQ17_9FLAO Epoxyqueuosine reductase OS=Mariniflexile sp. TRM1-10 OX=2027857 GN=queG PE=3 S V=1
MNNKQLHAQLIKTEAKRLGFLSCGISKAQFLEAEAPRLEKWLNNNMHGQMQYMENHFDKRLDPTKLVEDSKSVISLLLNYYPSEEQNKESYKLSKYAYGTDYHFVIKEKLKSLLNFIQEEIGDVHGRAFVDSAPVLDKAWAAKSGLGWIGKHSNLLTQQVGSFYFIAELIVDLELEYDSQTTDHCGTCTACIDACPTQAITEPYVVDGSKCISYFTIELKENIPTEFKGKFDDWMFGCDVCQDVCPWNRFSKAHSEPLFNPHPELLSMTKKDWEEITEDVFEKVFKNSAVKRTKFSGLKRNIDFLKNQD

SEQ ID NO: 78107 - protein, 313 aa, Marinilabilia salmonicolor
  misc_feature (1)..(313): tr|A0A2T0XLK5|A0A2T0XLK5_9BACT Epoxyqueuosine reductase OS=Marinilabilia salmonicolor OX=989 GN=queG PE=3 SV=1
MDLIAEQRGQMIREKALDLGFDDVAFVEAQFLEREAETYDRWITKGAHAGMDYMARNREKRNDPRLLVEGTKSVVVVLQNYQPDRNTSQGDEFKISKYAYGRDYHKVLKNRLKKLMSFIRTEVADEADGRFFVDSAPVSERSLAARAGLGWRGKNTNLIHPRLGSFVFIGELFLNFELPYGTPIKEACGGCTRCLDACPTGALTSPYELDANKCISYLTIENKGEISEDFSGQFDGWIFGCDICQDVCPWNWKARPHKEPDFNLRPTFGKMTSVDWKALSEASFDELSKGSAIRRAGYAGIMRNIRFVGSVRK

SEQ ID NO: 78108 - protein, 316 aa, Marinilabilia sp.
  misc_feature (1)..(316): tr|A0A2U2B816|A0A2U2B816_9BACT Epoxyqueuosine reductase OS=Marinilabilia sp. WTE OX=2162893 GN=queG PE=3 SV=1
MDLVLEQRAKLIREFAQDLGFDDVGFVSAEPMQKESDFLEQWLEKGYHAGMDYMERNFEKRTNPAKLVEGAKSVVVCLQNYAPSRKEKPSGDYKISKYAYGRDYHKVVKNRLKKLFTFIQSEVDPQADGRFFVDSAPVSERALAASAGLGWRGKNTNLIHPRLGSFIFIGEIILNIDLPSGSPIKEACGGCTRCIEACPTDALRSPYELDSNRCISYLTIENKGSISAEFAGKMEDWIFGCDICQDVCPWNWKARPHSEPDFKLWPVFKNMENQSWEELDAGCFDEISRGSPIRRAGFDGIKRNISFVVNAKDPDN

SEQ ID NO: 78109 - protein, 312 aa, Marinilabiliaceae bacterium
  misc_feature (1)..(312): tr|A0A353U130|A0A353U130_9BACT Epoxyqueuosine reductase OS=Marinilabiliaceae bacterium OX=2053574 GN=queG PE=3 SV=1
MSLIKEYIAEGIRRKASELGFAEVGFSPATELVEDKERLRAWLAKGYSAGMSYMSNYFDKRTDPSLLVQGSLSVISLLHSYKPTESPLSEHAPKISRYAYGKDYHDVIRRKLSELFSHIRDEYYPALEGRFFVDSAPLLERALAVKSGLGWIGKNSMLINRRLGSYVFLSEILVNIELPYNEGGMIDRCGGCTYCIDACPTAAILPDRVIDGNRCISYLTIENKDDIPLEFKGKLKGWTFGCDICQEVCPWNRKAPDSDEPEFRPSAALLAMNLEKWEGLSREGFSELFKGSAVKRAKYTGWIRNYKFVVEP

SEQ ID NO: 78110 - protein, 313 aa, Marinilabiliaceae bacterium
  misc_feature (1)..(313): tr|A0A4Q8RT92|A0A4Q8RT92_9BACT Epoxyqueuosine reductase OS=Marinilabiliaceae bacterium JC017 OX=2234116 GN=que G PE=3 SV=1
MDIIALKYQEMIREEALRLGFSDIGFAPVEHLCDDELHLKQWLNDGFQAGMEYMNNHFEKRVNPSLLVEGARSVISLLVNYKPDQKQRADVPQIATYAFGKDYHFTLKEKMQVLFDFIKANIFPQLDGRCFVDSAPVLDRAWAVKSGLGWIGKNTNLIHRKHGSYVFIGELITNLALPATDPIKAACGNCTRCIDACPTGALVAPYRLDANKCISFQTIENRGEIPEQLVVKFQNRVYGCDICQEVCPWNRKTPPTREADFMPHPDLLTMTREQWYALDESTYREIFRKSAVKRAKYAGLMRNLAFLKKAHGK

SEQ ID NO: 78111 - protein, 335 aa, Marinilabiliales bacterium
  misc_feature (1)..(335): tr|A0A2N5YYZ8|A0A2N5YYZ8_9BACT tRNA epoxyqueuosine(34) reductase QueG OS=Marinilabiliales bacterium OX=2053303 GN=queG PE=4 SV=1
MSLVLTPNTYISVIKHIKTTNVKLDAGLIKELAQKTGFDACGITYATPLLEDNAFLDKWIDHGKNAEMHYLKNNRELRKNPEGLLDNAKSIISVLLSYNLGYDDTIDYYISKYARGLDYHRVVKKLLNAFVNSLMESYPELNARVFVDSAPVFERAYARNSGLGFIGKNTCLINPKLGSFVFIGEIICDMRSDYDSEISLDCGNCNLCVESCPVGALSDKGLDANRCISYHTIESKNDIPENIANKITNQVFGCDICQDVCPYNKRAQLSTNVEFKRNSLIEDLNIQYLENISNSQFNKKYEETAFNRVKREKLLKNFRLVERKKNFKLQDISNY

SEQ ID NO: 78112 - protein, 74 aa, Marinilabiliales bacterium
  misc_feature (1)..(74): tr|A0A351HT76|A0A351HT76_9BACT tRNA epoxyqueuosine(34) reductase QueG (Fragment) OS=Marinilabiliales bacterium OX=2053303 GN=DCY97_22935 PE=4 SV=1
GSFVFIGEMVINLELAYDEPYPSNYCGSCTQCIDACPTGAIVKPGTIDSNRCISYLTIENKSDSISSEFSGKFG

SEQ ID NO: 78113 - protein, 413 aa, Marinilactibacillus piezotolerans
  misc_feature (1)..(413): tr|A0A1I3V7T9|A0A1I3V7T9_9LACT Epoxyqueuosine reductase OS=Marinilactibacillus piezotolerans OX=258723 GN=SAMN 04488569_100235 PE=4 SV=1
MKIYYSELYLILVKFTVTQLLLVRLEESSINLKLKEKIKQKANEIGIDKIGFTHAEPFYDLEDKLHKQKEKGYTSGFEHDVIEERIYPEKIFSKPRSIIAIAVAYPSKMRSKPPKVKGERRGEFARASWGTDYHDVLRKRMDLLIEFIRTETSEETSFKPMVDTGELVDVAVAQRAGLGFIGRNGLLITKEYGSYVYLGEIITNLEFEPDEEVPFGCGECTRCVKACPTGALLGDGRMNAQKCLSYQTQTKGYMPKEYRRKMGHMIYGCDICQIVCPYNKGVDSHFHEDMEPDPEKTMPLLKPILTISNREFKDTYGEMAGSWRGKKPLQRNAIIALANYRDRTAIPDLLRVIDQDPRPMIRGTAAWAISVILKREANEDVVSFLEEALSKETDLETIEEFQIAISLMKENLT

SEQ ID NO: 78114 - protein, 389 aa, Marinilactibacillus psychrotolerans
  misc_feature (1)..(389): tr|A0A511GYA5|A0A511GYA5_9LACT Epoxyqueuosine reductase OS=Marinilactibacillus psychrotolerans OX=191770 GN=qu eG PE=4 SV=1
MEESLINLELKEKIKQKAQEIGIDKIGFTHAEPFYELEEKLYIQKEKGYTSGFEHDVIEERVYPDKIFSKPRSIIAIAVAYPSKMRTKPPRVKGERRGEFARASWGSDYHDVLRKRMDLLIEFIRAEANEKANFKPMVDTGELVDVAVAQRAGLGFIGRNGLLITKEFGSYVYLGEIITNLEFAPDIEVPFGCGECTRCVTACPTGALLGDGRMNAQKCLSYQTQTKGYMPKEYRRKMGHMIYGCDICQIVCPYNKGVDSHFHEDMEPDPEKTMPLLKPILTISNREFKDTYGEMAGSWRGKKPLQRNAIIALANYRDRTAIPDLLRVIDQDPRPMIRGTAAWAISVILKREANEDVVSFLNEALSKETDDETIEEFQTAISLMKENLT

SEQ ID NO: 78115 - protein, 389 aa, Marinilactibacillus psychrotolerans
  misc_feature (1)..(389): tr|A0A1R4KDD3|A0A1R4KDD3_9LACT Epoxyqueuosine (OQ) redu ctase QueG OS=Marinilactibacillus psychrotolerans 42ea OX=1255609 GN=FM115_09470 PE=4 SV=1
MEESLINLELKEKIKQKAQEIGIDKIGFTHAEPFYELEEKLHIQKEKGYTSGFEHDVIEERIYPDKIFSKPRSIIAIAVAYPSKMRTKPPRVKGERRGEFARASWGSDYHDVLRKRMDLLIEFIRAEANEKANFKPMVDTGELVDVAVAQRAGLGFIGRNGLLITKEFGSYVYLGEIITNLEFAPDVEVPFGCGECTRCVTACPTGALLGDGRMNAQKCLSYQTQTKGYMPKEYRRKMGHMIYGCDICQIVCPYNKGVDSHFHEDMEPDPEKTMPLLKPILTISNREFKDTYGEMAGSWRGKKPLQRNAIIALANYRDRTAIPDLLRVIDQDPRPMIRGTAAWAISVILKREANEDVVSFLNEALSKETDDETIEEFQIAISLMKENLT

SEQ ID NO: 78116 - protein, 384 aa, Marinilactibacillus sp.
  misc_feature (1)..(384): tr|A0A1L4C2M8|A0A1L4C2M8_9LACT tRNA epoxyqueuosine(34) reductase QueG OS=Marinilactibacillus sp. 15R OX=191158 6 GN=BKP56_10090 PE=4 SV=1
MNLKLKEKIKQKANEIGIDKIGFTHAEPFYDLEDKLHKQKEKGYTSGFEHDVIEERIYPEKIFSKPRSIIAIAVAYPSKMRSKPPKVKGERRGEFARASWGTDYHDVLRKRMDLLIEFIRTETSEETSFKPMVDTGELVDVAVAQRAGLGFIGRNGLLITKEYGSYVYLGEIITNLEFEPDEEVPFGCGECTRCIKACPTGALLGDGRMNAQKCLSYQTQTKGYMPKEYRRKMGHMIYGCDICQIVCPYNKGVDSHFHEDMEPDPEKTMPLLKPILTISNREFKDTYGEMAGSWRGKKPLQRNAIIALANYRDRTAIPDLLRVIDQDPRPMIRGTAAWAISVILKREANEDVVSFLEEALSKETDLETIEEFQIAISLMKENLT

SEQ ID NO: 78117 - protein, 371 aa, Marinimicrobium koreense
  misc_feature (1)..(371): tr|A0A3N1P8V2|A0A3N1P8V2_9GAMM Epoxyqueuosine reductase OS=Marinimicrobium koreense OX=306545 GN=queG PE=3 SV= 1
MPHSVDFQQLADDIKLWGRELGFQQVGITDTHLQESEARLKQWLERGYHGTMNWFTAHGDKRSRPPELHPGTIRVISVRMDYLPADTDQIKILKDPTKAYISRYALGRDYHKLIRKRLATLAKKIEAALPPEMMEGQQRPFVDSAPVMEKPLADKAGLGWTGKHTLILNSEAGSWFFLGELFTYLPLPVDRSEQPNQCGTCSACLQVCPTDAFPEPYTLDARRCISYLTIEQKGPIPEEFREPMGNRVFGCDDCQAVCPWNRYAQHTRERDFSPRHDLDRQDLLTLFQWTEEEFLTRTEGSAIRRTGYEGWLRNLAVGLGNAPSDPDIIAALEARRPLASPMVQEHIDWALQQQARPNRRRKRKIRRKRES

SEQ ID NO: 78118 - protein, 371 aa, Marinimicrobium sp.
  misc_feature (1)..(371): tr|A0A2D8WHB3|A0A2D8WHB3_9GAMM Epoxyqueuosine reductase OS=Marinimicrobium sp. OX=2024837 GN=queG PE=3 SV=1
  misc_feature (16)..(16): Xaa can be any naturally occurring amino acid
  misc_feature (20)..(20): Xaa can be any naturally occurring amino acid
  misc_feature (25)..(25): Xaa can be any naturally occurring amino acid
  misc_feature (32)..(33): Xaa can be any naturally occurring amino acid
  misc_feature (35)..(36): Xaa can be any naturally occurring amino acid
  misc_feature (39)..(39): Xaa can be any naturally occurring amino acid
  misc_feature (41)..(41): Xaa can be any naturally occurring amino acid
  misc_feature (48)..(48): Xaa can be any naturally occurring amino acid
  misc_feature (53)..(53): Xaa can be any naturally occurring amino acid
  misc_feature (67)..(67): Xaa can be any naturally occurring amino acid
  misc_feature (73)..(73): Xaa can be any naturally occurring amino acid
  misc_feature (76)..(76): Xaa can be any naturally occurring amino acid
  misc_feature (82)..(83): Xaa can be any naturally occurring amino acid
  misc_feature (92)..(92): Xaa can be any naturally occurring amino acid
  misc_feature (95)..(95): Xaa can be any naturally occurring amino acid
  misc_feature (113)..(113): Xaa can be any naturally occurring amino acid
MPHSVDFQQLADDIKXWGRXLGFQXVGITDTXXQXXEAXLXQWLERGXHGTMXWFTAHGDKRSRPPXLHPGTXRVXSVRMDXXPADTDQIKXLKXPTKAYISRYALGRDYHKXIRKRLATLAKKIEAALPPELIEGQQRPFVDSAPVMEKPLADKAGLGWTGKHTLILNSEAGSWFFLGELFTYLPLPVDRSEQPNQCGTCSACLQVCPTDAFPEPYTLDARRCISYLTIEQKGPIPEEFREPMGNRVFGCDDCQAVCPWNRYAQHTRERDFSPRHDLDRQDLLTLFQWTEAEFLTRTEGSAIRRTGYEGWLRNLAVGLGNAPSDPGIIAALEAKRPLASPMVQEHIDWALQQQARPNRRRKRKIRRKRES

SEQ ID NO: 78119 - protein, 380 aa, Marininema halotolerans
  misc_feature (1)..(380): tr|A0A1I6T0P5|A0A1I6T0P5_9BACL Epoxyqueuosine reductase OS=Marininema halotolerans OX=1155944 GN=SAMN05444972_ 108185 PE=4 SV=1
MEAETLKQFLIAEAKDIGIDKVGFATADPFTELKERLMRHREAGFESGFEEPDLDKRTEPFKSLPGAKTIIAIALAYPTRMENSPQSHPGERRGLFCRASWGVDYHHVLRQRLEALKEKLLEKVPDASCEIMVDTGALSDRAVAERAGIGWSGKNTSIITEEFGSWVYLGEMITDVWLPPDAPVTSGCGDCNACIEACPTGALVGPGQLNSQACLAYLTQTKGFLAKEYRDLLGNYLYGFETCQAVCPYNQKKNTSHHPEFQPDPEQVKPLLRPLLTISNREFRERFGVMAGSWRGKKPIQRNAIIALGKVRDHTAVPELVQLLETDPRPVIRGTAAWALGRIRGEIALQTLQQALSLEVDEAVRSEIQDALKEEVIEFG

SEQ ID NO: 78120 - protein, 379 aa, Marininema mesophilum
  misc_feature (1)..(379): tr|A0A1H3C711|A0A1H3C711_9BACL Epoxyqueuosine reductase OS=Marininema mesophilum OX=1048340 GN=SAMN05444487_12 035 PE=4 SV=1
MAPESLKELLIAEAHNMGIDKIGFASADPFTELKERLIRHREAGYESGFEEPDLDKRIDPAKSLVGAKTIIAIALAYPSQMGNLPTSSPGEYRGLFCRASWGADYHLVLRQRLEALKAKLLEMKPEANCEVMVDTGALSDRAVAERAGIGWSGKNTSIITEEYGSWVYLGEMITDVWIPPDTPVTAGCGDCNACIDACPTGALVGPGQLNSQACLAYLTQTKGFLAKEYRDQLGTYLYGFETCQVVCPYNRNKQPSKHKEFQPDPEQVKPLLKPLLTMSNRQFRERFGTMAGSWRGKKPIQRNAIIALGRVRDHTAVPDLTHLLKNDPRPVIRGTAAWALGRIGGDVVLTALKQALSTETDEAVREEIRDALADHEQVV

SEQ ID NO: 78121 - protein, 307 aa, Mariniphaga anaerophila
  misc_feature (1)..(307): tr|A0A1M4YMI5|A0A1M4YMI5_9BACT Epoxyqueuosine reductase OS=Mariniphaga anaerophila OX=1484053 GN=SAMN05444274_ 103405 PE=4 SV=1
MNISQSIKAKSKELGFLDCAIIPAGFLEEESGHFHSWLDAGMNGEMGYMSRNIEKRLNPQLLVENAKTVIVVLLNYFPKATQNDDSAPVLSKYAYGIDYHFVMKDKLKELLRFIRKEITPCNGRPFVDSAPVLERAWARRGGLGWVGKNSNLISVLYGSFFFIGELILDVELPYDNPKPVADHCGTCTRCIDACPTKAIANNRVIDARKCISYQTIELKGELDKNLKGQFENRVFGCDICQDVCPWNLKSEPNNTSEFTPVPKLLELTHNEWHNMDRPLFNQLFKNSAVKRTGFKGLKRNLEFVERE

SEQ ID NO: 78122 - protein, 314 aa, Mariniphaga sediminis
  misc_feature (1)..(314): tr|A0A399D287|A0A399D287_9BACT Epoxyqueuosine reductase OS=Mariniphaga sediminis OX=1628158 GN=queG PE=3 SV=1
MSKSKEISQRIKEQAVLLGFLECAIVPAGFLVEEKSRFQEWLDAGMHGEMGYMDRNKEKRLDPRLLIENAKTVIVVLQNYFPEKTQESTEAPVLSKYAYGTDYHFVMKDKLKKLLHFIQEEIQPCNGRPFVDSAPVLERAWARQAGLGWVGKNSNLISVRHGSYFFIGELILDTELPFDTPRPVADHCGTCTRCIDACPTKAIVANQVVDARKCISYQTIEIKGDLDENLKGQFENRVFGCDICQDVCPWNLKAHPHEEPAFTPNPKLLKLTHEDWHNMDRPLFNELFKNSAVKRAGFKGLKRNLQFLRPEQNE

SEQ ID NO: 78123 - protein, 314 aa, Mariniradius saccharolyticus
  misc_feature (1)..(314): tr|M7X5I6|M7X5I6_9BACT Epoxyqueuosine reductase OS=Mari niradius saccharolyticus AK6 OX=1239962 GN=queG PE=3 SV =1
MNGLSEKYAQIVKTQAKSLGFDFCGIAKAGFLEEEAPKLEVWLNKNYHGQMSYMANHFDKRLDPTKLVEGAKSVISLIYNYFPGKRLPEGPEDLKIAKYAYGQDYHLVVKDRLKTLMENLRKEIGEIGGRAFIDSAPVMERQWAQKSGLGWVGKNSLLLNRDMGSFFFLAELIVDVEISPDPPMVKDYCGTCTRCIDACPTDAIVADGVVDASKCISYLTIELKENIPAEFKGKMENWIFGCDICQDVCPWNRFSKPHREPLFEMSPDLANMGKREWQEITEEVFQQVFAKSPLKRSKWSGLRRNVWFVESREG

SEQ ID NO: 78124 - protein, 262 aa, Marinirhabdus gelatinilytica
  misc_feature (1)..(262): tr|A0A370QIK1|A0A370QIK1_9FLAO Epoxyqueuosine reductase OS=Marinirhabdus gelatinilytica OX=1703343 GN=C8D94_10 134 PE=4 SV=1
MHGEMGYMENYFDKRLDPTKLVEGSKSVISLLLNYYPSETQRDDSYKISKYAYGRDYHFVIKEKLKGLLRFIQSEIGEVHGRAFVDSAPVLDKAWAAKSGLGWIGKHSNLLTQKVGSFYFIAELIVDLELEYDTPVTDHCGSCTACIDACPTQAIVQPYVVDGSKCISYATIELKEQIPSSYSNQMDDWMFGCDVCQDVCPWNRFSKPHNEPLFNPHPELLSKSKKEWEEITKGVFNEIFKKSAVKRTKFEGLKRNIQFLKK

SEQ ID NO: 78125 - protein, 299 aa, Marinisporobacter balticus
  misc_feature (1)..(299): tr|A0A4V2S9L1|A0A4V2S9L1_9CLOT Epoxyqueuosine reductase OS=Marinisporobacter balticus OX=2018667 GN=EV214_1472 PE=4 SV=1
MKKSLIQFCQKLNIEHVGIAPVGPYKELEKILRDRVDKGYITGMEEKDLKKRTDPKEQMEDAASIIVCLFPYFTGNFENSNISKYTYSIDYHMIIKEKLEKIGEFFKAHIKGFSYKSFVDTGPLVDRYLAYLAGVGYFGLNNHIITDPYGSFVFIGYIINNYPFEEDKPLDKTCMRCGACIKKCPGGAILGGFKIDPRKCVSFITQKKEELTGEEIHILKKNNMVFGCDICQDICPHNQNIANTNMREFKTALIYTLKEEEISEMSNKAFKRIYGNRAFSWRGKKIIARNLHVLKRKDK

SEQ ID NO: 78126 - protein, 365 aa, Marinithermus hydrothermalis
  misc_feature (1)..(365): tr|F2NQB9|F2NQB9_MARHT 4Fe-4S ferredoxin-type domain-co ntaining protein OS=Marinithermus hydrothermalis (strai n DSM 14884 / JCM 11576 / T1) OX=869210 GN=Marky_0900 P E=4 SV=1
MDPRAVLTAEAEARGFLTAWAPARLPEPPRARYRAWIAGGKHAGMAYLERNLETRLDPTRRFPWVKSVLVLGALHAYPDPGVPRGGVRVGRVARYAWVRDYHAWFAPHLEALEALCVKLGGRGKGYVDHGPIPERSYAALGGMGWVGRNAMLIHQGCGSYFTLAVLLTSFEVEPVPAHPNRCGRCVRCVGACPTGALPGDGTLDANRCVSYWTIEHRGLIPPELWDGVGDWLFGCDACQEACPWNRKAHHFWEGVRPDPELAHPDLSAFFTLSSRAFQRRYAGSAFLRPGRVRMARNALVVLANTRDPAYLSLVRLGAEDVNPLVRATAARALALLGDARRAERLRKDPDPRVAAEATRALEALG

SEQ ID NO: 78127 - protein, 61 aa, Marinobacter adhaerens
  misc_feature (1)..(61): tr|A0A352IUE9|A0A352IUE9_9ALTE tRNA epoxyqueuosine(34) reductase QueG (Fragment) OS=Marinobacter adhaerens OX= 1033846 GN=DC045_12395 PE=4 SV=1
KRTEGSAIRRTGYEGWLRNLAVGLGNAPSTIPVIEALKKRADHPSEMVREHVQWALKRHGL

SEQ ID NO: 78128 - protein, 359 aa, Marinobacter adhaerens
  misc_feature (1)..(359): tr|E4PHY1|E4PHY1_MARAH Epoxyqueuosine reductase OS=Mari nobacter adhaerens (strain DSM 23420 / HP15) OX=225937 GN=queG PE=3 SV=1
MSTTATCTTTHPELADLPSLIRQWAAEFGFADVGITNADTGEHADHLKDWLAAGYQGEMDYMAHHGDKRYTPASLVPGTTRVISVRMDYLPSPDSPKEALTNRESAYVTRYALGRDYHKLIRKRLAQLAAKIDEAVSGYDYRAFVDSAPVLERALAQRAGLGWIGKNNMLIHPKAGSFFFLGEIFTSAPLPIDEPFETDHCGSCSACLDLCPTDAFVGSHKLDARRCISYLTIELKGSIPEELRPLMGNRVFGCDDCQLVCPWQKFSKPTSEKDFQPRHGLDNSSLAELFLWTEEQFLKRTEGSAIRRTGYEGWLRNLAVGLGNAPSTIPVIEALKKRADHPSEMVREHVQWALKRHGL

SEQ ID NO: 78129 - protein, 354 aa, Marinobacter algicola
  misc_feature (1)..(354): tr|A6F3K1|A6F3K1_9ALTE Epoxyqueuosine reductase OS=Mari nobacter algicola DG893 OX=443152 GN=queG PE=3 SV=1
MTESIDQNLELLPEQIQSWALELGFSDVGITLPDTGAHGARLKDWLRKGFHGEMSYMEDHGDKRYTPTSLVEGTQRVISVRLDYLPAPDNPGRILTNPEKAYVTRYATGRDYHKLMRKRLATLAKRIDEAVSGYDYRAFVDSAPVLERALAQRAGLGWIGKNNMLIHPKAGSFFFLGEIFTSAPLPLDEPFDKEHCGSCAACLDVCPTDAFEGPHKLDARKCISYLTIELKGSIPEQLRSKMGNRVFGCDDCQLVCPWNKFSKPTAEQDFQPRHGLDNSELATLFLWTEEQFLKRTEGSAIRRTGYEGWLRNLAVGLGNAPSTIPVIEALKQRADFPSEMVREHVHWALRRHGL

SEQ ID NO: 78130 - protein, 359 aa, Marinobacter antarcticus
  misc_feature (1)..(359): tr|A0A1M6RN71|A0A1M6RN71_9ALTE Epoxyqueuosine reductase OS=Marinobacter antarcticus OX=564117 GN=queG PE=3 SV= 1
MSTTETNTSLTPELADLPTLIRQWARELGFSDAGITTADTGEHAQHLQDWLDKGYQGEMEYMADHGDKRYTPKSLVPGTTRVISVRMDYLPAPDSPKEALTNRENAYITRYALGRDYHKLIRKRLATLAKRIDDAVSGYDYRAFVDSAPVLERALAQRAGLGWIGKNNMLIHPKAGSFFFLGEIFTSAPLPVDAAFETDHCGSCSACLELCPTDAFVGPHKLDARRCISYLTIELKGSIPEELRSLMGNRVFGCDDCQLVCPWQKFSKPAREDDFQPRHGLDNSSLAELFLWTEEQFLKRTEGSAIRRTGYEGWLRNLAVGLGNAPSTIPVIEALKKRADHPSDMVREHVQWALAQHDL

SEQ ID NO: 78131 - protein, 354 aa, Marinobacter confluentis
  misc_feature (1)..(354): tr|A0A4Z1BR56|A0A4Z1BR56_9ALTE Epoxyqueuosine reductase OS=Marinobacter confluentis OX=1697557 GN=queG PE=3 SV =1
MTETTDPNLSHLPDMIDKWARDLGFSDLGITYPDTGVHAQHLQQWLDDGFHGEMGYMADHGDKRYTPRSLVEGTRRVISVRLDYLPAPDSPAQVLTDPEKAYVTRYAVGRDYHKLMRKRLATLAKKIDEAVSGFEYRAFVDSAPVLERALAQRAGLGWIGKNNMVIHPKAGSFFFLGEIFTSAPLPVNEPFEKEHCGSCTACLDICPTDAFEGPHRLDARKCISYLTIELSGSIPLELREKMGNRVFGCDDCQLVCPWNKFSKPTAETDFQPRHGLDNAELATLFLWTEEEFLKRTEGSAIRRTGYQGWLRNLAVGLGNAPSTIPVIEALKQRADHPSELVREHVQWALARHGL

SEQ ID NO: 78132 - protein, 352 aa, Marinobacter daqiaonensis
  misc_feature (1)..(352): tr|A0A1I6HDW0|A0A1I6HDW0_9ALTE Epoxyqueuosine reductase OS=Marinobacter daqiaonensis OX=650891 GN=queG PE=3 SV =1
MTTALEALPEKIDQWARELGFSAVGITRPDTGVHAQRLQQWLEAGMQGQMTWMGDHGDKRYNPTSLVPGTERVISLRMDYLPAPDSPAEVLQDREKAYISRYTLGRDYHKLIRKRLSQLAKRIDEELEGHHYRAFTDSAPVMERALAQRAGLGWIGKNTMLLAPTVGSFFFLGEIFTSAPLPETAPFEKEHCGSCSACLDRCPTDAFVGPHVLDARKCISYLTIELKGSIPEELRPLMGNRVFGCDDCQLVCPWNKFSKPSAEDDFQPRHSLDNTTLAELFLWSEEEFLKRTEGSAIRRTGYEGWLRNLAVGLGNAPSTIPVIEALKARADHPSELVREHVHWALNQHNAVH

SEQ ID NO: 78133 - protein, 362 aa, Marinobacter excellens
  misc_feature (1)..(362): tr|A0A0P8B3K8|A0A0P8B3K8_9ALTE Epoxyqueuosine reductase OS=Marinobacter excellens HL-55 OX=1305731 GN=queG PE= 3 SV=1
MTSTQNSGDTAKDHPDLHALPDQIRQWAQELGFADAGITDADTGPHAERLQQWLSAGYHGEMAYMADHGDKRYTPDSLVPGTLRVISVRLDYLSAPDNPGRVLADREAAYITRYALGRDYHKLMRKRLATLAKWIDEAVSGYDYRAFVDSAPVLERGLAQRAGLGWIGKNNMVIHPKAGSYFFLGEIFTSAPLPVDPPFESQHCGTCSACLEVCPTDAFVGAHLLDARRCISYLTIELNGPIPEELRSKMGNRVFGCDDCQLICPWNKFSKPTREADFSPRHQLDNSSLAELFLWSEQQFLTRTEGSAIRRTGYENWLRNLAVGLGNAPTTIPVTEALKQRANHPSELVREHVAWALRQHGL

SEQ ID NO: 78134 - protein, 364 aa, Marinobacter excellens
  misc_feature (1)..(364): tr|A0A137SF52|A0A137SF52_9ALTE Epoxyqueuosine reductase OS=Marinobacter excellens LAMA 842 OX=1306954 GN=queG PE=3 SV=1
MTSNPELRSERPEHEALHALPDQIRAWASELGFADAGITCADTGPHAERLQQWLKAGYHGDMAYMADHGDKRYTPDSLVPGTTRVISVRMDYLPAPDNPKQVLTNRETAYVTRYALGRDYHKLMRKRLATLAAKIDSAVSGYDYRAFVDSAPVLERGLAQRAGLGWIGKNNMLIHPKAGSFFFLGEIFTSAPLPVDEAFDSQHCGSCSACLEVCPTDAFVGAHLLDARRCISYLTIELKGPIPEELRSKMGNRVFGCDDCQLVCPWNKFNKPTRENDFQPRHGLDNSTLAELFLWTEDEFLKRTEGSAIRRTGYENWLRNLAVGLGNAPSTIPVIEALKQRADHSSALVREHVAWALQQHGITA

SEQ ID NO: 78135 - protein, 359 aa, Marinobacter flavimaris
  misc_feature (1)..(359): tr|A0A3D8H6C0|A0A3D8H6C0_9ALTE Epoxyqueuosine reductase OS=Marinobacter flavimaris OX=262076 GN=queG PE=3 SV=1
MSTTATCTTTHPELADLPSLIRQWAAEFGFAEVGITNANTGEHADHLKDWLAAGYQGEMDYMAHHGDKRYTPASLVPGTTRVISVRMDYLPSPDSPKEALTNREGAYVTRYALGRDYHKLIRKRLAQLAAKIDEAVSGYDYRAFVDSAPVLERALAQRAGLGWIGKNNMLIHPKAGSFFFLGEIFTSAPLPIDEPFETDHCGSCSACLDLCPTDAFVGSHKLDARRCISYLTIELKGSIPEELRPLMGNRVFGCDDCQLVCPWQKFSKPTSEKDFQPRHGLDNSSLAELFLWTEEQFLKRTEGSAIRRTGYEGWLRNLAVGLGNAPSTIPVIEALKKRADHPSEMVREHVQWALKRHGL

SEQ ID NO: 78136 - protein, 362 aa, Marinobacter fuscus
  misc_feature (1)..(362): tr|A0A2T1K796|A0A2T1K796_9ALTE Epoxyqueuosine reductase OS=Marinobacter fuscus OX=2109942 GN=queG PE=3 SV=1
MSQPSQHSKTDTRTPSLEALPDRIRAWAKELGFADAGITRADTGPHAERLQQWLKAGYHGDMAYMADHGDKRYTPDSLVPGTTRVISVRLEYLPAPDNPKQVLTNRDQAYITRYALGRDYHKLMRKRLATLAARIDNAISGFDYRAFVDSAPVLERGLAQRAGLGWIGKNNMLIHPKAGSFFFLGEIFTNAPLPLDAPFESQHCGSCSACLEVCPTNAFVGPHLLDARRCISYLTIELKGSIPEELRPMMGNRVFGCDDCQLVCPWNKFSKPTMEDDFQPRHRLDNASLAELFLWTESEFLKRTEGSAIRRTGYENWLRNLAVGLGNAPTTIPVVEALKARAEHPSELVREHVAWALQQHGL

SEQ ID NO: 78137 - protein, 359 aa, Marinobacter gudaonensis
  misc_feature (1)..(359): tr|A0A1I6GKX4|A0A1I6GKX4_9ALTE Epoxyqueuosine reductase OS=Marinobacter gudaonensis OX=375760 GN=queG PE=3 SV= 1
MSATASSNTTHPELADLPALIRQWARDLGFADVGITTPDTGEHARHLQDWLAEGYQGDMDYMGHHGDKRYTPDSLVPGTRRVISVRMDYLPAPDSPKRALTNRESAYVTRYALGRDYHKLIRKRLAQLAAKIDAAVSGFDYRAFVDSAPVLERALAQRAGLGWIGKNNMLIHPKAGSFFFLGEIFTSAPLPTDTPFETYHCGSCSACLDLCPTDAFVGPHKLDARRCISYLTIEFRGSIPEELRPLMGNRVFGCDDCQLVCPWQKFSKPTEEKDFQPRHGLDNSTLAELFLWTEEQFLKRTEGSAIRRTGYEGWLRNLAVGLGNAPSTIPVIEALKQRTDHPSELVREHVRWALKQHGL

SEQ ID NO: 78138 - protein, 359 aa, Marinobacter guineae
  misc_feature (1)..(359): tr|A0A2G1VK73|A0A2G1VK73_9ALTE Epoxyqueuosine reductase OS=Marinobacter guineae OX=432303 GN=queG PE=3 SV=1
MSASSTCDKPSPELADLPALIRRWAAELGFSDVGITTPDTGEHAHHLQDWLAAGYQGEMDYMAHHGDKRYTPTSLVPGTCRVISVRMDYLPAPDNPKEALTHRDKAYVTRYALGRDYHKLIRKRLARLAEQIDAAVNGFDYRAFVDSAPVLERALAQRAGLGWIGKNNMLIHPKAGSFFFLGEIFTSAPLPIDEPFETDHCGSCSACLDLCPTDAFVGSHKLDARRCISYLTIELKGSIPEELRPLMGNRVFGCDDCQLVCPWQKFSKPTKEQDFQPRHGLDNTSLAELFLWSEEQFRKRTEGSAIRRTGYDGWLRNLAVGLGNAPSTIPVIEALKKRADHPSEMVREHVQWALRQHDL

SEQ ID NO: 78139 - protein, 362 aa, Marinobacter halophilus
  misc_feature (1)..(362): tr|A0A2T1KDR7|A0A2T1KDR7_9ALTE Epoxyqueuosine reductase OS=Marinobacter halophilus OX=1323740 GN=queG PE=3 SV= 1
MTSTQKPDDTATETPALAALPGQIRQWAQELGFADAGITGADTGPHAERLQQWLNAGYHGEMAYMADHGGKRYTPDSLVPGTLRVISVRMDYLTSPDSPGQALADRETAYITRYALGRDYHKLMRKRLAKLAKRINEAVSGYDYRAFVDSAPVLERGLAQRAGLGWIGKNNMVIHPKAGSYFFLGEIFTSAPLPVDPPFDSQHCGSCSACLEVCPTDAFVGAHLLDARRCISYLTIELKGPIPEELRAKMGNRVFGCDDCQLVCPWNKFSKPTRETDFLPRHKLDNSALAELFLWSEQEFLERTEGSAIRRTGYENWLRNLAVGLGNAPPTIPVIEALKQRADHPSELVREHVAWALRRHGL

SEQ ID NO: 78140 - protein, 362 aa, Marinobacter hydrocarbonoclasticus
  misc_feature (1)..(362): tr|A0A350RTM3|A0A350RTM3_MARHY Epoxyqueuosine reductase OS=Marinobacter hydrocarbonoclasticus OX=2743 GN=queG PE=3 SV=1
MAVTPEHPASETLHTELADLPAQIRRWARELGFSDAGITQAETGPHAERLQRWLAAGYHGQMAYMADHGDKRYTPDSLVPGTTRVISVRLDYLPAPDNPKQVLTDRERAYVTRYALGRDYHKLMRKRLATLAKWIDEAVSGYDYRAFVDSAPVLERGLAQRAGLGWIGKNNMLIHPKAGSFFFLGEIFTNAPLPLDAPFDSQHCGSCAACLDVCPTDAFVGPHLLDARRCISYLTIELKGPIPEELRSQMGNRVFGCDDCQLVCPWNKFNKPTDEEDFKPRHGLDNSSLAELFLWSEQEFLKRTEGSAIRRTGYENWLRNLAVGLGNAPSTIPVVEALKARADHPSELVREHVAWALKQHGL

SEQ ID NO: 78141 - protein, 362 aa, Marinobacter hydrocarbonoclasticus
  misc_feature (1)..(362): tr|A1U4D1|A1U4D1_MARHV Epoxyqueuosine reductase OS=Mari nobacter hydrocarbonoclasticus (strain ATCC 700491 / DS M 11845 / VT8) OX=351348 GN=queG PE=3 SV=1
MAVTPEHPASETLHTELADLPAQIRRWARELGFSDAGITQAETGPHAERLQRWLAAGYHGQMAYMADHGDKRYTPDSLVPGTTRVISVRLDYLPAPDNPKQVLTDRERAYVTRYALGRDYHKLMRKRLATLAKWIDEAVNGYDYRAFVDSAPVLERGLAQRAGLGWIGKNNMLIHPKAGSFFFLGEIFTNAPLPLDAPFDSQHCGSCAACLDVCPTDAFVGPHLLDARRCISYLTIELKGPIPEELRSQMGNRVFGCDDCQLVCPWNKFNKPTDEEDFKPRHGLDNSSLAGLFLWTEQEFLKRTEGSAIRRTGYENWLRNLAVGLGNAPSTIPVVEALKARADHPSELVREHVAWALKQHGL

SEQ ID NO: 78142 - protein, 354 aa, Marinobacter lipolyticus
  misc_feature (1)..(354): tr|R8B5A6|R8B5A6_9ALTE Epoxyqueuosine reductase OS=Mari nobacter lipolyticus SM19 OX=1318628 GN=queG PE=3 SV=1
MTAKPTTVIENLPESIRSWARELGFSDAGITLPDTGIHGERLKSWLAKGYHGEMTYMGDHGDKRYTPTSLVPGTLRVISVRLDYLASPDSPKEALTNREKAYVTRYALGRDYHKLMRKRLATLAKRIDEAVSGHDYRAFVDSAPVLERALAQRAGLGWIGKNNMVIHPKAGSFFFLGEIFTSAPLPVDEPFEADHCGSCSACLDLCPTDAFKGPHLLDARRCISYLTIELKGSIPEELRPLMGNRVFGCDDCQLVCPWNKFSKPTREPDFQPRHGLNNSELAELFMWTEEQFLKRTEGSAIRRTGYEGWLRNLAVGLGNAPSTIPVIEALKKRADYPSDLVREHVQWALRQHGL

SEQ ID NO: 78143 - protein, 359 aa, Marinobacter litoralis
  misc_feature (1)..(359): tr|A0A3M2RFX3|A0A3M2RFX3_9ALTE Epoxyqueuosine reductase OS=Marinobacter litoralis OX=187981 GN=queG PE=3 SV=1
MVTSTDNTPSNASLEALPEKIRQWAKELGFADAGITYADTGPHAERLKQWLAAGYHGNMAYMADHGDKRYTPSSLVPNTQRVISVRMDYLPSPDNPKQALTNRETAYITRYALGRDYHKLMRKRLATLAKWIDEAVAGYDYRAFVDSAPVLERGLAQRAGLGWIGKNNMVIHPKAGSFFFLGEIFTSAPLPVDEPFDKQHCGSCSACLEICPTDAFVGAHLLDARKCISYLTIELKGPIPEELRSKMGNRVFGCDDCQIVCPWNKFSKPTAESDFQPRHGLNNTELAELFMWTEDEFLKRTEGSAIRRTGYENWLRNIAVGLGNAPSTIPVIEALKQRAEHPSEVVREHVVWALRQHGL

SEQ ID NO: 78144 - protein, 361 aa, Marinobacter lutaoensis
  misc_feature (1)..(361): tr|A0A1V2DVX2|A0A1V2DVX2_9ALTE Epoxyqueuosine reductase OS=Marinobacter lutaoensis OX=135739 GN=queG PE=3 SV=1
MTDRDSAPVRDSQLQELKREIRAWARELGFSDVGVTRADTGPHGERLRQWLAKGYHGEMTYMAQHGDKRYTPTSLVPGTVRVLSVRMDYLPAPDSPKQVLTNRERAYISRYTLGRDYHKLLRKRLATLARRIDEALQGFDYRAFVDSAPVLERALAQRAGLGWIGKNTMLIHPKAGSFFFLGEIFTSAPLPEDAPFERDHCGRCSACLDVCPTDAFVAPHLLDARRCISYLTIELKGPIPEALRPKLGNRVFGCDDCQLVCPWNRFSRPTAEPDFQPRHGLDNATLAELFLWSEEEFLARTEGSAIRRTGYQGWLRNLAVGLGNAPTTIPVVEALRRRADHPSELVREHVHWALRRHGLTP

SEQ ID NO: 78145 - protein, 359 aa, Marinobacter manganoxydans
  misc_feature (1)..(359): tr|G6YUK4|G6YUK4_9ALTE Epoxyqueuosine reductase OS=Mari nobacter manganoxydans MnI7-9 OX=1094979 GN=queG PE=3 S V=1
MSTTATCTTTHPELADLPSLIRRWAAEFGFADVGITNADTGEHADHLKDWLAAGYQGEMDYMAHHGDKRYTPASLAPGTTRVISVRMDYLPSPDSPKEALTNREGAYVTRYALGRDYHKLIRKRLAQLAAKIDEAVSGYDYRAFVDSAPVLERALAQRAGLGWIGKNNMLIHPKAGSFFFLGEIFTSAPLPIDEPFETDHCGSCSACLDLCPTDAFVGSHKLDARRCISYLTIELKGSIPEELRPLMGNRVFGCDDCQLVCPWQKFSKPTSEKDFQPRHGLDNSSLAELFLWTKEQFLKRTEGSAIRRTGYEGWLRNLAVGLGNAPSTIPVIEALKKRADHPSEMVREHVQWALKRHGL

SEQ ID NO: 78146 - protein, 361 aa, Marinobacter mobilis
  misc_feature (1)..(361): tr|A0A1H2T7A6|A0A1H2T7A6_9ALTE Epoxyqueuosine reductase OS=Marinobacter mobilis OX=488533 GN=queG PE=3 SV=1
MHHSLDTLPDTIRRWAKELGFADIGITHADTGSHGDHLKRWLAEGLHGEMGYMADHGDMRYTPASLVPGTERVISVRMDYLSAPDSPRDVLANPEKAYISRYTLGRDYHKLIRKRLSTLAKRIDDAVSGFNYRAFVDSAPVLERALGTQAGLGWQGKNTMLITRQAGSFFFLGEIFTSAPLPVDTPYDKDHCGRCTACLDLCPTQAFPAPHVLDARRCISYLTIELKGAIPEELRPLMGNRVFGCDDCQLVCPWNRFAKASKEDDFKPRHHLDNTELAQLFLWNEEEFLKRTEGSAIRRTGYEGWLRNLAVGLGNAPSTIPVIEALRKRADHPSPLVREHVAWALSRHGVDPVAQPPALQS

SEQ ID NO: 78147 - protein, 357 aa, Marinobacter nanhaiticus
  misc_feature (1)..(357): tr|N6WP40|N6WP40_9ALTE Epoxyqueuosine reductase OS=Mari nobacter nanhaiticus D15-8W OX=626887 GN=queG PE=3 SV=1
MLTDSLGANLDKLARQIPVWAEELGFQATGITEAETGRHGARLQEWLDSGMNGEMNYMADHGSKRYRPDELLPGTRRVISVRMDYMPSPDSPARTLNDPEKAYISRYTLGRDYHKLVRKRLAQLAKRIDDALEGHNHRAFVDSAPVLERALAQRAGLGWFGKNTMLIHPKAGSFFFLGEIFTSAPLPVSEPFETEHCGSCSACLDVCPTDAFDGPHRLDARRCISYLTIELKGSIPEELRSKMGNRVFGCDDCQLVCPWNKFSRPTDKDDFQARHNLDNSELAELFLWTEAEFLKRTEGSAIRRTGYEGWLRNLAVGLGNAPSTIPVIEALKKRADHPSELVREHVQWALRRHGITN

SEQ ID NO: 78148 - protein, 360 aa, Marinobacter nitratireducens
  misc_feature (1)..(360): tr|A0A072N1I7|A0A072N1I7_9ALTE Epoxyqueuosine reductase OS=Marinobacter nitratireducens OX=1137280 GN=queG PE= 3 SV=1
MTAPSNTTLPDQRLEKLTAEIRTWARELGFSDIGITLPDTGVHARRLQDWLSKGYHGDMEYMGHHGDKRYTPTSLVPGTARVISVRMDYLPAPDSPKQALTNRETAYVTRYALGRDYHKLIRKRLATLASRIDEAVSGFDYRAFVDSAPVLERALAQRAGLGWIGKNNMLIHPKAGSFFFLGEIFTSAPLPIDTPFDTDHCGSCSACLDLCPTDAFVGPHLLDARRCISYLTIESKGTIPEELRPLMGNRVFGCDDCQLVCPWQKFSKPTRETDFQPRHRLENSSLAELFLWTEEQFLKRTEGSAIRRTGYEGWLRNLAVGLGNAPSTIPVIEALKKRADHPSEMVREHVLWALKRHGIN

SEQ ID NO: 78149 - protein, 361 aa, Marinobacter pelagius
  misc_feature (1)..(361): tr|A0A1I4URJ4|A0A1I4URJ4_9ALTE Epoxyqueuosine reductase OS=Marinobacter pelagius OX=379482 GN=queG PE=3 SV=1
MTKPQKTPPVPPELDDLPGKIRQWARELGFADAGITLPETGPHADRLQAWLAEGYQGEMDYMGHHGDKRYTPTSLVPGTARIISVRLDYLPAPDNPKQALTDRGTAYVTRYALGRDYHKLMRKRLATLAKWIDEAVSGFEYRAFVDSAPVLERALAQRAGLGWIGKNNMVIHPKAGSFFFLGEIFTSAPLPVDPPFESEHCGSCSACLEVCPTDAFVGPHLLDARRCISYLTIELKGSIPEELRPKMGNRVFGCDDCQLVCPWNKFSKPTAEQDFQPRHGLDNSSLAELFLWTEEQFLKRTEGSAIRRTGYEGWLRNLAVGLGNAPTTIPVVEALKQRADHPSEMVREHVHWALRRHGLTP

SEQ ID NO: 78150 - protein, 361 aa, Marinobacter pelagius
  misc_feature (1)..(361): tr|A0A366GMR3|A0A366GMR3_9ALTE Epoxyqueuosine reductase OS=Marinobacter pelagius OX=379482 GN=queG PE=3 SV=1
MTEPKETPPAPPELDDLPGKIRQWARELGFADAGITLPETGPHADRLQAWLAEGYQGEMEYMGHHGDKRYTPTSLVHGTARIISVRMDYLPAPDNPKQALTDRETAYVTRYALGRDYHKLMRKRLATLAKWIDEAVSGFEYRAFVDSAPVLERALAQRAGLGWIGKNNMVIHPKAGSFFFLGEIFTSAPLPVDPPFETEHCGSCSACLEVCPTDAFVGPHLLDARRCISYLTIELKGSIPEELRPKMGNRVFGCDDCQLVCPWNKFSKPTAEQDFQPRHGLDNSSLAELFLWTEEQFLKRTEGSAIRRTGYEGWLRNLAVGLGNAPTTIPVVEALKQRADHPSEMVREHVHWALRRHGLTA

SEQ ID NO: 78151 - protein, 362 aa, Marinobacter persicus
  misc_feature (1)..(362): tr|A0A1I3PU93|A0A1I3PU93_9ALTE Epoxyqueuosine reductase OS=Marinobacter persicus OX=930118 GN=queG PE=3 SV=1
MASNTNTTDKPGTDPSLNALPEHIRQWGRELGFADIGITTAQTGPHAERLQRWLAAGYHGQMGYMADHGDKRYTPDSLVPGTTRVISVRLDYLPAPDNPKEVLTNREKAYVTRYALGRDYHKLMRKRLATLAKWIDEAVSGYDYRAFVDSAPVLERGLAQRAGLGWIGKNNMLIHPKAGSYFFLGEIFTSAPLPVDEPFEKQHCGSCSACLEVCPTDAFVGAHLLDARRCISYLTIELKGPIPEELRAKMGNRVFGCDDCQLVCPWNKFSKATAENDFQPRHGLENSELAELFLWSEEEFLKRTEGSAIRRTGYENWLRNLAVGLGNAPSTIPVIEALKQRADHPSELVREHVAWALRRHGL

SEQ ID NO: 78152 - protein, 359 aa, Marinobacter persicus
  misc_feature (1)..(359): tr|A0A2S6G9V8|A0A2S6G9V8_9ALTE Epoxyqueuosine reductase OS=Marinobacter persicus OX=930118 GN=queG PE=3 SV=1
MATSPEDNRTHTPLADMPGRIRQWAKDLGFADAGITLADTGPHAERLQQWLKAGYHGQMGYMADHGDKRYTPDSLVPGTARVISVRLDYLPAPDNPKHTLQNREKAYITRYALGRDYHKLMRKRLATLATWIDEAVSGYDYRAFVDSAPVLERGLAQRAGLGWIGKNNMLIHPKAGSYFFLGEIFTSAPLPVDEPFEKQHCGSCSACLEVCPTDAFVGAHLLDARRCISYLTIELKGPIPEELRAKMGNRVFGCDDCQLVCPWNKFSKATAENDFQPRHGLDNSELAELFLWTEAQFLKRTEGSAIRRTGYENWLRNLAVGLGNAPSTIPVIEALKQRADHPSELVREHVAWALRRHGQ

SEQ ID NO: 78153 - protein, 368 aa, Marinobacter psychrophilus
  misc_feature (1)..(368): tr|A0A0H4I2J4|A0A0H4I2J4_9ALTE Epoxyqueuosine reductase OS=Marinobacter psychrophilus OX=330734 GN=queG PE=3 S V=1
MTASLATSTTCAKNSDQTANLQALVQQIRDWAQELGFADLGITSADTGEHAQRLQHWLEQGYHGTMDYMANHGDKRYTPASLVPGTARVISVRMDYLTLPDNPEQALRNRENAYISRYTLGRDYHKLMRKRLAQLAKRIDSALEGHQHRAFVDSAPVLERALAQRAGLGWIGKNNMVIHPKAGSFFFLGEIYTSAPLPIDAPFTTDHCGSCSACLQLCPTNAFVDAHMLDARRCISYLTIELKESIPEELRPLMGNRVFGCDDCQLVCPWNKFSKHSEEDDFKPRHGLDNTSLAALMMWSEEQFLQRTEGSAIRRTGYHGWLRNLAVGLGNAPTTIPVLEALRARQDYPSEMVREHVEWALAQHGLAL

SEQ ID NO: 78154 - protein, 361 aa, Marinobacter salarius
  misc_feature (1)..(361): tr|A0A1W6K7M5|A0A1W6K7M5_9ALTE Epoxyqueuosine reductase OS=Marinobacter salarius OX=1420917 GN=queG PE=3 SV=1
MPLDWHSMTESIDQNLEHLPEHIQSWARELGFSDVGITLPDTGAHGARLKDWLRKGFHGEMSYMEDHGDKRYTPTSLVEGTQRVISVRLDYLPAPDNPGRILTNPEKAYITRYATGRDYHKLMRKRLATLAKRIDEAVSGYDYRAFVDSAPVLERALAQRAGLGWIGKNNMLIHPKAGSFFFLGEIFTSAPLPLDEPFEKEHCGSCAACLDICPTDAFEGPHKLDARKCISYLTIELKGSIPEELRPKMGNRVFGCDDCQLVCPWNKFSKPTAEKDFQPRHGLDNSELATLFLWTEEQFLKRTEGSAIRRTGYEGWLRNLAVGLGNAPPTIPVIEALKQRADFPSEMVREHVHWALRRHGL

SEQ ID NO: 78155 - protein, 354 aa, Marinobacter salarius
  misc_feature (1)..(354): tr|W5YMU6|W5YMU6_9ALTE Epoxyqueuosine reductase OS=Mari nobacter salarius OX=1420917 GN=queG PE=3 SV=1
MTESIDQNLEHLPEHIQSWARELGFSDVGITLPDTGAHGARLKDWLRKGFHGEMSYMEDHGDKRYTPTSLVEGTQRVISVRLDYLPAPDNPGRILTNPEKAYITRYATGRDYHKLMRKRLATLAKRIDEAVSGYDYRAFVDSAPVLERALAQRAGLGWIGKNNMLIHPKAGSFFFLGEIFTSAPLPLDEPFEKEHCGSCAACLDICPTDAFEGPHKLDARKCISYLTIELKGSIPEELRPKMGNRVFGCDDCQLVCPWNKFSKPTAEKDFQPRHGLDNSELATLFLWTEEQFLKRTEGSAIRRTGYERWLRNLAVGLGNAPSTIPVIEALKQRADFPSEMVREHVHWALRRHGL

SEQ ID NO: 78156 - protein, 359 aa, Marinobacter salinus
  misc_feature (1)..(359): tr|A0A1D9GHQ7|A0A1D9GHQ7_9ALTE Epoxyqueuosine reductase OS=Marinobacter salinus OX=1874317 GN=queG PE=3 SV=1
MSIATNNPDTAQALAELTESIRRWAEELGFSDLGITLPETGEHGQHLQDWLEQGYQGEMAYMGHHGDKRFTPRSLVPGTDRIISVRMDYLPAPDSPKEALTNRTKAYITRYALGRDYHKLIRKRLATLAKRIDDAVSGYDYRAFVDSAPVLERALAQRAGLGWIGKNNMLIHPKAGSFFFLGEIFTSAPLPLSEPFDTDHCGSCTSCLDLCPTDAFVGPHKLDARRCISYLTIELNGSIPEELRPLMGNRVFGCDDCQLVCPWQKFSKPTIENDFQPRHGLDNSSLAELFLWTEEQFLKRTEGSAIRRTGYEGWLRNLAVGLGNAPSTIPVIEALKKRTDHPGDMVREHVQWALRQHGL

SEQ ID NO: 78157 - protein, 372 aa, Marinobacter santoriniensis
  misc_feature (1)..(372): tr|M7CSC1|M7CSC1_9ALTE Epoxyqueuosine reductase OS=Mari nobacter santoriniensis NKSG1 OX=1288826 GN=queG PE=3 S V=1
MIFSPTPVHCSMNDLTSEQPPTPPLADLPGTIRQWARELGFADAGITLPDTGEHARYLKSWLASGYQGEMEYMGHHGNKRYTPTALVPGTARVISVRMDYLPSPDNPKQALTDRETAYITRYALGRDYHKLMRKRLATLAKWIDDAVTGHDHRAFVDSAPVLERALAQRAGLGWIGKNNMLIHPKAGSFFFLGEIFTSAPLPVDPPFESDHCGSCSACLEVCPTDAFVGPHLLDARRCISYLTIELKGSIPEELRPLMGNRVFGCDDCQLVCPWNKFSKPTDEQDFQPRHGLDNASLAELFLWSETEFLKRTEGSAIRRTGYEGWLRNLAVGLGNAPSTISVIEALKKRADHPSEVVREHVQWALARHGIKP

SEQ ID NO: 78158 - protein, 351 aa, Marinobacter segnicrescens
  misc_feature (1)..(351): tr|A0A1I0B0L3|A0A1I0B0L3_9ALTE Epoxyqueuosine reductase OS=Marinobacter segnicrescens OX=430453 GN=queG PE=3 S V=1
MTSALEDFPARIREWARELGFSDIGITRPETGVHAQRLQQWLEQGLQGEMEWMGHHGDKRYTPTALVPGTERVISVRMDYRNAPDNPQQVLQDPEKAYVTRYALGRDYHKLIRKRLTHLAKRIDSELHGYDYRAFTDSAPVMEKALAQRAGLGWIGKNTLVLNPKAGSYFFLGEIFTSAPLPVTPAFEKDHCGSCTACLDTCPTNAFAGPYVLDARRCISYLTIELKGAIPEDLRPLMGNRVFGCDDCQLACPWNRFSKPTREEDFSPRHNLDNSTLAELFRWTEDEFLKRTEGSAIRRTGYEGWLRNLAVGLGNAPSTIPVIEALKSRVDHPSELVREHVHWALARHGIE

SEQ ID NO: 78159 - protein, 364 aa, Marinobacter shengliensis
  misc_feature (1)..(364): tr|A0A2T1KRQ2|A0A2T1KRQ2_9ALTE Epoxyqueuosine reductase OS=Marinobacter shengliensis OX=1389223 GN=queG PE=3 S V=1
MTSNPELRSERPEHEALHALPDQIRAWASELGFADAGITCADTGPHAERLQQWLKAGYHGDMAYMADHGDKRYTPDSLVPGTTRVISVRMDYLPAPDNPKQVLTNRETAYVTRYALGRDYHKLMRKRLATLAAKIDSAVSGYDYRAFVDSAPVLERGLAQRAGLGWIGKNNMLIHPKAGSFFFLGEIFTSAPLPVDEAFDSQHCGSCSACLEVCPTDAFVGAHLLDARRCISYLTIELKGPIPEELRSKMGNRVFGCDDCQLVCPWNKFNKPTRENDFQPRHGLDNSSLAELFLWTEDEFLKRTEGSAIRRTGYENWLRNLAVGLGNAPSTIPVIEALKQRADHPSALVREHVAWALQQHGITA

SEQ ID NO: 78160 - protein, 359 aa, Marinobacter similis
  misc_feature (1)..(359): tr|W5YPN4|W5YPN4_9ALTE Epoxyqueuosine reductase OS=Mari nobacter similis OX=1420916 GN=queG PE=3 SV=1
MSAASDQPSTTEDFSDLVTRIRGWARELGFADLGITLPDTGEHGQHLQDWLAEGYHGEMEYMGYHGDKRYTPRSLVPGTARVISVRMDYLPSPDSPKEALTNREGAYVTRYALGRDYHKLIRKRLATLANRIDEALSGYEYRAFVDSAPVLERALAQRAGLGWIGKNNMLIHPKAGSFFFLGEIFTSAPLPVDAPFETDHCGSCTACLDLCPTDAFVGPHQLDARRCISYLTIELRGSIPEELRPLMGNRVFGCDDCQLVCPWQKFSKPTGEDDFQPRHGLDNSSLAELFLWTEEQFLKRTEGSAIRRTGYSGWLRNLAVGLGNAPSTIPVIEALKQRADHPDDMVREHVQWALKQHGL

SEQ ID NO: 78161 - protein, 359 aa, Marinobacter sp.; identical to SEQ ID NO: 78145
  misc_feature (1)..(359): tr|A0A2D7WX63|A0A2D7WX63_9ALTE Epoxyqueuosine reductase OS=Marinobacter sp. OX=50741 GN=queG PE=3 SV=1

SEQ ID NO: 78162 - protein, 360 aa, Marinobacter sp.
  misc_feature (1)..(360): tr|A0A5B0VQQ3|A0A5B0VQQ3_9ALTE Epoxyqueuosine reductase OS=Marinobacter sp. ZYF650 OX=2604327 GN=queG PE=3 SV= 1
MTTTSDATNTADALTSVASDIRAWATELGFSDAGITHPDTGIHGQHLQDWLAAGYQGEMEYMGHHGDKRYTPKSLVPGTARVISVRMDYMPTPDSPKEALTNRENAYVTRYALGRDYHKLIRKRLATLAKRIDDAVSGYDYRAFVDSAPVLERALAQRAGLGWIGKNNMLIHPKSGSFFFLGEIFTSAPLPLDAPFETDHCGSCSACLDLCPTDAFVGPHKLDARRCISYLTIELRGSIPEELRAPMGNRVFGCDDCQLVCPWQKFSKPTKEDDFHPRHGLDNTSLAELFMWTEEQFLKRTEGSAIRRTGYEGWLRNIAVGLGNAPSTIPVIEALRKRADHPSEMVREHVQWALRRHGIQ

SEQ ID NO: 78163 - protein, 359 aa, Marinobacter subterrani
  misc_feature (1)..(359): tr|A0A0J7JCZ0|A0A0J7JCZ0_9ALTE Epoxyqueuosine reductase OS=Marinobacter subterrani OX=1658765 GN=queG PE=3 SV= 1
MNATSTCDKATTELADLPALIRQWASDYGFADVGITMPDTGEHARHLQDWLAAGYQGEMEYMDHHGDKRYTPASLVPGTARVISVRMDYLPSPDSPKEALTDREGAYVTRYALGRDYHKLIRKRLAQLAAKIDEAVSGYSHRAFVDSAPVLERALAQRAGLGWIGKNNMLIHPKAGSFFFLGEIFTSAPLPVDEPFATDHCGSCSACLEMCPTDAFVGPHKLDARRCISYLTIELKGSIPEELRPLMGNRVFGCDDCQLVCPWQKFSKPAEEKDFQPRHGLDNSSLAELFLWTEEQFLKRTEGSAIRRTGYEGWLRNLAVGLGNAPSTIPVIEALKKRTDHPSEMVREHVQWALTRHGL

SEQ ID NO: 78164 - protein, 364 aa, Marinobacter vinifirmus
  misc_feature (1)..(364): tr|A0A558BGA2|A0A558BGA2_9ALTE Epoxyqueuosine reductase OS=Marinobacter vinifirmus OX=355591 GN=queG PE=3 SV=1
MTSQPETTENHPSGTELTTLPGQIRQWAKDLGFADAGITLADTGPHAERLQRWLAAGYHGDMAYMADHGDKRYTPDSLVPGTLRVISVRMDYLPSPDNPKQALTNRETAYITRYALGRDYHKLMRKRLATLAKQIDEAVSGYDYRAFVDSAPVLERGLAQRAGLGWIGKNNMLIHPKSGSYFFLGEIFTSAPLPVDEPFEKQHCGSCSACLEVCPTDAFVGAHLLDARRCISYLTIELKGPIPEELRSKMGNRVFGCDDCQLVCPWNKFSKPTREDDFQPRHGLDNTNLAELFLWTEEQFLKNTEGSAIRRTGYENWLRNLAVGLGNAPSTIPVIEALKQRADHPSELVREHVTWALRRHGLTA

SEQ ID NO: 78165 - protein, 361 aa, Marinobacter zhejiangensis
  misc_feature (1)..(361): tr|A0A1I4QHW8|A0A1I4QHW8_9ALTE Epoxyqueuosine reductase OS=Marinobacter zhejiangensis OX=488535 GN=queG PE=3 S V=1
MHQSLDTLPDIIRRWAQELGFADVGISTPDTGDHGSHLKRWLANGLHGEMSYMADHGNKRFTPTELVPGTQRVISVRMDYLTTPDSPGDVLSNPEKAYISRYTLGRDYHKLMRKRLATLAKRIDDAVSGFDYRAFVDSAPVLERALARQAGLGWQGKNTMLLTRKAGSFFFLGEIFTSAPLPLDTPYDKDHCGRCTSCLDLCPTQAFPAPHVLDARRCISYLTIELKGAIPEELRPLMGNRVFGCDDCQLVCPWNRFSKPSAEEDFKPRHHLDNTELAQLFRWTEEEFLTRTEGSAIRRTGYEGWLRNLAVGLGNAPSTIPVIEALKYRTNHPSPLVREHVLWALQQHGVDTDATPPATQS

SEQ ID NO: 78166 - protein, 386 aa, Marinobacterium aestuarii
  misc_feature (1)..(386): tr|A0A1A9F2K6|A0A1A9F2K6_9GAMM Epoxyqueuosine reductase OS=Marinobacterium aestuarii OX=1821621 GN=queG PE=3 S V=1
MNRLSPEQLSQLAAQIKNWAQELGFQQCGITGTDLSAEGPKLQAWLDQGYQGDMGYLENHFEKRLDPSLLVPGTQRIISVRMDYLPPDTQTLKILKQPDKAYIARYTLGRDYHKTLRKRLTRLGQRIEEACETLGYRAFVDSAPVLERPLAREAGIGWQGKHSLILNREAGSWFLLGELFIDLPLPVDAPYTEDHCGRCSACMDVCPTQAFPAPHVLDARRCISYLTIEYKGSIDPELRPLMGNRIFGCDDCQLICPWNRFASHSTETDFKPRHQLDDIDLTELFGWDEAQFLHKTEGSAIRRTGYQGWLRNIAIALGNSNGGAEVIAALQARLSDPSPLVQEHVQWALAQLQERAATHTTEVARAVGMHPAHPILDHPRARKLAD

SEQ ID NO: 78167 - protein, 376 aa, Marinobacterium georgiense
  misc_feature (1)..(376): tr|A0A1H4GTP5|A0A1H4GTP5_9GAMM Epoxyqueuosine reductase OS=Marinobacterium georgiense DSM 11526 OX=1122198 GN= queG PE=3 SV=1
MSDYTTAQLQQLSLALKEKARELGFHDCAITLPDASAESESYTRWLEAGYQADMAYLNENLDKRFDPTLLLPGTRRIIMLRMNYLPTEAPITGVLRNPDKAYIARYTLGRDYHKLMRKRLKQLGQWFNSQIEGIEVQFRPFVDSAPVLERPLARNAGLGWIGKHTLLLNRHAGSWFLLGELFIDLPLPVDAPETEQHCGRCRACLDVCPTNAFPEPYVLDARRCISYLTIEHKGSIPHELRPLMGNRIFGCDDCQLICPWNRFARRSSEPDFQPRHGLDTASLLELFLWDEATFLKRTEGSAIRRTGYEGWQRNLAVALGNSNGSDAVMEALRNRRATASEMLIEHIDWALQQLSERHAPRSLPLLDHPGAGRLPE

SEQ ID NO: 78168 - protein, 376 aa, Marinobacterium halophilum
  misc_feature (1)..(376): tr|A0A2P8F3P4|A0A2P8F3P4_9GAMM Epoxyqueuosine reductase OS=Marinobacterium halophilum OX=267374 GN=queG PE=3 S V=1
MSQFSTEQLDALARALKLQARTLGFQDCAITLPDAHQEAEAIQHWLDKGYQGSMDYLTQNVEKRLDPTLLVPGTQRIIMLRMDYLPAGAPITGILRNPDKAYVARYTLGRDYHKLIRKRLKQLGQWLDAQVEGAEVRFRPFVDSAPVLERPLARNAGLGWIGKHTLLLNRQAGSWFLLGELFIDLPLPIDPPETESHCGRCSACIDICPTQAFPEPGVLDARRCISYLTIEHRGSIPPELRPLMGNRIFGCDDCQLICPWNRFAKRSDEPDFQPRHGIDQAGLLELFAWDEETFLKRTEGSAIRRTGYEGWQRNLAVALGNSRGGDAVTKALQGRREQSSALVQEHIDWALQQLRNAAGPSPLPILDHPGARRLPE

SEQ ID NO: 78169 - protein, 382 aa, Marinobacterium lutimaris
  misc_feature (1)..(382): tr|A0A1H6DMS9|A0A1H6DMS9_9GAMM Epoxyqueuosine reductase OS=Marinobacterium lutimaris OX=568106 GN=queG PE=3 SV =1
MEQPSANANQPEPLESLAQRLKQRARELGFQQCAITLPDASAEAEHLQQWLDTGYQGEMGYLEQHFDKRIDPKLLVPGCERIVMVRMDYLPPETTTLKTLANPDKAYIARYTLGRDYHKLIRKRLKQLGQWLAAEAGDEAAVQFRPFVDSAPVLERPLARNAGIGWIGKHTLLLNRQAGSLFFLGELFTNLPLPIDAPETESHCGRCSACLDICPTKAFPEAGVLDARRCISYLTIEYSGSIPEELRPLMGNRIFGCDDCQLICPWNRFAKRTPEEDFKPRHSLDDVDLLTLFNWDEETFLKNTEGSAIRRTGFEGWQRNLAVALGNSRGGDKVEEALRSRRESVSALVQEHIDWALERLASKAGPVPLPIQQHPGARRIKD

SEQ ID NO: 78170 - protein, 382 aa, Marinobacterium mangrovicola
  misc_feature (1)..(382): tr|A0A4R1GC89|A0A4R1GC89_9GAMM Epoxyqueuosine reductase OS=Marinobacterium mangrovicola OX=1476959 GN=queG PE= 3 SV=1
MEQPIANANQPEPLSSLAVRLKQRARELGFQQCAITLPDASAEAEHLQQWLDAGYQGEMGYLEQHFDKRIDPKLLVPGCERIVMVRMDYLPPETTTLKTLANPDKAYIARYTLGRDYHKLIRKRLKQLGQWLAAEAGDEAAVQFRPFVDSAPILERPLARNAGIGWIGKHTLLLNRQAGSLFFLGELFTNLPLPIDAPETESHCGRCNACLDICPTNAFPEAGVLDARRCISYLTIEYDGSIPEELRPLMGNRIFGCDDCQLICPWNRFAKRTAEEDFKPRHNLDDVDLLTLFNWDEETFLKNTEGSAIRRTGFEGWQRNLAVALGNSRGGERVESALRQRRGSASALVQEHIDWALERLASRAGPAPLPIQQHPGARRIKD

SEQ ID NO: 78171 - protein, 382 aa, Marinobacterium sp.
  misc_feature (1)..(382): tr|A0A081G240|A0A081G240_9GAMM Epoxyqueuosine reductase OS=Marinobacterium sp. AK27 OX=1232683 GN=queG PE=3 SV =1
MANTNPNPLSDARLRQLADALKQRARELGFQQCAVTLPDASMEAETLDRWLAQGYNGEMHYLEQHREKRLNPRLLVPGSERIVMVRMDYLPPETTTLRTLTNPDKAYIARYTLGRDYHKLIRKRLKQLGQWLQQEAGSGADVQFRPFVDSAPVLERPLARNAGMGWIGKHTLLLNRSAGSLFFLGELFTNIPLPIDAPETESHCGRCTACLDVCPTQAFPEPGVLDARRCISYLTIEYSGSIPLELRPMMGNRIFGCDDCQLICPWNRFARRTPEDDFKPRHALDNADLLTLFNWDEETFLRKTEGSAIRRTGFEGWQRNLAVALGNSAGGDKVIAALKAKRDHASPLVQEHIDWAVDNLGRAAQPQPLPILAHRGARRLND

SEQ ID NO: 78172 - protein, 383 aa, Marinobacterium stanieri
  misc_feature (1)..(383): tr|A0A1N6TUG8|A0A1N6TUG8_9GAMM Epoxyqueuosine reductase OS=Marinobacterium stanieri OX=49186 GN=queG PE=3 SV=1
MPEFSATQLEHLKAELKQEALRLGFADCAVTLPDASAEAEHLQHWLEQGYQGSMDYLNQNIDKRLDPTLLVPGTQRIIMLRMNCLPEGAPVTGVLRNPDKAYIARYTLGRDYHKTMRKRLKQLGQWLEKQLGDREVRFRPFVDSAPVLERPLARNAGLGWIGKHTLLLNRSAGSWFLLGELFIDLPLPIDPPETESHCGRCSACIDICPTKAFPEPGVLDARRCISYLTIESKAAIPPELRPLMGNRIFGCDDCQLICPWNRFAKRSDETDFQPRHGLEQADLLELFLWDEPTFLKRTEGSAIRRTGYEGLQRNLAVALGNSRGGKAIIDALRARRTDASELVREHIDWALAQLAERQEASSDKEPSAALPILAHPGARRMPK

SEQ ID NO: 78173 - protein, 381 aa, Marinococcus halophilus
  misc_feature (1)..(381): tr|A0A510Y6A8|A0A510Y6A8_MARHA Epoxyqueuosine reductase OS=Marinococcus halophilus OX=1371 GN=queG PE=3 SV=1
MRTAQELKEEIQAFAESIGIDKVGFASASPFVTLKARLKEQQRLNYQSGFEEDDIDKRTHPELLLTEATTIISIALAYPTKLPEAPKNRPGARRGQFCRASWGKDYHDVLRDKLNQLEAFIQETVPGAECKSMVDTGELSDRAVAERAGIGWSGKNCAIITPEFGSYVYLGEMITTLYLPEDTPLIDQCGTCNRCVDLCPTDALIQGGQLDAKKCIAYLTQTKEALPERYRHKLGNRLYGCDTCQQVCPENKGVDFHNHPEFEPEPEVVKPLLEPLLTISNREFKEKFGYIAGSWRGKKPIQRNALIALGHMKEKSSIPTIVQLLCNDPRPVIRGACAWALGEMPTQEGVEALHHADSREKDEEVLEEISKALDKTSPERV

SEQ ID NO: 78174 - protein, 381 aa, Marinococcus luteus
  misc_feature (1)..(381): tr|A0A1H2SDY2|A0A1H2SDY2_9BACI Epoxyqueuosine reductase OS=Marinococcus luteus OX=1122204 GN=queG PE=3 SV=1
MRTAQELKEEIQGFAESIGIDKVGFASASPFVTLKARLKEQQRLNYQSGFEEDDIEKRTHPELLLTEATTIISIALAYPTKLPEAPKNRPGARRGQFCRASWGKDYHDVLRDKLNQLEAFIQETVPGAECKSMVDTGELSDRAVAERAGIGWSGKNCAIITPEFGSYVYLGEMITTLYLPEDTPLMDQCGTCNRCVDLCPTDALIQGGQLDAKKCIAYLTQTKEALPERYRHKLGNRLYGCDTCQQVCPENKGVDFHNHPEFEPDPEVVKPLLEPLLTISNREFKEKFGYIAGSWRGKKPIQRNALIALGHMKEKSSIPTIIQLLRNDPRPVIRGACAWALGEMPTQEGMEALHSANGREEEAEVLEEITKALDKTSPERV

SEQ ID NO: 78175 - protein, 354 aa, Marinomonas alcarazii
  misc_feature (1)..(354): tr|A0A318UTE8|A0A318UTE8_9GAMM Epoxyqueuosine reductase OS=Marinomonas alcarazii OX=491949 GN=queG PE=3 SV=1
MILSSPEELNQLADDIKSWAIEFGFAEARIVEPDLAQHKDDYNKWLDNGYQAGMDYLANHGDMRFYPEQLHPGTRRVISLRMHYLPQSVETVERLKTKDKAYIARYALGRDYHKLIRKRLTQLAKKIEQTVGDHGYRAFVDSAPILERQIAEQAGMGWIGKNTLLLTPKAGSWFLLGEIFTNLPLPVDAPTATRHCGSCTACLTQCPTDAFVEPWVLDAGKCISYLTIEHKGSIPEELRSKMGNRIFGCDDCQLVCPWTKFAKYTAEDDFQPRHSLDSADLVELFEWDEETFLKNTEGSPIRRTGFENWRRNIAVALGNAPTSPTTIQALENALPHSSELVKEHIVWALKQHNH

SEQ ID NO: 78176 - protein, 379 aa, Marinomonas aquimarina
  misc_feature (1)..(379): tr|A0A1A8SYP9|A0A1A8SYP9_9GAMM Epoxyqueuosine reductase OS=Marinomonas aquimarina OX=295068 GN=queG PE=3 SV=1
MSHSYFTFLKGRIALHLLSNDFIVSSLSDSELHQLAQDIKQWAHEFGFSECRIVDPSLEQYREEFQAWLEQGYHGEMDYLANHSDLRFAPANLHEGTQRVLSLSMAYLPESVETIKRLQTKDQGYIARYALGRDYHKLIRKRLTQLAKRIEQAIGEHGYRAFVDSAPILERQIAEQAGMGWIGKNTLLLSPKAGSWFLLGEIFTNLPLPVDQATQKRHCGSCSACLDKCPTDAFVEPWVLDASKCISYLTIEYDGIIPEELRAKMGNRIFGCDDCQLVCPWTKFAKYTQEPDFQPRHNLDSEDLLTLFSWDEATFLKNTEGSPIRRTGYENWRRNIAVALGNAPTRVDLIEVLEQARLEASPKLLVHLEWALKQHQAPQ

SEQ ID NO: 78177 - protein, 358 aa, Marinomonas aquiplantarum
  misc_feature (1)..(358): tr|A0A366D4X2|A0A366D4X2_9GAMM Epoxyqueuosine reductase OS=Marinomonas aquiplantarum OX=491951 GN=queG PE=3 SV =1
MLPSSLSTPDDLAKLVSDIKTWATEFGFADARIVDPDLGQHKDEFNNWLDKGYHAGMDYLANHGDMRFYPEQLHPGTRRVISLRMHYLPQSVETVKRLQTKDKAYIARYALGRDYHKLIRKRLTQLAKKIQEHVGDHGYRAFVDSAPVLERQIAEQAGMGWIGKNTLLLTPKAGSWFLLGEIFTNLPLPVDKPTASRHCGSCDACLTQCPTDAFVEPWVLDAGKCISYLTIEHKGPIPEALRSKMGNRIFGCDDCQLVCPWTKFAKHTEEEDFQPRHNLDSADLIDLFLWDEETFLKNTEGSPIRRTGYENWQRNIAVALGNAPTTEKTIKALQQALEHSTPLVQEHIQWALTQHQSQ

SEQ ID NO: 78178 - protein, 360 aa, Marinomonas balearica
  misc_feature (1)..(360): tr|A0A4R6M520|A0A4R6M520_9GAMM Epoxyqueuosine reductase OS=Marinomonas balearica OX=491947 GN=queG PE=3 SV=1
MLSSNLNSPRDLADLAQQIKDWAFELGFAEAKIVQPSLEQYKAQYQQWIDRGYHGSMGYLADHGDLRFKPEELHEGTQRVISLRMHYLPESVETVKRLKTPTKAYVARYALGRDYHKIIRKRLTTLAKRIEEVVGDHGYRAFVDSAPILERQIAEQAGMGWIGKNTLLLSPKAGSWFLLGELFTNLPLPVDAPSKSRHCGSCDACIQKCPTDAFVEPWVLDASKCISYLTIEHKGSIPVELRSKMGNRIFGCDDCQLVCPWTKFSKNTQENDFQPRHQLDQADLMDLFLWSEDEFLDKTAGSPIRRTGYESWLRNVAIALGNAPYDEKIIEALKIKQLSCTELVREHVEWALERQLNNPQ

SEQ ID NO: 78179 - protein, 361 aa, Marinomonas communis
  misc_feature (1)..(361): tr|A0A4R6X7G2|A0A4R6X7G2_9GAMM Epoxyqueuosine reductase OS=Marinomonas communis OX=28254 GN=queG PE=3 SV=1
MSSLSELELQQLAQDIKSWALEFGFSECRIVDPELEQYREGFQAWLDKGYHGEMEYLANHSDLRFSPASLHSGTQRVISLNMAYLPESVETVKRLQTKDKGYVARYALGRDYHKLIRKRLTQLAKKIELAVGEHGYRAFVDSAPILERQIAEQAGMGWIGKNTLLLSPKAGSWFLLGEVFTNLPLPVDKPTAKRHCGSCSACLDKCPTNAFVEPWVLDASKCISYLTIEYDGIIPEELRSKMGNRIFGCDDCQLVCPWTKFAKHTQEQDFQPRHNLDNEDLLTLFKWDEDTFLKNTEGSPIRRTGYENWRRNIAVALGNAPTRIDIIEALEDAKSTASEKLRIHLDWALSQHQTPQQTPPL

SEQ ID NO: 78180 - protein, 357 aa, Marinomonas foliarum
  misc_feature (1)..(357): tr|A0A368ZMX7|A0A368ZMX7_9GAMM Epoxyqueuosine reductase OS=Marinomonas foliarum OX=491950 GN=queG PE=3 SV=1
MLPSFLSSPKELNQLADDIKSWATEFGFADARIVEPDLAQHKDDFNKWLDNGYHAGMDYLANHGDIRFYPEQLHPGTRRVISLRMHYLPQSVETVKRLQTKDKAYIARYALGRDYHKLIRKRLTQLAKKIEQQVGDHGYRAFVDSAPILERQIAEQAGMGWIGKNTLLLTPKAGSWFLLGEIFTNLPLPVDKPTEARHCGSCTACLTQCPTDAFVEPWVLDAGKCISYLTIEHKGSIPEELRGKMGNRIFGCDDCQLVCPWTKFAKYTEEDDFQPRHNLDSADLVELFEWDETTFLKNTEGSPIRRTGFENWRRNIAVALGNAPTSPDTIQTLKNALPHSSELVKEHIIWALKQHNL

SEQ ID NO: 78181 - protein, 356 aa, Marinomonas fungiae
  misc_feature (1)..(356): tr|A0A0K6IJ56|A0A0K6IJ56_9GAMM Epoxyqueuosine reductase OS=Marinomonas fungiae OX=1137284 GN=queG PE=3 SV=1
MSSFSDCDLHQLTQDIKQWAKEFGFNECRIVDPELEQYRTDFNAWLEQGYHGEMDYLANHADLRFAPANLHEGTQRVLSLSMAYLPESVETVKRLQTKDKGYIARYALGRDYHKLIRKRLTQLAKKIEQTVGDHGYRAFVDSAPILERQIAEQAGMGWIGKNTLLLSPKAGSWFLLGEIFTNLPLPVDAPTSKRHCGSCSACLDKCPTDAFVEPWVLDASKCISYLTIEYDGIIPEELRPKMGNRIFGCDDCQLVCPWTKFAKHTQELDFQPRHNLDNEDLLTLFNWDEDTFLKNTEGSPIRRTGYENWRRNIAVALGNAATRIDIIESLEQARMGASEKLLVHIDWALTQHRRPQ

SEQ ID NO: 78182 - protein, 356 aa, Marinomonas gallaica
  misc_feature (1)..(356): tr|A0A1C3JLT2|A0A1C3JLT2_9GAMM Epoxyqueuosine reductase OS=Marinomonas gallaica OX=1806667 GN=queG PE=3 SV=1
MPSFDEASLQDIANNIKTWAKEFGFSECRIVNPELEQYREDFHAWLEQGYHGEMDYLANHDDLRFQPANLHAGTQRVISLSMPYLPESVETVKRLKTPEKAYIARYALGRDYHKLIRKRLTQLAKRIEEEFGDHGYRAFVDSAPVLERQIAEQAGMGWIGKNTLLLSPKAGSWFLLGEVFTNLPLPVDPPTPQRHCGSCSACLDKCPTNAFVKPWVLDASKCISYLTIEYDGIIPEELRAKMGNRIFGCDDCQLVCPWTKFAKNTQEDDFQPRHNLDSEDLLTLFEWDEDTFLSNTAGSPIRRTGYENWRRNIAVALGNAPYSKATVDALDRAKKNASEKLLVHLEWALAQHQTPQ

SEQ ID NO: 78183 - protein, 357 aa, Marinomonas hwangdonensis
  misc_feature (1)..(357): tr|A0A3M8Q2F2|A0A3M8Q2F2_9GAMM Epoxyqueuosine reductase OS=Marinomonas hwangdonensis OX=1053647 GN=queG PE=3 S V=1
MLPSFLSSPDDLNSLVDDIKSWAIDLGFADARVVEPDLAQYKDEFNQWLNNQYHAGMDYLANHGDMRFYPEQLHPGTRRVISLRMHYLPQSVATVERLQTKHKAYIARYALGRDYHKLIRKRLTQLAKKIEEKVGDHGYRAFVDSAPILERQIAEQAGMGWIGKNTLLLTPKAGSWFLLGEIFTNLPLPVDKPTESRHCGSCTACLTQCPTDAFVEPWVLDAGKCISYLTIEHKGPIPEELRSKMGNRIFGCDDCQLVCPWTKFAKYTEEDDFQPRHNLDSANLIELFEWDEATFLKNTEGSPIRRTGFENWRRNIAVALGNAPTNQATIQTLQSALPHSSELVKEHILWALKQHDR

SEQ ID NO: 78184 - protein, 361 aa, Marinomonas mediterranea
  misc_feature (1)..(361): tr|F2JUQ3|F2JUQ3_MARM1 Epoxyqueuosine reductase OS=Mari nomonas mediterranea (strain ATCC 700492 / JCM 21426 / NBRC 103028 / MMB-1) OX=717774 GN=queG PE=3 SV=1
MLPSNLHSADELNNFAQKIKDWALELGFADAKIVKPSLEQYKAQYQQWIDSGYHGTMEYLADHGDLRFKPEELHEGTQRVISLRMHYLPESVETVKRLQTPEKAYIARYALGRDYHKVIRKRLTTLAKRIEDVIGDHGYRAFVDSAPVLERQIAEQAGMGWIGKNTLLLSPKAGSWFLLGELFTNLPLPVDAPTQTRHCGSCDACIQKCPTDAFVEPWVLDASKCISYLTIEYKGSIPVDLRSKMGNRIFGCDDCQLVCPWTKFSKHTQENDFQPRHKLDQADLIELFLWTEDEFLDKTAGSPIRRTGYESWRRNIAIALGNAPYNEVAIKALESQKPASSELLQEHIEWALDMQQRKQHR

SEQ ID NO: 78185 - protein, 357 aa, Marinomonas polaris
  misc_feature (1)..(357): tr|A0A1M5C897|A0A1M5C897_9GAMM Epoxyqueuosine reductase OS=Marinomonas polaris DSM 16579 OX=1122206 GN=queG PE =3 SV=1
MLPSFLSSPEELNQLVDDIKSWAVELGFAEARIVEPDLAQYKDEFNEWLNNQYHAGMDYLANHGDMRFYPEQLHPGTRRVISLRMHYLPQSVETVERLKTKDKAYIARYALGRDYHKLIRKRLTQLAQKIEQKVGDHGYRAFVDSAPILERQIAEQAGMGWIGKNTLLLTPKAGSWFLLGEIFTNLPLPVDKPTETRHCGSCTACLTQCPTDAFVEPWVLDAGKCISYLTIEHKGPIPEELRSKMGNRIFGCDDCQLVCPWTKFAKYTQEDDFQPRHNLDSADLIELFEWDEATFLKNTEGSPIRRTGFENWRRNIAVALGNAPSNEATIQTLENALSHSSELVKEHIVWALKQHKP

SEQ ID NO: 78186 - protein, 362 aa, Marinomonas pollencensis
  misc_feature (1)..(362): tr|A0A3E0DVB9|A0A3E0DVB9_9GAMM Epoxyqueuosine reductase OS=Marinomonas pollencensis OX=491954 GN=queG PE=3 SV= 1
MLPPSFSDPQDLVSLVDDIKSWAIEFGFAEARIVEPDLEQYRDGFNNWLAQDYHAGMDYLANHGDIRFQPNKLHPGTRRVISLRMHYLPQSVATVERLKTKKQAYIARYALGRDYHKLIRKRLTQLAKKIEERVGEHGYRAFVDSAPILERQVAEQAGMGWIGKNTLLLTPKAGSWFLLGEIFTNLPLPVDPPTKTRHCGSCDACLTQCPTDAFVEPWVLDAGKCISYLTIEHKGAIPVDLRAKMGNRIFGCDDCQLVCPWTKFAKHTTEQDFQPRHNLDAEDLVSLFLWDETTFLKNTEGSPIRRTGYENWRRNIAVALGNAPTEAAIIAALESAADSNSELVNEHVRWALEQHDIRLKGA

SEQ ID NO: 78187 - protein, 357 aa, Marinomonas posidonica
  misc_feature (1)..(357): tr|F6CXK3|F6CXK3_MARPP Epoxyqueuosine reductase OS=Mari nomonas posidonica (strain CECT 7376 / NCIMB 14433 / IV IA-Po-181) OX=491952 GN=queG PE=3 SV=1
MLPSSLSNPDDLAQLAVDIKAWATEFGFAEARIVDPDLGQHKDQFNNWLDKGYHAGMDYLANHGDMRFYPEQLHPGTRRVISLRMHYLPQSVETVKRLHTKEKAYIARYALGRDYHKLIRKRLTQLAKKIEAKIGDHGYRAFVDSAPILERQIAEQAGMGWIGKNTLLLTPKAGSWFLLGEIFTNLPLPVDGATKTRHCGSCDACLTQCPTDAFVEPWVLDASKCISYLTIEHKGPIPEELRDKMGNRIFGCDDCQLVCPWTKFAKYTEEEDFQPRHNLDSSDLVELFQWNEETFLKNTEGSPIRRTGYENWQRNIAVALGNAKTTDDILDALKKALKHSSPLVQEHIEWALKQHNH

SEQ ID NO: 78188 - protein, 357 aa, Marinomonas primoryensis
  misc_feature (1)..(357): tr|A0A2Z4PRG4|A0A2Z4PRG4_9GAMM Epoxyqueuosine reductase OS=Marinomonas primoryensis OX=178399 GN=queG PE=3 SV= 1
MLPSFLSSSDDLNLLADDIKSWAIDFGFAEARIVEPDLAQYKDEFNEWLNNQYHAGMDYLANHGDMRFYPEQLHPGTRRVISLRMNYLPQSVETVGRLKTKNKAYIARYALGRDYHKLIRKRLTQLAKKIEQRVGDHGYRAFVDSAPILERQIAEQAGMGWIGKNTLLLTPKAGSWFLLGEIFTNLPLPVDAPTQTKHCGSCTACLTQCPTDAFVEPWVLDAGKCISYLTIEHKGPIPEELRSKMGNRIFGCDDCQLVCPWTKFAKYTEEDDFQPRHNLDSAGLIELFEWDEETFLKNTEGSPIRRTGYENWRRNIAVALGNAPTNKETTETLKRALISSSDLVKEHVIWALQQHKE

SEQ ID NO: 78189 - protein, 359 aa, Marinomonas profundimaris
  misc_feature (1)..(359): tr|W1RS41|W1RS41_9GAMM Epoxyqueuosine reductase OS=Mari nomonas profundimaris OX=1208321 GN=queG PE=3 SV=1
MLPSFLSSPDELNQLADDIKSWAIEFGFAEARIVEPDLAQYKDEFNQWLNNQYHAGMDYLANHGDMRFYPEQLHPGTRRVISLRMHYLPQSVETVDRLKTKNKAYIARYALGRDYHKLIRKRLTQLAKKIEQRVGDHGYRAFVDSAPILERQIAEQAGMGWIGKNTLLLTPKAGSWFLLGEIFTNLPLPVDEPTQTRHCGSCTACLTQCPTDAFVEPWVLDAGKCISYLTIEHKGPIPVELRRKMGNRIFGCDDCQLVCPWTKFAKYTEEEDFQPRHNLDSADLVELFEWDEETFLKNTEGSPIRRTGYENWRRNIAVALGNAPTDHATTYALENALTHSSDLVKEHVIWALAQHKIPR

SEQ ID NO: 78190 - protein, 357 aa, Marinomonas rhizomae
  misc_feature (1)..(357): tr|A0A366J684|A0A366J684_9GAMM Epoxyqueuosine reductase OS=Marinomonas rhizomae OX=491948 GN=queG PE=3 SV=1
MLPSFLSSPEELKQLADEIKSWAVEFGFAEARIVEPDLAQYKDEFNEWLNNQYHAGMDYLANHGDMRFYPEKLHPGTRRVISLRMHYLPQSVETVERLKTKDKAYIARYALGRDYHKLIRKRLTQLAKKIEQKVGNHGYRAFVDSAPILERQIAEQAGMGWIGKNTLLLTPKAGSWFLLGEIFTNLPLPVDKPTETRHCGSCTACLTQCPTDAFVEPWVLDARKCISYLTIEHKGPIPEELRSKMGNRIFGCDDCQLVCPWTKFAKYTEENDFQPRHNLDSANLVELFEWDEETFLKNTEGSPIRRTGFENWRRNIAIALGNAPTSQATTQTLENALPHASELVKEHIVWALKQHNL

SEQ ID NO: 78191 - protein, 362 aa, Marinomonas sp.
  misc_feature (1)..(362): tr|A0A432RXJ4|A0A432RXJ4_9GAMM Epoxyqueuosine reductase OS=Marinomonas sp. OX=1904862 GN=queG PE=3 SV=1
MVSSLSELELQQLAQDIKSWALEFGFSECRIVDPELEQYREGFQAWLDKGYHGEMEYLANHSDLRFSPASLHSGTQRVISLNMAYLPESVETVKRLQTKDKGYVARYALGRDYHKLIRKRLTQLAKKIELAVGEHGYRAFVDSAPILERQIAEQAGMGWIGKNTLLLSPKAGSWFLLGEVFTNLPLPVDKPTAKRHCGSCSACLDKCPTNAFVEPWVLDASKCISYLTIEYDGIIPEELRSKMGNRIFGCDDCQLVCPWTKFAKHTQEQDFQPRHNLDNEDLLTLFKWDEETFLKNTEGSPIRRTGYENWRRNIAVALGNAPTRIDIIEALEDAKLTASEKLRIHLDWALSQHQTPQQTPPL

SEQ ID NO: 78192 - protein, 359 aa, Marinomonas sp.
  misc_feature (1)..(359): tr|A0A370U4I5|A0A370U4I5_9GAMM Epoxyqueuosine reductase OS=Marinomonas sp. YLB-05 OX=2213058 GN=queG PE=3 SV=1
MLPSDLNSPTSLSDLATQIKQWASEFGFSDCRIVDPKLEQFRDPYNKWLASGYHGTMDYLANHGDLRFTPENLHVGTQRVISLSMPYLPESVETVKRLQTKNKAYIARYALGRDYHKLIRKRLTQFAKRIEEEVGDHGFRAFVDSAPVLERQIAEQAGMGWIGKNTLLLSPKAGSWFLLGEVFTNLPLPVDDAMPSRHCGSCSACLDLCPTNAFVEPWVLDATKCISYLTIEYDGIIPEELRSKMGNRIFGCDDCQLVCPWTKFAKYTQENDFQPRHHLDNEELITLFQWDERTFLKNTEGSPIRRTGYENWQRNLAVALGNAPTSMAIIEALEKGKEGASEKLLIHIDWALAQHPILR

SEQ ID NO: 78193 - protein, 357 aa, Marinomonas spartinae
  misc_feature (1)..(357): tr|A0A1A8TQ76|A0A1A8TQ76_9GAMM Epoxyqueuosine reductase OS=Marinomonas spartinae OX=1792290 GN=queG PE=3 SV=1
MLPPALSHPDDLTNLANQIKHWAVEFGFADARIVAPDLEQYKEGFKKWLDNGYHAGMDYLANHGDMRFHPEQLHAGTRRVISLRMHYLPQSVETVERLKTKEKAYIARYALGRDYHKLIRKRLNQLAKKIQEVIGDHGYRAFVDSAPVLERQIAEQAGMGWIGKNTLLLTPKAGSWFLLGEIFTNLPLPVDQPTRTRHCGSCSACLTQCPTDAFVEPWVLDAGKCISYLTIEHKGPIPVELRSKMGNRIFGCDDCQLVCPWTKFAKHTEEDDFQPRHDLDSEDLITLFAWDEETFLKNTEGSPIRRTGYENWRRNIAVALGNAPSNKETIDALKKGLVSSSELVNEHIHWALKQHQQ

SEQ ID NO: 78194 - protein, 357 aa, Marinomonas ushuaiensis
  misc_feature (1)..(357): tr|X7E461|X7E461_9GAMM Epoxyqueuosine reductase OS=Mari nomonas ushuaiensis DSM 15871 OX=1122207 GN=queG PE=3 S V=1
MLPSFLSSPDDLQKLADDIKSWAINFGFAEARIVEPDLAQYKDEFNEWIDNQYHAGMDYLANHGDMRFYPEQLHPGTRRVISLRMHYLPQSVETVGRLKTKDKAYIARYALGRDYHKLIRKRLTQLAKKVEQQVGDHGYRAFVDSAPILERQIAEQAGMGWIGKNTLLLTPKAGSWFLLGEIFTNLPLPVDKPTTDRHCGSCTACLTQCPTDAFVEPWVLDAGKCISYLTIEHKGPIPEPLRSKMGNRIFGCDDCQLVCPWTKFAKYTKEEDFQPRHDLDSAGLVELFKWDEATFLKKTEGSPIRRTGYENWQRNIAVALGNAPTSDLTVQTLEAALHTSSELVKEHIIWALEQHKR

SEQ ID NO: 78195 - protein, 308 aa, Marinoscillum furvescens
  misc_feature (1)..(308): tr|A0A3D9LKZ4|A0A3D9LKZ4_9BACT Epoxyqueuosine reductase OS=Marinoscillum furvescens DSM 4134 OX=1122208 GN=que G PE=3 SV=1
MIPEKHTATVKKIASELGFSFCGIGKAEFLEEEAPKLEEWLKRGYQGKMGYLENHFDKRLDPTKLVPGAKSVVSLLYNYYPEPDHNKDSSYKIAKYAYGKDYHFVIKDKLKEFMQSLQEEVGAVEGRVFVDSAPVHERAWAAKSGLGWVGKNSLLLNRNLGSFFFIAELIIDLELEPDPPTKDYCGTCTACMDACPTDAIPEPYVVDGSRCISYLTIELKDEIPAEFKDKMEGWAFGCDICQDVCPWNRFAKPHHEPAFTSQGWEDFSKQDWEEMTEEVFRRVFKKSPVKRTKYTGLKRNIDFIRKSD

SEQ ID NO: 78196 - protein, 305 aa, Marinoscillum sp.
  misc_feature (1)..(305): tr|A0A2D7THS6|A0A2D7THS6_9BACT tRNA epoxyqueuosine(34) reductase QueG OS=Marinoscillum sp. OX=2024838 GN=queG PE=4 SV=1
  misc_feature (15)..(15): Xaa can be any naturally occurring amino acid
  misc_feature (26)..(26): Xaa can be any naturally occurring amino acid
  misc_feature (72)..(72): Xaa can be any naturally occurring amino acid
  misc_feature (114)..(115): Xaa can be any naturally occurring amino acid
  misc_feature (122)..(122): Xaa can be any naturally occurring amino acid
  misc_feature (128)..(128): Xaa can be any naturally occurring amino acid
  misc_feature (136)..(136): Xaa can be any naturally occurring amino acid
  misc_feature (142)..(142): Xaa can be any naturally occurring amino acid
  misc_feature (145)..(145): Xaa can be any naturally occurring amino acid
  misc_feature (167)..(167): Xaa can be any naturally occurring amino acid
  misc_feature (175)..(175): Xaa can be any naturally occurring amino acid
  misc_feature (216)..(216): Xaa can be any naturally occurring amino acid
  misc_feature (232)..(232): Xaa can be any naturally occurring amino acid
MTKNNTELIKIKAKXLGFTSCGISKXRHLHEEEDNFEKWLSRGNQGSMSYLEKNFDKRLDPRKLVPGSKSVXSLSYNYYPQKKIDQKNNFIISKYAYGKDYHNVIRKKLKKLFXXIKEKIGXVEGRVXVDSAPVHXRAWAKXSGXGWIGKNSLLINEKRGSYFFLAXIICDLKLXYDSPAINRCGKCTQCIDACPTDAITSAQVINANKCISYLTXENKDQIPDELKDNLNXAIFGCDICQDVCPWNKFSKPHDEKEFIPNDELSSFKKSDWLELTEETFNKIFEGSAVKRSKYKGIIRNIKASN

SEQ ID NO: 78197 - protein, 377 aa, Marinospirillum alkaliphilum
  misc_feature (1)..(377): tr|A0A1K1W1Y9|A0A1K1W1Y9_9GAMM Epoxyqueuosine reductase OS=Marinospirillum alkaliphilum DSM 21637 OX=1122209 G N=queG PE=3 SV=1
MIADSHLQPDLQRLADHIRQLARELGFSACGITGVDLGEHPAYLKKWLAAGYHGQMQWMENHLDKRCNPALLEPGTLSIISVRLDYLPPETQAIKVLNNPEQAYVSRYALGRDYHKLIRKRLAQLAEQINQHLQQLPALQAAFGELKSRAFTDSAPVLERGIAQQAGLGWIGKNCMLITPRAGSLFFLGELYLNLPLPPDPAFVKDHCGQCNACHTACPTQAFVADGVLDAQRCISYLTIELEGSIPLELRPLIGNRIFGCDDCQLVCPWTRFAPSTREKDFHPRHDLDSASLLELFNWDENTFLKNTEGSAIRRTGYTNWLRNLAVALGNAPHSNAVIQALKEKSQHPEAVVREHVEWALEGQLGKTATSGGVTTQ

SEQ ID NO: 78198 - protein, 372 aa, Marinospirillum celere
  misc_feature (1)..(372): tr|A0A1I1IUA3|A0A1I1IUA3_9GAMM Epoxyqueuosine reductase OS=Marinospirillum celere OX=1122252 GN=queG PE=3 SV=1
MILDSEQQAGLKALAVTIKELATDLGFADCGITDVDLGEHPAYLKKWLDAGYEGDMQWMHNHLEKRCNPALLEPGTLSVITLRMDYLPPETQAIKILANPEKAYVSRYALGRDYHKLIRKRLGQLAKKINQHLDDNAALRAAFPEFRSRAFTDSAPVLERALALQGGLGWIGKNCMLITPKAGSWFFLGEIYLNLPLPKDKAFVKDHCGQCSACHTACPTQAFVADGVLDAKRCISYLTIELKGSIPEELRPLMGNRIFGCDDCQLFCPWNRFAKSTQEKDFHPRHQLDTADLVDLFNWDEASFLKNTEGSPIRRTGYISWLRNLAVALGNAPPSETVLSALKARQTHPDPVVREHVLWALQRHQAGPAKDH

SEQ ID NO: 78199 - protein, 346 aa, Marinosulfonomonas sp.
  misc_feature (1)..(346): tr|A0A2G2BF10|A0A2G2BF10_9RHOB Epoxyqueuosine reductase OS=Marinosulfonomonas sp. OX=2030815 GN=queG PE=3 SV=1
  misc_feature (286)..(286): Xaa can be any naturally occurring amino acid
MPAVLKERLVERALAEGFARVGVTTPDAVPEAAVRLKEYVAEGRHGQMGWMAERMNWRGNPAALWPEAKSVVMLAEMYTPGHDPMAVLGQADRGAISVYAQNRDYHDIVKKRLKRVGRWLLEQAPGESIKVFVDTAPVMEKPLAAAAGLGWQGKHTNLVSRELGSWFFLGAIFTTVELPVDAPGEDHCGNCRACLDVCPTGAFPAPYQLDARRCISYLTIEHHGPVEEELRGLLGNHIYGCDDCLAACPWNKFAVAASEARYLAREELTAPRLAELAALDDAAFRXMFSGSPVKRVGRDRFVRNVLYAIGNSGIEELLPVAAGLADDADETVADAARWAAGRLVSR

SEQ ID NO: 78200 - protein, 345 aa, Marinosulfonomonas sp.
  misc_feature (1)..(345): tr|A0A2G2BGP1|A0A2G2BGP1_9RHOB Epoxyqueuosine reductase OS=Marinosulfonomonas sp. OX=2030815 GN=queG PE=3 SV=1
MTADLKARLFEFAHAEGFSNMGVCRTSDVPQIAARLKTYVEKGHHGQMGWMAERMNWRGSPQDLWPEAKSVIMLAEPYTPDHDPMDVIGMPDRGAISVYAQNRDYHDIVKKRLKRVGRWLLEQAPGEQIKVFVDTAPVMEKPLAQAAGLGWQGKHTNLVGRNLGSWFFLGSIFTTIELPTDGAEPENCGSCTACLDVCPTDAFPAPYQLDARRCISYLTIEHDGPVDEEFRPLLGNRIYGCDDCLAVCPWNKFAAEAREMRYVARADLVAPKLAELAVLDDAAFREMFSGSPVKRIKRGRFVRNVLYAIGNSGDASLCAVAAGLVADADAVVADAARWAVERLTP

SEQ ID NO: 78201 - protein, 347 aa, Marinovum algicola
  misc_feature (1)..(347): tr|A0A0H4KYK1|A0A0H4KYK1_9RHOB Epoxyqueuosine reductase OS=Marinovum algicola DG 898 OX=988812 GN=queG PE=3 SV =1
MDALKDRLLREARDQGFSAARICRPEAVPEVAERLAGFLAAGYHGQMSWLAERSNWRGDPAALWPEARSVIMLAENYGPAHDPLAVLEQSDRAAISVYAQHRDYHDVVKKRLKRLARWLIAEADTDPPAEVKVFVDTAPVPEKALGQAAGLGWQGKHTNLVSRQLGSWFFLGAVFTTLELPVDPGEVDHCGSCRKCLDICPTAAFPAPYQLDARRCISYLTIEHKGPVDVALRPLLGNRIYGCDDCLAVCPWNKFAERAAEVKYHARDDLMAPDLAELAGLADAAFRARFSGSPIKRIGRGRFVRNVLYAIGNSGEARLLPAAQALCEDADPQVADAARWAVERLQR

SEQ ID NO: 78202 - protein, 345 aa, Marinovum sp.
  misc_feature (1)..(345): tr|A0A2E8JH07|A0A2E8JH07_9RHOB Epoxyqueuosine reductase OS=Marinovum sp. OX=2024839 GN=queG PE=3 SV=1
  misc_feature (87)..(87): Xaa can be any naturally occurring amino acid
  misc_feature (92)..(92): Xaa can be any naturally occurring amino acid
  misc_feature (115)..(115): Xaa can be any naturally occurring amino acid
  misc_feature (339)..(339): Xaa can be any naturally occurring amino acid
MQQLKADLEFKAREEGFDDLRICRPWEVPDVLEQLEAFLQKGYHGQMHWLAERRAWRGDPSQLWPEAKSVIMLAENYAPQDNPMTVXGQSDXGAISVYARGKDYHDLVKKRLKRXARWLLSEAGGEVKVFVDTAPVPEKPLAQAAGLGWQGKHTNLVSRTLGNWFFIGSIFTTLDLPVDAAEIDHCGSCTACLMACPTDAFPKPYQLDARRCISYLTIEHKGPVVPELRPKLGNRIYGCDDCLAVCPWNKFAQSARELRYQARDDLAAPKLRDLVALTDAAFREKFSGSPIKRIGRDRFVRNVLYAIGNSKDPSLISAARALCGDPDTTVADAANWAVXQLTASS

SEQ ID NO: 78203 - protein, 346 aa, Marinovum sp.
  misc_feature (1)..(346): tr|A0A2E7WHX3|A0A2E7WHX3_9RHOB tRNA epoxyqueuosine(34) reductase QueG OS=Marinovum sp. OX=2024839 GN=queG PE=4 SV=1
MSSSALKHRLVDQAKDQGFAACRLCRPWDVPQMPEQLASFLARGYHGQMSWLEERAHWRAAPQVLWPGAQTVIMLAESYTPQHDPRAILTQSEAGAISVYAQNRDYHDTVKKRLKRLARWLIAEGGGEVKVFVDTAPVPEKPLGQAAGLGWQGKHTNLVSRDLGNWFFIGSVFTTLDLPVDAAEVDHCGSCRACLTACPTEAFPAPYQLDARRCISYLTIEHKGPVDLGLRSKMGNRIYGCDDCLAACPWNKFAVTAQEIRYHARDDLLAPALAELAVLDDAQFRSMFSGSPIKRIGRDRFVRNVLYAIGNSGQGRLRAVAQSLCADPDPAVADAARWAVERLTKK

SEQ ID NO: 78204 - protein, 399 aa, Mariprofundus aestuarium
  misc_feature (1)..(399): tr|A0A2K8KZK6|A0A2K8KZK6_9PROT Epoxyqueuosine reductase OS=Mariprofundus aestuarium OX=1921086 GN=Ga0123461_09 29 PE=4 SV=1
MPVLCQTAAMVSNGLKDRVRAKAKECGFALCHVTRPEVGGQHADALQRWSDAGMQGDMVWMAEEMRMQRRKSPETMLQGVNSVITVAMHYTPPDYSLDEADAQKLCGVISAYAHGDDYHDIMKKRLKALALELDAMLGVHDQRVFVDTAPVLEHALAASAGLGWQGKHTLTIQRQLGSWFLLGEIFTTAEFEPDQPAINHCGSCTACIDICPTRAIVAPYVVDARRCISYLTIEFDDFIPAEFRPLMGNRIYGCDDCQMVCPWNAHATKDKDAVVDLLMPKGENNLPDLASLLLLDEEAFRIRFRKSPIKRTKRRGLLRNVCIAMGNSGNVHCIPALLDALNDGESLIRGHAAWALARLTDQGNRERVLAALNLLSEQENDPAVLHEFMSAIQGIREES

SEQ ID NO: 78205 - protein, 399 aa, Mariprofundus ferrinatatus
  misc_feature (1)..(399): tr|A0A2K8L573|A0A2K8L573_9PROT Epoxyqueuosine reductase OS=Mariprofundus ferrinatatus OX=1921087 GN=queG PE=3 SV=1
MDRPICKNSDMDAVSLKNMIRDKAKAHGFSLCHVTRPEIRNIHRGALEYWTNAGMQGEMAWMAEPVRLDRRKDPATMLDGVKSVISLAMRYTPPEHSLDEARSRKHSGVITAYAHGADYHDIMKKQLKALAFELDTLLGVHNQRIFVDTAPVLEHAIAESAGLGWQGKHSLTIQKNLGSWFLLGEIFTTAELEPDQPASNHCGSCSACIDICPTQAIVAPYVVDARRCISYLTIEFDGFIPRDLRPLMGNRIYGCDDCQVICPWNGHAAKEGVQFDDLLTPKGENILPDLVSLLQLDEEAFRIRFRKSPIRRTRRRGLLRNVCIAMGNSGEADFIVVLLDALHDGEPLIRGHAAWALARLTAPVNRQMVLSALAEQADHEKEPAVEQEIQSAINDIRGV

SEQ ID NO: 78206 - protein, 397 aa, Mariprofundus ferrooxydans
  misc_feature (1)..(397): tr|Q0F2C2|Q0F2C2_9PROT Iron-sulfur cluster binding prot ein OS=Mariprofundus ferrooxydans PV-1 OX=314345 GN=SPV 1_01732 PE=4 SV=1
MCQDSAMNSDCVKSTVQAKALEHGFDLCRVTQPVVAREHAEALHRWVDAGMQGEMDWMAEEVRLQRRSDPTSMLAGVRSVVTVAMRYTPPEYGLNEACSGTRRGVITAYAHGDDYHEVMKKRLKALARDLDTLLGRHDQRVFVDTAPVLEHALAERAGLGWQGKHTLTIHRGVGSWFLLGEIFTTAEIVPDAQAANHCGSCTACIDICPTGAIVAPYVVDARLCISYLTIEFDGFIPHPLRPLMGNRIYGCDDCQMICPWNEHAGKGTTLGDDLLTPRGENHLPDLVSILQLDEDAFRHRFMKSPIRRTKRRGLLRNVCIAMGNSGHAGFMPDLIAVLDDVEPLIRGHAVWALGQLVGQENRADILAVLVQMNVAEKDDAVREEISLTMRHIRMNDE

SEQ ID NO: 78207 - protein, 389 aa, Mariprofundus micogutta
  misc_feature (1)..(389): tr|A0A1L8CRA0|A0A1L8CRA0_9PROT Epoxyqueuosine reductase OS=Mariprofundus micogutta OX=1921010 GN=MMIC_P2333 PE =4 SV=1
MQGEQLKTLIRSKASQHGFDLCHVTRPEIGSKHAEALEQWVAADMQGDMSWMGEATRLERRKDPQSMLDAVKSVITLAMRYTPPAYAIEAAESACGKGVITAYAHGDDYHDVMKKRLKALALDLDLLLGKHDQRVFADTAPVLEHALAESAGLGWQGKHSLTIHREVGSWLLLGEIFTTAALQPDEPATNHCGTCSACIEICPTQAIVAPYVVDARLCISYLTIEFDGFIPRQLRAKMGNRIYGCDDCQQTCPWNQHAARAACLKNDLLNPRGENVLPDLARILQIDGEEFRKIYRKSPIKRTKRAGLLRNVCIAMGNSGDTRFISDLVAVLNDEEPLIRGHAVWALAQLADDENCHDISALLECLQKEEKEVMVHEEITHAITHIRNL

SEQ ID NO: 78208 - protein, 405 aa, Mariprofundus sp.
  misc_feature (1)..(405): tr|A0A498DMM8|A0A498DMM8_9PROT tRNA epoxyqueuosine(34) reductase QueG OS=Mariprofundus sp. EBB-1 OX=2650971 GN =queG PE=4 SV=1
MCQSAAMVNDGVKEMIKAKALAHGFALCRISSPVVDQKHVQGLQHWVQSDMQADMAWMAEEVRMQRRMQPESMLQDVRSVITVAMTYSPPAYQLDEANEATEQGVISAYAHGDDYHDVMKKRLKALAADLDVLLGKHDQRVFVDTAPVLEHALAESSGLGWQGKHSLTIHRELGSWFLLGEIFTTAEIDADEAANNHCGTCSACLDVCPTQAIVAPYVVDARLCISYLTIEFDGFIPHPLRSLMGNHIYGCDDCQMVCPWNQHAAKVVLRLQDLNTWCDPLTPRGENHLPNLASLLRLDDDGFRQLFRKSPIKRTKRAGLLRNVCIAMGNSGNDLFVDDLLPALTDKEALVRGHAAWALGRLSCAENHQCISAALQHQLVDEVDVNAREEIILTIEYLRSKYDDA

SEQ ID NO: 78209 - protein, 381 aa, Marisediminitalea aggregata
  misc_feature (1)..(381): tr|A0A1M5E1Z9|A0A1M5E1Z9_9ALTE Epoxyqueuosine reductase OS=Marisediminitalea aggregata OX=634436 GN=queG PE=3 SV=1
MSELQSIDLYKLVDDIKAWANALGFQQVGISDIDLSQHEAALQSWLDNQYHGDMAFMANHGMKRARPVELVPGTLRVISVRMDYLPPDASFAKHLNNPDIGYISRYALGRDYHKVLRSKLKKLGEKIQAELADTQFRPFVDSAPVLEHAIAEKAGIGWTGKHSLTLNKQAGSWFFLGELFINLPLPVDEPTSEEHCGTCTACMTICPTQAIVAPYVVDARRCISYLTIEYDGVIPEVFREPMGNRLYGCDDCQLICPWNRYAPLTDEADFHPRKVLHGQSLATLFSWDEATFLRNTEGSPIRRIGYTKWRRNVSVAIGNASYDEHYIHLLTEALPDACEILRPHLEWALERQQQKNGDALSRPRQITRLVRTIEKGLPRDA

SEQ ID NO: 78210 - protein, 333 aa, Marispirochaeta aestuarii
  misc_feature (1)..(333): tr|A0A1Y1RX60|A0A1Y1RX60_9SPIO 4Fe-4S ferredoxin-type d omain-containing protein OS=Marispirochaeta aestuarii O X=1963862 GN=B4O97_11110 PE=4 SV=1
MIMTRTDILLGKFLENGFRSPGIAWIAPGLVGETPGDRTYLVIMGIFPIPDPAPSADPGKVLVAPFAAAHYYRDCVKRLKALVSELQRGTGVSKQHVRLFSNSRLPERSIAAALGIGWVGRNGLLMNREYGSSFVLAGILASLDEGEISRLRGNEDLARISSLEAPADPHGECGSCRACVSACPTGAIAESGGVRLERCLQYLATTREDLPDFARKVWGRRLYGCMDCQNSCPVNRRRSVHADGDSLGREEYPIRDLLPKFASPAEKGLKKIFPDTALEASWIPREAILRNLLTAAGNSGDPSLEQLIRPFLEEKHPVVKTAAARALDRIFSK

SEQ ID NO: 78211 - protein, 377 aa, Maritalea mobilis
  misc_feature (1)..(377): tr|A0A4R6VQH5|A0A4R6VQH5_9RHIZ Epoxyqueuosine reductase OS=Maritalea mobilis OX=483324 GN=queG PE=3 SV=1
MTLSPEKLRQTIETRARELGFVAFGIGDANGHPEAPERLSQALAQDFHGDMHWLKETLDRRATPKHMWPEAKSAIVLGYNYGPDQNPLEQLDDTENGLISVYARHRDYHDIIKGKLKEIAGLLARQGNCEVKVFVDTAPLMEKPLGEQAGIGWQGKHTVLVSRDHGCWLFLGTILTDFAFEPDQPGKDRCGNCRRCLDVCPTNAFPAPYQLDARRCIAYLTNEYKGVIPVEFRKPIGNRIYGCDDCLAVCPWNKFASVARDEKLRSRDELRSPELVELATFDDAAFRAFFKGSPIKRLGRDAFIRNVLIALGNAPNKPDIVAAIEALLTDESPLVRASAVWAMDQHCDQTAFDQLRQAHYAAEQEQVVRAEWDRTAQ

SEQ ID NO: 78212 - protein, 377 aa, Maritalea myrionectae
  misc_feature (1)..(377): tr|A0A2R4MIK7|A0A2R4MIK7_9RHIZ Epoxyqueuosine reductase OS=Maritalea myrionectae OX=454601 GN=queG PE=3 SV=1
MTQSAEKLRQTIEARARDLGFVSFGVAQANGHPEAPERLNEALARDFHGDMHWLKDTLDRRTSPQHMWPEAKSALVLGYNYGPDQNPLDQLDDTENGLISVYARHRDYHDIIKGKLKEIAGLLARQGNCEVKVFVDTAPLMEKPLGEQAGIGWQGKHTVLVSRDHGCWLFLGTILTDMEFAPDAAGTDRCGNCRRCLDVCPTNAFPAPYQLDARRCIAYLTNEYKGIIPVEFRKPIGNRIYGCDDCLAVCPWNKFASVARDEKLRSREDLRAPSLVELAKFDDADFRAFFKGSPIKRLGRDAFIRNVLIALGNAPRKDDIVAAIKPHLSDESALVRAAAVWAIDQHYDSEAFDQLRQAHYPSENDHDVCAEWDRTAP

SEQ ID NO: 78213 - protein, 344 aa, Maritimibacter alkaliphilus
  misc_feature (1)..(344): tr|A3VHC2|A3VHC2_9RHOB Epoxyqueuosine reductase OS=Mari timibacter alkaliphilus HTCC2654 OX=314271 GN=queG PE=3 SV=1
MTLTEKLKAQALAEGFSAVGVTRPDAVPELADRLAAFVEAGRHGDMGWMAERMHWRGAPDALWPEAKSVIMLAELYTPEHDPMAVIGEPERGAISVYAQNRDYHDIVKKRLKRVGRWLIDAAGPDTEIKVFVDTAPVMEKPLAQAAGLGWQGKHTNLLSRDLGSWFFLGAIFTTAELEPDRPGRENCGRCTACLDVCPTKAFPAPFQLDARRCISYLTIEHKGPVDEALRPLLGNRIYGCDDCLAVCPWNKFAAEASEARYLARDDLAAPRLAGLAALDDAAFREKFSGSPIKRIGRNRFLRNVAYAMGNSGDPSFAPQLQRLAGEPDPVLADAATWALTRIAR

SEQ ID NO: 78214 - protein, 347 aa, Maritimibacter sp.
  misc_feature (1)..(347): tr|A0A2D9YJD7|A0A2D9YJD7_9RHOB Epoxyqueuosine reductase OS=Maritimibacter sp. OX=2003363 GN=queG PE=3 SV=1
MSPDLKARLVAQARSEGFAKCRITTPDAVPEIAGRLAEFVDAGYHGQMAWMAERMNWRGDPAALWPEARSIIMLAEPYTPETDPLEVLDRSDRGAVSVYAQGRDYHDVVKKRLKRLGRWLIEAGGGTPEIKVFVDTAPVMEKPLGQAAGLGWQGKHTNLLSRDLGNWFFLGAIFTTAALPPDAPEAQKCGSCTACLDICPTDAFPAPFQLDARRCISYLTIEHRGPVPVELRERMGNRIYGCDDCLAICPWNKFAQTGRDAKLSARPDLVAPDLETLVKLDDAGFRERFSGSPIKRIGRDRFVRNVLYAIGNSGLPRLIPAARALTDDADETVREAARWAVERLHKV

SEQ ID NO: 78215 - protein, 345 aa, Maritimibacter sp.
  misc_feature (1)..(345): tr|A0A1X7P9X5|A0A1X7P9X5_9RHOB Epoxyqueuosine reductase OS=Maritimibacter sp. HL-12 OX=1162418 GN=queG PE=3 SV =1
MTSGLRQKLIDHAQAEGFAKVGITRPDVLPTLGRRLADFVDKGRHGDMGWMAERMHWRGNPAALWPEARSVIMLAEVYSPEHDPREVLRHPDKAAISVYAQNRDYHDIVKKRLKRVGRWLIDEAGRDTEIKVFVDTAPVMEKPLAAAAGLGWQGKHTNLLARDLGNWFFLGAIFTTLELEPDAPAADHCGACTACLDACPTRAFPAPYQLDARRCISYLTIEHKGPIDEALRPALGNRIYGCDDCLAACPWNKFAAVASEVRYRARDDLAAPDLAALAALDDAGFREKFSGSPIKRIGRARFLRNVAYAIGNSGDSRLKEAVRPLAADPDPVLAEAARWALARLG

SEQ ID NO: 78216 - protein, 312 aa, Marivirga lumbricoides
  misc_feature (1)..(312): tr|A0A2T4DV73|A0A2T4DV73_9BACT Epoxyqueuosine reductase OS=Marivirga lumbricoides OX=1046115 GN=queG PE=3 SV=1
MQNSHAKNSSIIKAIASELGFQFCGIAKAEFLEEEAPRLESWLKKNYQGKMAYMSNHFDKRLDPTKLVEGAKSVVSLLYNYYPSEDISSNGSYKIAKYAYGKDYHFVIKEKLKDFMARIHEEIGEVGGRAFVDSAPVMERQWAAKSGLGWLGKNSLLLNKQRGSFFFLAELIIDLPLEPDGPVKDYCGTCTKCIDACPTDAIVGNQVIDASKCISYLTIELKDEIPDAFSGKMDDWMFGCDICQDVCPWNRFSSPHNEKAFKPHAQLREMNKSEWKELTREVFNEIFKKSAVKRTKYEGLMRNVKFLEESAK

SEQ ID NO: 78217 - protein, 309 aa, Marivirga sericea
  misc_feature (1)..(309): tr|A0A1X7JZ77|A0A1X7JZ77_9BACT Epoxyqueuosine reductase OS=Marivirga sericea OX=1028 GN=queG PE=3 SV=1
MSFRKEKNTKIIKSIAAELGFDFCGVSKAGFLEEEAPKLENWLKKGYHGKMQYMENHFDKRLDPTKLVEGAKSVVSLMYNYYPEQDIAKSDSYKLAKYAYGKDYHFVVKDKLKDFMSRIHEEIGEVDGRVFVDSAPVMERQWAAKSGLGWLGKNSLLLNKQRGSFYFLAELIIDLDLQEDGPMQDYCGTCTKCIDACPTDAIVGDTIVDASKCISYLTIELKDDLPKEFSDKMESWVFGCDICQDVCPWNRFSRPHKEKAFQPHPLLKEMDKNDWKEMTKEVFNEVFRKSAVKRTKYTGLMRNIDYINS

SEQ ID NO: 78218 - protein, 309 aa, Marivirga tractuosa
  misc_feature (1)..(309): tr|E4TL50|E4TL50_MARTH Epoxyqueuosine reductase OS=Mari virga tractuosa (strain ATCC 23168 / DSM 4126 / NBRC 15 989 / NCIMB 1408 / VKM B-1430 / H-43) OX=643867 GN=queG PE=3 SV=1
MSLPKEKNTKIIKSIASDLGFDFCGVSKAGFLEEEAPKLEDWLKKGYHGKMHYMENHFDKRLDPSKLVEGAKSVVSLMYNYYPEQDLAKSDSYKIAKYAYGKDYHFVIKDKLKDFMTRLHEKIGEVGGRVFVDSAPVMERQWAAKSGLGWLGKNSLLLNKQRGSFYFLAELIIDLELEEDGPMQDYCGTCTKCIDACPTDAIVGDGIVDASKCISYLTIELKDDLPTEFSDKMEDWVFGCDICQDVCPWNRFSKSHQEYSFQPHPVLAEMDKKDWEEMTKEVFNEVFRKSAVKRTKYSGLKRNIKYINS

SEQ ID NO: 78219 - protein, 352 aa, Marivita cryptomonadis
  misc_feature (1)..(352): tr|A0A1X4NTJ9|A0A1X4NTJ9_9RHOB Epoxyqueuosine reductase OS=Marivita cryptomonadis OX=505252 GN=queG PE=3 SV=1
MDFTARLKEQALNEGFSACRICRPWDVPDVPGRLQAFLEAGFHGQMGWLAERSRWRGAPQVLWPEARSVIMLAENYGPEHDPLEVLERPELAAISVYAQNRDYHDVVKKRLKRLARWLIADAGGEVKVFVDTAPVPEKPLGQAAGLGWQGKHTNLVSRELGSWFFIGSIFTTLDLTPDAAEVDHCGSCRACLDVCPTDAFPAPYQLDARRCISYLTIEHNGPVDEELRGLMGNRIYGCDDCLAVCPWNKFASRASEVKYHARDDLKAPDLADLAQLDDAAFRERFSGSPIKRIGRNRFVRNVLYAIGNSGSPRLRAVAQVLVDDPDETVADAARWAAMRLADVANTRAGSGD

SEQ ID NO: 78220 - protein, 352 aa, Marivita geojedonensis
  misc_feature (1)..(352): tr|A0A1X4NR12|A0A1X4NR12_9RHOB Epoxyqueuosine reductase OS=Marivita geojedonensis OX=1123756 GN=queG PE=3 SV=1
MDLTEQVKAQAMAEGFSACRICRPWDVPEVPERLQAFLDAGYHGQMGWLAERAHWRGAPQVLWPEARSVIVLAENYGPEHDPLEVLQHPEQAAISVYAQNRDYHDVVKKRLKRLARWLIAEAGGGVKVFVDTAPVPEKPLGQAAGLGWQGKHTNLVSRDLGSWFFIGSVFTTLDLTPDAAEVDHCGSCRACLDVCPTDAFPGPYRLDARRCISYLTIEHHGPVDEDLRALMGNRIYGCDDCLAVCPWNKFASRAAEVKYHAREDLLAPDLAELAQLDDTAFRARFSGSPIKRIGRNRFVRNVLYAISNSGSPRLRSVAQALVDDPDETVADAARWAAMRLADVANARAGAGD

SEQ ID NO: 78221 - protein, 346 aa, Marivita hallyeonensis
  misc_feature (1)..(346): tr|A0A1M5TRK2|A0A1M5TRK2_9RHOB Epoxyqueuosine reductase OS=Marivita hallyeonensis OX=996342 GN=SAMN05443551_23 37 PE=4 SV=1
MTLTARVKAQAVAEGFSLCRVCRPWDVPEVPNRLRAFLEAGYHGQMGWLAERSHWRGAPHVLWPEARSVIMLAENYGPDHDPLDVLHQPERAAISVYAQNRDYHDVVKKRLKRLARWLISEAGGEVKVFVDTAPVPEKALGQASGLGWQGKHTNLVSRELGSWFFIGSVFTTLELDTDATEVDHCGSCRACLEVCPTDAFPAPYHLDARRCISYLTIEHHGPVDEDLRPLMGNRIYGCDDCLAVCPWNKFAERAAEVKYHAREDLLAPDLADMAQLDDGAFRARFSGSPIKRIGRNRFVRNVLYAIGNSGSARLREVARGLVDDADPTVSDAARWALGRLAHVEET

SEQ ID NO: 78222 - protein, 352 aa, Marivita sp.
  misc_feature (1)..(352): tr|A0A316KQ77|A0A316KQ77_9RHOB Epoxyqueuosine reductase OS=Marivita sp. XM-24bin2 OX=2133951 GN=queG PE=3 SV=1
MSLTARLKAQAAAEGFSACRICRPSDVPEVPTRLTAFLDAGYHGQMGWLAERAHWRGAPDVLWPEAQSVIVLAENYGPDHDPLQILEQPEKAAISVYAQNRDYHDVVKKRLKRLARWLIAEAGGEVKVFVDTAPVPEKPLGQAAGLGWQGKHTNLVSRELGSWFFIGSVFTTLDLTPDKPEVDHCGSCRACLDICPTNAFPAPYQLDARRCISYLTIEHHGPVDEDLRALMGNRIYGCDDCLAVCPWNKFASRAAEVKYHARDDLLAPGLAELARLDDTAFRARFSGSPIKRIGRNRFVRNVLYAIGNSGLPHLRAVAQDLVEDPDATVADAARWAVMRLADVANTRAGSGD

SEQ ID NO: 78223 - protein, 342 aa, Marivivens niveibacter
  misc_feature (1)..(342): tr|A0A251WYU8|A0A251WYU8_9RHOB Epoxyqueuosine reductase OS=Marivivens niveibacter OX=1930667 GN=queG PE=3 SV=1
MISKDQIRAFALDAGFAKMGVCRPDAVPDIAARLQDFVDAGRHGDMAWMADRMHWRGNPAELWPEAKSVIMLAEPYTPDHDPMAVIDQHDRAAISVYAQNRDYHDVVKKRLKKVGRWMLEQQRDEAIKVFVDTAPVMEKPLGQAAGLGWQGKHTNLLGRDLGSWFFLGAIFTTIELEPDDAEVSYCGSCTACLTSCPTDAFPAPYQIDARRCISYLTIEFGGQVPHDLREKMGNRIYGCDDCLAACPWNKFAADAREVKYAARDDLIAPKLSELVTLDDPSFRAMFSGSPIKRIGRNRFVRNVLYAIGNSGDPALIESAKALTHDPDPVVAEAATWAVSRLV

SEQ ID NO: 78224 - protein, 307 aa, Marixanthomonas ophiurae
  misc_feature (1)..(307): tr|A0A3E1QBS9|A0A3E1QBS9_9FLAO Epoxyqueuosine reductase OS=Marixanthomonas ophiurae OX=387659 GN=queG PE=3 SV= 1
MSIKEQNTKLIKTEAKRLGFLSCGISKAEFLEEEAPRLETWLKQNMHGEMSYMENYFDKRLDPTKLVPDSKSVISLLLNYYPSETQNEDSYKISKYAYGRDYHFVIKDKLKQLLNHIQEEIGDVHGRAFVDSAPVLDKAWAAKSGLGWIGKHSNLLTKQTGSFYFIAELIVNLDLEYDTPVTDHCGSCTACIDACPTQAIVDPYVVDGSKCISYLTIELKNEIPTEFSKKMDDWMFGCDICQDVCPWNRFSKPHNEPLFNPHPELLENTKKDWEEITKELFNEIFRKSAVKRTKYEGLKRNIQYLKN

SEQ ID NO: 78225 - protein, 307 aa, Marixanthomonas sp.
  misc_feature (1)..(307): tr|A0A2U0I844|A0A2U0I844_9FLAO Epoxyqueuosine reductase OS=Marixanthomonas sp. HN-E44 OX=2174845 GN=queG PE=3 SV=1
MNSKEEHTKLIKAAAKRLGFLSCGISKAEFLEDEAPRLETWLNKNMNGEMGYMENYFDKRLDPTKLVPGSKSVISLLLNYYPSEKQKSDTYKISKYAYGRDYHFVIKDKLKQLMHVIQEEIGEVNGRAFVDSAPVLDKAWAAKSGLGWIGKHSNLLTKQTGSFYFIAELIIDLDLEYDTPVTDHCGSCTACIDACPTQAIVDPYVVDGSKCISYLTIELKNEIPNEFSGKMEDWMFGCDICQDVCPWNRFSKPHNEPLFNPHPALLENSKQDWEEITKEVFNEIFRKSAVKRTKYEGLKRNIQFLKN

SEQ ID NO: 78226 - protein, 379 aa, Martelella endophytica
  misc_feature (1)..(379): tr|A0A0D5LV20|A0A0D5LV20_9RHIZ Epoxyqueuosine reductase OS=Martelella endophytica OX=1486262 GN=queG PE=3 SV=1
MAERGDKLKRFIKDEARALGFSDCRIARAEDMPEAAARLRDGVARGYYGEMAWMAETLERRSSPLALWPEARSVIMLSMNYGPDEDPRPLLARRDRANISVYARNRDYHDVVKGKLKQMAGRFAARTGAEVKVFVDTAPVMEKPIAEKAGIGWQGKHTNLVSRSQGSWFFLGSIFTTEELDPDAAERDHCGSCRACLDACPTDAFPAPYRLDARRCISYLTIEHHGTIPLEFRQAMGNRIYGCDDCLAACPWNKFAKAASEMKLAAREDLKAPEIARFLAFDDAGFRSFFTGSPVKRIGRDRFVRNCLIAAGNSGLASLIAPCRALLDDESPAVRAMAVWALSRLLPADAFATLARTRKPEHDKTVLEEWSGAGETLCI

SEQ ID NO: 78227 - protein, 379 aa, Martelella mediterranea
  misc_feature (1)..(379): tr|A0A2T0JSR1|A0A2T0JSR1_9RHIZ Epoxyqueuosine reductase OS=Martelella mediterranea OX=293089 GN=queG PE=3 SV=1
MAERREKLKRFVQAEAKAIGFDACRIARAEDMPEAAAALGEFVAKGYYGQMKWMAETLERRSSPLKLWPDARSVIMLAMNYGPEEDPRPLLKQPDRANISVYARNRDYHDVIKGKLKQMAGRFAARSGADVKVFVDTAPVMEKPIAAKAGIGWQGKHTNLVSREFGSWLFLGSIFTTEELEPDRAEKDFCGSCRACLDACPTAAFPAPYKLDARRCISYLTIEHHGVIPEEFREAMGNRIYGCDDCLAACPWNKFAQSASEMKLAARDDLKAPELSMFLGFDDAAFRKFFTGSPIKRIGRNRFVRNCLIAAGNSGHGFLADQCRVLADDESPEVRAMAVWALARLLPQAEFAALARARPRDTDEDVRREWQREEEMLCI

SEQ ID NO: 78228 - protein, 379 aa, Martelella mediterranea
  misc_feature (1)..(379): tr|A0A1U9Z750|A0A1U9Z750_9RHIZ Epoxyqueuosine reductase OS=Martelella mediterranea DSM 17316 OX=1122214 GN=que G PE=3 SV=1
MNERSEKLKYFLREEALSQGFSACRIARAEDMPEAANALAEGIAKGHYGEMAWMAETFERRSSPLKLWPEARSVIMLAMNYGPEDDPRPLLKRKDRANISVYARNRDYHDVIKGKLKQIAGRFAARSGADVKVFVDTAPVMEKPLAEKAGIGWQGKHTNLVSRQFGSWLFLGSIFTTEDIAPDTAERDHCGSCRACLDVCPTKAFPRPYRLDARRCISYLTIEHHGVIPLEFREAMGNRIYGCDDCLAACPWNKFAEQSSEMKLIARDDLKAPRLSQFLGFDDADFRAFFSGSPIKRIGRDRFVRNCLIAAGNSGDAALVPLCRRLIDDDSAAVRAMAVWALARLLPGKEFAALARTRLHESDETVRHEWQREEETLCI

SEQ ID NO: 78229 - protein, 379 aa, Martelella sp.
  misc_feature (1)..(379): tr|A0A2E1BE45|A0A2E1BE45_9RHIZ Epoxyqueuosine reductase OS=Martelella sp. OX=1969699 GN=queG PE=3 SV=1
MDERTEKLKQFLREEALSQGFSACRIARAEDMPEAAQALAEGIAKGHYGEMAWMAETFERRSSPLKLWPEARSVIMLAMNYGPEDDPRPLLKRKDRANISVYARNRDYHDVIKGKLKQIAGRFAARSGADVKVFVDTAPVMEKPLAEKAGIGWQGKHTNLVSRQFGSWLFLGSIFTTEDLAADAAERDHCGSCRACLDVCPTNAFPAPYRLDARRCISYLTIEHHGVIPLEFREAMGNRIYGCDDCLAACPWNKFAEQSSEMKLIARDDLKAPRLSQFLGFDDAAFRAFFTGSPIKRIGRDRFVRNCLIAAGNSGDATLAPLCRLLIDDDSAAVRAMAVWALARLLPGKEFAALARTRLHESDETVRHEWQREEETLCI

SEQ ID NO: 78230 - protein, 379 aa, Martelella sp.
  misc_feature (1)..(379): tr|A0A5C4JQQ7|A0A5C4JQQ7_9RHIZ Epoxyqueuosine reductase OS=Martelella sp. GH2-6 OX=2583532 GN=queG PE=3 SV=1
MAERQDRLKRFLKDEARAIGFDACRIARADDMPDSAAALRDFVENGYHGQMAWMNETLERRSSPLSLWPEARSVIMLAMNYGPDEDPRPLLERRDRANISVYARNRDYHDVIKGKLKQMAGRFAARSGADVKVFVDTAPVMEKPLAEKAGIGWQGKHTNLVSRDYGSWLFLGSIFTTEALDPDSAEKDHCGSCRACLDVCPTDAFPAPYRLDARRCISYLTIEHHGVIPEEFRSAMGNRIYGCDDCLAACPWNKFAETASEMKLSARADLKAPELSMFLGFDDAAFRKFFTGSPVKRIGRDRFVRNCLIAAGNSGHPHLAAHCRSLLEDDSAAVRAMAVWALARLLSKTEFAALAKSRLRDTDEDVRREWKREEEVPCI

SEQ ID NO: 78231 - protein, 362 aa, Massilia albidiflava
  misc_feature (1)..(362): tr|A0A411WTD5|A0A411WTD5_9BURK Epoxyqueuosine reductase OS=Massilia albidiflava OX=321983 GN=queG PE=3 SV=1
MSLSPEVLSTLAAAIKRWGRELGFAEVRIADIDLAAAEAGLQAWLDAGMHGEMDYMAAHGMKRARPAELVPGTVRVITARMDYLPASHDAGWRAREQARLADPQAAVISVYARGRDYHKVLRARLQQLADRVRSEVGEFGYRVFTDSAPVMELPLAEKSGLGWRGKHTLLINREAGSMFFMGEILVDLPLPVDPPTEAHCGACSACITVCPTGAILGPGRLDARRCISYLTIELKGSIPEDLRPLLGNRVYGCDDCQTACPWNKFAGRATLPDFDERHGLGHASMITLFGWSEEEFNRNMEGSPIRRIGHERWLRNLAVGLGNAAALGARGDAAILAALRSRLDHPSALVREHVAWALARHG

SEQ ID NO: 78232 - protein, 380 aa, Massilia armeniaca
  misc_feature (1)..(380): tr|A0A2R4CIT2|A0A2R4CIT2_9BURK Epoxyqueuosine reductase OS=Massilia armeniaca OX=2072590 GN=queG PE=3 SV=1
MSPSPEELTALAAAIKAWGQELGFAEVRIADIDLAAAEAGLQAWLDAGMHGEMDYMATHGMKRARPAELVPGTVRVITARMNYLPASAGADWREREGARLADPEAAVISVYARGRDYHKVLRARLQQLADRIQGAIGAFGYRVFTDSAPVMELPLAEKSGLGWRGKHTLLLNRAAGSMFFMGEILVDLPLPVDAPTAAHCGQCSACITACPTQAILGPGRLDARRCISYLTIELKGAIPEELRPLLGNRVYGCDDCQTACPWNKFAQRATLPDFDERHGLGTASMLALFAWSEEEFNRNMEGSPIRRIGHERWLRNLAVGLGNAADAGARGDAAIVAALLARAEHPSELVREHAVWALARHGVETGVTHRPAAYPASAAD

SEQ ID NO: 78233 - protein, 365 aa, Massilia aurea
  misc_feature (1)..(365): tr|A0A422QIS7|A0A422QIS7_9BURK Epoxyqueuosine reductase OS=Massilia aurea OX=373040 GN=queG PE=3 SV=1
MPTSPDPAPDLPQLARAIKAWGKELGFADVRIADVDLGHLEAGLQAWLDAGYHGEMDYMASHGMKRARPAELVPGTVRAIVARMDYLPASQDADWRAGERLRQQDPDAAVVSVYARGRDYHKVLRNRLQSLAGKIQEAIGPFGFRVFTDSAPVMELPLAEKAGLGWRGKHTLLLSRAAGSTFFIGEILVDLPLPVDPPTGAHCGQCQACIDLCPTGAILGPGKLDARRCISYLTIELKSSIPEELRPLIGNRIYGCDDCQVACPWNKFAQRASVPDFDERNGLGEGDLVGLFAWDEEEFNRRMEGSPIRRIGHERWLRNLAVGLGNAAEKKRGDTAIVAALQSRRDHPSELVREHVAWALARHAA

SEQ ID NO: 78234 - protein, 368 aa, Massilia eurypsychrophila
  misc_feature (1)..(368): tr|A0A2G8TKC6|A0A2G8TKC6_9BURK Epoxyqueuosine reductase OS=Massilia eurypsychrophila OX=1485217 GN=queG PE=3 S V=1
MLPAQPDLPELARAIKQWGAELGFADLRITDADLAHAEPGLQAWLDEGHHGEMDYMASHGMKRARPSELVPGTVRVISARMDYLPAATPPDWRERETARLADPGAAVVSLYARGRDYHKVLRARLQQLAARIEAAAGQFGYRVFTDSAPVMEIPLAEKAGLGWRGKHTLMLNREAGSMFFLGEILVDLPLPIDAPASAHCGQCSACIDVCPTGAIIGPGRLDARRCISYLTIELKSSIPVELRPLIGNRIYGCDDCQTMCPWNKFAQRATVPDFDQRNGLGEASLVALFGWSEEQFERRMEGSPIRRIGHERWLRNLAVGLGNAADSIKGDAAIVAALEARAQHPSAMVREHVEWALARHARCDQHGV

SEQ ID NO: 78235 - protein, 362 aa, Massilia flava
  misc_feature (1)..(362): tr|A0A562PVU2|A0A562PVU2_9BURK Epoxyqueuosine reductase OS=Massilia flava OX=871742 GN=queG PE=3 SV=1
MSLSPEVLSTLAGAIKAWGRELGFAEVRIADIDLAAAEAGLQAWLDAGMHGEMDYMASHGMKRARPAELVPGTVRVITARMNYLPVSHDEGWRERERARLDDPQAAVISVYARGRDYHKVLRARLQQLADRIRAEVGEFGYRVFTDSAPVMELPLAEKSGLGWRGKHTLLINRDAGSLFFMGEILVDLPLPVDAPTTSHCGQCSACIDVCPTSAILGPGRLDARRCISYLTIELKGAIPLELRPLIGNRVYGCDDCQTVCPWNKFAQRATLPDFDERHGLGTAGMVELFAWSEDDFNRKMEGSPIRRIGHERWLRNLAVGLGNAAAAGARGDSAIVAALQARQAHPSELVREHVAWALAQHG

SEQ ID NO: 78236 - protein, 366 aa, Massilia glaciei
  misc_feature (1)..(366): tr|A0A2U2I7M4|A0A2U2I7M4_9BURK Epoxyqueuosine reductase OS=Massilia glaciei OX=1524097 GN=queG PE=3 SV=1
MPAVQPDLDALARAIKQWGAELGFADVRIADADLAHAEEGLLAWLAEGRHGEMDYMASHGLKRARPAELVPGTVRVISARMDYLPSATPADWRGREAARLADPDAAVVSLYARGRDYHKVLRARLQQLAARIEAAAGPFGYRVFTDSAPVMELPLAEQAGLGWRGKHTLLLNREAGSMFFLGEILVDLPLPVDAPASAHCGQCRACIDVCPTQAILGPGRLDARRCISYLTIELKGSIPLELRPLIGNRVYGCDDCQTACPWNKYARRAVVPDFDERNELGSAGMVALFGWTGDEFERRLEGSPIRRIGHERWLRNLAVGLGNAAGKKRGDANIVAALRARAGHPSALVREHVEWALALHGADAGS

SEQ ID NO: 78237 - protein, 368 aa, Massilia lurida
  misc_feature (1)..(368): tr|A0A562R7A9|A0A562R7A9_9BURK Epoxyqueuosine reductase OS=Massilia lurida OX=1036180 GN=queG PE=3 SV=1
MSSSAGLSSEALAALAAAVKGWGRELGFAEVRIADADLSAAEPGLQAWLDAGMHGEMDYMASHGMKRARPAELVPGTVRVITARMNYLPASHQGDWRARERARLDDPQAAVISVYARGRDYHKVLRARLQGLAERIQKEIGAFGYRVFTDSAPVMELPLAEKSGLGWRGKHTLLLNRAAGSMFFMGEILVDLPLPVDAPAEAHCGQCSACIAVCPTQAIVAPGRLDARRCISYLTIELKSAIPVELRPLIGNRVYGCDDCQTICPWNKFAQRATLPDFDERHGLGSASMIELFAWSEDDFNRRMEGSPIRRIGHERWLRNLAVGLGNAATLGAAGDPAIVAALRSRLDHPSELVREHVTWALDQHGYC

SEQ ID NO: 78238 - protein, 362 aa, Massilia lutea
  misc_feature (1)..(362): tr|A0A4P6KZH6|A0A4P6KZH6_9BURK Epoxyqueuosine reductase OS=Massilia lutea OX=321985 GN=queG PE=3 SV=1
MSLSPEVLSSLAAAVKRWGHELGFAEVRIADIDLATAEAGLQAWLDAGMHGEMDYMAAHGMKRARPAELVPGTVRVITARMDYLPPSHDADWRLRERGRLEDPNAAVISVYARGRDYHKVLRARLQQLADRIRGEVGEFGYRVFTDSAPVMELPLAEKSGLGWRGKHTLLINRDAGSMFFMGEILVDLPLPVDAPTDAHCGQCSACITACPTGAILGPGRLDARRCISYLTIELKGSIPEELRPLLGNRVYGCDDCQTACPWNKFAGRATLPDFDERHGLGSAGMVTLFAWSEDDFNRNMEGSPIRRIGHERWLRNLAVGLGNAAALGARGDAAIVATLRSRLDHPSELVREHVQWALAQHG

SEQ ID NO: 78239 - protein, 366 aa, Massilia namucuonensis
  misc_feature (1)..(366): tr|A0A1I7FVR9|A0A1I7FVR9_9BURK Epoxyqueuosine reductase OS=Massilia namucuonensis OX=1035707 GN=queG PE=3 SV=1
MSAVSPGSVNNLVELAASIKEWGGELGFAEVRVADVDLSAAEAGLQAWLDAGMHGEMDYMAAHGMKRARPAELVPGTVRAITARMNYLPQSAGEDWREREAARLADPSAAVVSIYARGRDYHKVIRARLQQLADRIQAAIGPFGYRVFTDSAPVMELPLAEKSGLGWRGKHTLLLSRSAGSMFFMGEILVDLPLPVDEPTGAHCGQCGACITACPTQAILGPGRLDARRCISYLTIELKGAIPEELRPLVGNRVYGCDDCQTACPWNKFAQRATLPDFDERHGLGAAGMVELFGWSEEEFNRRMEGSPIRRIGHERWLRNIAVGLGNAAALGARGDAAIVAALEARRDHPSELVREHVEWALARHG

SEQ ID NO: 78240 - protein, 365 aa, Massilia oculi
  misc_feature (1)..(365): tr|A0A2S2DKZ4|A0A2S2DKZ4_9BURK Epoxyqueuosine reductase OS=Massilia oculi OX=945844 GN=queG PE=3 SV=1
MPTSPDPAPDLPQLARAIKAWGKELGFADVRIADVDLGHLEAGLQAWLDAGYHGEMDYMASHGMKRARPAELVPGTVRAIVARMDYLPANGDGDWRAGERLRQQDPDAAVVSVYARGRDYHKVLRNRLQSLAGRIQDAIGPFGFRVFTDSAPVMELPLAEKAGLGWRGKHTLLLSRAAGSTFFIGEILVDLPLPVDPPTGAHCGQCQACIDLCPTGAILGPGKLDARRCISYLTIELKSSIPEALRPLIGNRIYGCDDCQVACPWNKFAQRASVPDFDERNGLGEGDLVGLFAWDEEEFNRRMEGSPIRRIGHERWLRNLAVGLGNAAEKKRGDTAIVAALQSRRDHPSELVREHVAWALARHAA

SEQ ID NO: 78241 - protein, 363 aa, Massilia phosphatilytica
  misc_feature (1)..(363): tr|A0A2S8HEQ5|A0A2S8HEQ5_9BURK Epoxyqueuosine reductase OS=Massilia phosphatilytica OX=2026176 GN=queG PE=3 SV =1
MSAQLPVQPDLPALAQAIKAWGAELGFADVRIADIDLAEHEAGLQAWLDAGHHGEMDYMASHGMKRARPAELVPGTVRVISARMDYLPMATPADWRARERLRQDDPEAAVVSIYARGRDYHKVLRNRLQALAEKVRAAVGEYGYRVFTDSAPVMELPLAQKAGLGWRGKHTLLLSREAGSMFFIGEILVDLPLPVDEPTGTHCGQCSACIDVCPTGAILGPGRLDARRCISYLTIELKGAIPEEFRPLIGNRIYGCDDCQLACPWNKFAQRATVPDFDERNGLGTAGLVELFGWSEDDFNRRLEGSPIRRIGHERWLRNLAVGLGNAITSDEIVAALRARADHPSALVREHVAWALARHGRTV

SEQ ID NO: 78242 - protein, 364 aa, Massilia plicata
  misc_feature (1)..(364): tr|A0A4P7BDL1|A0A4P7BDL1_9BURK Epoxyqueuosine reductase OS=Massilia plicata OX=321984 GN=queG PE=3 SV=1
MSPSQEELASLAAAIKGWGIALGFAEVRIADVDLSAAETGLQAWLDAGMHGEMDYMASHGMKRARPAELVPGTVRVITARMNYLPESAGADWRAREQARLADPNAAVISVYARGRDYHKVLRARLQQLADKVRAAVGEFGYRVFTDSAPVMELPLAEKSGLGWRGKHTLLLNRAAGSMFFMGEILVDLPLPVDAPIDAHCGQCSACITACPTGAIVAPGRLDARRCISYLTIELKGAIPPELRSLIGNRVYGCDDCQTACPWNKFAQRATLPDFDERHGLGSAGMLELFAWSEEEFNRRMEGSPIRRIGHERWLRNLAVGLGNAAAAGLRGDAAIVAALRSRADHPSELVREHVSWALALHGPQ

SEQ ID NO: 78243 - protein, 369 aa, Massilia psychrophila
  misc_feature (1)..(369): tr|A0A2G8T374|A0A2G8T374_9BURK Epoxyqueuosine reductase OS=Massilia psychrophila OX=1603353 GN=queG PE=3 SV=1
MPTQSPDVPNLLPDMHDLARAIKQWGVELGFADLRITDIDLAHAEPGLQAWLDAGHHGEMDYMASHGMKRARPGELVPGTVRVISARMDYLPAATPGDWRAREAARLDDPRAAVVSLYARGRDYHKVLRARLQQLASRIEAQAGQFGYRVFTDSAPVMELPLAEKAGLGWRGKHTLMLNREAGSMFFLGEILVDLPLPVDTPTGAHCGQCRACIDACPTAAILGPGRLDARRCISYLTIELKTSIPVELRPLIGNRIYGCDDCQIVCPWNKFAQRASLPDFDERNAMGDATLTDLFGWSEEQFGRRTEGSPIRRIGHERWLRNLAVALGNAADRAKGDAAIVSALRARERHPSALVREHVEWALARHLN

SEQ ID NO: 78244 - protein, 364 aa, Massilia sp.
  misc_feature (1)..(364): tr|A0A354ITV7|A0A354ITV7_9BURK Epoxyqueuosine reductase OS=Massilia sp. OX=1882437 GN=queG PE=3 SV=1
MIPASPDLHELARAIKMWGRELGFADVRIADVDLAHAEEGLQAWLAAGHHGEMDYMASHGMKRARPAELVPGTVRAIVARMDYLPKNNEPGSAWRARETARQADPGAAVVSVYARGRDYHKVLRNRLAQLAERVKREIGEYGYRVFTDSAPVMELPLAAKAGLGWRGKHTLLLSREAGSTFFIGEILVDLPLPVDEATSGHCGQCSNCIDLCPTQAILGPGRLDARRCISYLTIELKGSIPLELRPLIGNRIYGCDDCQLACPWNKFAQRAVLPDFDERNGLGDASLVELFAWEEEEFNRRTEGSPIRRIGHERWLRNLAVGLGNAASSRAGDPAIVAALRARAEHPSALVREHVRWALGQHGA

SEQ ID NO: 78245 - protein, 397 aa, Massilia sp.
  misc_feature (1)..(397): tr|A0A344JP81|A0A344JP81_9BURK Epoxyqueuosine reductase OS=Massilia sp. YMA4 OX=1593482 GN=queG PE=3 SV=1
MSPSPEELTALAAAIKAWGQELGFAEVRIADIDLAAAEAGLQAWLDAGMHGEMDYMATHGMKRARPAELVPGTVRVITARMNYLPESAGAGWRERERARLADPQAAVISVYARGRDYHKVLRARLQQLADRIQGAIGAFGYRVFTDSAPVMELPLAEKSGLGWRGKHTLLLNRAAGSMFFMGEILVDLPLPIDPPTEAHCGQCSACITACPTQAILGPGRLDARRCISYLTIELKGAIPEELRPLLGNRVYGCDDCQTACPWNKFAQRATLPDFDERHGLGSASMLALFAWSEEEFNRNMEGSPIRRIGHERWLRNLAVGLGNAADAGARGDAAIVAGLLARAEHPSALVREHVAWALARHGAERCVGGREGLGSDPAGPTPGVTRPPAAHPGCAAD

SEQ ID NO: 78246 - protein, 365 aa, Massilia timonae
  misc_feature (1)..(365): tr|A0A1S2N957|A0A1S2N957_9BURK Epoxyqueuosine reductase OS=Massilia timonae OX=47229 GN=queG PE=3 SV=1
MPTSPNPAPDLPELARAIKAWGKELGFADVRVADVDLGHLEAGLQAWLDAGYHGEMDYMASHGMKRARPAELVPGTVRAIVARMDYLPAAQDADWRARERLRQQDPEAAVVSVYARGRDYHKVLRNRLQSLAGRIQDAIGPFGFRVFTDSAPVMELPLAEKAGLGWRGKHTLLLSRAAGSTFFIGEILVDLPLPVDPPTGAHCGQCQSCIDLCPTGAILGPGKLDARRCISYLTIELKNSIPEELRPLIGNRIYGCDDCQVACPWNKFAQRAAVPDFDERNGLGGGDLLELFAWDEEEFNRRMEGSPIRRIGHERWLRNLAVGLGNAAEKKRGDAVIVAALQSRLDHPSELVREHVAWALARHAA

SEQ ID NO: 78247 - protein, 365 aa, Massilia timonae
  misc_feature (1)..(365): tr|K9DWW3|K9DWW3_9BURK Epoxyqueuosine reductase OS=Mass ilia timonae CCUG 45783 OX=883126 GN=queG PE=3 SV=1
MPTSPNPAPDLPELARAIKAWGKELGFADVRVADVDLGHLEAGLQAWLDAGYHGEMDYMASHGMKRARPAELVPGTVRAIVARMDYLPAAQDADWRARERLRQQDPEAAVVSVYARSRDYHKVLRNRLQSLAGRIQDAIGPFGFRVFTDSAPVMELPLAEKAGLGWRGKHTLLLSRAAGSTFFIGEILVDLPLPVDPPTGAHCGQCQSCIDLCPTGAILGPGKLDARRCISYLTIELKNSIPEELRPLIGNRIYGCDDCQVACPWNKFAQRAAVPDFDERNGLGGGDLLELFAWDEEEFNRRMEGSPIRRIGHERWLRNLAVGLGNAAEKKRGDAVIVAALQSRLDHPSELVREHVAWALARHAA

SEQ ID NO: 78248 - protein, 362 aa, Massilia umbonata
  misc_feature (1)..(362): tr|A0A4P8HRE0|A0A4P8HRE0_9BURK Epoxyqueuosine reductase OS=Massilia umbonata OX=864828 GN=queG PE=3 SV=1
MSLSPEVLSTLAAAIKRWGRELGFAEVRIADIDLAAAEPGLQAWLDAGMHGEMDYMAAHGMKRARPAELVPGTVRVITARMDYLPPSQDADWRARERARLDDPQAAVISVYARGRDYHKVLRARLQQLADRVRNEIGEFGYRVFTDSAPVMELPLAEKSGLGWRGKHTLLLNRDAGSMFFMGEILVDLPLPVDAPADAHCGQCSACITACPTNAILGPGRLDARRCISYLTIELKGSIPEEMRPLLGNRVYGCDDCQTACPWNKFAQRATLPDFDERHGLGSASMVALFGWTEEEFNRNMEGSPIRRIGHERWLRNLAVGLGNAATLGARGDAAIVAALRSRLDHPSDLVREHVGWALAQHG

SEQ ID NO: 78249 - protein, 363 aa, Massilia violaceinigra
  misc_feature (1)..(363): tr|A0A2D2DV65|A0A2D2DV65_9BURK Epoxyqueuosine reductase OS=Massilia violaceinigra OX=2045208 GN=queG PE=3 SV=1
MHSSHAEPDLSALAQSIKHWGAELGFADVRISDADLSHAEAGLQAWLDAGRHGEMDYMASHGMKRARPAELVPGTVRVISARMDYLPAATPDDWREREAARLRDPGAAVISIYARGRDYHKVLRSRLQQLAERIERETGQLGFRVFTDSAPVMELPLAEKAGIGWRGKHTLILNRDAGSMFFIGEILVDLALPVDAPASAHCGQCSACITACPTQAILAPGRLDARRCISYLTIELKNSIPEELRPLIGNRVYGCDDCQTACPWNKFAQRAVVPDFDERNELGSADMVSLFGWSEEEFGRKLEGSPIRRIGHERWLRNLAVGLGNAAEGARGDARIVAALQARADDASPMVREHVAWALKRHA

SEQ ID NO: 78250 - protein, 372 aa, Massilia yuzhufengensis
  misc_feature (1)..(372): tr|A0A1I1V1K2|A0A1I1V1K2_9BURK Epoxyqueuosine reductase OS=Massilia yuzhufengensis OX=1164594 GN=queG PE=3 SV= 1
MTTSPDLPELARAIKAWGRELGFADVRIADVDLAHAEAGLQAWLDAGFHGEMDYMASHGMKRARPNELVPGTVRAIVARMDYLPATRGDGWRAEEAARQLEPGAAVVSVYARGRDYHKVLRNRLQALAERVKLAVGELGYRVFTDSAPVMELPLAEKSGLGWRGKHTLLLSRAAGSTFFIGEILVDLPLPVDPPTGAHCGQCQACIDVCPTQAILGPGRLDARRCISYLTIELKGSIPEELRPLIGNRIYGCDDCQLACPWNKFAQRAALPDFDERNGLGAAGMVDLFAWDEDEFNRRMEGSPIRRIGHERWLRNLAVGLGNAAASAAGRGDAAIVAALRARAAHPSSLVREHVAWALARHGVLLDALEAQA

SEQ ID NO: 78251 - protein, 318 aa, Massilimicrobiota sp.
  misc_feature (1)..(318): tr|A0A1Y4WD78|A0A1Y4WD78_9FIRM Uncharacterized protein OS=Massilimicrobiota sp. An105 OX=1965540 GN=B5E48_0609 0 PE=4 SV=1
MKEILMKGDTLGKSIYQAAIEAGFDNCGIISLDDMIPYETRLQERIEKVPESKAFYEGIYTNANIKKCYPWAKSLVICTIWYGKYRYPKNLQNKYAKGFFLSYESDKSTKLYKQTQSLNTWFDKQGIRWSNKKIYGLRYAAMQAGLGIIRRNNFFYDEKGSWLELVGFVIDQECRLYQNKQLRPCSPNCNLCIKNCPTRSLFAPYTMNPFKCISYCTTFGKGNIPKDVEENSFSTWIVGCDRCQDVCPYNRNDWDEDEDFPNLEELVPLLEPEILLKLSDEQLRNLIIPKTVGHIDTKDVETLRKNAIRFLKIQNKIH

SEQ ID NO: 78252 - protein, 318 aa, Mastigocladus laminosus
  misc_feature (1)..(318): tr|A0A4D9CQZ7|A0A4D9CQZ7_MASLA Epoxyqueuosine reductase OS=Mastigocladus laminosus UU774 OX=1594576 GN=queG PE =3 SV=1
MNQFPGTNSAEVKQQAVELGFHKVGIVAVNGIDEQQMERLQAWIELGYHADIKWMTSPKRQDIKLVMSEVRSLICVALNYYTPHQRPRGEEYAKISRYAWGRDYHKVMHKKLKALSGWLHRQGENIQARYYADTGPVQDKVWAQKAGIGWIAKNGNVITREYGSWVFLGEVLTNLELEPDKPHTQHCGNCTRCLEACPTDAITSPFVVDANRCIAYHTIENRQEKLPEAIASNLQGWVAGCDICQDVCPWNQRFASPTDVEEFQPYPGNIAPKLVELAQISDHEWDERFPASALRRIKPEMLRRNARANLNAFQQAQE

SEQ ID NO: 78253 - protein, 316 aa, Mastigocoleus testarum
  misc_feature (1)..(316): tr|A0A0V7ZFN5|A0A0V7ZFN5_9CYAN Epoxyqueuosine reductase OS=Mastigocoleus testarum BC008 OX=371196 GN=queG PE=3 SV=1
MNQFTFISSTQIKQKVLEIGFHKVGIADIDIIDNQVQRLRAWLALGYHADMEWMNSPKRQDIKLVMPEVRSLICVALNYYTPHQRPKGLEYAKISRYAWGRDYHKVMHKKLKVLCRWLESFSPEIKTRYYADTGPIQDKVWAQKAGIGWIAKNGNLITREYGSWVFLGEVLTNIELTPDNPHTEHCGSCTRCLDACPTNAITQPFVVDANRCIAYHTIENRQKQLPEDIKANLRNWVAGCDICQDVCPWNERFAHTTDVEEFNPYSGNLAPKLVELAKISNEEWDRQFPASALRRIKPEMLRRNARANLDTLGAPE

SEQ ID NO: 78254 - protein, 318 aa, Megasphaera cerevisiae
  misc_feature (1)..(318): tr|A0A0J6WP78|A0A0J6WP78_9FIRM 4Fe-4S ferredoxin OS=Meg asphaera cerevisiae DSM 20462 OX=1122219 GN=AB840_14965 PE=4 SV=1
MEYNELSEKIYEMAIQCGFENCGIIPLSEVDGYKQRLNERREKIPQSVQFYKKMEKFTCLEKRYPWGKSIVVCTSWLGKYQYPKSLQGKYAKAFMLSGDTVPDSEEHKNKKRFEAWMRDQKIYFEGGETNAPLRDVPLRHAAVAAGLGIFRKNNFFYTEKGSYYALEGYIIDKTCVHKHVNNIKSCSDTCLLCQQACKTQALSSPYTMNPLACVSFWTTFGKGRIPKSLDEGQFEDWVCGCDSCQDACPYNRRDWSVGEKFPGLEELTELLRPQNIVKASDAVLCEKVIPKTERHIPPDQVETLRITAVRVLRQSRKT

SEQ ID NO: 78255 - protein, 297 aa, Megasphaera cerevisiae
  misc_feature (1)..(297): tr|A0A0J6WTE4|A0A0J6WTE4_9FIRM (Fe-S)-binding protein O S=Megasphaera cerevisiae DSM 20462 OX=1122219 GN=AB840_ 11495 PE=4 SV=1
MNSYDIKKFAASLGLKCTGIAPADLKGPAEEADICPLAAGEGQDRYAPERLLPGCRSVIVILFPYYVSEDTAANLAMYCRCPDYHLVIRTYLHRIESFLQELCPESRQYSIIDTSPLADRWLAYKAGLGFFGDNHCFINVTYGSYCFIGSILTTLRLEPDLPLEKECLHCGACKTACPGHCFTSASGYDYRFCKSFLTQKKGSLTPPEITVLQKTPLIFGCDECQQVCPHNANIADTPLPEFRQDRLSLLHRSDIADMSNRQFQTAYSRRAFAWRGKKLLLRNLDYISKTASETFED

SEQ ID NO: 78256 - protein, 317 aa, Megasphaera elsdenii
  misc_feature (1)..(317): tr|A0A2S0M483|A0A2S0M483_MEGEL Epoxyqueuosine reductase OS=Megasphaera elsdenii OX=907 GN=C6Y28_00650 PE=4 SV= 1
MDTDKLGQVIYEKALACGFDDCGIIPIDDMDGFQQRLQEREEKVPSSAFFYQGMGDFANIKKRFPWAKSVIIGTYWLGKYRFPPSLQGKYGKAFFLSPSNSVCKESLTARRDFETWFKEQGIRCEGGDQFGHPSIGPLRYAAMMAGLGIIRKNNFFYTKKGSFVELVGYVIDQKAWCHHVPDIRPCAESCHLCQTHCPSGALKGPFTMSPLECVSFITTFAKGELTPGLNDKNCSTWICGCDSCQDACPYNRQHDWNQGDAYPGLEELAPQLQPKKLLAQSDTFIQEKVIPYTDYHIAADEAKTLKRCAARSLDNQM

SEQ ID NO: 78257 - protein, 317 aa, Megasphaera elsdenii
  misc_feature (1)..(317): tr|G0VQ86|G0VQ86_MEGEL Putative 4Fe-4S ferredoxin OS=Me gasphaera elsdenii DSM 20460 OX=1064535 GN=MELS_1393 PE =4 SV=1
MDTDKLGQVIYEKALACGFDDCGIIPIDDMDGFQQRLQEREEKVPSSAFFYQGMGDFANIKKRFPWAKSVIIGTYWLGKYRFPPSLQGKYGKAFFLSPSNSVCKESLTARRDFETWFKEQGIRCEGGDQFGHPSIGPLRYAAMMAGLGIIRKNNFFYTKKGSFVELVGYVIDQKAWCHHVPDIRPCAESCHLCQTHCPSGALKGPFTMSPLECVSFITTFAKGELTPGLNDKNCSTWICGCDSCQDACPYNRQHDWNQGDAYPGLEELAPQLQPEKLLAQSDTFIQEKVIPYTDYHIAADEAETLKRCAARSLDNQM

SEQ ID NO: 78258 - protein, 317 aa, Megasphaera genomosp.
  misc_feature (1)..(317): tr|D3LUH3|D3LUH3_9FIRM Putative iron-sulfur cluster-bin ding protein OS=Megasphaera genomosp. type_1 str. 28L O X=699218 GN=HMPREF0889_0163 PE=4 SV=1
MNSLHIKQFIYQLGIPCVGIAPGQFPAPPPPARPCPLAAGQGAERYEPERLLSPCRSIIVMLFPYYVADPPTANLSLYCRSTDYHLLIRRYLQTVEAYLHQHYPSCRTLSVADTSPLADRYLAYLAGLGFIGDNDCFIHERYGSYCFIGSILTTLPLTPDTPLHRECYHCGACRHACPGHCFDGADYDYRLCKSYLTQKKGSLSLPEIEVLRKTPLIFGCDMCQAVCPHNAEIPETPLNDFKENRIYTLSHEAIASLSNREFQRKYGNRAFAWRGKKILLRNMEYLRLPPSMPEQAHGYTQQQHADENRRTYNKRNE

SEQ ID NO: 78259 - protein, 310 aa, Megasphaera genomosp.
  misc_feature (1)..(310): tr|A0A2J8B8K6|A0A2J8B8K6_9FIRM (Fe-S)-binding protein O S=Megasphaera genomosp. type_2 OX=699193 GN=CAL30_06685 PE=4 SV=1
MERDTNLIKQYIYTLGIPCVGIAPGTFSIPSYPQDICPLAAGEGDARYQPTTLLPSCQSVIVLLFPYYVKDPHPYNLSLYCRSIDYHTIIHHYLNEVTCFLTQTYPHQDFLSIVDTAPLSDRYLAYLAGLGFIGDNNCFINETYGSFCFIGSILTSLPLKPDHPQQRECFHCGACKRSCLGHCLDTAEYDYHLCKSYLTQKKGELSPMEIQVIQKTPLVFGCDICQDVCPHNHDIPETPIKEFHQSRIAYLKKSDLQELSNRQFQQLYKNRAFSWRGKGILLRNIQYLEEVQSNSEQRQNPNTKNDPSHK

SEQ ID NO: 78260 - protein, 304 aa, Megasphaera hexanoica
  misc_feature (1)..(304): tr|A0A344MJD9|A0A344MJD9_9FIRM Uncharacterized protein OS=Megasphaera hexanoica OX=1675036 GN=ACT01_07130 PE=4 SV=1
MDTDKLGQVIYDKALACGFDDCGIIPIDDMDGFQQRLQEREEKVPSSAFFYQKMGDFANIKKRFPWAKSVIIGTYWLGKYRFPASLRGKYGKAFFLSPSNGVCKESLAARRDFETWFKEQGIRCEGGSQFGHRSIGPLRYAAMMAGLGIIRKNNFFYTKKGSFVELVGYVTDQKAWCHHVPDIRPCAESCHLCQAHCPSGALKGPFTMSPLECVSFITTFAKGKLTPGLDDKSCGTWICGCDSCQDACPYNRQHDWNQGDAYPGLEELAPQLQPEKLLAQSDTFIQEKVIPYTDYHIAADEAKH

SEQ ID NO: 78261 - protein, 290 aa, Megasphaera hexanoica
  misc_feature (1)..(290): tr|A0A344MHN7|A0A344MHN7_9FIRM (Fe-S)-binding protein O S=Megasphaera hexanoica OX=1675036 GN=ACT01_03765 PE=4 SV=1
MNTDFIKDAARRLGLTCTGIASAHLPVPETEQPVCPLASGKGMERYDLTSLLPDCKAAVVILFPYYNKETEKTNLSLYCQLEDYHLIVPAYLEKLSAILTSYGGTQRCIADTSPLTERLLAVEAGLGFVGDNQCLIHPVYGSYCFIGAILTTLPLTPDAPMDRECLHCGACQRICPGGCLSEGTYDYHLCKSYLTQKKELLTDREMEVIARTPLIFGCDECQRVCPHNKGVPITPIVEFRQNRLTMLRKEDIESLTNRQFRTTYGNRPFSWRGKKILLRNLDIVHAKTGL

SEQ ID NO: 78262 - protein, 175 aa, Megasphaera micronuciformis
  misc_feature (1)..(175): tr|E2ZAJ4|E2ZAJ4_9FIRM 4Fe-4S ferredoxin-type domain-co ntaining protein OS=Megasphaera micronuciformis F0359 O X=706434 GN=HMPREF9429_00457 PE=4 SV=1
MAVTAGLGFIGDNGCLIHETYGSYCFIGAVLTTADLEVDEPTKKECFHCGNCEKICPGNCFSGTAYNFVTCKSYLTQKKGDLTSQEQKIVAKTPYIFGCDECQRVCPHNKDIPVTPLADFRTDLLSYVDTRSFKNLTNRQFKETYGKRAFSWRGKAILIRNFTYIEQENTPESKK

SEQ ID NO: 78263 - protein, 290 aa, Megasphaera paucivorans
  misc_feature (1)..(290): tr|A0A1G9V2R7|A0A1G9V2R7_9FIRM Epoxyqueuosine reductase QueG (Queuosine biosynthesis) OS=Megasphaera paucivora ns OX=349095 GN=SAMN05660299_01314 PE=4 SV=1
MDSNRLKKYARSLGLDCLGITSSELIIPAEGKKICPLAAGQGIERYTPQALLKNCRAVIVVLFPYYVPTAEPSNLSIYTQSLDYHLIIQNYLKLLQHFMEQEYPQSNHYLCADTSPLCDRYLAHQAGLGFIGDNNCFIHPIYGSYCFIGSLLTTVPLIPDKPLTKECFHCGACRKICPGNCFINSDYNYECCKSYLTQKKGDLTPPEIAIIKKTSLIFGCDECQRVCPHNRYIPITPISEFRKDRILQLRRTELLSLTNTQFRRTYGNRAFAWRGKSILLRNLEYMDKEL

SEQ ID NO: 78264 - protein, 290 aa, Megasphaera sp.
  misc_feature (1)..(290): tr|A0A3C1CQH2|A0A3C1CQH2_9FIRM DUF1730 domain-containin g protein OS=Megasphaera sp. OX=2023260 GN=DCP59_04300 PE=4 SV=1
MNTDFIKDAARRLGLTCTGIASAHLPVPETEQPVCPLASGKGMERYDLTSLLPDCKAAVVILFPYYNRETEKTNLSLYCQLEDYHLIVPAYLEKLSAILTSYGGTQRCIADTSPLTERLLAVEAGLGFVGDNQCLIHPVYGSYCFIGAILTTLPLTPDAPMDRECLHCGACQRICPGGCLSEGTYDYHLCKSYLTQKKEPLTDREMEVIARTPLIFGCDECQRVCPHNKGVPITPIVEFRQNRLTMLRKEDIESLTNRQFRTTYGNRPFSWRGKKILLRNLDIVHAKTGL

SEQ ID NO: 78265 - protein, 310 aa, Megasphaera sp.
  misc_feature (1)..(310): tr|F9MNS4|F9MNS4_9FIRM Putative iron-sulfur cluster-bin ding protein OS=Megasphaera sp. UPII 135-E OX=1000569 G N=HMPREF1040_1203 PE=4 SV=1
MERDTNLIKQYIYTLGIPCVGIAPGTFSIPSYPQDICPLAAGEGDARYQPTTLLPSCQSVIVLLFPYYVKDPHPYNLSLYCRSIDYHTIIHHYLNEVTCFLTQTYPHQDFLSIVDTAPLSDRYLAYLAGLGFIGDNNCFINETYGSFCFIGSILTSLPLKPDHPQQRECFHCGACKRSCLGHCLDTAKYDYHLCKSYLTQKKGELSPMEIQVIQKTPLVFGCDICQDVCPHNHDIPETPIKEFHQSRIAYLKKSDLQELSNRQFQQLYKNRAFSWRGKGILLRNIQYLEEIQSNSEQRQNPNTKNDPSHK

SEQ ID NO: 78266 - protein, 305 aa, Megasphaera stantonii
  misc_feature (1)..(305): tr|A0A346B2L6|A0A346B2L6_9FIRM tRNA epoxyqueuosine(34) reductase QueG OS=Megasphaera stantonii OX=2144175 GN=q ueG PE=4 SV=1
MDSTDMKRFAAALGLDCVGVAPADLPRPPYAEDPPCPLAAGTGDERYEPRRLLPSCRSVVVVLVPYYTAQAEPGNLSLYCRSADYHVVVRSYLEQIAAYLQRQYPGSEQRCVVDTSPLSDRWLAYQAGLGFFGDNRCLINDTYGSYVFIGSVLTSLPFAPDQPLQQECSHCGACQSACPGQCFSGGAYDYSRCKSYITQKKGSFTLPEIQCMEKTPLIFGCDVCQESCPHNAGVKATPLPEFYRNRLSQLCPSDIESLSNKQFQQAFGDRAFAWRGKKVLLRNLEYAANPAAASAENRNDGKDDV

SEQ ID NO: 78267 - protein, 326 aa, Megasphaera stantonii
  misc_feature (1)..(326): tr|A0A346AYN7|A0A346AYN7_9FIRM Epoxyqueuosine reductase OS=Megasphaera stantonii OX=2144175 GN=DKB62_05040 PE= 4 SV=1
MSRSSLVQAIYETALSCGFDNCGIIPVSALDGYKQRLQEREEAVPQSRPVYQDIEHLAAVRELYPWAKSVVVCITWLGAYRYPLSLQGLYGKAFLLSPDTVPDCEAHRQKLHFETWLAEQGLRFEGGETNAPARIIPLRYAAVAAGLGIFRKNNFFYGEKGSYYELEGYLIDQPCEYTHECRLRPCADSCTLCQKACRTKALSAPYTMNPLSCTSFWTTFGQGAVPPHLTADQFTTWLCGCDACQDVCPYNRHDWSQGKDFPGLQELEPLLQPETIVAASDAELCDKVIPKTDLHISPDQVQTLRTSALRILAYLKKRGDTPARKE

SEQ ID NO: 78268 - protein, 355 aa, Mehylophilales bacterium
  misc_feature (1)..(355): tr|A0A258LMQ6|A0A258LMQ6_9PROT Epoxyqueuosine reductase OS=Mehylophilales bacterium 35-46-6 OX=1970535 GN=queG PE=3 SV=1
MNDTANYAMQKLSASIKQWGLDLGFSQIGITDTDLQSAESEHQAWIEKGLHGEMDYMAKHGTKRSRPAELVPNTIRVISARLDYQPPNAADSEAILNDSNKAFISRYALGRDYHKVMRNKLQKLCEKIQAEFTSFEYRVFTDSAPVLEVALAEKAGLGWRGKHTLLINKDRGSWFFLGEIYTNLPLEIDAIATNHCGTCSSCIDVCPTQAITAPYEVDARRCISYLTIELKGSIPLEFRPLIGNRVYGCDDCQLFCPWNKFAEITKESDFAVRNGLDTISLIACFNWTEAEFKTNLAGSAIYRIGYEQWLRNIAIGLGNAKTSPEIIAALQQHCNHDNAIVREHVAWALAQHHTV

SEQ ID NO: 78269 - protein, 365 aa, Meiothermus cateniformans
  misc_feature (1)..(365): tr|A0A399E1H8|A0A399E1H8_9DEIN Epoxyqueuosine reductase OS=Meiothermus cateniformans OX=482825 GN=queG PE=4 SV =1
MQVAEALTQAAQERGFLTAWAGLELPQETQQRYRDWLAEGKQAGMAYLPRNLETRLNPSRRFDWAQSVLVLAASHAYPPPPKPPGGLRVGRVARYAWVRDYHLLLQPHLEALEHLAQRLGVQARGYVDTGPLSERSYAVLGGLGWIGRNAMLMRMGEGSYLTLAVLLTSLEAPPAEPYPNRCGRCSRCLAHCPTQALLGDGTLDARLCISYWTIEHRGPIPDGLWAGLGDWLLGCDLCQEVCPWNRKAQSFWEGFVPEPELAYPNLEDFFYLSSKAFERKYAGTVFLRPGRTRMARNALVVLANLNNPDYLPLVRRAAQDVNPLVRATAAQALARLGDFVSLESLRRDPVPQVAGLAQGLLERQG

SEQ ID NO: 78270 - protein, 361 aa, Meiothermus granaticius
  misc_feature (1)..(361): tr|A0A399FF82|A0A399FF82_9DEIN Epoxyqueuosine reductase OS=Meiothermus granaticius NBRC 107808 OX=1227551 GN=q ueG PE=4 SV=1
MEPWFTLRQEAQQRGFLAEWAPLGLPEEAQRRYRAWLEAGNHASMDYLLPSTRLEPAQRFAWARSVLVLAAPQAYPDPGPPEGGVRLGRVARYAWVRDYHVLLEPYLRELEDCAAKLGVQAKGYVDTGPFSERSYAVLSGLGWVGRNAMLMRMGEGAYLSLALLLTSLEPPEPAPPYPNRCGRCTRCLTACPTGALLGDGTLDARRCISYWTIEHRGLIPAPLWPLIGDWLFGCDLCQEVCPWNRKPQVFWSGFRPEPELAHPDLEEFFSLSSRAFARRYERTVFLRPGRTRMARNALIVLANRQEHLPLVRRAAGDVNPVVRATAARALARFGDWDAVARLGHDPQPEVAQEAQAVLAGR

SEQ ID NO: 78271 - protein, 366 aa, Meiothermus hypogaeus
  misc_feature (1)..(366): tr|A0A511QYP1|A0A511QYP1_9DEIN Epoxyqueuosine reductase OS=Meiothermus hypogaeus NBRC 106114 OX=1227553 GN=MHY 01S_02830 PE=4 SV=1
MNAALILTQAAQEQGFLTAWAGIELPEATQDRYQAWLAQGRQAEMAYLNQNLSTRLSPRSRFGWAKSVLVLAAPHAYPPPKRPLGGVRIGRVARYAWVRDYHLLIQPYLQDLERLAQSLGLQAKGYVDTGPLSERSYAAWGGLGWIGRNAMLMRMGEGTYLTLAMLLTSLPPPAGEGLYPNRCGTCRRCVTGCPTGALLGDGTLDSKRCISYWTIEHRGPIPAELWTGMGDWLFGCDICQEVCPWNRKARAFWQGFVPEPELAYPNLEDFFTLSSKAFERKYAGTVFLRPGRTRMARNALVVLANLGNPDYLPLVRRGARDVNPLVRATAAEALARLGDFDSLVLLLQDPEPSVAGVARGWLERQC

SEQ ID NO: 78272 - protein, 176 aa, Meiothermus luteus
  misc_feature (1)..(176): tr|A0A399EJS6|A0A399EJS6_9DEIN Epoxyqueuosine reductase OS=Meiothermus luteus OX=2026184 GN=queG PE=4 SV=1
MGGCPTGALLGDGTLDARRCISYWTIEHRGTIPLELWSGLGDWLFGCDVCQEVCPWNRKARAFWAGFSPEADLAYPNLLDFFELSSRAFERRYAGTAFLRPGRTRMARNALVVLSNLAYPELLPLALKAAQDVNPVVRATAAQALARLGERALLERFFQDPDPKVAGVARGLREAL

SEQ ID NO: 78273 - protein, 369 aa, Meiothermus roseus
  misc_feature (1)..(369): tr|A0A399EYR3|A0A399EYR3_9DEIN Epoxyqueuosine reductase OS=Meiothermus roseus OX=1644118 GN=queG PE=4 SV=1
MDAQGALESYAREQGLLTAWAALELPEGVRRRYRDWIEQGAHAGMGYLGQRLEERLEPSRRFTWARSVLVLAAAHAYPDPGLPEGGLRLGRVARYAWVRDYHGLLRPHLAALESLARQAGVRAKGYVDHGPLSERSYAALGGLGWIGKNGMWMRMGEGSYLTLAVLLTELEAPPAPPHPNRCGRCTRCHSACPTQALPGDGTLDARRCVSYWTIEHRGLIPQALWAGIGDWLLGCDICQEVCPWNRKATAFWRGFTPEPELAHPDLWAFLVLSSRAFARRFEGTVYTRPGRSALARNALIVLCNTGDEAHLPYIRRALQDVNPVVRATAAAAMVRLGRAAEAESALRDPDPAVTRYVREALERAPAAGG

SEQ ID NO: 78274 - protein, 365 aa, Meiothermus ruber
  misc_feature (1)..(365): tr|D3PR19|D3PR19_MEIRD 4Fe-4S ferredoxin-type domain-co ntaining protein OS=Meiothermus ruber (strain ATCC 3594 8 / DSM 1279 / VKM B-1258 / 21) OX=504728 GN=K649_05345 PE=4 SV=1
MQVAEALTQAAQERGFLTAWAGLDLPQETQQRYRDWLAEGKQAGMAYLPRNLETRLNPSQRFTWARSVLVLAAPHAYPPPPKPPGGLRLGRVARYAWVRDYHRLMQPHLEALEHLAQRLGAQAKGYVDTGPLSERSYAALGGLGWIGRNAMLMRMGEGTYLTLAVLLTSLEAPPAEPYPNRCGRCSRCVAHCPTQALLGDGTLDSRRCISYWTIEHRGPIPGELWAGIGDWLFGCDICQEVCPWNRKARSFWQDFVPEPELAYPNLEDFFFLSSKAFERKYAGTVFLRPGRTRMARNALVVLANLGNPDYLPLVRRAAQDVNPLVRATAARALARLGDFVSLEPLRRDPVLQVAGLARGLLERQG

SEQ ID NO: 78275 - protein, 365 aa, Meiothermus ruber; identical to SEQ ID NO: 78274
  misc_feature (1)..(365): tr|A0A0S7AQE9|A0A0S7AQE9_MEIRU 4Fe-4S ferredoxin-type d omain-containing protein OS=Meiothermus ruber H328 OX=1 297799 GN=MrH_1145 PE=4 SV=1

SEQ ID NO: 78276 - protein, 364 aa, Meiothermus silvanus
  misc_feature (1)..(364): tr|A0A4Q4L3Q1|A0A4Q4L3Q1_9DEIN tRNA epoxyqueuosine(34) reductase QueG OS=Meiothermus silvanus OX=52022 GN=queG PE=4 SV=1
MEARERIEAEARERGFLTAWAAVDLPEGVRSRYREWLVAGYQAGMAYLEARIEDRLEPTRRFAWAKSALVLAASHAYPDPGLPEGGVRIGRVARYAWVRDYHALLQPHIESLENLARRLGLEAKGYVDHGPLSERSYAVWGGLGWIGKNAMLMRMEEGSYLTLAVLLTSLALEERPKKLYENRCGRCTRCFTGCPTQALPGDGTLDARRCISYWTIEHRGWIPTELWPGLGDWILGCDICQHVCPWNRKAREFWRGFTPEAELAHPDIQDFFFLSGHAFARKYAGTVFLRPGRTRLARNALIALANAQDERYLPLVRRAAEDVSPLVRATAAHALVRLGDLASARKLLFDPDAEVVRQARSALD

SEQ ID NO: 78277 - protein, 385 aa, Meiothermus silvanus
  misc_feature (1)..(385): tr|D7BEL2|D7BEL2_MEISD 4Fe-4S ferredoxin-type domain-co ntaining protein OS=Meiothermus silvanus (strain ATCC 7 00542 / DSM 9946 / VI-R2) OX=526227 GN=Mesil_1362 PE=4 SV=1
MDARARIESEARARGFLVAWAPVDLPEEARLGYMDWLAAGNQAGMGYLEARIEDRLAPTRRFSWAKSVLVLAASHAYPDPGLPEGGVRIGRVARYAWVRDYHTLLQPHIESLENLARRLGLEAKGYVDHGPLSERSYAVLAGLGWIGKNAMLMRMEEGSYLTLAVLLTSLVLEDLPEERYPNRCGRCTRCFTACPTNALPGNGSLDARRCISYWTIEHRGWIPTELWPGLGDWILGCDICQQVCPWNRKAREFWQDFTPEAELAHPDVQDFFFLSGHAFARKYAGTVFLRPGRTRLARNALIALANAQDERYLPLVRRAAEDVSPLVRATAAHTLARLGDTAAAEKRLTDPDENVIREARAALDQALCRVSPLATPETVPGGSRR

SEQ ID NO: 78278 - protein, 364 aa, Meiothermus sp.; identical to SEQ ID NO: 78276
  misc_feature (1)..(364): tr|A0A323UBC1|A0A323UBC1_9DEIN tRNA epoxyqueuosine(34) reductase QueG OS=Meiothermus sp. Pnk-1 OX=873128 GN=qu eG PE=4 SV=1

SEQ ID NO: 78279 - protein, 366 aa, Meiothermus sp.
  misc_feature (1)..(366): tr|A0A370JZA7|A0A370JZA7_9DEIN tRNA epoxyqueuosine(34) reductase QueG OS=Meiothermus sp. QL-1 OX=2058095 GN=qu eG PE=4 SV=1
MDPLVRLTQAAEERGLLAAWAPVELPPGVQARYQDWLAQGHQAGMAYLAEQAPTRLMPTRRFAWARSVLVLAASHAYPPPPKPFGGLRVGRVARYAWVRDYHHLLRPHLEALEGLAQSLGLEARGYVDTGPLSERSYAVLGGLGWVGRNAMLIRMGAGSYLTLAVLLTSAPLPEAPTPHPHRCGRCTRCLAGCPTGALLGDGTLDARLCISYWTIEHRGLVPLERWSGMGEWLFGCDVCQEVCPWNRRARTFWAGFTPEPELAYPDLRDFFTLSSRAFARKYAATAFLRPGRTRMARNALIVLSNLDHPELLPLARQAAGDVNPVVRATAAQALARHGLKAPLEPLLRDPEPQVAQLARGLLEALG

SEQ ID NO: 78280 - protein, 369 aa, Meiothermus terrae
  misc_feature (1)..(369): tr|A0A399EIS6|A0A399EIS6_9DEIN Epoxyqueuosine reductase OS=Meiothermus terrae OX=1408545 GN=queG PE=4 SV=1
MEAREVLEGYAREQGFLTAWAPLELPQPVRQRYRDWLGQGAHAGMGYLERGVEERLEPVRHFPWARSVLVLAAPHAYPDPGVPAGGLRVGRVARYAWVRDYHGLLEPHLAALEGLARQAGVRAKGYVDHGPLSERSYAALGGLGWIGKNGMWMRMGEGSYLTLAVLLTELEATPLPLHPDRCGRCARCFTACPTQALPGDGTLDARRCVSYWTIEHRGLIPQELWPGVGEWLLGCDICQEVCPWNRKAAALWQGFTPDPELAHPDLWAFLTLSGRAFARRFAGTVLTRPGRTALARNALIVLSNTGDDAHLPYFRRALQDVNPAVRATAAAGLVRLGKAAEAGAALGDPDPEVARYVREALERVSLAER

SEQ ID NO: 78281 - protein, 361 aa, Melaminivora alkalimesophila
  misc_feature (1)..(361): tr|A0A317RFZ4|A0A317RFZ4_9BURK Epoxyqueuosine reductase OS=Melaminivora alkalimesophila OX=1165852 GN=queG PE= 3 SV=1
MVASSSQLLPLLRQWARELGFSQIGIAGVDLSSAEPGLMQWLAEGFHGDMHYMEAHGARRARPAELVPGTVSVITARMDYLPRNTPEDWQALEFARLQRPGEAIVSVYARGRDYHKVLRSRLQKLSERIAEALGPFGHRVFTDSAPVLEAELASRSGQGWRGKHTLVLSREAGSMFFLGEIYVDVALEPTEAVSAHCGSCTACMDVCPTGAIVAPYRVDARRCISYLTIEHHGAIDPQLRPLMGNRIYGCDDCQLACPWNKFAQVSSLPDFDARAGLVGAQLVELFAWDEATFLRATEGSPIRRIGHERWLRNIAVALGNALRSADPLQAEGLRVALSSRLGHHSETVREHVQWALAQRPD

SEQ ID NO: 78282 - protein, 350 aa, Melaminivora sp.
  misc_feature (1)..(350): tr|A0A2P1NQ25|A0A2P1NQ25_9BURK Epoxyqueuosine reductase OS=Melaminivora sp. SC2-7 OX=2116657 GN=queG PE=3 SV=1
MRQWARELGFSQIGVAGVDLSSAEPGLMQWLAQGFHGEMHYMAAHGTKRARPAELVPGTVSVITARMDYLPRDTPPEWQAVEWSRLQRPDEAIVSVYARGRDYHKVLRSRLQKLSERIAQALGPFGHRVFTDSAPVLEAELARRSGQGWRGKHTLVLSREAGSMFFLGEIYVDMALQPTEPVTAHCGSCQACIQVCPTQAIVAPHRVDARRCISYLTIEHAGPIPLELRPLMGNRIYGCDDCQLVCPWNKFAQASSLPDFDLRCGLVGQQLVALFAWDEPTFLRVTEGGPIRRIGHERWLRNIAVALGNALRAADVQQAQPLRMALQSRLGHHSEIVREHVHWALAQRPD

SEQ ID NO: 78283 - protein, 350 aa, Melaminivora sp.
  misc_feature (1)..(350): tr|A0A2R3QH84|A0A2R3QH84_9BURK Epoxyqueuosine reductase OS=Melaminivora sp. SC2-9 OX=2109913 GN=queG PE=3 SV=1
MRQWARELGFSQIGVAGVDLSSAESGLGQWLAAGFHGGMQYMEAHGMRRARPAELVPGTVSVITARMDYLPRSTPAGWQAVEFERLGRAHEGVVSVYARGRDYHKVLRARLQKLSDRIAEALGPFGHRVFTDSAPVLEAELASRSGQGWRGKHTLVLSREAGSMFFLGEIYVDMALHPTEPVTAHCGSCSACIDVCPTGAIVAPHRVDARRCISYLTIEHHGPIPLELRCLMGNRIYGCDDCQLICPWNKYAQVSSLPDFDQRAGLTGQHLATLFAWDEATFLRMTEGGPIRRIGHERWLRNIAVALGNALRTGDAQQAPALRAALQTRLEHPSALVVEHVRWALAQRPG

SEQ ID NO: 78284 - protein, 378 aa, Melghiribacillus thermohalophilus
  misc_feature (1)..(378): tr|A0A4R3N3K9|A0A4R3N3K9_9BACI Epoxyqueuosine reductase OS=Melghiribacillus thermohalophilus OX=1324956 GN=que G PE=3 SV=1
MTYDNLKQEVIEYSREIGIDKIGFASADVFSTLKERLKIQASLGYQSGFEKGSIEERTEPERLLPEAKSIISIAMAYPSRMKNAPRGTRKERRGIFCRASWGKDYHHILRERLEKLSQFLKDKNPDVLTRIMVDTGELSDRAVAERAGIGFSGKNCSIITPEFGSYVYLGEMITNIPFPPDQPVEDSCGDCHICVDACPTGALVQGGQLNARRCIAFLTQTKDFLPDEFRGKIGNRLYGCDTCQQVCPKNKGKDVHLHPEMEPEPENVKPKLIPLLKLSNREFRERFGSMSGSWRGKKPIQRNAILALAHYKDKSAVNDLIAMMNEDPRPVIRGTAAWALGKIGGNKAEEAIKEAMQKETDMQVIQEMKKGLDLLKKS

SEQ ID NO: 78285 - protein, 389 aa, Melghirimyces algeriensis
  misc_feature (1)..(389): tr|A0A521FA98|A0A521FA98_9BACL Epoxyqueuosine reductase OS=Melghirimyces algeriensis OX=910412 GN=SAMN06264849 _11546 PE=4 SV=1
MGPGDIKKTLQEEAKRLNIDKIGFASADPFTELKERLKDHRKAGYESGFEEPDLEKRTDPRKTLPNARSIIAIALAYPTRLENPPDSKPGAYRGVFCRASWGEDYHRVLKRKLEGLKVKLLELVPDAKVEIMVDTGALSDRAVAERAGIGWSGKNTSIITPEFGSWVYLGEMITDVYLPPDQPLTQSCGECTACLDACPTGALVAPGQLNSQACLAYLTQTKGMLAEEYRNKLGGYLYGYETCQAVCPYNRKKNFTQHEEFHPDPDQVKPLLKPLLRMSNREFRQRFGKMAGSWRGKKPIQRNAIIALGRYRDRTAVPDLIHLLENDPRPVIRGTAAWALGRIGGSEAEEALYRVKEKESNEQVMVEIEKALHECGIQETANHRTYREA

SEQ ID NO: 78286 - protein, 391 aa, Melghirimyces profundicolus
  misc_feature (1)..(391): tr|A0A2T6C4Q8|A0A2T6C4Q8_9BACL Epoxyqueuosine reductase OS=Melghirimyces profundicolus OX=1242148 GN=C8P63_104 156 PE=4 SV=1
MKMEAAEIKKALQMEAKRLKIDKIGFASAEPFTELKERLKRHREAGFESGFEEPDLDKRTDPRKILPEARSIIAIALAYPTKMEQPPVSKPGAYRGVFCRASWGEDYHNVLKRKLEGLKAKLLELVPGAAATVMVDTGALSDRAVAERAGIGWSGKNTSIITPEFGSWVYLGEMITDVHLPPDQPVTEACGDCTACLDACPTGALVAPGQLNSRACLAYLTQTKGFLAPEYRDLLGGYLYGFETCQAVCPYNRKKNFTHHEEFTPDPEKVRPLLKPLLQLSNREFRERFGSMAGSWRGKKPIQRNAIIALGRFRDRTAVPDLIRLLKEDPRPVIRGTAAWALGRIGGPEAADALSLAGKTERDQKVKEEIEKALDECRGEETANHRTYREA

SEQ ID NO: 78287 - protein, 389 aa, Melghirimyces thermohalophilus
  misc_feature (1)..(389): tr|A0A1G6RCI9|A0A1G6RCI9_9BACL Epoxyqueuosine reductase OS=Melghirimyces thermohalophilus OX=1236220 GN=SAMN04 488112_12717 PE=4 SV=1
MKPADIKAALQEAAKELNIDKIGFAAADPFDELKERLRKHRKAGYESGFEEPDLEKRTDPQKSLPGARSIIAIALAYPTKMDNAPVSKPGAYRGVFCRASWGEDYHHVLKRKLEALRRKLVEWVPDAKAEIMVDTGALSDRAVAERAGIGWSGKNTSIITPEFGSRVYLGEMLTDVYLPPDQPIENACGECTACLDACPTGALVGPGQLNSQACLAYLTQTKGFLAEEYRDKLGNFLYGFETCQAVCPYNRGKNFTHHPEFQPEAENVKPLLKPLLHMSNRQFRQRFGSMAGSWRGKKPIQRNAIIALGRYRDRTAVPDLVRLLEEDPRPVIRGTAAWALGRIGGGEAAEALNRAQEVEPDEQVAVEIEHAIEMCRMRETADHRTYREA

SEQ ID NO: 78288 - protein, 310 aa, Melioribacter roseus
  misc_feature (1)..(310): tr|I6Z3C3|I6Z3C3_MELRP Epoxyqueuosine reductase OS=Meli oribacter roseus (strain JCM 17771 / P3M-2) OX=1191523 GN=queG PE=3 SV=1
MKLTNEIVIEKAREIGFDLIGFAPYQTLQEETERLNRWLDRKYHAGMKYMEKNIDKRCDVKNILPEAKSIISLGLNYYINEKHSNLPGHGKISRYAWGKDYHLIVWDKLELLEEELKKLDEGFVAKSYVDTGPVMDKVWAIKSGIGWMGKHSNIINRNMGSWFFIATLINNREFEYSEPAYELCGACRACIDACPTSAIVEDFVVDSNKCISYLTIENKGEIPGEFKGKFDNWLFGCDVCQDVCPWNKKFSMPANEEAFKPAASKEYLLEDIMNMTEEEFKEKFNVSPIKRSKLKGLKRNAQFLIDSESN

SEQ ID NO: 78289 - protein, 313 aa, Melioribacter sp.
  misc_feature (1)..(313): tr|A0A1G1BBI5|A0A1G1BBI5_9BACT Epoxyqueuosine reductase OS=Melioribacter sp. GWF2_38_21 OX=1801612 GN=queG PE= 3 SV=1
MKVKISNEIVIHKAHELGFDLVGFSRSEILSEESSHLQMWLDNGFNASMEYMKRNFEKRQDVKQILPSAKSVISLALNYYTPNQHSTDSNTGKISRYAWGRDYHLVIWDKLSLLEEYLSSLDENFESKSYVDTGPVMDKAWAVRSGIGWLGKNSNVINKEIGSWFFIANIITNCEFNYSEPIADLCGSCTACLDACPTNAIVQPYIVDANRCISFLTIENKGEISNEFKGKFDNWIFGCDVCQDVCPWNKKFSEPTMLQEFQPKGTNLVLDEVINMNEEEFKAKLETSPIKRAKLSGLKRNAAFLFGESLPQE

SEQ ID NO: 78290 - protein, 443 aa, Melissococcus sp.
  misc_feature (1)..(443): tr|A0A374JDV2|A0A374JDV2_9ENTE tRNA epoxyqueuosine(34) reductase QueG OS=Melissococcus sp. OM08-11BH OX=229311 0 GN=queG PE=4 SV=1
MLTHNHLFFFIDCNKHIFTSFKLHSQIAEKSLKYKKVCLILSKESNWRDNALDTHLLKQKIIEASKEIGIDKIGFTTAEPFDHLKDSLIEQKENHHTTGFEHGNIDERLFPELIFDQPQSIISIALAYPTRMNNRLKSVRGEKRGKFARASWGIDYHDILKDRLNKLIDFIKEEASQNLNVTFKPMVDTGELIDVVVAQRAGLGFIGKNGLLITEEFGSYVYLGEIITNIPFEPDMPIENQCGDCTKCIDQCPTSALLGDGRMNAQKCLSYQTQTKGFMPEEYRPKIRSIIYGCDICQEVCPFNKGKNFHFHKEMEPDPEIVTPLLKPILTISNREFKERFGYLAGSWRGKKPIQRNAIIALANVRDKTSIPNLLSCIENDPRPVIRGTAAWSLSVIDPNNRAILDFLIEYFNKETDDEAKEEMRKAIDRMRIQKKNKIIDDF

SEQ ID NO: 78291 - protein, 336 aa, Melittangium boletus
  misc_feature (1)..(336): tr|A0A250IAN0|A0A250IAN0_9DELT Epoxyqueuosine reductase OS=Melittangium boletus DSM 14713 OX=1294270 GN=MEBOL_ 001633 PE=4 SV=1
MPTAHLRQLATEVGFDLVGFARAEPIPPRFFLEWLEAGCAADMDWLGSRAAERLDVSQLLPGARSVIAFATNYYRDASEAADSPIARYARGRDYHSTLRDSLKAFRKRLGRAYPEVHDYGSVDSGPLMEKVWAARAGLGYVGKNGCFITERFGSWVMLAVLILDAEVDAYADGPATDRCGSCRKCLMSCPTGALLGEGRVDARACLSYQTVENRHAEVPESFRVQMDNLIFGCDICQDVCPLNRHPVPTPNERFVPRAVAQLGVMELAALTPEDYDRLVPGTALARAKYDGLRRNAVYALGAAKKAEARSLLERLREDPSEPVRRAALWALLHLNA

SEQ ID NO: 78292 - protein, 307 aa, Meridianimaribacter sp.
  misc_feature (1)..(307): tr|A0A4Q9RNQ1|A0A4Q9RNQ1_9FLAO Epoxyqueuosine reductase OS=Meridianimaribacter sp. CL38 OX=2213021 GN=queG PE= 3 SV=1
MNNQTSKYTKLIKEESKRLGFLSCGISKAEFLEAEAPRLEKWLNANMHGEMRYMENHFDKRLDPTKLVDGSKSVVSLLLNYFPSQTQNTESYKLSKYAYGTDYHFVIKDKLKQLLQFIQDEIGEVSGRAFVDSAPVLDKAWAAKSGLGWIGKHSNLLTQKVGSFYFIAELIIDLELDYDTPTTDHCGSCTACIDACPTEAIVRPYVVDGSKCISYLTIELKDNIPSDFKNKTDDWMFGCDVCQDVCPWNRFSKPHNEPLFNPHPELLEMTKKDWDEITEDTFKKVFKKSAVKRVKFEGLQRNIKFLK

SEQ ID NO: 78293 - protein, 314 aa, Merismopedia glauca
  misc_feature (1)..(314): tr|A0A2T1C0F9|A0A2T1C0F9_9CYAN Epoxyqueuosine reductase OS=Merismopedia glauca CCAP 1448/3 OX=1296344 GN=queG PE=3 SV=1
MVTEITSDAIKQKALEIGFHKVGIAAIDVSRQNEAANYLQNWLELGYQGDMEWMQNPKRQDIYLTMPQVSSVIAVALNYYTPHQRLEGEEYAKISRYGWGRDYHKIMHKKLKFLCSWLEDRGEGILTKYYADTGPISDKFWAQQAGLGWVAKNGNLITREYGSWVFLGEVLTNLELTDDTPHTQHCGSCTRCLEACPTGAITSPYVVDANRCIAYHTIENREEKLPEDITPHLSGWVAGCDICQDVCPWNQRFSQPTNVREFEPYPENLAPKLIELAEISEEKWHQQFTASALRRIKPEMWQRNAKANLKNLDK

SEQ ID NO: 78294 - protein, 306 aa, Mesoflavibacter aestuarii
  misc_feature (1)..(306): tr|A0A2T1NE31|A0A2T1NE31_9FLAO Epoxyqueuosine reductase OS=Mesoflavibacter aestuarii OX=1266046 GN=queG PE=3 S V=1
MSNASTYTKLIKAEAKRLGFLSCGISKAGFLEEEAPRLERWLKSNAHGEMQYMENHFDKRLDPTKLVEDSKSVVSLLLNYYPSEEQNENSYKISKYAYGQDYHHIIKSKLKELHQFIETEIGEVSGRAFVDSAPILDKAWAAKSGLGWIGKHSNLLTQKVGSFYFIAELIIDLELEYDHITTDHCGSCTACIDACPTQAITEPYVVDGSKCISYLTIELKNQIPTEFKSKMDDWMFGCDVCQDVCPWNRFSKPHQEPLFHPKPELLSMSKKDWEEITEDVFKKVFQKSAVKRTKFSGLRRNINFLK

SEQ ID NO: 78295 - protein, 306 aa, Mesoflavibacter sabulilitoris
  misc_feature (1)..(306): tr|A0A2T1NIH6|A0A2T1NIH6_9FLAO Epoxyqueuosine reductase OS=Mesoflavibacter sabulilitoris OX=1520893 GN=queG PE =3 SV=1
MNTKTKYTQLIKTEAKRLGFLSCGISKAQFLEEEAPRLEKWLNKNMHGQMSYMQNHFDKRLDPTKLVEDSKSVISLLLNYYPEQTQIEDSYKLSKYAYGTDYHFVIKDKLKQLLAFINEEIGEVYGRAFVDSAPVLDKAWAAKSGLGWIGKHSNLLSQKTGSFYFIAELIIDLELDYDNPTTDHCGTCTACIDACPTQAIVEPYVVDGSKCISYFTIELKDELPSNMKDKFDDWMFGCDVCQDVCPWNRFSKPHNEPLFNPHPELLSMTKNDWQDITKDVFNKLFKKSAVKRTKFSGLQRNINFLK

SEQ ID NO: 78296 - protein, 307 aa, Mesoflavibacter sp.
  misc_feature (1)..(307): tr|A0A2T1NPH6|A0A2T1NPH6_9FLAO Epoxyqueuosine reductase OS=Mesoflavibacter sp. HG96 OX=2109944 GN=queG PE=3 SV =1
MNNTSKHTRLIKEEAKRLGFLSCGISKAQFLDEEAPRLEQWLNNNMHGKMQYMENHFDKRLDPTKLVEDSKSVISLLLNYYPDQTQTEDSYKLSKYAYGTDYHFVIKDKLKQLLQFIKENIGDVNGRAFVDSAPVLDKAWAAKSGLGWIGKHSNLLSKQTGSFYFIAELIIDLDLDYDNPTTDHCGTCTACIDACPTQAIVQPYVVDGSKCISYFTIELKEELPSTMKNKFDDWMFGCDVCQDVCPWNRFSKPHSEPLFNPHPDLLSMTKKDWDEITEDTFRKIFKKSAVKRTKLSGLNRNINFLKD

SEQ ID NO: 78297 - protein, 308 aa, Mesonia algae
  misc_feature (1)..(308): tr|A0A2W7I9E2|A0A2W7I9E2_9FLAO Epoxyqueuosine reductase OS=Mesonia algae OX=213248 GN=queG PE=3 SV=1
MLNNTSRYTKLIKDEAKRLGFMSCGISKAEFLEEEAPRLENWLHENRNGKMGYMENYFDKRLDPTLLVDDSKSVVSLLLNYYPQNFQTENTYKVSKYAYGQDYHFVIKDKLKHLLNFIKDEIGEVGGRAFVDSAPVLDKAWAAKSGLGWIGKNSNLLSKKTGSFFFIAELIIDLELDYDTPVTDHCGSCTACIDACPTDAIYEPYKVDGSKCISYYTIELKESIPESEKGKFEDWMFGCDICQDVCPWNRFSKPHNEPLFNPHPDLLQMTKDDWEEITKETFQEIFKKSAVKRTKYDGLKRNINFLET

SEQ ID NO: 78298 - protein, 309 aa, Mesonia phycicola
  misc_feature (1)..(309): tr|A0A1M6EUX8|A0A1M6EUX8_9FLAO Epoxyqueuosine reductase OS=Mesonia phycicola OX=579105 GN=queG PE=3 SV=1
MLLTNSEKYTKLIKDEALRLGFMSCGISKAGFLEDEAPRLEKWLNENRNGEMQWMENHFDKRLNPTLLVDDAKSIVSVLLNYYPHEIQQEDSYHLSKYAYGQDYHFVIKDKLKHLLQFIKKEIGEVSGRAFVDSAPVLDKAWAAKSGLGWIGKNSNLLSKKTGSFFFIAELIIDLELEYDTPVTDHCGSCTACIDACPTDAIYEPYKVDGSKCISYYTIELKDSIPASERGKFNDWMFGCDICQDVCPWNRFSKPHTEPLFNPHPDLLQMTKEDWKEITKETFQEIFKKTAVKRTKYDGLKRNINFLES

SEQ ID NO: 78299 - protein, 307 aa, Mesonia sp.
  misc_feature (1)..(307): tr|A0A2D8UKY3|A0A2D8UKY3_9FLAO Epoxyqueuosine reductase OS=Mesonia sp. OX=1960830 GN=queG PE=3 SV=1
MLNQSEKYTKLIKEEALQLGFMSCGISRAEFLEEEAPRLEQWLNENRNGEMSYMENHFDKRLNPSLLVPGAKSVVSLLLNYYPNEFQREDSYKVSKYAYGRDYHFVIKDKLKSLLHFINEEIGEVHGRAFVDSAPVLDKAWAAKSGLGWVGKNSNLLSKKVGSFFFIAELIIDLELEYDTPVTDHCGSCTACIDACPTDAIYEPYKVDGSKCISYYTIELKDSIPESEKGKFEDWMFGCDICQDVCPWNRFSKPHSEPLFDPHPDLLQMTKQDWEEITRETFSEIFRKSAVKRTKYQGLKRNINFLD

SEQ ID NO: 78300 - protein, 312 aa, Mesonia sp.
  misc_feature (1)..(312): tr|A0A2W1KH60|A0A2W1KH60_9FLAO Epoxyqueuosine reductase OS=Mesonia sp. K7 OX=2218606 GN=queG PE=3 SV=1
MLFTSTQEKYTHFIKQEAKNLGFMSCGISKAKFLEEEAPRLEKWLNENRHGQMTYMENHFDKRLDPTKLVEGSKSVISLLLNYFPEKKQNPTSYKISKYAYGKDYHFVIKEKLKSLLTKMQEEIGEIHGRAFVDSAPVLDKAWAAKSGLGWMGKHSNLLTKQVGSFYFIAELIVDIELDYDTPVTDHCGSCTACIDACPTDAIYEPYKVDGSKCISYFTIELKDEIPTSQQGHFQDWMFGCDICQDVCPWNRFSQSHREPLFNPHPELLNFSKEEWEEITKETFNEIFRKSAVKRTKFEGLKRNIAFLKNDI

SEQ ID NO: 78301 - protein, 394 aa, Mesorhizobium albiziae
  misc_feature (1)..(394): tr|A0A1I3WWX4|A0A1I3WWX4_9RHIZ Epoxyqueuosine reductase OS=Mesorhizobium albiziae OX=335020 GN=queG PE=3 SV=1
MRTAGAIADPARLRDLIDREAKKAGFDLVAVTTPDAIPLAPERLAQFVAEGLHGSMEWLAETAPRRGDPSILWPEVRSIIVLAMNYGPDSNPLDILDRPDRGAISVYARNRDYHDVIKGRLKEIAGKLAVRGGADVKVFVDTAPVMEKPLAEAAGIGWQGKHTNLVSREFGSWLFLASIFTTAELTPDTPEGDHCGSCRACLDICPTNAFPAPYRLDARRCISYLTIENKGPIPHEFRKAIGNRIYGCDDCLAACPWNKFARSASEMKLASRDELREPALAQLLQLDDAAFRALFSGSPVKRIGRDRFIRNVLIAAGNSGEPSLVESCRELARDPSPLVRGAAVWALSCLLPPPAFADLASDRAGEETDAEVLAEWDAARGAAAGSPARHGIHA

SEQ ID NO: 78302 - protein, 389 aa, Mesorhizobium albiziae
  misc_feature (1)..(389): tr|A0A5D4GT64|A0A5D4GT64_9RHIZ Epoxyqueuosine reductase OS=Mesorhizobium albiziae OX=335020 GN=queG PE=3 SV=1
MAAALNPVRPDRLRAFLDEEARRQGFDAIAVTRPDAVPLAPERLAAYVEKGRHGSMDWIAETAARRGDPRNLWPQVRSIVMLAMNYGPDRDPLDLMSRKDRAAISVYARHRDYHDVIKGRLKEIAQKLASRSGAEVKVFVDTAPVMEKPLAEAAGIGWQGKHTNLVSREFGSWLFLGSIFTAAELPPDDPERDHCGSCRACLDICPTDAFPAPYQLDARRCISYLTIEHKGPIPHEFREPMGNRIYGCDDCLAVCPWNKFAQAASEARLVARQDLLEPRLADLLTLDDAGFRAFFSGSPVKRIGRDRFIRNVLIAAGNSGERSLATQAEKLLADPSPLVRGAAVWALSRLLPAERLVAALRDLRAVEADGDVLAEIDTVLPAGTTKELS

SEQ ID NO: 78303 - protein, 374 aa, Mesorhizobium alhagi
  misc_feature (1)..(374): tr|H0HJC3|H0HJC3_9RHIZ Epoxyqueuosine reductase OS=Meso rhizobium alhagi CCNWXJ12-2 OX=1107882 GN=queG PE=3 SV= 1
MIDREARLAGFDAVAVVSPDAIPLAPARLAEFVSDGFHGSMGWIEETMLRRANPRTLWPDVRSIIVLAMNYGPDHDPREVLEKPDRGAISVYAQNRDYHDVMKGRLKQIAGKIAAQAGGDVKVFVDTAPVMEKPLAEAAGLGWQGKHTNLVSREHGSWLFLGSIFTTAELAPDAREEDHCGSCRACLDVCPTDAFPAPYRLDARRCISYLTIENKGPIPHEFRQAIGNRIYGCDDCLAVCPWNKFARTASEAKLAARDDLREPALADLLSLDDAAFRTFFSGSPIKRIGRDRFLRNVLIAAGNSGDAALTGQCKAHLDDASALVRGAAVWALSRLLDARGFAYLAAGRVAEEGDADVISEWNQALEAGRIKSHA

SEQ ID NO: 78304 - protein, 395 aa, Mesorhizobium amorphae
  misc_feature (1)..(395): tr|A0A2W5BH46|A0A2W5BH46_9RHIZ Epoxyqueuosine reductase OS=Mesorhizobium amorphae OX=71433 GN=queG PE=3 SV=1
MRTSISEPRSGARPEPEGAALRRLIETEARAQGFEAFAVADPDAIPLAATRLESFVEQGRHGSMAWMAETLARRGHPRGLWPAVRSVVVLGLNYGPASDPREGLAKRDRALISAYARNRDYHEVIKGRLKAIAQKLAVRSGAEVKVFVDTAPVMEKPLAEAAGLGWQGKHTNLVSRAHGSWLFLGTIFTDAALPFDRADADRCGSCHACLSACPTDAFPAPYQIDARRCLSYLTIENKGPIPPEFREAMGNRVYGCDDCLAACPWNKFAQAASEAKLQARADMVEPELAEFLRLDDAGFRLRFSGSPVKRIGRDRFLRNVLVAAGNSGEGALGPLVLALLDDPHPLVRGAAVWAGSRLAPESLQTLASTRLESETDPDVIAEWRLALPEPLPCAS

SEQ ID NO: 78305 - protein, 386 aa, Mesorhizobium amorphae
  misc_feature (1)..(386): tr|G6YHX1|G6YHX1_9RHIZ Epoxyqueuosine reductase OS=Meso rhizobium amorphae CCNWGS0123 OX=1082933 GN=queG PE=3 S V=1
MRTSTSDAAKLRALIDREAQRAGFDAVAVTTPDAIPLAPTRLAEFVADGFHGSMGWIAETLERRSEPAALWPEVRSIVVLAMNYGPEHDPRKLQAKCDRGAISAYAQNRDYHEVMKGRLKEIAGKIVARAGGDVKVFVDTAPVMEKPLAEAAGLGWQGKHTNLVSREHGSWLFLGTIFTTAELVPDTAEDDHCGSCRACLDACPTDAFPAPYRLDARRCISYLTIENKGPIPHEFREKIGNRIYGCDDCLAACPWNKFARTASEAKLVARADLREPPLAELLLLDDAAFRSFFTGSPIKRIGRDRFVRNVLIAAGNSGDFWLTASVRDLLGDASPLVRGAAIWALSRLVPEAEFAERAAAAAQTERDEGVRREWLVAQSNPIEMHA

SEQ ID NO: 78306 - protein, 388 aa, Mesorhizobium australicum
  misc_feature (1)..(388): tr|A0A1X7N7U3|A0A1X7N7U3_9RHIZ Epoxyqueuosine reductase OS=Mesorhizobium australicum OX=536018 GN=queG PE=3 SV =1
MRAAPASRPDTLRPFIDREARRLGFSTVAVTTPDSIPLARERLAAALSAGHHGDMDWLAETFERRAAPAVLWPEVRSVIMLAMNYGPDENPLGLLDRKDRAAISVYARNRDYHDIIKGRLKELAGKIASRAGGDVKVFVDTAPVMEKPLAAAAGLGWQGKHTNLVSREFGSWLFLGSIFTTAELPADTPEVDHCGSCRACLDICPTNAFPAPYRLDARRCISYLTIENKGLIPREFRVAIGNRIYGCDDCLAACPWNKFAAAASEAKLVARDDLKAPHIADLLALDDGAFRAFFSGSPVKRIGRDRFVRNVLVAAGNSGDTSLIPPCRNLLDDPSALVRGAAVWALSRLMGDKAFQALSSDMEAGESDASVREEWAAALGERRERLTA

SEQ ID NO: 78307 - protein, 384 aa, Mesorhizobium australicum
  misc_feature (1)..(384): tr|L0KE07|L0KE07_MESAW Epoxyqueuosine reductase OS=Meso rhizobium australicum (strain HAMBI 3006 / LMG 24608 / WSM2073) OX=754035 GN=queG PE=3 SV=1
MRISTSDASKLRALIDAEARRAGFDAVAVTTPNAIPLAPARLAEFVADGFHGSMDWIAETIARRGEPSTLWPDVRSIIVLAMNYGPDHDPRDVLARRDRGAISVYAKNRDYHEVMKGRLKEIAGKIVARAGGDVKVFVDTAPVMEKPLAEAAGLGWQGKHTNLVSREHGSWLFLGTIFTTAELEPDKPEIDHCGSCRACLDACPTDAFPAPYRLDARRCISYLTIENKGPIPHEFREKIGNRIYGCDDCLAACPWNKFARAASEAKLAARDDLREPPLADLLALDDAGFRAFFSGSPIKRIGRDRFVRNVLIAAGNSCDGALVGVVRDLLGDASPLVRGAAIWALARLVPETEYAERAANGLNSEDDAAVREEWRLARPSRAHA

SEQ ID NO: 78308 - protein, 384 aa, Mesorhizobium ciceri
  misc_feature (1)..(384): tr|A0A143NL62|A0A143NL62_9RHIZ Epoxyqueuosine reductase OS=Mesorhizobium ciceri OX=39645 GN=queG PE=3 SV=1
MRTSTSDAAKLRALIDAEAQRAGFDAVAVTSPDAIPLAPARLAEFVADGFHGSMDWIAETLQRRSEPTALWPQVRSIVVLAMNYGPDHDLREVLAKRDRGAISVYAQNRDYHDVMKGRLKEIAGKLVARAGGDVKVFVDTAPVMEKPLAEAAGLGWQGKHTNLVSREHGSWLFLGTIFTTAELVPDRAEIDHCGSCRACLDACPTDAFPAPYRLDARRCISYLTIENKGPIPHEFREKIGNRIYGCDDCLAACPWNKFARAASEAKLAARDDLREPPLADLLGLDDAAFRAFFSGSPIKRIGRDRFIRNVLIAAGNSGDASLADTVRALLDDASQLVRGAAIWALARLVPDAEYSERAALGLKTESDEAVRDEWRLARPTRANA

SEQ ID NO: 78309 - protein, 384 aa, Mesorhizobium ciceri
  misc_feature (1)..(384): tr|E8TFP6|E8TFP6_MESCW Epoxyqueuosine reductase OS=Meso rhizobium ciceri biovar biserrulae (strain HAMBI 2942 / LMG 23838 / WSM1271) OX=765698 GN=queG PE=3 SV=1
MRTSTSDAAKLRALIDAEAQRAGFDAVAVTSPDAIPLAPARLAEFVADGFHGSMDWIAETLQRRSEPTALWPQVRSIVVLAMNYGPDHDLREMLAKRDRGAISVYAQNRDYHDVMKGRLKEIAGKLVARAGGDVKVFVDTAPVMEKPLAEAAGLGWQGKHTNLVSREHGSWLFLGTIFTTAELVPDRAEIDHCGSCRACLDACPTDAFPAPYRLDARRCISYLTIENKGPIPHEFREKIGNRIYGCDDCLAACPWNKFARAASEAKLAARDDLREPPLADLLGLDDAAFRAFFSGSPIKRIGRDRFIRNVLIAAGNSGEASLSGAVLALLGDPSPLVRGAAIWALARLVPDAEYSERAALGLKTESDEAVRDEWRLARPTRANA

SEQ ID NO: 78310 - protein, 386 aa, Mesorhizobium delmotii
  misc_feature (1)..(386): tr|A0A2P9AAG7|A0A2P9AAG7_9RHIZ Epoxyqueuosine reductase OS=Mesorhizobium delmotii OX=1631247 GN=queG PE=3 SV=1
MRTSISRAQNLRALIDREARRAGFDAVAVTTPHAIPQAPARLAEFVADGFHGSMGWIAETLERRGEPTALWPEVRSIIVLAMNYGPDHDPRAVLVKRERGAISVYALNRDYHDVMKGRLKEIAGKIVARAGGDVKVFVDTAPVMEKPLAEAAGLGWQGKHTNLVSREHGSWLFLGTIFTTAELSPDTPEDDHCGSCRACLDVCPTDAFPAPYRLDARRCISYLTIENKGPIPHEFREKIGNRIYGCDDCLAACPWNKFAQTASEAKLVARADLREPPLADLLALDDAAFRSFFTGSPIKRIGRDRFIRNVLIAAGNSGEPSLGNAVCALLSDASPLVRGAAVWALSRLVPETEFAKCASSALKAEGDEAVRREWRLALANQIEAHA

SEQ ID NO: 78311 - protein, 387 aa, Mesorhizobium ephedrae
  misc_feature (1)..(387): tr|A0A2P7RIC1|A0A2P7RIC1_9RHIZ Epoxyqueuosine reductase OS=Mesorhizobium ephedrae OX=2116701 GN=queG PE=3 SV=1
MRTSTSEAPASVRRFLEREAKLAGFDCVAVTSPDAIPLAAERLADFVRQGLHGSMAWMEEKLARRGDPRTLWPEVRSIVMLAMNYGPAHDPLAVLEQKDSAAISVYAQNRDYHDVVKGRLKGVAGKLAARTGCDVKVFVDTAPVMEKPLAQAAGIGWQGKHTNLVSREHGSWLFLGTIFTTAALAPDRPETDHCGSCRACLDACPTDAFPAPYRLDARRCISYLTIENKGPIPREFREKIGNRIYGCDDCLAVCPWNKFAREASEAKLRAREDLREPKLADLLALDDAAFRTLFSGSPVKRIGRDRFLRNVLVAAGNSDDASLIAPCTGLLDDASPLVRAAAVWALSRLLKAEVLLELMRDRTDADPLVLDELRAAVEAAERQVEDA

SEQ ID NO: 78312 - protein, 384 aa, Mesorhizobium erdmanii
  misc_feature (1)..(384): tr|A0A4Q1VC45|A0A4Q1VC45_9RHIZ Epoxyqueuosine reductase OS=Mesorhizobium erdmanii OX=1777866 GN=queG PE=3 SV=1
MRTSTSDAAKLRALIDAEAHRAGFDAIAVTTPDAIPLAPARLAEFVADGFHGSMDWIAETIARRSEPATLWPEVRSIIVLAMNYGPDHDPRALQARHDRGAISVYAQNRDYHDVMKGRLKEIAGKIVARAGGDVKVFVDTAPVMEKPLAQAAGLGWQGKHTNLVSREHGSWLFLGTIFTTAELAPDRAEIDHCGSCRACLDACPTDAFPAPYRLDARRCISYLTIENKGPIPHEFREKIGNRIYGCDDCLAACPWNKFARAASEAKLAARDDLRAPPLADLLELDDAAFRVFFSGSPIKRIGRDRFIRNVLIAAGNSGDVDLAVPVRALVGDPSPLVRGAAIWALARLVPDAEYSERAATGLKTENDAAVREEWRLARPDRAHA

SEQ ID NO: 78313 - protein, 383 aa, Mesorhizobium hawassense
  misc_feature (1)..(383): tr|A0A330HMY3|A0A330HMY3_9RHIZ Epoxyqueuosine reductase OS=Mesorhizobium hawassense OX=1209954 GN=queG PE=3 SV =1
MRTSTSENLRALIDAEAHRAGFEAVAVTRPDAIPLAPARLAEFVSDGFHGSMEWIAETVQRRAEPSTLWPEVRSIIVLAMNYGPDHDPRGLQARRDRGAISVYAQNRDYHDVMKGRLKEIAGKIVARVGGDVKVFVDTAPVMEKPLAEAAGLGWQGKHTNLVSRAHGSWLFLGTIFTTAELEPDTAEIDHCGSCRACLDACPTDAFPAPYRLDARRCISYLTIENKGPIPREFREKMGNRIYGCDDCLAACPWNKFASAAAEAKLAARADLREPQLSELLALDDASFRAFFSGSPVKRIGRDRFVRNVVIAAGNSSDASLTPIARRLLDDASPLVRGAAIWALSRLLPDREFGDLAATASKTETDVVVRQEWLAALTPPVGAD

SEQ ID NO: 78314 - protein, 384 aa, Mesorhizobium helmanticense
  misc_feature (1)..(384): tr|A0A2T4IPC5|A0A2T4IPC5_9RHIZ Epoxyqueuosine reductase OS=Mesorhizobium helmanticense OX=1776423 GN=queG PE=3 SV=1
MRTSISKNENLRALIDREAKRAGFDAVAVTTPDAIPLAPARLAAFVADGFHGSMDWIAETLKRRGEPAALWPEVRSIVVLAMNYGPDHDPRAVLARRDCGAISVYAQNRDYHEVMKGRLKEIAGKIVARAGGDVKVFVDTAPVMEKPLAEAAGLGWQGKHTNLVSREHGSWLFLGTIFTTAALAPDTAEEDHCGSCRACLDACPTDAFPAPYRLDARRCISYLTIENKGPIPHEFRERIGNRIYGCDDCLAACPWNKFARAASEAKLVARADLREPPLAELLSLDDAAFRAFFTGSPIKRIGRDRFVRNVLIAAGNSGDSSLGNAVRALLDDASPLVRGVAVWALSRLVPNRELAKCAVAGLKTEADETVRNEWRLALAIEAHA

SEQ ID NO: 78315 - protein, 384 aa, Mesorhizobium huakuii
  misc_feature (1)..(384): tr|A0A068DEM8|A0A068DEM8_9RHIZ Epoxyqueuosine reductase OS=Mesorhizobium huakuii 7653R OX=763057 GN=queG PE=3 SV=1
MRTSTSDAAKLRALIDAEAQRAGFDAIAVATPDAIPLAPARLAEFVADGFHGSMDWIAETIARRSEPSTLWPEVRSIVVLAMNYGPDHDPRALQARRDRGAISVYAQNRDYHDVIKGRLKEIAGKIVARAGGDVKVFVDTAPVMEKPLAQAAGLGWQGKHTNLVSREHGSWLFLGTIFTTVELAPDRAEIDHCGSCRACLDACPTDAFPAPYRLDARRCISYLTIENKGPIPHEFREKIGNRIYGCDDCLAACPWNKFARAASEAKLAARDDLRKPPLADLLELDDAAFRAFFSSSPIKRIGRDRFIRNVLIAAGNSGDAALAVPVRALLGDPSPLVRGAAIWALARLVPDAEYAKWAATGLKTENDAAVREEWRLAPPDGAHA

SEQ ID NO: 78316 - protein, 384 aa, Mesorhizobium japonicum; identical to SEQ ID NO: 78312
  misc_feature (1)..(384): tr|A0A3M9X9N8|A0A3M9X9N8_9RHIZ Epoxyqueuosine reductase OS=Mesorhizobium japonicum OX=2066070 GN=queG PE=3 SV= 1

SEQ ID NO: 78317 - protein, 384 aa, Mesorhizobium japonicum
  misc_feature (1)..(384): tr|Q98DM5|Q98DM5_RHILO Epoxyqueuosine reductase OS=Meso rhizobium japonicum (strain LMG 29417 / CECT 9101 / MAF F 303099) OX=266835 GN=queG PE=3 SV=1
MRTSTSDAAKLRALIDAEAHRAGFDAIAVTTPDAIPLAPARLAEFVADGFHGSMDWIAETIARRSEPSTLWPDVRSIVVLAMNYGPDHDPRVLQARHDRGAISVYAQNRDYHDVMKGRLKEIAGKIVARAGGDVKVFVDTAPVMEKPLAQAAGLGWQGKHTNLVSREHGSWLFLGTIFTTAELAPDRAEIDHCGSCRACLDACPTDAFPAPYRLDARRCISYLTIENKGPIPHEFREKIGNRIYGCDDCLAACPWNKFARAASEAKLAARDDLRAPPLADLLELDDAAFRVFFSGSPIKRIGRDRFIRNVLIAAGNSGDVVLAVPVRALVGDPSPLVRGAAIWALARLVPDAEYSERAATGLKAENDAAVREEWRLARPDRAHA

SEQ ID NO: 78318 - protein, 384 aa, Mesorhizobium jarvisii; identical to SEQ ID NO: 78315
  misc_feature (1)..(384): tr|A0A3A5KBX1|A0A3A5KBX1_9RHIZ Epoxyqueuosine reductase OS=Mesorhizobium jarvisii OX=1777867 GN=queG PE=3 SV=1

SEQ ID NO: 78319 - protein, 384 aa, Mesorhizobium kowhaii
  misc_feature (1)..(384): tr|A0A2W7CNA1|A0A2W7CNA1_9RHIZ Epoxyqueuosine reductase OS=Mesorhizobium kowhaii OX=1300272 GN=queG PE=3 SV=1
MRTSTSDPVKLRALIDAEAHRAGFDAVAVTTPDAIPLAPARLAEFVADGFHGSMDWIAETLQRRGEPTALWPQVRSIIVLAMNYGPDHDPREVLAKRDRGAISVYAQNRDYHEVMKGRLKEIAGKLVARAGGDVKVFVDTAPVMEKPLAEAAGLGWQGKHTNLVSREHGSWLFLGTIFTTAELLPDRAEIDHCGSCRACLDVCPTDAFPAPYRLDARRCISYLTIENKGPIPHEFREKIGNRIYGCDDCLAACPWNKFARAASEAKLAARDELREPPLAELLQLDDAAFRAFFSGSPIKRIGRDRFVRNVLIAAGNSGDAALAGAVRVLLDDASPLVRGAAIWALARLVPDAEYSERAATGLKTEGDAAVRDEWRVARPTRAHA

SEQ ID NO: 78320 - protein, 386 aa, Mesorhizobium mediterraneum
  misc_feature (1)..(386): tr|A0A271L4C6|A0A271L4C6_9RHIZ Epoxyqueuosine reductase OS=Mesorhizobium mediterraneum OX=43617 GN=queG PE=3 S V=1
MRTSISKAENLRALIDREARRAGFDAVAVTTPDAIPQAPARLAEFVADGFHGSMGWIAETLERRSEPTALWPEVRSIIVLAMNYGPDHDPRAVLVKRDRGAISVYAQNRDYHDVMKGRLKEIAGKIVARAGGDVKVFVDTAPVMEKPLAEAAGLGWQGKHTNLVSRAHGSWLFLGTIFTTAELAPDTPEDDHCGSCRACLDVCPTDAFPAPYRLDARRCISYLTIESKGPIPHEFREKIGNRIYGCDDCLAACPWNKFAQTASEAKLAARADLREPPLADLLALDDAAFRSLFTGSPIKRIGRDRFVRNVLIAAGNSGDSSLGNAVRALLGDASPLVRGAAVWALSRLVPETEFARRATAAVKAESDDAVQREWRLALANQIEAHA

SEQ ID NO: 78321 - protein, 386 aa, Mesorhizobium metallidurans
  misc_feature (1)..(386): tr|M5EIV0|M5EIV0_9RHIZ Epoxyqueuosine reductase OS=Meso rhizobium metallidurans STM 2683 OX=1297569 GN=queG PE= 3 SV=1
MRTSISKNEPLRALIEREAKRAGFDAIAVTTPDAIPLAPARLAAFVADGFHGSMGWIAETLERRGEPAALWPAVRSIIVLAMNYGPDRDPRAVLAKRDRGAISVYAQNRDYHEVMKGRLKEIAGKIVARAGGDVKVFVDTAPVMEKPLAEAAGLGWQGKHTNLVSREHGSWLFLGTIFTTAELAPDGAEEDHCGSCRACLDACPTDAFPAPYRLDARRCISYLTIENKGPIPQEFRESIGNRIYGCDDCLAACPWNKFARMASEAKLVARADLREPPLAELLSLDDAAFRALFAGSPIKRIGRDRFVRNVLIAAGNSDDFSLADAVRALLGDASPLVRGAAVWALSRLVPGTEFAERARAAMKIESEAAVRDEWLLALPKPIEAHA

SEQ ID NO: 78322 - protein, 376 aa, Mesorhizobium muleiense
  misc_feature (1)..(376): tr|A0A1G8P1A4|A0A1G8P1A4_9RHIZ Epoxyqueuosine reductase OS=Mesorhizobium muleiense OX=1004279 GN=queG PE=3 SV= 1
MRALIDREARRAGFDAVAVTTPDAIPQAPARLAAFVADGFHGSMGWIAETLERRGEPMALWPEVRSIIVLAMNYGPDHDPRAVLGRRQRGAISVYAQNRDYHDVMKGRLKEIAGKIVGHSGSDVKVFVDTAPVMEKPLAEAAGLGWQGKHTNLVSREHGSWLFLGTIFTTAELASDTPEDDHCGSCRACLDACPTDAFPAPYRLDARRCISYLTIENKGPVPHEFREKIGNRIYGCDDCLAACPWNKFARAASEAKLVARADLREPPLADLLALDDASFRSFFSGSPVKRIGRDRFVRNVLIAAGNSGEPSLGNAVRALLGDASPLVRGAAVWALSRLVPTSEFAKSASAAVKAEGDEAVRREWRLALANQIEAHA

SEQ ID NO: 78323 - protein, 390 aa, Mesorhizobium oceanicum
  misc_feature (1)..(390): tr|A0A1L3SMI7|A0A1L3SMI7_9RHIZ Epoxyqueuosine reductase OS=Mesorhizobium oceanicum OX=1670800 GN=queG PE=3 SV= 1
MSPTAAQADTGRLRAFIEGEAVKAGFDVVRITHPAATPQAAGRLSEFLAEGRHGSMDWLAETAERRGAPARLWPDARSVIMLGMNYGPSHDPLSVLSERSAGAVSVYAQNRDYHDVMKGRLKLVASKLAARTGADVKVFVDTAPVMEKPLAEAAGLGWQGKHTNLVSRDLGSWLFLGSIFTTAQLPPDEPEKDHCGSCRACLDVCPTDAFPAPYQLDARRCISYLTIENKGPIPHEFREAIGNRIYGCDDCLAVCPWNKFARTASEAKLAGRDDRRAPALADLLELDDAAFRQTFSGSPIKRIGRDRFLRNVLIAAGNSGDARLAERCAELMRDASALVRGAAIWACGRLLAPEEFERRHVDRVTDPEDEREWEWARRMRATRRSERVDA

SEQ ID NO: 78324 - protein, 384 aa, Mesorhizobium opportunistum
  misc_feature (1)..(384): tr|F7Y8X2|F7Y8X2_MESOW Epoxyqueuosine reductase OS=Meso rhizobium opportunistum (strain LMG 24607 / HAMBI 3007 / WSM2075) OX=536019 GN=queG PE=3 SV=1
MRTSTSDAAKLRALIDAEARRAGFDAVAVTSPDAIPLAPARLAEFVADGFHGSMDWIAETLARRSEPSTLWPEVRSIIVLAMNYGPDHDPRDLLARRDRGAISVYAQNRDYHEVMKGRLKEIAGKIVARAGGDVKVFVDTAPVMEKPLAEAAGLGWQGKHTNLVSREHGSWLFLGTIFTTAELVPDSAEIDHCGSCRACLDACPTDAFPAPYRLDARRCISYLTIENKGPIPHEFREAIGNRIYGCDDCLAACPWNKFARVASEAKLAARDDLREPAIADLLELDDAAFRAFFSGSPIKRIGRDRFVRNVLIAAGNSGDAALAGAVRGLLDDASPLVRGAAIWALARLVPETEYAERAAIGLATENDAAVREEWRLARPNRAQA

SEQ ID NO: 78325 - protein, 387 aa, Mesorhizobium plurifarium
  misc_feature (1)..(387): tr|A0A2T3EVG9|A0A2T3EVG9_MESPL Epoxyqueuosine reductase OS=Mesorhizobium plurifarium OX=69974 GN=queG PE=3 SV= 1
MPGDAGKAENQGRKRQTLTVFLKEEAAAKGFDICRITHPDAIPHAPERLKQFLAAGAHGTMDWLAETAERRAAPRVLWGEVRSIALFGMNYAPEDDPRDILARRDRGAISVYARNRDYHDVVKGRLKEIATRFAARAGEDVKVFVDTAPVMEKPLAEKAGIGWQGKHTNLVSREFGSWLFLGSLFTTAELKLDEPERDHCGSCRSCLDVCPTNAFPAPYRIDARRCISYLTIEHKGPIETELRPLIGNRIYGCDDCLAACPWNKFARSASELKLQARDDLKEPELSFLLTLDDTGFRAFFSGSPVKRIGRDRFVRNALIAAGNSREKSLIPICKTLAADASPTVRGMAVWALSRLISPADLAAFALQCGPETDNEVLSEWKMAGVSR

SEQ ID NO: 78326 - protein, 383 aa, Mesorhizobium plurifarium
  misc_feature (1)..(383): tr|A0A0K2W4I7|A0A0K2W4I7_MESPL Epoxyqueuosine reductase OS=Mesorhizobium plurifarium OX=69974 GN=queG PE=3 SV= 1
MRTSTSENLRALIDAEARRAGFEAIAVTRPDAIPLAPARLAEFVADGFHGSMAWIAETLERRAEPSTLWPEVRSIIVLAMNYGPDRDPRDILARSDRGAISVYAQNRDYHEVMKGRLKEIAGKIVARAGGDVKVFVDTAPVMEKPLAEAAGLGWQGKHTNLVSREHGSWLFLGTIFTTAELEPDQAETDHCGSCRACLDACPTNAFPAPYRLDARRCISYLTIENKGPIPREFREKIGNRIYGCDDCLAACPWNKFATAASEAKLAARADLREPPLSELLALDDAAFRAFFSGSPVKRIGRDRFIRNVLIAAGNSGDASLMPAVRGLLDDGSPLVRGAAIWALSRLLSGREFGDLAAKASKTETDAMVLDEWLAAAANPAKAD

SEQ ID NO: 78327 - protein, 386 aa, Mesorhizobium prunaredense
  misc_feature (1)..(386): tr|A0A1R3V3X7|A0A1R3V3X7_9RHIZ Epoxyqueuosine reductase OS=Mesorhizobium prunaredense OX=1631249 GN=queG PE=3 SV=1
MRTSISRAQNLRALIDRAARRAGFDAVAVTTPDAIPQAPARLAAFVADGFHGSMDWIAETLERRGEPMALWPEVRSIIVLAMNYGPDHDPRAVLDKRQRGAISVYAQNRDYHDVIKGRLKEIAGKIVARSGSDVKVFVDTAPVMEKPLAEAAGLGWQGKHTNLVSREHGSWLFLGTIFTTAELAPDTPEDDHCGSCRACLDVCPTDAFPAPYRLDARRCISYLTIENKGPIPHAFREKIGNRIYGCDDCLAACPWNKFARAASEAKLVARADLREPPLADLLALDDAAFRSFFSGSPVKRIGRDRFVRNVLIAAGNSGQPSLGNAVRALLDDASPLVRGAAVWALSRLVPVSEFAKSATAAVKAEGDEAVRREWRLALADQIEAHA

SEQ ID NO: 78328 - protein, 386 aa, Mesorhizobium qingshengii
  misc_feature (1)..(386): tr|A0A1G5VX46|A0A1G5VX46_9RHIZ Epoxyqueuosine reductase OS=Mesorhizobium qingshengii OX=1165689 GN=queG PE=3 S V=1
MRTSTSDASKLRALIDAEAHRAGFDAVAVTTPDAIPLAPARLAEFVADGFHGSMDWIAETIARRGEPTALWPQVRSIIVLAMNYGPDHDPRGVLAKRDRGAISVYAQNRDYHDVMKGRLKEIAGKIVARAGGDVKVFVDTAPVMEKPLAEAAGLGWQGKHTNLVSREHGSWLFLGTIFTTAELVPDRAEIDHCGSCRACLDACPTDAFPAPYRLDARRCISYLTIENKGPIPHEFRDKIGNRIYGCDDCLAACPWNKFARVASEAKLAARDDLREPPLADLLQLDDAAFRALFSGSPIKRIGRDRFVRNVLIAAGNAGDASLARAVLVLLDDASPLVRGAAIWALARLVPEAEYSQRAATGLKTESDGAVREEWRLARPNPTGAHA

SEQ ID NO: 78329 - protein, 384 aa, Mesorhizobium sanjuanii
  misc_feature (1)..(384): tr|A0A2A6FCT3|A0A2A6FCT3_9RHIZ Epoxyqueuosine reductase OS=Mesorhizobium sanjuanii OX=2037900 GN=queG PE=3 SV= 1
MRTSISKNEPLRALIDREAKRAGFDAIAVTTPDAIPLAPARLAAFVADGFHGSMGWIAETLKRRGEPAALWPEVRSIVVLAMNYGPDGDPRAVLNKRGRGAISVYAQNRDYHEVMKGRLKEIAGKIVARAGGDVKVFVDTAPVMEKPLAEAAGLGWQGKHTNLVSREHGSWLFLGTIFTTAALAPDTAEEDHCGSCRACLDACPTDAFPAPYRLDARRCISYLTIENKGPIPHEFRERIGNRIYGCDDCLAACPWNKFARAASEAKLVARADLREPPLAELLSLDDAAFRAFFSGSPIKRIGRDRFVRNVLIAAGNSGDSSLGNAVRALLDAPSPLVRGAAVWALSRLVPDRELAKCAAAGLKTEADETVRNEWRLALAIEAHA

SEQ ID NO: 78330 - protein, 397 aa, Mesorhizobium soli
  misc_feature (1)..(397): tr|A0A2P7S644|A0A2P7S644_9RHIZ Epoxyqueuosine reductase OS=Mesorhizobium soli OX=1295366 GN=queG PE=3 SV=1
MRTSISDRPERGKPGEGDRLRQMIDREAARAGFDAIAVTTPDSIPQAPALLAEFLDAGFHGSMGWMAETLERRAAPKALWGDVRSIIVLAMNYGPGEDPRALQAMPERGAISVYARNRDYHDVIKGRLKELAGKIVARAGGDVKVFVDTAPVMEKPLAEAAGIGWQGKHTNLVSRQFGSWLFLGTIFTTAEIAPDGREVDHCGSCRACLDACPTHAFPAPYKLDARRCISYLTIENKGPIPHEFRAAMGNRIYGCDDCLAACPWNKFARAASEMKLAARDDLLAPRLADFLSLDDAAFRAFFSGSPVKRIGRDRFVRNALIAAGNSNDRGLIPACESLLSDPSPLVRGAAVWALSCLMEPADFTALAAARQNGEDDAEVREEWALASGRAQAIGEQA

SEQ ID NO: 78331 - protein, 385 aa, Mesorhizobium sp.
  misc_feature (1)..(385): tr|A0A439H3G5|A0A439H3G5_9RHIZ Epoxyqueuosine reductase OS=Mesorhizobium sp. OX=1871066 GN=queG PE=3 SV=1
MRTSTSDRTRLRALIDAEARRAGFEAIAVTRPDAIPLAPARLAEFVADGFHGSMDWIAETVLRRAQPSTLWPEVRSIIVLAMNYGPDRDPRDVLEKRDRGAISVYAQNRDYHDVMKGRLKEIAGKIVARAGGDVKVFVDTAPVMEKPLAEAAGLGWQGKHTNLVSRAHGSWLFLGTIFTTAELEPDKAEIDHCGSCRACLDVCPTDAFPAPYRLDARRCISYLTIENKGPIPVEFREKIGNRIYGCDDCLAVCPWNKFASAAAEAKLAARDDLREPPLSKLLLLDGAAFRAFFSGSPIKRIGRDRFVRNVLIAAGNSGDASLTPIVRGLLDDSSPLVRGAAVWALSRLMPARDFAARAAAALQTEGDATVRDEWFLVLSDPTKDH

SEQ ID NO: 78332 - protein, 396 aa, Mesorhizobium sp.
  misc_feature (1)..(396): tr|A0A1I6ZNG0|A0A1I6ZNG0_9RHIZ Epoxyqueuosine reductase OS=Mesorhizobium sp. YR577 OX=1884373 GN=queG PE=3 SV= 1
MRTSISDKAQRGKPDEAGRLRQLIDREAARAGFAAVAVTTPDAIPQAPMRLAEFVADGFHGSMAWISETLQRRADPSTLWPEVRSIIVLAMNYGPESDPRSLQTQRDRGAISVYAQNRDYHDVMKGRLKEIAGKIVARAGGDVKVFVDTAPVMEKPLAESAGIGWQGKHTNLVSREFGSWLFLGTIFCTAELTPDKADEDHCGSCRACLDACPTDAFPAPYRLDARRCISYLTIENKGPIPQEFRAAIGNRIYGCDDCLAACPWNKFASAASEAKLAARDDLRAPALADFLAMDDAGFRAFFTGSPVKRIGRDRFLRNVLIAAGNSGDVSLVAACESLSVDPSPLVRGAAVWALSRLMEPAAFSALATSARQDDDADVRREWLMATGNHPEIRTHA

SEQ ID NO: 78333 - protein, 383 aa, Mesorhizobium tamadayense
  misc_feature (1)..(383): tr|A0A3P3FA12|A0A3P3FA12_9RHIZ Epoxyqueuosine reductase OS=Mesorhizobium tamadayense OX=425306 GN=queG PE=3 SV =1
MRTSTSDKARLRALIDTEARRAGFDAVAVARPDAIPLAPARLAEFVADGFHGSMEWIAETIERRAEPSTLWPEVRSIIVLAMNYGPDHDPRGALAKRDRGAISVYAQNRDYHDVMKGRLKEIAGKIVARAGGDVKVFVDTAPVMEKPLAEAAGLGWQGKHTNLVSRAHGSWLFLGTIFTTAELEPDKPEEDHCGSCRACLDVCPTDAFPAPYRLDARRCISYLTIENKGPIPHEFREKIGNRIYGCDDCLAVCPWNKFASVASEAKLAARNDLREPPLSELLRLDDATFRSFFSGSPIKRIGRDRFVRNVLIAAGNSGDASLAPIVRGLLDDASPLVRGAAVWALSRLAPRRDFAKLAASALQAEDDATVRDEWLSALPDHAK

SEQ ID NO: 78334 - protein, 386 aa, Mesorhizobium temperatum
  misc_feature (1)..(386): tr|A0A271LE90|A0A271LE90_9RHIZ Epoxyqueuosine reductase OS=Mesorhizobium temperatum OX=241416 GN=queG PE=3 SV= 1
MRTSISKTENLRALIDREARRAGFDAVAVTTPDAIPQAPARLAEFVADGFHGSMGWIADTLKRRGEPTALWPEVRSIIVLAMNYGPDHDPRAVLAKRDRGAISVYAQNRDYHDVMKGRLKEIAGKIVARAGGDVKVFVDTAPVMEKPLAEAAGLGWQGKHTNLVSREHGSWLFLGTIFTTAELAPDTPEDDHCGSCRACLDVCPTDAFPAPYRLDARRCISYLTIENKGPIPHEFREKIGNRIYGCDDCLAACPWNKFAQAASEAKLVARADLREPPLTDLLALDDAAFRSFFTGSPIKRIGRDRFVRNALIAAGNSGEPSLRDAVCALLGDASPLVRGAAVWALSRLVPETEFAKCASAALKAEGDEAVRREWRLALANQIEAHA

SEQ ID NO: 78335 - protein, 386 aa, Mesorhizobium tianshanense
  misc_feature (1)..(386): tr|A0A562N3H1|A0A562N3H1_9RHIZ Epoxyqueuosine reductase OS=Mesorhizobium tianshanense OX=39844 GN=queG PE=3 SV =1
MRTSISRAENLRALIDREAQRAGFDAVAVTTPDAIPQAPARLAEFVADGFHGSMGWIAETLERRGEPTALWPEVRSVIVLAMNYGPDHDPRAVLAKHDRGAISVYAQNRDYHDVMKGRLKEIAGKIVARSGSDVKVFVDTAPVMEKPLAEAAGLGWQGKHTNLVSREHGSWLFLGTIFTTAELAPDTPEDDHCGSCRACLDVCPTDAFPAPYRLDARRCISYLTIENKGPIPHEFREEIGNRIYGCDDCLAACPWNKFARAASEVKLAARDDLREPRLADLLALDDTAFRSFFSGSPIKRIGRDRFVRNVLIAAGNSGDSSLGSAVRALLSDASPLVRGAAVWALSRLVPASGFAKCAAAAVKAESDEAVQREWRLALAKQIEAHA

SEQ ID NO: 78336 - protein, 386 aa, Mesorhizobium waimense
  misc_feature (1)..(386): tr|A0A3A5KEF9|A0A3A5KEF9_9RHIZ Epoxyqueuosine reductase OS=Mesorhizobium waimense OX=1300307 GN=queG PE=3 SV=1
MRTSTSDAAKLRGLIDREAQRAGFDAVAVTTPNAIPLAPARLAEFIADGFHGSMGWIAETLERRGEPAALWPEVRSIVVLAMNYGPDHDPRALQEKRDRGAISAYAQNRDYHEVMKGRLKEIAGKIVARAGGDVKVFVDTAPVMEKPLAEAAGLGWQGKHTNLVSREHGSWLFLGTIFTTAALVPDKAEDDHCGSCRACLDACPTDAFPAPYRLDARRCISYLTIENKGPIPHEFREKIGNRIYGCDDCLAACPWNKFAQAASEAKLVARADLREPPLAELLLLDDAAFRSFFAGSPIKRIGRDRFVRNVLIAAGNSGDYSLAGPVRELLGDASPLVRGAAIWALSRLVPEAEFAEHAAASAQTERDEAVRREWLLAQSNPIEIHA

SEQ ID NO: 78337 - protein, 386 aa, Mesorhizobium wenxiniae
  misc_feature (1)..(386): tr|A0A271KNV7|A0A271KNV7_9RHIZ Epoxyqueuosine reductase OS=Mesorhizobium wenxiniae OX=2014805 GN=queG PE=3 SV= 1
MRTSISRAQNLRALIDREARRAGFDAVAVTTPNAIPQAPARLAEFVADGFHGSMGWIAETLERRGQPTALWPEVRSIIVLAMNYGPDHDPRAVLAKRDRGAISVYAQNRDYHDVMKGRLKEIAGKIVVRAGGDVKVFVDTAPVMEKPLAEAAGLGWQGKHTNLVSREHGSWLFLGTIFTTAELAPDTPEDDHCGSCRACLDVCPTDAFPASYRLDARRCISYLTIENKGPIPHEFREKIGNRIYGCDDCLAACPWNKFARAASEVKLAARDDLREPPLADLLALDDAAFRSFFSGSPIKRIGRDRFVRNVLIAAGNSGEPSLGNAVRALLDDASPLVRGAAVWALSRLVPAQEFAKWATAAVKAERDEAVQREWRMALANQIETHA

SEQ ID NO: 78338 - protein, 395 aa, Metakosakonia sp.
  misc_feature (1)..(395): tr|A0A348DKM2|A0A348DKM2_9ENTR Epoxyqueuosine reductase OS=Metakosakonia sp. MRY16-398 OX=2487150 GN=queG PE=3 SV=1
MECGILAAYFFIVWSVMSEPLDLNQLAHSIKQWGSELGFQQVGIADTDLSASEPKLQAWLDKQYHGEMEWMARHGMMRARPHELLPGTLRVISVRMNYLPANAAFASTLKNPALGYVSRYALGRDYHKLLRNRLKQLGEKIQQHCASLNFRPFVDSAPILERPLAEKAGLGWVGKHSLILNRQAGSFFFLGELLIDLPLPVDQPVEEDCGRCVACLTICPTGAIVEPYTVDARRCISYLTIELEGAIPEEFRPLIGNRIYGCDDCQLICPWNRFSQLTDEADFSPRKALHSPELIELFAWSESWFLKVTEGSAIRRIGHLRWLRNIAVALGNAPWDEANIRALEQRRGEHPLLDEHIEWAIAQQVEKRNACVVEVQTPKKQRLVRVIEKGLIRDA

SEQ ID NO: 78339 - protein, 377 aa, Metallibacterium scheffleri
  misc_feature (1)..(377): tr|A0A4V6RR99|A0A4V6RR99_9GAMM Epoxyqueuosine reductase OS=Metallibacterium scheffleri OX=993689 GN=queG PE=3 SV=1
MSPAPAVPQAILPDYPALRAEIAGWALELGFTALGVSGIELPEDAAHLADWLAQGQHGGMEYMSRHAALRSDPAALHPGTLRVISVRMDYWPESAHDAWQVLGDGTRAYIARYALGRDYHGLMRKRLQALADRIAARIGAFGYRAFVDSAPVLEKALARNAGLGWIGKHTLLLSREAGSYFFLGELFTDLPLPIDAEPGAHCGSCSRCIDICPTQAIVAPRRLDARRCIAYLTIEHKGAIPEELRPMLGNRVFGCDDCQLVCPWNRYARASMLPDFAPRHGLDAALLCELIAWDEATWNARTEGMALRRAGYAGWLRNLAVALGNAPHSARVMQALAARAQHASALVREHVAWALAAQQQKAARGVDQGNNSEAPVV

SEQ ID NO: 78340 - protein, 304 aa, Unknown
  misc_feature (1)..(304): tr|A0A1X7ML51|A0A1X7ML51_9GAMM Epoxyqueuosine reductase OS=methanotrophic bacterial endosymbiont of Bathymodio lus sp. OX=280772 GN=queG PE=3 SV=1
MDTTNNELPQKIKQWGYELGFQQVGITDTNLQQAEQRLQDWLAQGYHADMEYMHKHGLKRSRPALLQPETVSIISVRMDYLPEAHEPMETTLNNPVAAFISRYALGRDYHKVLRKRLQKLAQRIEQEVGVFGYRAFVDSAPVLEKAIAEKAGLGWIGKHSNIINKKAGSWFFLGEIYTTLALPSDIPSHNHCGQCVACIDICPTQAIVAPYQVDARRCISYLTIELKGSIPEELRPLMGNRIYGCDDCQLICPWNRFARISKEADFSPRHNLNSQHLIELFNWTESEFLQKTEGSAIRRIGYQQ

SEQ ID NO: 78341 - protein, 353 aa, Unknown
  misc_feature (1)..(353): tr|A0A1D3RNG5|A0A1D3RNG5_9BACT Epoxyqueuosine reductase OS=methanotrophic endosymbiont of Bathymodiolus azoric us (Menez Gwen) OX=343232 GN=queG PE=3 SV=1
MDKAMNELSQQIKHWGLELGFQQVGITDTDFHQAEQRLQHWVAQGYHADMEYMHKHGLKRSRPALLQPGTVSIISVRMDYLPEAQEPIENTLNNPVAGFISRYALGRDYHKVLRKRLQKLAQRIEQEIGIFGYRAFVDSAPVLEKAIAEKAGLGWIGKHSNIINKKAGSWFFLGEIYTSIPLTIDSPSHNHCGQCTACINICPTQAIIAPYQVDARKCISYLTIELKGSIPEALRSLMGNRIYGCDDCQLICPWNRFARLSTETDFSPRYNLNAQHLIELFNWSETEFLTKTEGSAIRRIGYEQWQRNIAVALGNAPASTEIKAVLNHKISYHSELVKEHVLWALKQEHVLKQ

SEQ ID NO: 78342 - protein, 375 aa, Methylarcula marina
  misc_feature (1)..(375): tr|A0A3R7LNT7|A0A3R7LNT7_9RHOB Epoxyqueuosine reductase OS=Methylarcula marina OX=72022 GN=queG PE=3 SV=1
MPSWTSDRTGGRGARPATAGGQPPDPRGIFTKKKIKAALALEAEAVGFAGMRITTPDAAPEIARRLQSFLEADRHGQMSWMAERTHWRGNPAALWPEARSVIMLAELYTPDHDPLAVLAQPDRAAISVYAQGRDYHDLVKKRLKRLGRWLLEQEPGHEIKVFVDTAPVMEKPLAEAAGLGWQGKHTNLLSRELGSWFFLGAIFTTQELPPDEPEREHCGSCRACLDICPTKAFPAPFQLDARRCISYLTIEHKGPVDPELRELMGNRIYGCDDCLAVCPWNKFAQTGTEMRYRGIVDAPPLEELAILDDAGFRARFSGSPIKRIGRDRFVRNVLYAIGNSGEPRLAEAARPLVNDPDEAVADAARWALLRLARQP

SEQ ID NO: 78343 - protein, 349 aa, Methylibium petroleiphilum
  misc_feature (1)..(349): tr|A2SHE4|A2SHE4_METPP Epoxyqueuosine reductase OS=Meth ylibium petroleiphilum (strain ATCC BAA-1232 / LMG 2295 3 / PM1) OX=420662 GN=queG PE=3 SV=1
MAGLRREARELGFSQIGVADVDLRSAEPGLLAWLAQGFHGSMHYMALHGLKRARPGELVPGTVRVITARMDYLPAALPEGWQTIEFERLRRPEAATVSLYARGRDYHKVLRARLQTLADRLGERLGPFGHRVFTDSAPVLEVELASRSGIGWRGKHTLALSREAGSMFFLGEIYVDLALPLTEPVDAHCGSCRACIDVCPTQAIVGERRVDARRCISYLTIEHDGPIPAELRAPMGNRIYGCDDCQLVCPWNKYATRAVLPDFDTREVFDAPTLLGLWAWSEAEFLKRTEGSAIRRIGPARWRRNLAVALGNAWREQGDPAVAQALQAARYGASELLREHIDWALAQRA

SEQ ID NO: 78344 - protein, 376 aa, Methylibium sp.
  misc_feature (1)..(376): tr|A0A0L6TDV9|A0A0L6TDV9_9BURK Epoxyqueuosine reductase OS=Methylibium sp. NZG OX=1686064 GN=queG PE=3 SV=1
MTDALRVDEPDLDGQALLSDLRSWAATLGFSQIGVADVDLTSAEPGLLAWLDNGFHGSMAYMAAHGLKRARPAELVPGSVRVITARMDYLPRDTPEGWQAVEWRGLHDPARANVSIYARGRDYHKVLRQRLQQLADRLAEAVGPFGHRVFTDSAPLLEVELAARSGIGWRGKHTLALDREAGSMFFLGEICVDLALPLTPPVQPHCGSCSACIDVCPTQAIVDAYRLDARRCISYLTIEHDGPIPVGLRAPIGNRIYGCDDCQLVCPWNKYARKSTLPDFDVRADPGHASLLQLWAWSEADFLRLTEGSAIRRIGFVRWQRNLAVALGNALRGEACEAPGDAVSEGTGQHMRHALSARRDAAGALVREHIDWALER

SEQ ID NO: 78345 - protein, 253 aa, Methylibium sp.
  misc_feature (1)..(253): tr|W7WTY5|W7WTY5_9BURK Epoxyqueuosine reductase OS=Meth ylibium sp. T29-B OX=1437443 GN=queG PE=4 SV=1
MSLYARGRDYHKVLRARLQTLADRLGEQLGPFGHRVFADSAPVLEVELASRSGIGWRGKHTLALSREAGSMFFLGEIYVDLALPLTEPVDAHCGSCRACIDVCPTQAIVGERRVDARRCISYLTIEHDGPIPAELRAPMGNRIYGCDDCQLVCPWNKYATRAVLPDFDTREVFDAPTLLGLWAWSEAEFLKRTEGSAIRRIGPARWRRNLAVALGNAWREQGDPVVAQALQAARDGASELLREHIDWALAQRA

SEQ ID NO: 78346 - protein, 355 aa, Methylobacillus flagellatus
  misc_feature (1)..(355): tr|Q1H1J0|Q1H1J0_METFK Epoxyqueuosine reductase OS=Meth ylobacillus flagellatus (strain KT / ATCC 51484 / DSM 6 875) OX=265072 GN=queG PE=3 SV=1
MPQTLNNWESLAEDIKRWGVTLGFSQIGITDTDLSAAEPHHREWIAQGFHGAMDYMAKHGDKRTRPAELVPGTIRIISARMDYMPPNARDSEVVMQDSRLAFISRYALGRDYHKVLRNRLQKLSDMIAQQVGEFGYRVFTDSAPVLEVELAQKAGLGWRGKHTLLLSRNAGSWFFLGEIYTDLPLPIDKPISGHCGKCTACIDVCPTQAIIAPYQVDARRCISYLTIELKDSIPEHLRPLIGNRVYGCDDCQLTCPWNRFAQVTQQDDFHVRHGLDNISLVELFKWDEVTFNEKMAGSAIYRIGHIQWLRNLAVGLGNAATTPEVIEALEHRRNHPSELVREHVAWALNQHKKKR

SEQ ID NO: 78347 - protein, 355 aa, Methylobacillus rhizosphaerae
  misc_feature (1)..(355): tr|A0A238YMN1|A0A238YMN1_9PROT Epoxyqueuosine reductase OS=Methylobacillus rhizosphaerae OX=551994 GN=queG PE= 3 SV=1
MSQILNNLQTLAADIKRWGLELGFGQIGITDTDLSAAEPRHREWLEKGFHGAMDYMAKHGEKRTRPAELVPGTVRIISARMDYMPPEARDSEEVIQDSNLAFISRYALGRDYHKVLRNRLQKLSEKIAEAIGPFGYRVFTDSAPVLEVELAQKAGLGWRGKHTLLLSRSAGSWFFLGEIYIDLPLPVDEPSSGHCGKCTACIDICPTQAIVAPYQVDARRCISYLTIELKDSIPEQLRPLIGNRVYGCDDCQLTCPWNRFSHLTEQPDFQVRHGLDNISLVELFSWDEATFKDRMAGSAIYRIGHVQWLRNIAVGLGNARTTPEVVQALEDRRHDPSELVREHVAWALKQHEIQS

SEQ ID NO: 78348 - protein, 356 aa, Methylobacillus sp.
  misc_feature (1)..(356): tr|A0A1A9NN46|A0A1A9NN46_9PROT Epoxyqueuosine reductase OS=Methylobacillus sp. MM3 OX=1848039 GN=queG PE=3 SV= 1
MQGHLSYDPQQLAADIKAWGKALGFQHIGITDTDLSTAEPRYREWLEQGFHGAMDYMAKHGSKRTRPGELVPGTVRVISVRMDYRPPEARDSWEVMENADQAFISRYALGRDYHKVLRTRLQQLCDHIASEIGEFGYRAFTDSAPVLEVQLAEKAGLGWRGKHTLLLSREAGSWFFLGEIYTDLPLPVDTPGKNHCGTCQACIDICPTKAIVAPYSVDARRCISYLTIELKESIPEELRPLIGNRVYGCDDCQLVCPWNRFAQLTGEADFQVRHGLDDVTLVELFGWEEEDFRTKMAGSAIYRIGHEQWLRNIAVGLGNAPTTPEVIAALQKRADHPSPLIREHVAWALARHGVIG

SEQ ID NO: 78349 - protein, 360 aa, Methylobacter sp.
  misc_feature (1)..(360): tr|A0A522WQJ8|A0A522WQJ8_9GAMM Epoxyqueuosine reductase OS=Methylobacter sp. OX=2051955 GN=queG PE=3 SV=1
MGISSQQMITLALQIKQWGLELGFQQVGITDTALPEAEAHLQNWLVNNFHGEMDYMQRHGLKRSRPELLYPGTVRIISVRMDYQTESAMAMNQALADPASAYISRYALGRDYHKLMRGRLQKLADKIQAETGSLLPDSMRAFVDSAPVLEKALAEKAGLGWIGKHSNVINRKAGSWFFLGELFTNLPLPLDTPATAHCGECRACLDICPTQAIVAPYQIDARRCVSYLTIELHGSIPEPLRPLLGNRIYGCDDCQIICPWNRFSKLTGEKDFNPRHRLNTRQLLEVFAWTETEFLANTEGSAIRRIGHQRWLRNIAVALGNAPASGLIVDALKPMLKHDSEMVREHVHWALAQQIPNDSA

SEQ ID NO: 78350 - protein, 357 aa, Methylobacter sp.
  misc_feature (1)..(357): tr|A0A2P5MDY3|A0A2P5MDY3_9GAMM Epoxyqueuosine reductase OS=Methylobacter sp. OX=2051955 GN=queG PE=3 SV=1
MHTFDTEKMAQLVLQIKAWGQALGFQQVGITDTQLSEAEQHLQNWLEKGFHGDMDYMHKHGLKRSRPALLEPGTRSIISVRMDYLPESASSMQAQLDDPFTAYISRYSLGRDYHKLMRNRLQKLAERIQQHIGPFGYRAFVDSAPVLEKALAEKAGLGWIGKHSNLINRQAGSWFFLGEIYTDLALPTDSKTGTHCGDCTACLTICPTQAIVAPYQVDAGRCVSYLTIELKGAIPEALRPLIGNRIYGCDDCQLVCPWNRFARLTDEQDFKPRHQLDNTQLVAAFAWSEAEFLAKTEGSAIRRIGYERWLRNLAVALGNAKGSETIVTALKTRMEHVSALVREHVLWALNQQRAKSN

SEQ ID NO: 78351 - protein, 361 aa, Methylobacter tundripaludum
  misc_feature (1)..(361): tr|A0A2S6HBV5|A0A2S6HBV5_9GAMM Epoxyqueuosine reductase OS=Methylobacter tundripaludum OX=173365 GN=queG PE=3 SV=1
MDTSSQKMADLALQIKQWGLELGFQQVGITDTALPEAEAHLQNWLDNGFHGEMDYMQRHGLKRSRPELLHPGTVRIISVRMDYQTESATTMNQALADPASAYISRYALGRDYHKLMRNRLQKLADKIQAGIGSQLPGSMRAFVDSAPVLEKALAEKAGLGWIGKHSNVINRKAGSWFFLGELFTNLPLPVDSPATAHCGACRACLDVCPTQAIIAPYQVDARRCVSYLTIELHGSIPEDLRPLIGNRIYGCDDCQIICPWNRFAKPTGEQDFNPRHRLNTQQLLEVFAWSEAEFLAKTEGSAIRRIGHQRWLRNIAVALGNAPSSPLIIDALKPMLAHESEMVKEHVTWALAQQAANDSAE

SEQ ID NO: 78352 - protein, 361 aa, Methylobacter tundripaludum
  misc_feature (1)..(361): tr|G3IYG1|G3IYG1_METTV Epoxyqueuosine reductase OS=Meth ylobacter tundripaludum (strain ATCC BAA-1195 / DSM 172 60 / SV96) OX=697282 GN=queG PE=3 SV=1
MDTSSQKMADLALQIKQWGLELGFQQVGITDTDLPEAEAHLKNWLDNNFHGEMDYMQRHGLKRSRPELLHPGTLRIISVRMDYQTESAITMNQALADPASAYISRYALGRDYHKLMRNRLQKLADKIQAEIGSQLPGPMRAFVDSAPVLEKALAEKAGLGWIGKHSNVINRKAGSWFFLGELFTNLPLPVDSPATAHCGECRACLDICPTQAIIAPYQVDARRCVSYLTIELHGSIPEDLRPLIGNRIYGCDDCQIICPWNRFAKPTGEQDFNPRHRLNTQQLLEVFAWSEVEFLAKTEGSAIRRIGHERWLRNIAVALGNAPSSPLIIDALKPMLAHESEMVKEHVTWALAQQAANDSAE

SEQ ID NO: 78353 - protein, 361 aa, Methylobacterium aquaticum
  misc_feature (1)..(361): tr|A0A0J6S5V1|A0A0J6S5V1_9RHIZ 4Fe-4S ferredoxin OS=Met hylobacterium aquaticum OX=270351 GN=VP06_25595 PE=4 SV =1
MTRPDAVPALPERLAAWLAAGHHGGMAWMAERTAERAGPARLWPAVRSIVMLGINAGPDGDPLAALQDSSRGAIAVYARRRDYHDVIKGKLKELGGAFAAKAGAEIKVFVDTAPVMEKPLAAAAGLGWQGKHSVLVSRDAGNWLLLGALYTTAALPVDEPEGDHCGRCRRCLDACPTGAFPAPYRLDARRCLAYLTIEHAGPIPEEFRVPMGNRVFGCDDCLAVCPWNKFAVATREARLAARADLAAPPLAELARLDDAAFRRRFAGTPIKRTGRDRFLRNVLIAVGNAGDQSLAGEAERLLEDPSPLVRGMAVWALARLGRLPPAPPDEPDPDVRVEWSRAKNPGVQRASPLAGAGRRPA

SEQ ID NO: 78354 - protein, 362 aa, Methylobacterium aquaticum
  misc_feature (1)..(362): tr|A0A0C6FDQ0|A0A0C6FDQ0_9RHIZ 4Fe-4S ferredoxin OS=Met hylobacterium aquaticum OX=270351 GN=Maq22A_c08420 PE=4 SV=1
MTRPDAVPALPERLSAWLSAGHHGEMAWMEERAAERAEPARLWPAIRSIVMLGMNAGPEGDPLASLADPTRGSVAVYARRRDYHDVIKGKLKELGGAFAAKAGAKVKVFVDTAPVMEKPLAEAAGLGWQGKHSVLVSRKFGNWLLLGAIYTTADLAVDASEPDRCGSCRRCLDACPTNAFPAPYRLDARRCLAYLTIEHEGPIPAEFREPMGNRVFGCDDCLAACPWNKFAAAAREARLAARADLAAPPLAELARLDEASFRQRFAGTPIKRTGRDRFLRNVLIAVGNSGDPDLAGEALRLLDDASPLVRGMAVWALARLGRLPPGPAPDEHDPDVLAEWAAAKNRGVPRASPLAGAEQRPA

SEQ ID NO: 78355 - protein, 381 aa, Methylobacterium brachiatum
  misc_feature (1)..(381): tr|A0A3G2VEQ8|A0A3G2VEQ8_9RHIZ tRNA epoxyqueuosine(34) reductase QueG OS=Methylobacterium brachiatum OX=269660 GN=queG PE=4 SV=1
MRRLVEARAQHLGFCGLRITRPDRLPDLPDRLSRWLEEGAHGTMDWMAERADQRASPVGLWPGLRSILVLAMSYRPEDDPLDLVARTDRGAVAAYARRRDYHEVLKGRLKELGGYLSAKGDVRVKVFCDTAPVMEKTLAEAAGLGWQGKHTVLLSREHGNWLLLGAIYTSAEFEPDAPGRGHCGSCRACLDICPTDAFPAPYRLDARRCISYLTIEHAGPIADEFRTAIGNRVFGCDDCLAVCPWNKFARQAADARLAARADLEAPALADLAELDDASFRKLFAGTPVKRTGRDRFLRNVMIAVGNSGDPRLAGSAIARLDDASPLVRGMAVWACGRLLEPDAVRALHRRHGVAETDSHVRDEWKAATALTELRLGETSPA

SEQ ID NO: 78356 - protein, 381 aa, Methylobacterium brachiatum
  misc_feature (1)..(381): tr|A0A1I3H8C2|A0A1I3H8C2_9RHIZ Epoxyqueuosine reductase OS=Methylobacterium brachiatum OX=269660 GN=SAMN027996 42_01523 PE=4 SV=1
MRRLVEARAQHLGFCGLRITRPDRLPDLPDRLSRWLEEGAHGTMDWMAERADQRASPVGLWPGLRSILVLAMSYRPEDDPLDLVARTDRGAVAAYARRRDYHEVLKGRLKELGGYLSAKGDVRVKVFCDTAPVMEKTLAEAAGLGWQGKHTVLLSREHGNWLLLGAIYTSAEFEPDAPGRGHCGSCRACLDICPTDAFPAPYRLDARRCISYLTIEHAGPIADEFRTAIGNRVFGCDDCLAVCPWNKFARTAADARLAARADLEAPALADLAELDDASFRKFFAGTPVKRTGRDRFLRNVMIAVGNSGDPRLADSAIARLDDASPLVRGMAVWACGRLLEPDAVRALHRRHGVAETDSHVRDEWSAATALTELHLGETSPA

SEQ ID NO: 78357 - protein, 427 aa, Methylobacterium currus
  misc_feature (1)..(427): tr|A0A2R4WFC0|A0A2R4WFC0_9RHIZ Epoxyqueuosine reductase OS=Methylobacterium currus OX=2051553 GN=queG PE=3 SV= 1
MGRGRDGAELVRAGEVAPLLPQPAHRPGGRDGAGRSLRGSGLLTPHALRHFLETRARALGFDALAITRPDAVPALPERLAAWLASGHHGDMAWMEERTGERADPARLWPEVRSIVMLGVNAGPESDPLAALRDPSRGSIAVYARRRDYHDVIKGKLKELGGAFAVKAGAAIKVFVDTAPVMEKPLAAAAGLGWQGKHSVLLSRDFGNWLLLGALYTTAELPADAPEGDHCGRCRRCLDACPTDAFPAPYQLDARRCLAYLTIEHAGPIPPEFRVPMGNRVFGCDDCLAVCPWNKFATATREARLTARDDLAAPPLAELARLDDAAFRRRFAGTPIKRTGRDRFLRNVLIAIGNSGDEGLSGEAERLLGDPSPLVRGMAVWALARLGRLPPAPPPGERDPDVLAEWDLAKNSGVRRASPLAGAGQRPA

SEQ ID NO: 78358 - protein, 356 aa, Methylobacterium dankookense
  misc_feature (1)..(356): tr|A0A564FQV6|A0A564FQV6_9RHIZ Epoxyqueuosine reductase OS=Methylobacterium dankookense OX=560405 GN=queG PE=4 SV=1
MTRPEAVPHLPGRLGAWLAAGAQGDMAWMAERADQRASPPELWPAVRSILVLAMSYRPESDPLALLEARDRGAIAAYAQRRDYHDVLKGKLKELGGYLSAKAGRPVKVFVDTAPVMEKPLAEAAGLGWQGKHTVLISREHGNWLLLGAIYTAAVLDPDAPGRDRCGSCRACLDICPTDAFPGPYRLDARRCISYLTIEHAGPIAPEFRAPMGNRVFGCDDCLAICPWNKFAREAAETRMAARDDLASPPLAELAALDDAGFRARFAGTPVKRTGRDRFVRNVLIAIGNAGDPALCAAALARLDDPAPLVRGMAVWAASRYLGAEALTALHARHGATEADPHVRAEWDAALSAEPAA

SEQ ID NO: 78359 - protein, 391 aa, Methylobacterium frigidaeris
  misc_feature (1)..(391): tr|A0A2G8M8G4|A0A2G8M8G4_9RHIZ Epoxyqueuosine reductase OS=Methylobacterium frigidaeris OX=2038277 GN=queG PE= 3 SV=1
MTPHAPLKPDVLRQFLETRARALGFDALAVTRPDAVPALPERLAAWLAAGHHGDMAWMDERTGERADPARLWPDVRSIVMLGVNAGPDGDPLAALQDPARGSIAVYARRRDYHDVIKGKLKELGGAFAVKAGAEIKVFVDTAPVMEKPLAAAAGLGWQGKHSVLLSRDFGNWLLLGAIYTTAELPADAPEGDHCGRCRRCLDACPTNAFPAPYQLDARRCLAYLTIEHAGPIPPEFRVPMGNRVFGCDDCLAVCPWNKFATATREARLIARDDLAAPPLADLARLDDAAFRTRFAGTPIKRTGRARFLRNVLIAIGNSGDEGLAGEAERLLEDASPLVRGMAVWALARLGRLPPAPPPDEHDPDVLSEWTSAKNSGVQRASPLAGAGQRPA

SEQ ID NO: 78360 - protein, 383 aa, Methylobacterium gnaphalii
  misc_feature (1)..(383): tr|A0A512JN46|A0A512JN46_9RHIZ Epoxyqueuosine reductase OS=Methylobacterium gnaphalii OX=1010610 GN=queG PE=4 SV=1
MVEDRARKLGFDTFAVTRPDSVPGLPDRLARWLVDGHHGDMAWMGDRADQRAAPSALWDDVRSIVMLGLNAAPDQDPLDNLARKDRGTIASYAQRRDYHEVIKGKLKEIGGLLSARSGRPAKVFVDTAPVMEKPLAAAAGLGWQGKHTVLISREFGNWMLLGAIYSAAELEPDAPGRDSCGTCRRCLDICPTGAFPEPYRLDARRCISYLTIEHAGPIPHEFREAIGNRIFGCDDCLAVCPWNKFAERAGEAKMAVRADLASPSLAELARLDDAAFRAFFAGTPVKRTGRDRFLRNVLIAIGNSGDPALAEEAARCLDDPAPVVRGAAVWACGQLLDDDRVGALRAMHAPIERDATVREEWHALNPCPSSAKGREPGAVTSRL

SEQ ID NO: 78361 - protein, 390 aa, Methylobacterium gossipiicola
  misc_feature (1)..(390): tr|A0A1I2R4T4|A0A1I2R4T4_9RHIZ Epoxyqueuosine reductase OS=Methylobacterium gossipiicola OX=582675 GN=queG PE= 3 SV=1
MKGRPPKKVWAGAELRRAVEARARHLGFDSLRITRPDAVPALMQRLPAWLAAGHHGGMAWMQDRADQRADPATLWPGVRSVIVLAMSYTPEESPLDVLTRRDRGAIAAYAQRRDYHEVMKGKLKELGGYLSAKGDVRVKVFVDTAPVMEKPLAEAAGLGWQGKHTVLISRTHGNWLLLGAIYTSAAFDADTPEADHCGSCRRCLDICPTNAFPAPYRLDARRCISYLTIEHQGPIPREFRAAIGNRIFGCDDCLAVCPWNKFAERAGEARLAARDDLAAPPLAELARLDDAAFRVRFAGTPIKRTGRDNILRNVLIAIGNSGSAALAEEAVRCLTDPSPVVRGAAVWAIGRLFGAADLHTIFARAGTDEADDAVRGEWQNALAQQAQNHP

SEQ ID NO: 78362 - protein, 465 aa, Methylobacterium haplocladii
  misc_feature (1)..(465): tr|A0A512IQX7|A0A512IQX7_9RHIZ Epoxyqueuosine reductase OS=Methylobacterium haplocladii OX=1176176 GN=queG PE= 3 SV=1
MVRAPEVAPVLPRDPRRPGAGHGPSRALRGSGFLKTTGRTLTGSDLRAVIEARAKKLGFDTFAVTRPDAVPGLPDRLAQWLAEGHHGEMAWMTERSDERAAPAALWGGVRSIVMVGLNAGPEQDPLASLTRKDRGTIASYAQRRDYHEVIKGKLKEIGGLLSARSGRSAKVFVDTAPVMEKPLAEAAGLGWQGKHTVLVSREHGNWLLLGAIYTAADLEPDAPGRDSCGSCRRCLDICPTDAFPAPYRLDARRCISYLTIEHEGPIPHEFREAIGNRIFGCDDCLAVCPWNKFAAQAGEAKMAARADLASPPLADLVRLDDAGFRARFAGTPIKRTGRDRFLRNVLIAIGNSGDEVLAEEAVACLADPAPVVRGAAVWACGRLLDGQRAGALYAEHAPGESDADVTREWLALNPLPSAGEGGHRVSEGREGAAPSPDPLRGPPSPAEGGGDRHDTSFEKPGTPAA

SEQ ID NO: 78363 - protein, 389 aa, Methylobacterium indicum
  misc_feature (1)..(389): tr|A0A0J6RC08|A0A0J6RC08_9RHIZ Epoxyqueuosine reductase OS=Methylobacterium indicum OX=1775910 GN=queG PE=3 SV =1
MTAAPTPDKLRHFLETRARTLGFDALAVTRPDAVPALPGRLSAWLAAGHHGEMTWMEERTAERADPARLWPDLRSIVMLGMNAGPEGDPLAALADPARGSIAVYARRRDYHDVIKGKLKELGGAFAAKAGAKVKVFVDTAPVMEKPLAEAAGLGWQGKHSVLVSRKFGNWLLLGAIYTTAELSVDAPESDHCGRCRRCLDACPTNAFPAPYRLDARRCLAYLTIEHEGPIPAEFREPMGNRVFGCDDCLAVCPWNKFAAAAREARLSARTDLAAPPLAELARLDEASFRQRFAGTPIKRTGRDRFLRNVLIAVGNSGDPDLAVEALRLLDDAAPLVRGMAVWALARLGRLPPGPPPGETDRDVLAEWDLAKNPGVQRASPLAGAGRRPA

SEQ ID NO: 78364 - protein, 380 aa, Methylobacterium indicum
  misc_feature (1)..(380): tr|A0A147FLC2|A0A147FLC2_9RHIZ Epoxyqueuosine reductase OS=Methylobacterium indicum OX=1775910 GN=queG PE=3 SV =1
MRHFLETRARTLGFDALAVTRPDAVPALPGRLSAWLTAGHHGEMTWMEERTAERADPARLWPDLRSIVMLGMNAGPEGDPLAALADPARGSIAVYARRRDYHDVIKGKLKELGGAFAAKAGAKVKVFVDTAPVMEKPLAEAAGLGWQGKHSVLVSRKFGNWLLLGAIYTTAELSVDAPESDHCGRCRRCLDACPTNAFPAPYRLDARRCLAYLTIEHEGPIPAEFREPMGNRVFGCDDCLAVCPWNKFAAAAREARLSARTDLAAPPLAELVRLDEARFRQRFAGTPIKRTGRDRFLRNVLIAVGNSGRQDLAGEALRLLDDAAPLVRGMAVWALARLGRLPPGPPPDETDRDVLAEWDLAKNPGVQRASPLAGAGRRPA

SEQ ID NO: 78365 - protein, 338 aa, Methylobacterium mesophilicum
  misc_feature (1)..(338): tr|M7YUU2|M7YUU2_9RHIZ Uncharacterized protein OS=Methy lobacterium mesophilicum SR1.6/6 OX=908290 GN=MmSR116_0 474 PE=4 SV=1
MDWMSERADQRARPTGLWPGLRSIVVVAMNYRPENDPLALVALKDRGAVAAYAQRRDYHEVLKGKLKELGGYLSAKGDVRVKVFCDTAPVMEKTLAEAAGLGWQGKHTVLISRAHGNWLLLGAIYTSAEFEPDVSGRDHCGSCRACLDICPTDAFPAPYRLDARRCISYLTIEYAGPIPVGFRPAIGNRVFGCDDCLAVCPWNKFARTSAETRLAARVELDAPPLADLAALDDAAFRSLFAGTPVKRTGRDRFLRNVMIAVGNSGARDLADPAIARLADDSSLVRGMAVWACGQLLEPEVVRALHRRYGPGEADPHVRAEWRAAAGLTEPWADETSAA

SEQ ID NO: 78366 - protein, 389 aa, Methylobacterium nodulans
  misc_feature (1)..(389): tr|B8IMS3|B8IMS3_METNO 4Fe-4S ferredoxin-type domain-co ntaining protein OS=Methylobacterium nodulans (strain L MG 21967 / CNCM I-2342 / ORS 2060) OX=460265 GN=Mnod_54 22 PE=4 SV=1
MTRDGAGLRRLLEERARALGFDALAVTGPEAVPDLPARLSAWLDAGHQAGMGWMGERVAERASPAALWPAVRSIVMLGVNAGPQEDPRAVLAARDRGAIAVYAQRRDYHDVIKGKLKELGGILAARGGADLKVFVDTAPVMEKPLAAAAGLGWQGKNTLLVSREFGTWLLLGAIYTNAELPRDSGIGDRCGSCRRCLDVCPTDAFPAPYRLDANRCIAYLTIEHAGPIAPEFREAMGNRVFGCDDCLAVCPWNKFAQAAREARLSARQDLASPALAELARLDEAAFRARFAGTPVKRTGRARVLRNVLIAIGNSGDATLAAEAERLLDDPSPLVRGMAVWALARLAPERLPPGPPPGEEDPDVLREWRLALNQGVQRASPLAGAGQRPA

SEQ ID NO: 78367 - protein, 363 aa, Methylobacterium organophilum
  misc_feature (1)..(363): tr|A0A2U1EXX1|A0A2U1EXX1_METOR Epoxyqueuosine reductase OS=Methylobacterium organophilum OX=410 GN=C7388_10613 9 PE=4 SV=1
MTRPDRLPDLPGRLSAWLAEGAQGTMDWMAERADQRASPIALWPGVRSILVLAMSYRPEHDPLDLVGRRDRGAVAAYAQRRDYHEVLKGRLKELGGYLSAKGDVRVKVFCDTAPVMEKTLAEAAGLGWQGKHTVLISRGHGNWLLLGAIYTSAEFEPDAPERDHCGSCRACLDVCPTDAFPAPYRLDARRCISYLTIEHAGPIPAAFRAAIGNRVFGCDDCLAVCPWNKFARTAAESRLAARAELASPALADLAELDDAAFRAFFAGTPVKRTGRDRFLRNVMIAIGNSGDPSLAEAAVARLRDPSPLVRGMAVWACGRLLEPETVRALRRQQGEREKDAHVRDEWRAATGLTGSRTDETSAA

SEQ ID NO: 78368 - protein, 335 aa, Methylobacterium oryzae
  misc_feature (1)..(335): tr|A0A089NZM2|A0A089NZM2_9RHIZ Putative iron-sulfur clu ster binding protein OS=Methylobacterium oryzae CBMB20 OX=693986 GN=MOC_3513 PE=4 SV=1
MAERADQRASPVDLWPGLRSILVLAMSYRPEHDPLDLVARPDRGAIAAYAQRRDYHEVLKGRLKELGGYLSAKGDVRVKVFCDTAPVMEKTLAEAAGLGWQGKHTVLISRGHGNWLLLGAIYTSAEFEPDPPERDHCGSCRACLDICPTDAFPAPYRLDARRCISYLTIEHAGPIPAAFRPAIGNRVFGCDDCLAVCPWNKFARTAAENRLAARADLAAPALADLAGLDDAAFRSFFAGTPVKRTGRDRFLRNVMIAIGNSGDPDLAGAAVAALDDASPLVRGMAVWACGRLLAPDAVHALCRLHGDHETDTHVRDEWTAAAALTESPVGETSAP

SEQ ID NO: 78369 - protein, 354 aa, Methylobacterium oxalidis
  misc_feature (1)..(354): tr|A0A512J727|A0A512J727_9RHIZ Epoxyqueuosine reductase OS=Methylobacterium oxalidis OX=944322 GN=queG PE=4 SV =1
MPGLPERLSAWLAAGAHGEMAWMAERTAERTAPAGLWPEVRSVVMLGLSYAPGTNPLDLLARRDRAAIAAYAQRRDYHEVVKGKLKELGGLLAARSGRPVKVFVDTAPVMEKPLAEAAGLGWQGKHTVLISREHGNWLLLGAIYSAAELEPDAPEPEHCGTCRRCLDICPTAAFPEPFRLDARRCLSYLTIEHAGPIPAEFRAPMGNRVFGCDDCLAICPWNKFAQDARATRLAARDDLAAPPLADLARLDDAAFRRLFAGTPVKRTGRDRFLRNVLIAIGNSGDRALAAEAARLLDDPAPLVRGMAVWACGRLLDRNACADLHARSGRGEADPHVLAEWRAALATRDEETPLP

SEQ ID NO: 78370 - protein, 354 aa, Methylobacterium phyllostachyos
  misc_feature (1)..(354): tr|A0A1G9WRD9|A0A1G9WRD9_9RHIZ Epoxyqueuosine reductase OS=Methylobacterium phyllostachyos OX=582672 GN=SAMN05 216360_10483 PE=4 SV=1
MDWMEERADQRARPTALWPGLRSILVLAMSYRPEQDPLALVAQRERGAVAAYAQRRDYHEVLKGKLKELGGYLSAKGDVRVKVFCDTAPVMEKTLAEAAGLGWQGKHTVLISRDHGNWLLLGAIYTSAEFEPDGPGRDHCGSCRACLDVCPTDAFPAPYRLDARRCISYLTIEHAGPIPVAFRPAIGNRVFGCDDCLAVCPWNKFARTAAETRLAARSDLAAPPLADLAALDDAAFRGLFAGTPVKRTGRDRFLRNVMIAVGNSGSPALAEAAVARLTDASPLVRGMAVWACGRLLEPAAVRTLHRRHGPGEADLHVRDEWRTALGLAHGDLGSKHVAHDGARCSPLPGGRGLG

SEQ ID NO: 78371 - protein, 379 aa, Methylobacterium platani
  misc_feature (1)..(379): tr|A0A179S009|A0A179S009_9RHIZ Epoxyqueuosine reductase OS=Methylobacterium platani OX=427683 GN=queG PE=3 SV= 1
MRGFLETRARALGFDALAVTRPDAVPALPERLAAWLAAGHHGDMGWMEERTGERADPRRLWPEVRSIVMVGANAGPDGDPLAALGDPSRGSISVYARRRDYHDVVKGKLKELGGAFAAKAGVKVKVFVDTAPVMEKPLAAAAGLGWQGKHSVLVSRDFGNWLLLGAIYTTAELAPDAPEADRCGRCRRCLDACPTDALPAPYRLDARRCLAYLTIEHEGPIPEEFRAPMGNRVFGCDDCLAVCPWNKFAQAAREARLSARADLAAPALAELARLDDAGFRARFAGTPVKRTGRDRFLRNVLIAIGNSGDAALAGEALRLLDDPAPLVRGMAVWALARLGRLPPAPDDERDPDVLAEWARAKNPGVRRASPLAGAGRRPA

SEQ ID NO: 78372 - protein, 335 aa, Methylobacterium pseudosasicola
  misc_feature (1)..(335): tr|A0A1I4PCZ7|A0A1I4PCZ7_9RHIZ Epoxyqueuosine reductase OS=Methylobacterium pseudosasicola OX=582667 GN=SAMN05 192568_102414 PE=4 SV=1
MEERADQRASPIGLWPGLRSILVLAMSYRPEDDPLDLVTRTDRGAVAAYARRRDYHEVLKGRLKELGGYLSAKGDVRVKVFCDTAPVMEKTLAEAAGLGWQGKHTVLLSREHGNWLLLGAIYTSAEFEPDAPGRGHCGSCRACLDICPTDAFPAPYRLDARRCISYLTIEHVGPIADEFRTAIGNRVFGCDDCLAVCPWNKFARTAADARLAARADLEAPALADLAELDDASFRKLFAGTPVKRTGRDRFLRNVMIAVGNSGDPRLAESAIARLNDDSPLVRGMAVWACRRLLEPGAVQALHRRHAPTETDSHVRDEWIAATALTETRAGETSPA

SEQ ID NO: 78373 - protein, 363 aa, Methylobacterium radiotolerans
  misc_feature (1)..(363): tr|B1M6M3|B1M6M3_METRJ 4Fe-4S ferredoxin-type domain-co ntaining protein OS=Methylobacterium radiotolerans (str ain ATCC 27329 / DSM 1819 / JCM 2831 / NBRC 15690 / NCI MB 10815 / 0-1) OX=426355 GN=Mrad2831_3132 PE=4
MTRPDRLPDLPGRLSAWLAEGAQGTMDWMAERADQRASPIALWPGVRSILVLAMSYRPEHDPLDLVGRRDRGAVAAYAQRRDYHEVLKGRLKELGGYLSAKGDVRVKVFCDTAPVMEKTLAEAAGLGWQGKHTVLISRGHGNWLLLGAIYTSAEFEPDAPERDHCGSCRACLDVCPTDAFPAPYRLDARRCISYLTIEHAGPIPAAFRAAIGNRVFGCDDCLAVCPWNKFARTAAESRLAARAELAAPSLADLAGLDDAAFRAFFAGTPVKRTGRDRFLRNVMIAIGNSGDPSLAEAAVARLRDPSPLVRGMAVWACGRLLEPETVRALRRQQGERETDAHVRDEWRAATGLTGSRTDETSAA

SEQ ID NO: 78374 - protein, 111 aa, Methylobacterium sp.
  misc_feature (1)..(111): tr|A0A519XQU5|A0A519XQU5_9RHIZ DUF1730 domain-containin g protein (Fragment) OS=Methylobacterium sp. OX=409 GN= EOO66_21865 PE=4 SV=1
MAQDKLEDRIKAKAAELGFAACGIARADAAPRAGERLREWLAEGRHGDMIWMESRAEQRSSPKGLWPEVRSVIALGMSYAPAQDPMALAEHPTRGRISVYAQGGDYHDVVK

SEQ ID NO: 78375 - protein, 363 aa, Methylobacterium sp.
  misc_feature (1)..(363): tr|A0A1I6TWR9|A0A1I6TWR9_9RHIZ Epoxyqueuosine reductase OS=Methylobacterium sp. yr668 OX=1761801 GN=SAMN044878 45_11075 PE=4 SV=1
MTRPDRLPDLPGRLSAWLAEGEQGTMDWMAERADQRASPIALWPGVRSILVLAMSYRPEHDPLDLVARRDRGAVAAYAQRRDYHEVLKGRLKELGGYLSAKGDVRVKVFCDTAPVMEKTLAEAAGLGWQGKHTVLISRGHGNWLLLGAIYTSAEFEPDPPEPDCCGSCRACLDVCPTDAFPAPYRLDARRCISYLTIEHAGPIPAAFRAAIGNRVFGCDDCLAVCPWNKFARTAAESRLAARADLAAPALADLAGLDDAAFRTFFAGTPVKRTGRDRFLRNVMIAIGNSDDPSLAEAAVARLRDPSPLVRGMAVWACGRLLAPEAVRALGRQHGDSETDAHVRDEWRAATGLTEPRTDETSAA

SEQ ID NO: 78376 - protein, 362 aa, Methylobacterium tarhaniae
  misc_feature (1)..(362): tr|A0A0J6TFR5|A0A0J6TFR5_9RHIZ 4Fe-4S ferredoxin OS=Met hylobacterium tarhaniae OX=1187852 GN=VQ03_01335 PE=4 S V=1
MTRPDAVPDLPGRLASWLAAGHHGGMGWMEERSGERADPARLWPEVRSIVMLGVNAGPDGDPLAALAEPSRGSIAVYARRRDYHDVIKGKLKELGGAFAAKAGAEIKVFVDTAPVMEKPLAAAAGLGWQGKHSVLLSRDFGNWLLLGALYTTAELPADEPEGDHCGRCRRCLDACPTDAFAGPYRLDARRCLAYLTIEHAGPIPAEFRVPMGNRVFGCDDCLAVCPWNKFAAATREARLMAREELAAPPLAELARLDDAAFRTRFAGTPIKRTGRDRFLRNVLIAIGNSGDASLAGEAGRLLEDPSPLVRGMAVWALARLGRLPPAPPAEEQDADVLAEWALAKNQGVQRAGPLAGAGPRPA

SEQ ID NO: 78377 - protein, 356 aa, Methylobacterium variabile
  misc_feature (1)..(356): tr|A0A0J6V6V2|A0A0J6V6V2_9RHIZ 4Fe-4S ferredoxin OS=Met hylobacterium variabile OX=298794 GN=VQ02_18970 PE=4 SV =1
MPALPERLSAWLAAGHHGGMAWMEERTGARADPAVLWPDVRSIVMLGVNCGPEGDPLAALSDPLRGSIAVYARRRDYHDVIKGKLKELGGAFAARAGAEIKVFVDTAPVMEKPLAAAAGLGWQGKHSVLVSREFGNWLMLSAIYTTADLPVDAPEGDRCGRCRRCLDACPTDAFAGPYRLDARRCLAYLTIEHAGPIPPEFRAPMGNRVFGCDDCLAVCPWNKFAAATREARLMAREDLSAPPLAELARLDDAAFRTRFAGTPIKRTGRDRFLRNVLIAIGNSGDETLAGEAERLLEDASPLVRGMAVWALARLGRLPPAPPPGEQDLDVLAEWDLAKNPGAQRASPLAGAGQRPA

SEQ ID NO: 78378 - protein, 388 aa, Methylobrevis pamukkalensis
  misc_feature (1)..(388): tr|A0A1E3H287|A0A1E3H287_9RHIZ Epoxyqueuosine reductase OS=Methylobrevis pamukkalensis OX=1439726 GN=queG PE=3 SV=1
MTADPLRAARDRAERLGFGALRVTTPERVAEAGLRLREAIAEGHHGTMDWLADTADRRADPRLVWPDVRSVVMLGLNYGPEGDALANLADPSVANISVYARGRDYHDVIKGKLKEIAGLVERDTGAKVKVFVDTAPVMEKPLAASAGLGWQGKHTNLVSRDFGSWLFLGAIFCAAELVPDAPEDDRCGSCRACLDACPTNAFPAPYRLDARRCISYLTIEHAGPIPAEFRAAIGNRIYGCDDCLAVCPWNKFAQTGAEMKLSARADLMAPPIADLLGFDDTAFRERFSGSPVKRIGRNRFLRNLLIAAGNSGTGALGGKVTALLDDPDPVVRGTAVWAAGRLLPAEDLAALGASRLDQETDPEVRAEWDAVLGPRPADETGDRGGKAC

SEQ ID NO: 78379 - protein, 366 aa, Methylocaldum marinum
  misc_feature (1)..(366): tr|A0A286P3P2|A0A286P3P2_9GAMM Epoxyqueuosine reductase OS=Methylocaldum marinum OX=1432792 GN=queG PE=3 SV=1
MTSSALDYSALAAKIKTWGRELGFQQVGVADTDLSAAEKRLRAWLKDGFHGEMDYMARHGTKRSRPDELVPGTLRVISVRMDYLPEERTAVRERLQDPAAAFISRYVLGRDYHKVLRRRLQQLAGRVAAEIGPFGYRVFVDSAPVLEKPLAAKAGLGWIGKHTNLINRKAGSMFFLGEIYTDVPLPTDAETSDHCGSCTACIDVCPTRAIVAPYRLDARRCISYLTIELRGQIPEEFRPAIGNRIYGCDDCQLVCPWNRYARLTEEADFMPRHGLDVAGLIELFHWDEATFLHRTEGSAIRRIGYECWIRNVAVALGNAPPPIEVLETLASRMDDPSPLIREHVRWALQRNRSRGKPALVADSPAR

SEQ ID NO: 78380 - protein, 369 aa, Methylocaldum sp.
  misc_feature (1)..(369): tr|A0A4R7A000|A0A4R7A000_9GAMM Epoxyqueuosine reductase OS=Methylocaldum sp. 0917 OX=2485163 GN=queG PE=3 SV=1
MTSSARDYSALAAKIKTWGKELGFQQVGIADTDLSAAEQQLQEWIDEGFHGEMDYMARHGTKRSRPEELVPGTLRVISVRMDYLPENRTTVRERLDDQTAAFISRYALGRDYHKVLRKRLQQLAERIAVEIGPFGYRVFVDSAPVLEKALAAKAGLGWIGKHTNLINRKAGSMFFLGEIYTDLPLPIDAETTNHCGSCTACMEVCPTQAIVAPYRLDARRCISYLTIELRGPIPEEFRAAIGNRIYGCDDCQLVCPWNRYARLTEEADFMPRHGLDTAGLIEFFHWDEATFLQKTEGSAIRRIGYECWIRNVAVALGNAATSTEIVDALRARTDDSSPLIREHVRWALARHSSNERQPHRAGHPASSTS

SEQ ID NO: 78381 - protein, 383 aa, Methylocapsa palsarum
  misc_feature (1)..(383): tr|A0A1I3XJM3|A0A1I3XJM3_9RHIZ Epoxyqueuosine reductase OS=Methylocapsa palsarum OX=1612308 GN=SAMN05444581_10 3194 PE=4 SV=1
MCKIAPPQAPEGAPARLDAWLLSGAAGDMDWMAAEQARRADPRVLWPEVESIIVVGMNYGPPDNPLAALEHKSAGGISVYARHRDYHDVLKGKLKLLASWFASAAQRDGMNGAEVKVFVDTAPVMEKPLAQAAGLGWQGKHTNLVSRELGSWLFLGSMFTNLALAPDPPEADHCGHCRACLDSCPTGAFPRPYVLDARRCISYLTIEHKGHIGAELRPLIGNRIYGCDDCLAVCPWNKFAEAAREAKLQARPELCAPPLADLLRLDDAAFRTFFAGSPIKRIGSARFLRNVLIAAGNSGESSLIEPVADKLAAASPLVRAMAVWALGRLVSPERLREWARAQRAQRAREQDGAVAAEWSLALGPGVGACLTFDATEPEDKRPS

SEQ ID NO: 78382 - protein, 376 aa, Methyloceanibacter caenitepidi
  misc_feature (1)..(376): tr|A0A0A8JYW7|A0A0A8JYW7_9RHIZ Epoxyqueuosine reductase OS=Methyloceanibacter caenitepidi OX=1384459 GN=queG P E=3 SV=1
MGQSLKQTIAERAEALGFDVMRITGADAPARIGSELDAFLAQGREGDMGWLKDTAERRKSPQALWPDVRSVILLGTNYGGPEDPLASLRDASRGAVSIYAKRADYHDVIKGKLKQLARQIQALAGGDVKVFVDTAPVMEKPLAAKAGLGWQGKHTNLVSREFGSWLFLGSIFTTADIEADAPEIDHCGACCRCLDACPTKAFTAPYEIDARRCISYLTIEHKGHIAREFRAAMGNRIYGCDDCLAVCPWNKFAQASHETKLAIRPETDDPPLAEILALDDAAFRERFRGTPIKRTGRDRFVRNALIAAGNAADTSLVPHVEALIDDASPLVRAMAAWALQRLDPARSDTMRAERLAAETDSAVRAEWQETAGALVP

SEQ ID NO: 78383 - protein, 376 aa, Methyloceanibacter methanicus
  misc_feature (1)..(376): tr|A0A1E3W242|A0A1E3W242_9RHIZ Epoxyqueuosine reductase OS=Methyloceanibacter methanicus OX=1774968 GN=queG PE =3 SV=1
MVQSLKARIAERAEALGFDAMRITTADSPDAMGTALDAFLAQGREGDMGWLKDTAERRKSPRALWPDARSIILLGLNYGGPAGPFAALRNASHGAVSIYAKRADYHDVIKGKLKQLAGHVQALAGGDVKVFVDTAPVMEKPLAAKAGLGWQGKHTNLVSRAFGSWLFLGSIFTTAGLEPDVPEIDHCGACRRCLDACPTDAFTAPYEIDARRCISYLTIEHKGHIAPEFREAMGNRIYGCDDCLAVCPWNKFAKTGHDAKLAIRPQADDPPLAEILALDDAGFRDRFRGTPIKRTGRDRFVRNALIAAGNAADASLTCPVETLLDDASPLVRAMAVWALQRLDPDRSAALVSARLSTETDPHVRAEWQAGAGKGAS

SEQ ID NO: 78384 - protein, 402 aa, Methyloceanibacter sp.
  misc_feature (1)..(402): tr|A0A353IMC8|A0A353IMC8_9RHIZ Epoxyqueuosine reductase OS=Methyloceanibacter sp. OX=1965321 GN=queG PE=3 SV=1
MPISISESRPDLRVPMRHAAGGASPVMARSLKARIAERAEALGFDAMRITTADGPDAMGAALDAFLADEREGDMGWLRDTAERRKSPRALWPDARSIILLGMNYGAPKDPFAALQNAAHGTVSIYAKRADYHDVIKGKLKQLAGQVLALAGGDVKVFVDTAPVMEKPLAAKAGLGWQGKHTNLVSREFGSWLFLGSIFTTVGLEPDAPETDHCGACRSCLDACPTNAFTAPYEIDARRCISYLTIEHKGHIAPEFREAMGNRIYGCDDCLAVCPWNKFAKDSHEVKLAVLPQADDPPLAEILGLDDAAFRDRFRGTPIKRTGRDRFVRNALIAAGNANDASLVRHVEALIDDASPLVRAMAVWAILRLDPDRSAALRLARLRGETDRQVRAEWQAGASVSTP

SEQ ID NO: 78385 - protein, 376 aa, Methyloceanibacter stevinii
  misc_feature (1)..(376): tr|A0A1E3VQ62|A0A1E3VQ62_9RHIZ Epoxyqueuosine reductase OS=Methyloceanibacter stevinii OX=1774970 GN=queG PE=3 SV=1
MGQSLKRIIAERAEALGFDAVRITGADAPERMGPALDAFLAQGREGDMGWLKDTAQRRKSPHALWPHARSIILLGTNYGGSADPLASLQDASRGAVSIYAKRADYHDVIKGKLKQLAGQIQALAGGDVKVFVDTAPVMEKPLAAKAGLGWQGKHTNLVSRDFGSWLFLGSIFTTADIEADAPEIDHCGACRRCLDACPTKAFTAPYEIDARRCISYLTIEHKGHIAPEFRAAMGNRIYGCDDCLAVCPWNKFAQASHETRLAIRPETDDPPLAEILALDDAEFRTRFRGTPIKRTGRDRFVRNALIAAGNARDSSLVPHVEALIDDASPLVRAMAAWALQRLDPAKSDTLRVERLAAETDGAVRAEWQVTESALVP

SEQ ID NO: 78386 - protein, 372 aa, Methyloceanibacter superfactus
  misc_feature (1)..(372): tr|A0A1E3W7H5|A0A1E3W7H5_9RHIZ Epoxyqueuosine reductase OS=Methyloceanibacter superfactus OX=1774969 GN=queG P E=3 SV=1
MAQSLKSKIADAAKALGFDAVRFTAADAAPDAGANLDAFLAEGRHGDMGWLADTADRRKTPRALWADARSVILLGLNYGRGGDPLAILDERSRGAISIYAQGADYHDAIKTKLKSLAVQVQMLAGGEVKVFVDTAPVMEKPLAAEAGLGWQGKHTNLVSREFGSWLFIGSIFTSVEIAPDEAEDDHCGACRRCLDICPTGALPSPHRMDARACISYLTIEHKGHIAPRYRAAMGNRIFGCDDCLAVCPWNKFAQASHEAKLAVRAESDNPKLAELLTLDDAAFRLRFRGTPIKRTGRDRFVRNVLIAAGNSRDVDLVPLVEARLDDDSPLVRAMAVWALARLAPARLQALRSAFAANETDPAVRDEWLAVAA

SEQ ID NO: 78387 - protein, 386 aa, Methylocella silvestris
  misc_feature (1)..(386): tr|A0A2J7TMQ4|A0A2J7TMQ4_METSI Epoxyqueuosine reductase OS=Methylocella silvestris OX=199596 GN=queG PE=3 SV=1
MNERLAARLEAKAKELGFDVLKITQPSVGGAGARLAEWIEAGFAGEMDWMAETAERRADPALIFPQARSAIMLGVNYGPAANPLAGLAQKSAGNLSVYARNRDYHDLIKGRLKQLAGFLSAAARAAGLEAPQIKVFVDTAPVMEKPLAQAAGLGWQGKHTNLVSREFGSWLFLGSIFTSLELPADQPERDHCGNCSACLDICPTQAFPAPHVLDARRCISYLTIEHKGHIAPEFREKIGNRIYGCDDCLAVCPWNKFAQDAREIRLQPRDDMSAPPLAKLLRLNEAAFRDLFSGSPVKRIGFARFMRNVLIAAGNSGAPELGPEALRHLDAASPLMRAMAVWALSRLAPDLLADHNALAARETDVGARREWAAAQNAPDIEKGRLS

SEQ ID NO: 78388 - protein, 366 aa, Methylocella silvestris
  misc_feature (1)..(366): tr|B8EJ74|B8EJ74_METSB Iron-sulfur cluster binding prot ein OS=Methylocella silvestris (strain DSM 15510 / CIP 108128 / LMG 27833 / NCIMB 13906 / BL2) OX=395965 GN=Ms il_3682 PE=4 SV=1
MKITRPSVGGAGARLAEWVEAGFAGEMDWMAETAERRAEPARIFPQARSAIMLGVNYGPAEDPLAGLAQKSAGNLSVYARNRDYHDLIKGRLKQLAGFLSAAARGAGLDAPQIKVFVDTAPVMEKPLAQAAGLGWQGKHTNLVSREFGSWLFLGSIFTSLDLPANEPERDHCGNCSACLDICPTQAFVGPYVLDARRCVSYLTIEHKGHIAREFRDKIGNRIYGCDDCLAVCPWNKFAQDAREIALQSRDDLRAPPLAKLLRLNEAAFRTLFSGSPVKRIGFARFMRNVLIAAGNSGAAELSEEVVRHLPSPSPLVRAMAVWALSRLAPDSLADHGALATRETDVDVRREWAAAQSAADIKKGRLS

SEQ ID NO: 78389 - protein, 339 aa, Methylocella tundrae
  misc_feature (1)..(339): tr|A0A4U8Z1I4|A0A4U8Z1I4_METTU Epoxyqueuosine reductase OS=Methylocella tundrae OX=227605 GN=queG PE=4 SV=1
MDWLEETQERRSDPRSLWPEAASIVMLAANYGPPGDPLAALADRSAGNISVYARHRDYHDVIKGRLKQLASWLASAAEGQGFEAPQFKVFVDTAPVMEKPLAQAAGLGWQGKHTNLVSRDFGSWLFLGSIFTNLPLTEDAPERDHCGQCRACLDICPTQAFPRPYALDARRCISYLTIEHKGHIAEEFRAAIGNRIYGCDDCLAVCPWNKFAKTARDIKLLPRGDLLAPALSDLLRLDDAAFRALFAGGPVKRIGFSRFSRNVLIAAGNSGDFSLAELVAEKLGDVSPLVRAMAVWALARLAPEGIAGLARVWLPRETDADVRREWAAAMALSEENAPD

SEQ ID NO: 78390 - protein, 358 aa, Methylococcaceae bacterium
  misc_feature (1)..(358): tr|A0A351KUD2|A0A351KUD2_9GAMM Epoxyqueuosine reductase OS=Methylococcaceae bacterium OX=1933926 GN=queG PE=3 SV=1
MDLKQIQTDIKAWAAEFGFDRLGVARLQTQEALKFLDDWLARGRHGEMAYMARHRALRADPSQWVPGALSVLSVRMDYLPMQLEDAMARLDDGEQAAVSVYALGRDYHKLMRRRLQRLASRMEAEIGPFGYRVFSDSAPLFEKSFAQDAGLGWIGKHTNLIDRDAGSFFFLGEIVTDLPLPEDRPVSAHCGSCSACITACPTAAILAPYQLDARRCISYLTIELKGTIPLEFRQSIGNRIYGCDDCQLVCPWNRYAQITREADFLPRQGLDRIAMVELFAWSEDEFQQKLEGSSIRRIGYESWLRNLAIGLGNGPPTSRGIAALKSRSDDVSPVVREHVAWALGELAVRAKELGNSDI

SEQ ID NO: 78391 - protein, 366 aa, Methylococcaceae bacterium
  misc_feature (1)..(366): tr|A0A1Z8WUR6|A0A1Z8WUR6_9GAMM Epoxyqueuosine reductase OS=Methylococcaceae bacterium TMED69 OX=1986766 GN=que G PE=3 SV=1
MRKNQVKHPKRLNALIQKFELLAKDLGFDRLAICDASVRFDKETYVDWIEKKFNGSMKYLEKNIEMRLAPRQIRPSTRSIICVTANYLTKPLSELISKIQDDRKGYISAYATGRDYHKIIRKQLVKLSKKLEEEIEPSGYRVFTDSAPIFEKPLARYAGLGWIGKNTLLINKEVGSFFFLGEIFTDLKLPTETNDLVDLCGTCTNCMDVCPTKAIVAPYKLDSRKCISYLTIESKDRIPIELREKIGNRIFGCDDCQIFCPWNKYAKIKGKNIFSPANDLDNQTLGDLFLISEVDFKVITAGTALKRINYDQWIRNLAVAIGNSEPDINLLNVLKAKLDYPNQSVREHIEWAIKKQYDKIKVEEIG

SEQ ID NO: 78392 - protein, 370 aa, Methylococcales bacterium
  misc_feature (1)..(370): tr|A0A418RFV2|A0A418RFV2_9GAMM Epoxyqueuosine reductase OS=Methylococcales bacterium OX=2304002 GN=queG PE=3 S V=1
MLSQNQKLDLSKQLSNQELAKLALKIKQWGLELGFQQVGIADTDLSVAEAHLHNWLAKGFHGDMDYMQRHGIKRSRPELLHEGTLRVISVRMDYLPETREVLQQCLEDPTSAYISRYALGRDYHKMLRNRLQKLADKIQEEFKADAESLKMRAFVDSAPVLEKALAEKAGLGWIGKHSNLINRKAGSWFFLGELFTDLPLPIDEQTSEHCGVCNACLDVCPTQAIVAPYQVDARRCVSYLTIELHGSIPVELRSLIGNRIYGCDDCQIICPWNRFAKITAEQDFNPRQQLNSQQLLAVFAWTEAQFLAKTEGSAIRRIGYERWLRNIAVALGNAPSSVLVIEALTDKLNHPSELVKEHVLWALEQQQQKR

SEQ ID NO: 78393 - protein, 370 aa, Methylococcales bacterium
  misc_feature (1)..(370): tr|A0A3A2J1E8|A0A3A2J1E8_9GAMM Epoxyqueuosine reductase OS=Methylococcales bacterium OX=2304002 GN=queG PE=3 S V=1
MLNQEQELDLSSRLTSSELADLALQIKQWGLELGFQQVGITDTDLSVAESHLQNWLLQDFHGNMDYMQRHGLKRSHPELLHEGTLRVISVRMDYQSDTRTAMQQGLDDPTSAYISRYALGRDYHKMMRNRLQKLADKIQAECKLDAEPLRMRAFVDSAPVLEKALAEKAGLGWIGKHSNLINRKAGSWFFLGELFTDLPLPIDEQTTAHCGGCTACLSICPTQAIVGPYQVDARRCVSYLTIELQGSIPVDLRALIGNRIYGCDDCQIICPWNRFAKITAEQDFNPRQQLNSQQLLAVFAWSEALFLVKTEGSAIRRIGHERWLRNIAVALGNAPKSDTIIEALTDKLSHPSELVQEHVQWALEQQYQKR

SEQ ID NO: 78394 - protein, 373 aa, Methylococcus capsulatus
  misc_feature (1)..(373): tr|Q609D3|Q609D3_METCA Epoxyqueuosine reductase OS=Meth ylococcus capsulatus (strain ATCC 33009 / NCIMB 11132 / Bath) OX=243233 GN=queG PE=3 SV=1
MLHAAISSPDLAELKDRIREWGRAQGFQQIGFAGIDLGGHEARLLDWLAAGFHGEMDYMARHGLKRSRPAELEPGTLSVISVRMDYLPEPMQDMKETLADPAAAYVSRYAVGRDYHKLMRRRLQRLAATIARYAGPFGYRVYTDSAPVLEKALAENAGLGWIGKHTNLVNREAGSWFFLGEIYTDLPLPPDQPATNHCGQCRACIDVCPTQAIVAPYRLDARRCVSYLTIELKGSIPAALRPGIGNRIYGCDDCQMVCPWNRFARMTEEADFLPRRGLDRGLLLEFFGWDEAEFLRCTEGSAIRRIGHERWLRNLAVAIGNAPPHPDLAEALRRRLDDASPLVREHVAWGLERQTETAPALPTGGDGAVPLQR

SEQ ID NO: 78395 - protein, 373 aa, Methylococcus sp.
  misc_feature (1)..(373): tr|A0A432RPB4|A0A432RPB4_9GAMM Epoxyqueuosine reductase OS=Methylococcus sp. OX=39769 GN=queG PE=3 SV=1
METTGVPTHIPDYSLLANRVKQWGQELGFQKIGITDCDLSQAEAQLVEWLRKSFHGEMDYMQRHGTMRTRPEELVPGTIRIISARLDYLPESMSNCEEVLENPTLGYISRYALGRDYHKVIRKKLQRLANRISIETGPFGYRAFTDSAPVMEKVLAEKAGLGWIGKHTNLIDKQSGSWFFLGEIYTDLPLPVDSVSTDHCGSCTACIDICPTQAIVAPYQLDARRCISYLTIELHGSIPVEFRPQIGNRIYGCDDCQIVCPWNSFARMTQETGFAARHELDSPRLVDLFAWDEGLFLARTEGTALRRLGHERWLRNIAVAMGNSPFSTEIVKSLRARLEHPSELVREHVRWALDQQSNRGSPDQPGIAVISGW

SEQ ID NO: 78396 - protein, 357 aa, Methylococcus sp.
  misc_feature (1)..(357): tr|A0A3N9V8K5|A0A3N9V8K5_9GAMM Epoxyqueuosine reductase OS=Methylococcus sp. OX=39769 GN=queG PE=3 SV=1
MNASPFSPEALKVRIQDWGRELGFQRIGIAGLDLRQAEQRLIDWLAAGFHGEMDYMARHGTRRSRPAELVPGTVSVISARMDYLPEPREAVWAQLERPGAAFVSRYALGRDYHKLMRQRLQKLADWVAGEIGPFGYRVFTDSAPVLEKPLAANAGLGWIGKHTNLIDRRAGSFFFLGEIYTDLTLPADAAVTNHCGSCRACLDVCPTQAIVAPYRLDARRCISYLTIELHGPIPEALRPGLGNRIYGCDDCQLVCPWNRYARLTGENDFLPRHGMDRAGLIELFGWDEVTFLRLTEGSAIRRLGHERWLRNIAVALGNQPPSAPVAAALRERLEHPSELVRDHVLWALNRLGEIASP

SEQ ID NO: 78397 - protein, 383 aa, Methylocystaceae bacterium
  misc_feature (1)..(383): tr|A0A395CWH0|A0A395CWH0_9RHIZ Epoxyqueuosine reductase OS=Methylocystaceae bacterium OX=2052174 GN=queG PE=3 SV=1
MLRRPRLLSLTPAIRQKARELGFDQCRITPAGAPPLAGERLADWLKSGAHGDMEWMETTAERRASPEVLWAEARSIVMLGANYGPAENPLAVLSERGRGAISLYARRRDYHDVVKGRLKLLAGFLLSRAGGGEAKVFVDTAPVMEKPLAQAAGLGWQGKHTNLVSRRFGSWLFLGAIFTNLELEADSPESDHCGSCRACLDICPTNAFPAPYRLDARRCVAYLTIEHKGGIPREFRAAIGNRVFGCDDCLAVCPWNKFASAAQDARLAARDELESVALADLAALDEAGFRALFAGTPVKRLGHARFMRNVAIAIGNSGDPALAPAAERLLGDASPLARGAAVWALARLLPRDEFASLADRLAPLEADAEVLEEWAKETQSPKK

SEQ ID NO: 78398 - protein, 395 aa, Methylocystaceae bacterium
  misc_feature (1)..(395): tr|A0A5C9DFQ0|A0A5C9DFQ0_9RHIZ Epoxyqueuosine reductase OS=Methylocystaceae bacterium OX=2052174 GN=queG PE=3 SV=1
MHATVPNALIGSPAGYDVRSPAAPALEEEIRARALELGFDVCRFARADVAPEQGERLHAWLRDGAHGDMDWMRETAERRAAPRALWPEAASLVMLGLNYGPDGDPLASLTKPACATISVYARNRDYHDVIKGRLKQLAGFILSRAGAGAGDAKVFVDTAPVMEKPLAQTAGVGWQGKHTNLVSRDFGAWLFLGAIFTTLRLEPDPPEHDHCGSCRKCLDVCPTAAFPAPYRLDARRCISYLTIEHKGPIPLEFRAKIGNRIYGCDDCLAVCPWNKYARAGREAKLAARPEFGAPPLAELARLDDAAFRALFAGSPIKRVGRDRFLRNVLIAIGNSGRPELAAEAERLTEDSAALVRGAAVWALVRLAPTRAAELRSHRLAAESETAVRQEWRQTA

SEQ ID NO: 78399 - protein, 402 aa, Methylocystis bryophila
  misc_feature (1)..(402): tr|A0A1W6MYM3|A0A1W6MYM3_9RHIZ Epoxyqueuosine reductase OS=Methylocystis bryophila OX=655015 GN=queG PE=3 SV=1
MAEFAPTSESLAIPDHPSGLARGKSALALRDAIRAKSRELGFDACGFARPDAIPLAAERLNAWLASGAHGEMGWMADRADARGSPQRLWSETRSVVLLGMNYGPGFDPLAATGTADRGAISVYAQGRDYHDVLKGRLKLLAGFMLSRAGGGAVKVFVDTAPVMEKPLAEAAGLGWQGKHTNLVSRGFGSWLFLGAIFTDLELSPDARESDHCGSCRACLDACPTQAFPAPYRLDARRCISYLTIEHKGPIPEEFRAAIGNRVYGCDDCLAVCPWNKFAQAAREAKLAANASLRAPRLADLAALDEAAFRRLFAGSAVKRIGHARFLRNVAIAIGNSGDCALAATLLPLLDAVSPLIRGAAVWALGRLLDADAFSQLVKARLREERDPSVAAEIAKMSHCWKK

SEQ ID NO: 78400 - protein, 376 aa, Methylocystis heyeri
  misc_feature (1)..(376): tr|A0A4S4MJX8|A0A4S4MJX8_9RHIZ Epoxyqueuosine reductase OS=Methylocystis heyeri OX=391905 GN=queG PE=3 SV=1
MPLEDAIRSKALSLGFDACRLAPADAAPQAGARLAQWLEQGAHGDMAWMADTAERRASPRALWPQARSLVMLGANYGPEGDPLAALERRGRGAISVYARNRDYHDLVKGRLKQLAGFIVTQRPGAQVKVFVDTAPVMEKPLAQAAGLGWQGKHTNLVSTRFGSWLFLGSIFTDLELAPDAPGADHCGSCSACLDACPTQAFPAPYRLDARRCIAYLTIENKGPIPREFRAAIGNRVYGCDDCLAVCPWNKFAKATREAKLVAREELENPALAELAALDDAGFRALFSGSPVKRLGHSRFLRNVLIAIGNSGDVGLARRAGDLLDSPSPLVRGAAVWALARLIDSQAFSALAQRRAKAEDDADVIEEWAKETQSDKN

SEQ ID NO: 78401 - protein, 384 aa, Methylocystis hirsuta
  misc_feature (1)..(384): tr|A0A3M9XUN5|A0A3M9XUN5_9RHIZ Epoxyqueuosine reductase OS=Methylocystis hirsuta OX=369798 GN=queG PE=3 SV=1
MASPAGYDVRRPAAPALEEDIRARAFELGFDVCRFARADVAPEQGDRLREWLRDGAHGDMAWMRETAERRAAPRALWPEAASLVMLGLNYGPDGDPLASLTKPDCATISVYARNRDYHDVLKGRLKQLAGFILSRAGGGDAKVFVDTAPVMEKPLAQTAGVGWQGKHTNLVSRDFGSWLFLGAIFTTLRLEPDPLERDHCGSCSKCLEVCPTAAFPAPYRLDARRCISYLTIEHKGPIPLEFRAKIGNRIYGCDDCLAVCPWNKYASAGREAKLAARPEFGSPPLAELARLDDAAFRALFSGSPIKRVGRDRFLRNVLIAIGNSARPELAAEAERLIEDAAAIVRGAAVWALGRLAPTRAAELRPHRLAAEPDAAVRQEWRQTP

SEQ ID NO: 78402 - protein, 390 aa, Methylocystis rosea
  misc_feature (1)..(390): tr|A0A3G8MAG7|A0A3G8MAG7_9RHIZ Epoxyqueuosine reductase OS=Methylocystis rosea OX=173366 GN=queG PE=3 SV=1
MGSPTGYDVRSPTARALEEEIRARALELGFDVCRIARADVAPEQGERLWAWLRDGAHGDMAWMRETAERRVAPRALWPEAASLILLGLNYGPDGDPRASLTKPDCATISVYARNRDYHDIIKGRLKQLAGFILSRAGAGDAKVFVDTAPVMEKPLAQTAGVGWQGKHTNLVSRDFGSWLFLGAIFTTLRLDPDPPEHDHCGSCSKCIDICPTAAFPAPYRLDARRCISYLTIEHKGPIPLEFRAKIGNRIYGCDDCLAVCPWNKYASAGREAKLAARPEFDAPPLAELARLDDSAFRALFAGSPIKRVGRDRFLRNVLIAIGNSARPELAAEAERLIEDAAAIVRGAAVWALGRLAPTRSAELGAQRLAAEPDAAVRQEWRQTGKSATVA

SEQ ID NO: 78403 - protein, 328 aa, Methylocystis sp.
  misc_feature (1)..(328): tr|A0A2S5LJ63|A0A2S5LJ63_9RHIZ tRNA epoxyqueuosine(34) reductase QueG (Fragment) OS=Methylocystis sp. OX=19110 79 GN=queG PE=3 SV=1
MGSPTGYDVRSPTARALEEEIRARALELGFDVCRIARADVAPEQGERLWAWLRDGAHGDMAWMRETAERRVAPRALWPEAASLILLGLNYGPDGDPRASLTKPDCATISVYARNRDYHDVIKGRLKQLAGFILSRAGAGDAKIFVDTAPVMEKPLAQTAGIGWQGKHTNLVSRDFGSWLFLGAIFTTLRLDPDPPERDHCGSCSKCIDVCPTAAFPAPYRLDARRCISYLTIEHKGPIPLEFRAKIGNRIYGCDDCLAVCPWNKYASAGREAKLAARPEFDAPPLAELARLDDSAFRALFAGSPIKRVGRDRFLRNVLIAIGNSARPE

SEQ ID NO: 78404 - protein, 433 aa, Methylocystis sp.
  misc_feature (1)..(433): tr|A0A2U1SJG7|A0A2U1SJG7_9RHIZ 4Fe-4S ferredoxin OS=Met hylocystis sp. MitZ-2018 OX=2127046 GN=C5688_04320 PE=4 SV=1
MVDRSLSFTRDAADLDAIALRDIALEAGADDVGLVSIDDPALDDQRRDILAAFPFTRTLVSFIVRMNRENIRSPARSAANVEFHHAADDCDEVARDIVHALQAHGVRAAYPSMGFPMEASKWPDKMWIISHKPVAVAAGLGRMGLHRNVIHPTFGNFILLGTVAVDIELEAHAKPLDFNPCFECKLCVAACPTGAIAPDGHFDFGACYTHNYREFMGGFSEWVETIADSKSARAYRAKVSDAETVSMWQSLAFGPNYKAAYCMAVCPAGADVIGAYQADKKRYLQEIVDPLQKKAETVYVVADSDAETYVTRRFPAKTPKRVGSAPRPVTIEGFLSGLRLFFQRGKSTGLDAVYHFVFTGADRRSATIVIANKTLSVDDGLVGDSRLTVTADSETWLRFVRKETSLVWALLRGKIRLRGDPRLLLAFGRCFPG

SEQ ID NO: 78405 - protein, 351 aa, Methyloglobulus morosus
  misc_feature (1)..(351): tr|V5C0J2|V5C0J2_9GAMM Epoxyqueuosine reductase OS=Meth yloglobulus morosus KoM1 OX=1116472 GN=queG PE=3 SV=1
MTLNNPDLMASLAAQIKTWGQELGFQQLGITDTNLSQAETHLGNWLANNFHGSMDYMQRHGHKRSRPALLHPGTQRVISVRMDYLPEPENQMNQSLEKPLLAYISRYALGRDYHKLMRSRLQKLADRIHAEIGDFGYRAFVDSAPVLEKALAEKAGLGWIGKHSNLINRKAGSWFFLGEIYTDLPLPVDKPGTEHCGDCRACLDICPTHAIVAPYQVDARRCISYLTIELHGSIPEELRPLLGNRIYGCDDCQLICPWNRFAKLTAEKDFNPRHRLNTQELLDVFAWGEQEFLTKTEGSAIRRIGHERWLRNIAVALGNAPKSEMIVNALKTKLQHPSELVREHVKWALEH

SEQ ID NO: 78406 - protein, 372 aa, Methyloligella halotolerans
  misc_feature (1)..(372): tr|A0A1E2RZZ0|A0A1E2RZZ0_9RHIZ Epoxyqueuosine reductase OS=Methyloligella halotolerans OX=1177755 GN=queG PE=3 SV=1
MTLKTDIASEAEALGFDAVAFTSADAPGSAGPGLDEFLAHGRQGDMGWMADNADRRKDPKTLWPEARSIVLLGVNYGPEADPMAALQRREIGTIATYAKRRDYHDVIKKKLKQLARFVQAESGADVKVFVDTAPVMEKPLAAKAGLGWQGKNTMLVSRQFGSWLFLGAIFTTADIDPDAPEADHCGGCTRCLDICPTDAFAGPYKLDARRCIAYLTIEHKGHIPAEFRRPIGNRIFGCEDCLAVCPWNKFAGAAKEAKLAVREEADNPPLAELLDLDDAAFRERFRGTPIKRTGRDRFLRNVLIAAGNSGDTTLLPRVERLLSDESPLVRAMAVWALKELAPGRADELKGTHLPRETDRDAASEWGEAKVAA

SEQ ID NO: 78407 - protein, 353 aa, Methylomagnum ishizawai
  misc_feature (1)..(353): tr|A0A1Y6D009|A0A1Y6D009_9GAMM Epoxyqueuosine reductase OS=Methylomagnum ishizawai OX=1760988 GN=queG PE=3 SV= 1
MSPIPESRITRARILALAQALGFQNIGIADIELAQAEQRLADWLRAGFHGAMDYMERHGSKRGRPAELVPGTVSVISARMDYLPESRARMWQRLEDPDSAYISRYALGRDYHKLLRKRLQQLAERIADDIGPYGYRVFTDSAPVLEKPLAAQAGLGWIGKHTNLIDRKAGSFFFLGEIYTDLRLPPDAEATAHCGSCTACLDICPTTAIVAPYRLDARRCISYLTIEWRGSIPLEFREALGNRVYGCDDCQLVCPWNRYAQPTQEPGFLPRHGLDTAGLIELFGWDEAEFLRKTEGSAIRRIGHECWLRNLAVGLGNAPTGPEVRAALAARAGHPSALVREHVAWALERQGGF

SEQ ID NO: 78408 - protein, 373 aa, Methylomicrobium album
  misc_feature (1)..(373): tr|H8GPY8|H8GPY8_METAL Epoxyqueuosine reductase OS=Meth ylomicrobium album BG8 OX=686340 GN=queG PE=3 SV=1
MSSIRNDEDLRWLAVQIKQWGLELGFQQVGIADTDLEQAERHLQAWLDDDFHGEMDYMHRHGLKRSRPALLQPGTVRIISVRMDYLPEPSDAMHKALAGPVEAYISRYALGRDYHKLIRSRLQKLADKIQVETGPFGYRAFVDSAPVLEKALAEKAGLGWIGKHSNLINRKAGSWFFLGEIYTDLPLPIDPPAAMHCGSCAACLDICPTRAIVAPFRVDARRCVSYLTIELHGSIPETLRPLIGNRIYGCDDCQLICPWNRFAKLTAENDFRPRHRLNARHLLDVFAWDEQTFLTRTEGSAIRRIGYERWLRNIAVALGNVPHAPKAVEALKARLGHSSELVKEHVRWALDRQSAKREELACSSAFVKGATSD

SEQ ID NO: 78409 - protein, 372 aa, Methylomicrobium alcaliphilum
  misc_feature (1)..(372): tr|G4T0W3|G4T0W3_META2 Epoxyqueuosine reductase OS=Meth ylomicrobium alcaliphilum (strain DSM 19304 / NCIMB 141 24 / VKM B-2133 / 20Z) OX=1091494 GN=yjeS PE=3 SV=1
MTTTNISQLSSLPQRIKQWGLELGFQQVGIADTDLAEAEAHLNHWLDKGFHGEMDYMQRHGLKRSRPAVLQPGTRSVISVRMDYLPESSAAMNRNLEKPLAAYISRYALGRDYHKLMRQRLQKLADRIANEIGDFGYRVFVDSAPVLEKALAEKAGLGWIGKHSNVINRKAGSWFFLGEIYTDLTLPPDTLADNHCGSCTACLDICPTRAIVAPYQVDARLCVSYLTIELHGSIPEALRPLIGNRIYGCDDCQIVCPWNRFARLTGEKDFNPRQQLNSRQLLEVFAWDETTFLKYTEGSAIRRIGHERWLRNIAVALGNAPYSESIVSALEAKLEHPSDLIKEHVLWAIALQIEKTKKKPEVTSSNAPGFES

SEQ ID NO: 78410 - protein, 359 aa, Methylomicrobium buryatense
  misc_feature (1)..(359): tr|A0A4P9UL37|A0A4P9UL37_9GAMM Epoxyqueuosine reductase OS=Methylomicrobium buryatense OX=95641 GN=queG PE=3 S V=1
MTTTNISQLSSLPQRIKQWGLELGFQQVGIADTDLAEAEAHLNNWLDKGFHGEMDYMQRHGLKRSRPAVLQPGTRSVISVRMDYLPESSAAMNQNLEKPLAAYISRYALGRDYHKLMRQRLQKLADRIANEIGDFGYRVFVDSAPVLEKALAEKAGLGWIGKHSNVINRKAGSWFFLGEIYTDLALPPDTKADNHCGSCMACLDICPTRAIVAPYQVDARLCVSYLTIELHSSIPEALRPLIGNRIYGCDDCQIVCPWNRFARLTGEKDFNPRQQLNSRQLLEVFAWDEPTFLKYSEGSAIRRIGHERWLRNIAVALGNAPYSESIVSAMKAKLEHPSDLIKEHVLWAIAKQSERRKAT

SEQ ID NO: 78411 - protein, 359 aa, Methylomicrobium kenyense
  misc_feature (1)..(359): tr|A0A543VFK8|A0A543VFK8_9GAMM Epoxyqueuosine reductase OS=Methylomicrobium kenyense OX=269709 GN=queG PE=3 SV =1
MSTASINSLSSLPQRIEQWGLELGFQQVGIADTDLTEAEAHLYRWLDKGFHGEMDYMRRHGLKRSRPADLQPGTRSVISVRMDYLPEPTAAMNRNLEKPLAAYISRYALGRDYHKLMRQRLQKLANRIADEIGEFGYRVFVDSAPVLEKALAEKAGLGWIGKHSNVINRKAGSWFFLGEIYTDLALPPDTKADNHCGSCTACLDICPTRAIVAPYQVDARLCVSYLTIELHGPIPEPLRPLIGNRIYGCDDCQIVCPWNRFARLTGEQDFNPRKQLNNRQLLEVFTWDEAAFLKYTEGSAIRRIGHERWLRNIAVALGNAPYSESIISALEAKLEHPSDLIKEHVLWAIAKQSERRKTT

SEQ ID NO: 78412 - protein, 348 aa, Methylomonas denitrificans
  misc_feature (1)..(348): tr|A0A126T7T9|A0A126T7T9_9GAMM Epoxyqueuosine reductase OS=Methylomonas denitrificans OX=1538553 GN=queG PE=3 SV=1
MELAQSIKQWGEELGFQQIGISDTNLNDAERHLQQWLNKGFNGEMQYMAAHGLKRSRPALLQEGTCSIISARMDYLPEPPAASQRLLEDPAAAFVSRYALGRDYHKLLRNRLQKLADKISAEIGPFGYRAFVDSAPVLEKAIAEKAGLGWIGKHSNLINRQAGSWFFLGEIYTDLPLPNDQPASNHCGQCRACLDICPTQAIVGPYQVDARRCVSYLTIELHGSIPVELRPLLGNRIYGCDDCQLVCPWNRFAKLSAESDFKPRHRLDQATLLELFAWTETEFLQKTEGSAIRRIGHQRWLRNIAVALGNGKSTDAAKTALAGRLSNDAEMVREHIQWALRKLDGMNV

SEQ ID NO: 78413 - protein, 358 aa, Methylomonas koyamae
  misc_feature (1)..(358): tr|A0A177P390|A0A177P390_9GAMM Epoxyqueuosine reductase OS=Methylomonas koyamae OX=702114 GN=queG PE=3 SV=1
MPPSHFVATEEFVANIRAWALDLGFQQLGISDTDLTSAEGHLQRWLADGMHGEMHYMAAHGLKRSRPADLQPGTLSIISARMDYLPEHRSSMAERLNDPATAFVSRYALGRDYHKLLRSRLQKLADKIAAEIGPFGYRVFVDSAPVLEKAIAEKAGLGWIGKHSNLINRRAGSWFFLGEIYTDLALPADTPVASHCGTCRACLDICPTQAIVAPYRVDARRCVSYLTIELHGSIPEELRPLLGNRIYGCDDCQLICPWNRYATLSGEADFQPRHRLDRATLIELFGWSETEFLQRTEGSAIRRIGHARWLRNIAVALGNARADQAIRAALAGRLDHDSELVREHVVWALRRQTTEAET

SEQ ID NO: 78414 - protein, 355 aa, Methylomonas koyamae
  misc_feature (1)..(355): tr|A0A177N5L3|A0A177N5L3_9GAMM Epoxyqueuosine reductase OS=Methylomonas koyamae OX=702114 GN=queG PE=3 SV=1
MPSTVSLDPEQLACRIKQWGLELGFQQIGISDTDLHQAESHLQNWLDQDFHGEMHYMAAHGLKRSRPALLQEGTRSIISARMDYLPEPSARSQNLLADPAAAFVSRYALGRDYHKLLRNRLQKLADNIAAAIGPFGYRAFVDSAPVLEKAIAEKAGLGWIGKHSNLINRRAGSWFFLGEIYTDLELPADQAASNHCGLCRACIDVCPTQAIVGPYRVDARRCVSYLTIELHGPIPEDLRPLLGNRIYGCDDCQLACPWNRFAKLSAEADFRPRQRLDRATLLELFAWDEAEFLQKTEGSAIRRIGHQRWLRNIATALGNGRPDPEMLTALNRRLHHASDLVAEHIHWALRRLTGA

SEQ ID NO: 78415 - protein, 358 aa, Methylomonas lenta
  misc_feature (1)..(358): tr|A0A177NDI5|A0A177NDI5_9GAMM Epoxyqueuosine reductase OS=Methylomonas lenta OX=980561 GN=queG PE=3 SV=1
MYPTQQPDFQQLADQIKTWGMALGFQQIGISDTDLNDAEHHLQLWLAQDRQGEMQYMSAHGLKRSRPALLQPGTRSIISARMDYLPENPVTSHTVLDDPTAAFVSRYALGRDYHKLLRNRLQKLADKIAAEIGPYGYRAFVDSAPILEKAIAEKAGLGWIGKHSNLINRRAGSWFFLGEIYTDLALPVDTATINHCGQCLACLDICPTQAIVAPYQVDARRCVSYLTIELHGSIPEELRPLLGNRIYGCDDCQLICPWNRFAKLSAEADFQPRHKLDNSTLITLFKWTESEFLSKTEGSAIRRIGHQRWLRNIAVALGNGNPSAASKIALQEKLHHEAELVREHADWALKQLISRAAL

SEQ ID NO: 78416 - protein, 359 aa, Methylomonas methanica
  misc_feature (1)..(359): tr|A0A177LXI6|A0A177LXI6_METMH Epoxyqueuosine reductase OS=Methylomonas methanica OX=421 GN=queG PE=3 SV=1
MNSPPHQTEDLTALVQRIKQWGEELGFQQIGISDTNLNDAERHLQHWLDQGFNGEMQYMAAHGLKRSRPALLQEGTRSIISARMDYLPEPPAASQRLLDDPAAAFVSRYALGRDYHKLLRNRLQKLADKISAEIGPFGYRAFVDSAPVLEKAIAEKAGLGWIGKHSNLINRRAGSWFFLGEIYTDLALQSDQAASNHCGQCRACLDICPTQAIVGPYQVDARRCVSYLTIELHGSIPVEFRPLLGNRIYGCDDCQLVCPWNRFAKLSAENDFKPRHRLDQATLLELFAWTEAEFLQKTEGSAIRRIGHLRWLRNIAVALGNGQATPEAKAALSDRSSHDSEMVREHIEWALQTLDSLNI

SEQ ID NO: 78417 - protein, 358 aa, Methylomonas methanica
  misc_feature (1)..(358): tr|F9ZXJ4|F9ZXJ4_METMM Epoxyqueuosine reductase OS=Meth ylomonas methanica (strain MC09) OX=857087 GN=queG PE=3 SV=1
MHPIEAPDFQQLAQQIKAWGTELGFQQIGISDTDLSAAEHYLGQWLAENRHGDMHYMAAHGLKRSRPAVLQPGTRSIISARMDYLPENPAHSHALLDNPVAAFVSRYALGRDYHKLLRNRLQKLADKIAAEIGPFGYRAFVDSAPVLEKAIAEKAGLGWIGKHSNLINRRAGSWFFLGEIYTDLPLPSSTAASNHCGQCRACLDICPTQAIVAPYQVDARRCVSYLTIELHGSIPEDLRPLLGNRIYGCDDCQLICPWNRFAKLSAETDFRPRHKLDNSTLLELFSWTESEFLQKTEGSAIRRIGHQRWLRNIAVALGNGSPTEASRTALTAKLQHDSELVREHATWALQRLTLPISL

SEQ ID NO: 78418 - protein, 354 aa, Methylomonas sp.
  misc_feature (1)..(354): tr|A0A2P5N303|A0A2P5N303_METSP Epoxyqueuosine reductase OS=Methylomonas sp. OX=418 GN=queG PE=3 SV=1
MRPTETEDFQHVAEQIKRWGVELGFQQIGISDTDLSQAEQHLQQWLAQGRQGEMQYMAAHGLKRSRPALLQPGTLSIISARMDYLPEQPDKSHALLKQPAAAFVSRYALGRDYHKLMRNRLQTLADKITDSVGPFGYRAFVDSAPVLEKAIAEKSGLGWIGKHSNLINRKAGSWFFLGEIYTDLPLPVDAPASQHCGQCKACLDICPTQAIVAPYQVDARLCVSYLTIELHGSIPEHLRPLLGNRIYGCDDCQLICPWNRFAKLSAEADFQPRHKLDQSSLIELFGWSESEFLQKTEGSAIRRIGHQRWLRNIAVALGNGKPSETSASALQTRLTHDSELVREHVVWAMARLDK

SEQ ID NO: 78419 - protein, 358 aa, Methylomonas sp.
  misc_feature (1)..(358): tr|A0A1S1Y3X8|A0A1S1Y3X8_9GAMM Epoxyqueuosine reductase OS=Methylomonas sp. LWB OX=1905845 GN=queG PE=3 SV=1
MPPSHFVATEEFVANIRAWALDLGFQQLGISDTDLTSAEGHLQRWLADGMHGEMHYMAAHGLKRSRPADLQPGTLSIISARMDYLPEHRSSMAERLNDPAAAFVSRYALGRDYHKLLRSRLQKLADKIAAAIGPFGYRVFVDSAPVLEKAIAEKAGLGWIGKHSNLINRRAGSWFFLGEIYTDLALPADTPVASHCGSCRACLDICPTQAIVAPYRVDARRCVSYLTIELHGSIPEELRPLLGNRIYGCDDCQLICPWNRYATLSGEADFQPRHRLDRATLIELFGWSETEFLQRTEGSAIRRIGHARWLRNIAVALGNARPDAAIRAALAGRLDHDSELVREHVVWALRRQTTEAET

SEQ ID NO: 78420 - protein, 303 aa, Methylomusa anaerophila
  misc_feature (1)..(303): tr|A0A348AII2|A0A348AII2_9FIRM Epoxyqueuosine reductase OS=Methylomusa anaerophila OX=1930071 GN=queG_4 PE=4 S V=1
MKSLRTALFAELENNGCQARIVPIHHLQNLRREMAELLQSGLVNNKLWGYLNGFQYDYSPVLSNPQSIIVAAVPQPITKLHIMWRGTKQTILVPPTYVYTTADNLVLNIMERELKKENFSLVRAKLPLKLLAVRSGLSYYGRNNISYIRGMGSFYRLIALVTDMPVSSGTWQNVQRMPECEDCQVCLNSCPARCIDLNRNIIHAEKCLTYINESPGPFPLWVDSNWHNSLVGCIKCQLACPQNKHVSQTNEFADILSERELDLILSASDYDGLPETTRYTLQKLNLTDYELTIIQRNLRALLL

SEQ ID NO: 78421 - protein, 255 aa, Methylomusa anaerophila
  misc_feature (1)..(255): tr|A0A348AGH7|A0A348AGH7_9FIRM Epoxyqueuosine reductase OS=Methylomusa anaerophila OX=1930071 GN=queG_3 PE=4 S V=1
MEEQIRNYILELGVDDAGFACAEDYKSPKSYEISRLLPDAKSIIVMAFKPLSSCESPSMSAAQNGYLDLGAFARSASYRIARFLENKYNAKVATIPVSYPFELHNDRRAIADFSLRHAAVAAGLGAFGRHNLVIHPRFGTRVIFTSIITNLALEPSPQTSQDFCIHCNLCVENCPVRALNEEGKTDVMKCFGHSQPYGLTGDIAFQLQLLGSSAEEQKKLLMDEQYARLRQAAHLGNQYMCFNCLKICPVGLSPE

SEQ ID NO: 78422 - protein, 356 aa, Methylophaga aminisulfidivorans
  misc_feature (1)..(356): tr|F5T154|F5T154_9GAMM Epoxyqueuosine reductase OS=Meth ylophaga aminisulfidivorans MP OX=1026882 GN=queG PE=3 SV=1
MDKQNSDINWQDFIVRMQRWARSLGFQALGVSDLDLSAADKHLQNWLEKGFHGEMTFMEKHGSKRTHPAQLVEGTLSVISVRMDYWPGQAAEPWSVINDSEKAFVSRYALGRDYHKLMRKRLAKLAEHIQKEVGEFGYRVFTDSAPVMEKAIAEKAGLGWIGKHTNVLNRDHGSYFFLGEIYTDLPLPATQSVSAHCGSCSACIDICPTQAIVAPYELDARRCISYLTIELRGAIPEEFRPLMGNRIYGCDDCQLICPWNKYAQATTESDYLPRDGLDAPQLVDLFMWSEHTFLSRLEGSPVRRIGYDCWLRNIAVALGNAKTSQSVIEALQSRSNQVSDMVQEHIDWALQQHQVS

SEQ ID NO: 78423 - protein, 356 aa, Methylophaga frappieri
  misc_feature (1)..(356): tr|I1YIS0|I1YIS0_METFJ Epoxyqueuosine reductase OS=Meth ylophaga frappieri (strain ATCC BAA-2434 / DSM 25690 / JAM7) OX=754477 GN=queG PE=3 SV=1
MIQINTTQSAEAVIEEMQSLARQCGFQQIGVSDINLTEAENQLQDWLARGFHGEMHFMERHGVKRSRPDVLLPDTVRVITARMDYWPESTAAPWPVIADDQKGFVSRYALGRDYHKLMRKRLLRLSNSLEALLGKMGYRVFCDSAPVMEKALAEKSGLGWMGKHTNILNRQHGSYFFLGEIYTDMPLPLTKSVSAHCGKCSACIDICPTQAIVAPYQLDARRCISYLTIELRGAIPESLRPLIGNRIYGCDDCQLVCPWNKFAQPSMESSFQPRENLDAPQLLDLFAWSETEFYQKLEGSPIRRIGYDCWQRNLAVALGNARPSQPIQQALRARLPIVNEMVAEHIEWALKRQLMS

SEQ ID NO: 78424 - protein, 364 aa, Methylophaga lonarensis
  misc_feature (1)..(364): tr|M7NY10|M7NY10_9GAMM Epoxyqueuosine reductase OS=Meth ylophaga lonarensis MPL OX=1286106 GN=queG PE=3 SV=1
MTSTNTSYDRTEFLPRLQKWARSFGFQQLGVSDIDLSQAEQHLNDWLAAGFHGEMQFMERHGSLRTHPEQLLPGTIRVITLRMDYWPSGAEDAWQVIDNDQLGFVSRYALGRDYHKLMRKRLLRLSEAIAKEVGPMGYRVFTDSAPVMEKALAEKSGLGWIGKHTNVLNRQHGSYFFLGEIYTDLPLPLTEPVSDHCGSCSACIDICPTQAIVAPYKLDARRCISYLTIELRGSIPVEFRKAMGNRIYGCDDCQLVCPWNKFAQHTHEMAFEPRDGLDAPRLAALFCWDEATFLSRLEGSPIRRIGYECWLRNIAVALGNAQSSPEVLAALNARRDDPSELVREHVQWAIAQHALSSAGHDRAQ

SEQ ID NO: 78425 - protein, 354 aa, Methylophaga muralis
  misc_feature (1)..(354): tr|A0A1E3GSC9|A0A1E3GSC9_9GAMM Epoxyqueuosine reductase OS=Methylophaga muralis OX=291169 GN=queG PE=3 SV=1
MADPNTVQSSRALLADMQVWARSLGFQQLGVSDIDLSAAEEQLQQWLAKGFHGEMEFMERHGSLRSHPEQLVPGTIRVITARMDYWPETAADAWQVMGDSDLGFVSRYALGRDYHKVMRKRLLRLSQRIEEAVGAMGYRVFTDSAPVLEKALAQKSGLGWIGKHTNVLNRDNGSYFFLGEIYTDLPLPLTEPVTEHCGSCTACIDICPTQAIVAPYELDARRCISYLTIELRGSIPVEFRPMMGNRIYGCDDCQLVCPWNKFAQMTTESAYLPREGLDAPKLVDLFSWTEAEFLQRLEGSPIRRIGYECWLRNIAIALGNAETSDEVLSALNARLEYHSELIREHVLWALEQHC

SEQ ID NO: 78426 - protein, 357 aa, Methylophaga nitratireducenticrescens
  misc_feature (1)..(357): tr|I1XLL3|I1XLL3_METNJ Epoxyqueuosine reductase OS=Meth ylophaga nitratireducenticrescens OX=754476 GN=queG PE= 3 SV=1
MVDSNTVQLSRALLNDMQIWARSLGFQQLGVSDIDLSAAEDQLQQWLARGFHGEMEFMQRHGSLRTHPEELVPGTIRVITARMDYWPETAADAWQVMGESELGFISRYALGRDYHKLIRKRLLRLSQRIEEAVGAMGYRVFTDSAPVMEKALAQKSGLGWVGKHTNVLNRQNGSYFFLGEIYTDLPLPLTEPVSDHCGSCTACIDICPTQAIVAPYQLDARRCISYLTIELRGSIPVEFRPMMGNRIYGCDDCQLVCPWNKFAQMTTESAYLPREGLDAPQLVELFSWTEAEFLQRLEGSPIRRIGYECWLRNIAIALGNAETSQKIVASLKDQLEHSSELVREHVQWALEQHINPS

SEQ ID NO: 78427 - protein, 357 aa, Methylophaga sp.
  misc_feature (1)..(357): tr|A0A2D9KW09|A0A2D9KW09_9GAMM Epoxyqueuosine reductase OS=Methylophaga sp. OX=2024840 GN=queG PE=3 SV=1
MADSNTVQLSRTLLKDMQIWARSLGFQQLGVSDIDLSAAEDQLQQWLARGFHGEMEFMQRHGSLRTHPEELMPGTIRVITARMDYWPETASDAWQVMGESELGFISRYALGRDYHKLIRKRLLRLSKRIEEAVGVMGYRVFTDSAPVMEKALAQKSGLGWIGKHTNVLNRQNGSYFFLGEIYTDLPLPLTEPVSDHCGSCTACIDICPTQAIVAPYELDARRCISYLTIELRGSIPVEFRPMMGNRIYGCDDCQLVCPWNKFAQMTTESAYLPREGLDAPQLVDLFAWTESEFLQRLEGSPIRRIGYECWLRNIAIALGNAKTSQTVLAALKDRIEYPSELVREHVQWALEQHNTPS

SEQ ID NO: 78428 - protein, 354 aa, Methylophaga sp.
  misc_feature (1)..(354): tr|A0A4S5JIU0|A0A4S5JIU0_9GAMM Epoxyqueuosine reductase OS=Methylophaga sp. SB9B OX=2570356 GN=queG PE=3 SV=1
MADPNTVQSSRALLADMQVWARSLGFQQLGVSDIDLSAAEEQLQQWLAKGFHGEMGFMERHGSLRSHPEQLVPGTIRVITARMDYWPETAADAWQVMGDSELGFVSRYALGRDYHKLMRKRLLRLSQRIEEAVGAMGYRVFTDSAPVLEKALAQKSGLGWIGKHTNVLNRDNGSYFFLGEIYTDLPLPLTEPVTEHCGSCTACINICPTQAIVAPYELDARRCISYLTIELRGSIPVEFRPMMGNRIYGCDDCQLVCPWNKFAQMTTESAYLPREGLDAPKLVDLFSWTESEFLQRLEGSPIRRIGYECWLRNIAIALGNAETSDEVLSALNARLEYHSELVREHVLWALEQHC

SEQ ID NO: 78429 - protein, 364 aa, Methylophaga sulfidovorans
  misc_feature (1)..(364): tr|A0A1I4AYS7|A0A1I4AYS7_9GAMM Epoxyqueuosine reductase OS=Methylophaga sulfidovorans OX=45496 GN=queG PE=3 SV =1
MLTAYNRSMDKQNTDIYWQDFIVRMQRWARSLGFQALGVSDLDLSDADKRLQNWLEKGFHGDMSFMEKHGSKRTHPAELVEGTLSVISVRMDYWPGEAAEPWSVINDSEKAFLSRYALGRDYHKLMRKRLARLAEHIQKEIGEFGYRVFTDSAPVMEKAIAEKAGLGWIGKHSNVLNRDHGSYFFLGEIYTNLPLPPTQSVTAHCGSCTACIDICPTQAIVAPYEVDARRCISYLTIELRGAIPEEFRPLMGNRIYGCDDCQLVCPWNKYAQVTTESDYLPRDGLDAPQLVDLFMWSEQTFLSRMEGSPIRRIGYDCWLRNIAVALGNAKTSQPVIAALKARSNQVSEMVQEHIDWALKQHHMS

SEQ ID NO: 78430 - protein, 356 aa, Methylophaga thiooxydans
  misc_feature (1)..(356): tr|A0A0A0BD56|A0A0A0BD56_9GAMM Epoxyqueuosine reductase OS=Methylophaga thiooxydans OX=392484 GN=queG PE=3 SV= 1
MAENYTDTDGQKLLSRMQRWARSLGFQALGVSDIDLRDAEAKLQDWLAKGFHGEMGFMAKHGSMRTHPEQLVEGTVRVISLRMDYWPGEAAEPWKVLDDGNRAFISRYALGRDYHKLMRKRLAKLAKRIEREVGSMGFRVFTDSAPVMEKAIAEKAGLGWIGKHTNVLNRDHGSYFFLGEIYTDLPLPVTDATSAHCGSCSACIDICPTQAIVGPYQLDARRCISYLTIELRGAIPEEFRPMMGNRIYGCDDCQLVCPWNKYAQSTVEPDYLPREGLDAPQLIDLFNWTEQEFLSRLEGSPIRRIGYECWLRNIAVALGNAKTSATVVNALQQKVEHQSALVREHVTWALDQHQLS

SEQ ID NO: 78431 - protein, 356 aa, Methylophaga thiooxydans
  misc_feature (1)..(356): tr|C0N1K5|C0N1K5_9GAMM Epoxyqueuosine reductase OS=Meth ylophaga thiooxydans DMS010 OX=637616 GN=queG PE=3 SV=1
MAENYTDTDGQKLLSRMQRWARSLGFQAMGVSDIDLRDAEAKLQDWLAKGFHGEMGFMAKHGSMRTHPEQLVEGTIRVISLRMDYWPGEAAEPWKVLDDGNRAFISRYALGRDYHKLMRKRLAKLAKRIEREVGPMGFRVFTDSAPVMEKAIAEKAGLGWIGKHTNVLNRDHGSYFFLGEIYTDLPLPVTDATSAHCGSCSACIDICPTQAIVGPYQLDARRCISYLTIELRGAIPEEFRPMMGNRIYGCDDCQLVCPWNKYAQSTVEPDYLPREGLDAPQLIDLFNWTEQEFLSRLEGSPIRRIGYECWLRNIAVALGNAKTSAPVVNALQQKAEHQSALVREHVTWALDQHQLS

SEQ ID NO: 78432 - protein, 357 aa, Methylophilaceae bacterium
  misc_feature (1)..(357): tr|A0A356CTC5|A0A356CTC5_9PROT Epoxyqueuosine reductase OS=Methylophilaceae bacterium OX=2030816 GN=queG PE=3 SV=1
MTHIWDQLALQIKDWGRELGFDQIGITDIDLNHSKDHYLEWIKQGFHGEMHYMVKHGSRRYKPDELVPHTIRIISARLNYFPNAHNSEVILKSNEKAFISRYALGRDYHKVMRSKLKKLSEKIQKEAHKTLNQAFELRLFSDSAPVMEVELAEKSGLGWRGKHTLLINKEHGSWFFLGEIYINLPLPIDKKVDNHCGTCTSCIDVCPTKAIIAPYKLDARKCISYLTIELKSAIPNEYRKLIGNRVYGCDDCQLYCPWNKFGQISKEDDFKVRHGLDDIELVECFLWTEAEFLKRMEGSAILRIGYDQWLRNIAIGLGNAKTSEIIVNALKNRYHDASALVKEHISWALAQHNFHIN

SEQ ID NO: 78433 - protein, 356 aa, Methylophilaceae bacterium
  misc_feature (1)..(356): tr|A0A259CZ86|A0A259CZ86_9PROT Epoxyqueuosine reductase OS=Methylophilaceae bacterium 17-44-8 OX=1970534 GN=qu eG PE=3 SV=1
MNNTLDNALVQLAADIKRWGQTLGFAEVGITDTALGTAEHEHQAWIEKGFHGEMHYMAKHGTKRTRPAELVPNTQRVISVRLDYKPPNAKDSWQVIHQPNQAFISRYALGRDYHKVVRQKLQQLCDQIQSATQAMEYRVFTDSAPVLEVALAEKAGLGWRGKHTLLINKHHGSWFFLGEIYTNLPLPVDPPATEHCGTCHACLDICPTNAIVAPYEVDARRCISYLTIELKSAIPIEFRKSIGNRVYGCDDCQLICPWNKFAETTKEPDFQVRHGLDDIDLVTCFGWSEAEFQQKMAGSAIYRIGYQQWLRNIAVGLGNAAHSPEVIEALQARQADDSEIVREHVAWALDQHLTNV

SEQ ID NO: 78434 - protein, 356 aa, Methylophilales bacterium; identical to SEQ ID NO: 78433
  misc_feature (1)..(356): tr|A0A258ULG8|A0A258ULG8_9PROT Epoxyqueuosine reductase OS=Methylophilales bacterium 16-45-7 OX=1970536 GN=que G PE=3 SV=1

SEQ ID NO: 78435 - protein, 358 aa, Methylophilales bacterium
  misc_feature (1)..(358): tr|A0A0H4IZV8|A0A0H4IZV8_9PROT 4Fe-4S ferredoxin-type d omain-containing protein OS=Methylophilales bacterium M BRS-H7 OX=1623450 GN=VI33_06935 PE=4 SV=1
MLDKAYWKDISKKIIATGKELGFNDVGISDTVINQNQGLYKEWIDAKNHGAMSYLEDHQDIKFDPENILANTKSIISVRLDYLPLNENLINLINQKDKAYIARYALGKDYHKTLKKKLNHFGSLIKSIISESNFDFKYRAITDSAPSPEIEIATQAGLGWRGKNTLLLNKNNGSWFFLGELYTNAPLVFNQTSSTNHCGSCSACIDICPTQAIEKPYYLNASKCISYWTIEHKGTIPISFRRKIGNRIYGCDDCQIICPWNKFAKKSTEIDFFVRHKLNNISLMDCFLMDNHRFNEYFNGSAIKRIGYEKWISNVAIALGNADHDQNILDALMKRSEDPSNLIKEHVLWAISEQEAKK

SEQ ID NO: 78436 - protein, 365 aa, Methylophilus medardicus
  misc_feature (1)..(365): tr|A0A5B8CRX9|A0A5B8CRX9_9PROT Epoxyqueuosine reductase OS=Methylophilus medardicus OX=2588534 GN=queG PE=3 SV =1
MSHQSHPTPIQWPDPAVAAQMSATIKDWARELGFGNIGITDTDLSAAEPDFLDWLAKQYHGDMDYMAKHGTKRSRPAELVPGTLRVISVNLNYLPEQVADGWQVLATPDKAYVARYAMGRDYHKVMRQKLQQLCTRITDTYGQFEYRVFADSAPVMEVALATKAGVGWRGKHTLLLNRQQGSWFFLGEIYTNLPLPIDAPTSAHCGSCSACIDICPTRAIVAPYELDARRCISYLTIEHKGSIPLELRPLIGNRIYGCDDCQLICPWNKFAVKTEESDFAVRNGLDSTALIDCFAWTEAEFQARMAGSAIYRIGYAQWLRNVAVGLGNAPSTPAVIHALQARQDDAHALVREHVAWALAKHLPSS

SEQ ID NO: 78437 - protein, 178 aa, Methylophilus methylotrophus
  misc_feature (1)..(178): tr|A0A5C7WHN5|A0A5C7WHN5_METME tRNA epoxyqueuosine(34) reductase QueG (Fragment) OS=Methylophilus methylotroph us OX=17 GN=queG PE=4 SV=1
IYTNLPLPVDSPTTAHCGSCSACIDICPTRAIVAPYELDARRCISYLTIEHKSSIPLELRPLIGNRVYGCDDCQLICPWNKFAVKTQETDFAVRHGLDSNDLVDCFAWTEAEFQQRMAGSAIYRIGYVQWLRNVAVGLGNAPSSPAVIAALTARQDDDNELVREHVAWALAQHQQHRA

SEQ ID NO: 78438 - protein, 345 aa, Methylophilus rhizosphaerae
  misc_feature (1)..(345): tr|A0A1G9AYM0|A0A1G9AYM0_9PROT Epoxyqueuosine reductase OS=Methylophilus rhizosphaerae OX=492660 GN=queG PE=3 SV=1
MAATIKGWARELGFGNLGITDTDLSAAEPGLLSWLDKHYHGDMDYMAKHGTKRSRPAELVPGTLRVISVSLDYMPEHAENSWQVLENPDKAYIARYAMGRDYHKVMRQKLQQLCSRITEHFGNFEYRVFADSAPVLEVALATKAGVGWRGKHTLLLNRQQGSWFFLGEIYTNLPLPIDPPTSSHCGSCSACIDICPTQAIVAPYELDARRCISYLTIEHKGSIPPELRPLIGNRVYGCDDCQLICPWNKFSVSTEESDFSVRNGLDSADLVTCFTWTEAEFQQRMAGSAIYRIGYLQWLRNVAVGLGNAPTSPAVVSALRSRQQDENELLREHVQWALARHGIAS

SEQ ID NO: 78439 - protein, 366 aa, Methylophilus sp.
  misc_feature (1)..(366): tr|A0A2S5N641|A0A2S5N641_9PROT Epoxyqueuosine reductase OS=Methylophilus sp. OX=29541 GN=queG PE=3 SV=1
MSHQSHPAPIQLPDQAVAAHMAATIKNWARELGFGSIGITDTDLSAAEPEFLEWLAKQYHGDMDYMAKHGTKRSRPAELVPGTLRVISVNLNYLPEKAADGWQVLESPDKAYVARYALGRDYHKVMRQKLQQLCTRITEEFGQFEYRVFADSAPVLEVALATKAGVGWRGKHTLLLNRQQGSWFFLGEIYTNLPLPVDSPTTAHCGSCSACIDICPTRAIVAPYELDARRCISYLTIEHKSSIPLELRPLIGNRVYGCDDCQLICPWNKFAVKTQETDFAVRHGLDSNDLVDCFAWTEAEFQQRMAGSAIYRIGYVQWLRNVAVGLGNAPSSPAVIAALTARQDDDNELVREHVAWALAQHQQHRA

SEQ ID NO: 78440 - protein, 366 aa, Methylophilus sp.
  misc_feature (1)..(366): tr|A0A0K0SVD5|A0A0K0SVD5_9PROT Epoxyqueuosine reductase OS=Methylophilus sp. TWE2 OX=1662285 GN=queG PE=3 SV=1
MSHQSHPTPIQLPDQAVAAQMAATIKNWARELGFGSIGITDTDLSAAEPEFLDWLAKQYHGDMDYMAKHGTKRSRPAELVPGTLRVISVNLNYLPDNAADGWQVLENPNKAYVARYALGRDYHKVMRQKLQQLCTRITEEFGKFEYRVFADSAPVLEVALATKAGMGWRGKHTLLLNRQQGSWFFLGEIYTNLPLPVDSPTTAHCGSCSACIDICPTRAIVAPYELDARRCISYLTIEHKSSIPLELRPLIGNRVYGCDDCQLICPWNKFAVNTQETDFAVRHGLDSNDLVDCFAWTEAEFQQRMAGSAIYRIGYHQWLRNVAVGLGNAPSSPAVIAALTARQDDDNELVREHVAWALAQHQQHIA

SEQ ID NO: 78441 - protein, 377 aa, Methylopila sp.
  misc_feature (1)..(377): tr|A0A2H6BA17|A0A2H6BA17_9RHIZ Epoxyqueuosine reductase OS=Methylopila sp. Yamaguchi OX=1437817 GN=queG PE=3 S V=1
MTPAALKDELRARAASYGFEAFGVTTPDAVLAAGARLLEALALGRHGSMAWLEDRAQWRADPRALWPEARSVVLLGLNYGPDADPRRALEHPDRAAISVYAQGDDYHDLIKGRLKQVAGALASAGHAAKVFVDTAPVMEKPLAAAAGLGWQGKHTNLVSRGYGSWLFLGAIFTTAELPPDDAETDRCGSCRACLDACPTEAFPAPYQLDARRCVSYLTIEHAGPIPHELRPKLGNRIYGCDDCLAACPWNKFAEAGREMRLAARDALRAPELSRLAALDDAGFRALFAKSAVKRIGRDRFVRNVAIAIGNSGDASLAEALGPLLDDPSAIVRGAGAWAIARLVPPATLAPLAARRLATETDEEVRAEWRAALDQEAA

SEQ ID NO: 78442 - protein, 349 aa, Methyloprofundus sedimenti
  misc_feature (1)..(349): tr|A0A1V8MB53|A0A1V8MB53_9GAMM Epoxyqueuosine reductase OS=Methyloprofundus sedimenti OX=1420851 GN=queG PE=3 SV=1
MDTAINELSRQIKQWGYELGFQQVGITDTNLQQAEQRLEDWLAHGYHADMDYMHKHGLKRSRPALLQPETVSIISVRMDYLPEDHESMETTLNNPVAAFISRYALGRDYHKVLRKRLQKLAQRIEQEVGVFGYRAFVDSAPVLEKAIAEKAGLGWIGKHSNIINKKAGSWFFLGEIYTSLALPSNVPSQNHCGQCVACINICPTQAIVAPYQVDARRCISYLTIELKGSIPVDLRPLMGNRIYGCDDCQLICPWNRFAKLSNEADFNPRHNLNAQHLIELFNWSENEFFDKTEGSAIRRIGYQQWLRNIAVALGNAPASTVIKQTLNVKLDQSSELVREHILWALKQHA

SEQ ID NO: 78443 - protein, 334 aa, Methylorubrum extorquens
  misc_feature (1)..(334): tr|A0A2N9AS41|A0A2N9AS41_METEX Epoxyqueuosine reductase OS=Methylorubrum extorquens OX=408 GN=queG PE=4 SV=1
MPAWLAAGHHGTMDWMEERADQRAAPSALWAETRSIVMLGMNAGPERDPLELIQLKDRAAIAAYAQRRDYHDVIKGKLKELGGFLSARSGQPVKVFVDTAPVMEKPLAQAAGLGWQGKHTVLISREHGNWLMLGAIFSRAELEPDTPETDHCGSCRRCLDICPTDAFPAPYQLDARRCIAYLTIEHQGPIPAEFREKIGNRVFGCDDCLAVCPWNKFAGAARESRMAARDDLAAPPLAELARLDDAGFRTRFAGTPIKRTGRDRFLRNVLIAIGNSGDAALAAEAVACLAEPDPVVRGAAVWACGRLLPQERLHELFDAHGHGGNGGACEGGMA

SEQ ID NO: 78444 - protein, 356 aa, Methylorubrum extorquens
  misc_feature (1)..(356): tr|H1KJJ8|H1KJJ8_METEX 4Fe-4S ferredoxin-type domain-co ntaining protein OS=Methylorubrum extorquens DSM 13060 OX=882800 GN=MetexDRAFT_2810 PE=4 SV=1
MPDLRERLPAWLAAGHHGTMDWMEERADQRAAPSALWAETRSIVMLGMNAGPERDPLELVRLKDRAAIAAYAQRRDYHDVIKGKLKELGGFLSACSGQPVKVFVDTAPVMEKPLAQAAGLGWQGKHTVLISREHGNWLMLGAIFSRAELEPDAPETDHCGSCRRCLDICPTDAFPAPYQLDARRCIAYLTIEHQGPIPAEFREKIGNRVFGCDDCLAVCPWNKFAGAARESRMAARDDLAAPPLAELARLDDAGFRTRFAGTPIKRTGRDRFLRNVLIAIGNSGDAALAAEAVACLVEPDPVVRGAAVWACGRLLPRARLHELFAAHGHGETEAHVREEWREAAALPMEADGPRET

SEQ ID NO: 78445 - protein, 392 aa, Methylorubrum populi
  misc_feature (1)..(392): tr|A0A514KVH7|A0A514KVH7_9RHIZ Epoxyqueuosine reductase OS=Methylorubrum populi OX=223967 GN=queG PE=3 SV=1
MKPEKAVLTGRSLRETVEARARRLGFDAFRVTRPDAVPALRERLPAWLADGHHGTMDWMEERAEQRAAPSALWAETRSIVMLGMNAGPQRDPLDLVRLTDRGAIAAYAQRRDYHDVIKGKLKELGGFLSARSGEPVKVFVDTAPVMEKPLAQAAGLGWQGKHTVLISREHGNWLMLGAIFARAELEPDAPETDHCGSCRRCLDICPTNAFPAPYRLDARRCIAYLTIEHHGPIPAAYREQIGNRVFGCDDCLAVCPWNKFAGAAREARMAARDDLAAPPLAELARLDDAGFRARFAGTPIKRTGRDRFLRNVLIAIGNSGEAALADEAVARLSEPDPVVRGAAVWACGRLLPRERLHDLFAAHGRGETEAHVREEWRAAAGLPMEADGPRES

SEQ ID NO: 78446 - protein, 356 aa, Methylorubrum populi
  misc_feature (1)..(356): tr|B1Z998|B1Z998_METPB 4Fe-4S ferredoxin-type domain-co ntaining protein OS=Methylorubrum populi (strain ATCC B AA-705 / NCIMB 13946 / BJ001) OX=441620 GN=Mpop_2342 PE =4 SV=1
MPALRERLPAWLADGHHGTMDWMEERADQRAAPSALWAETRSIVMLGMSAGPQRDPLDLVRLTDRGAIATYAQRRDYHDVIKGKLKELGGFLSARSGEPVKVFVDTAPVMEKPLAQAAGIGWQGKHTVLISREHGNWLMLGAIFARAELEPDAPETDHCGSCRRCLDICPTDAFPAPYRLDARRCIAYLTIEHHGPIPAEYREQIGNRVFGCDDCLAVCPWNKFAGAAREARMAARDDLAAPPLAELARLDDAGFRARFAGTPIKRTGRDRFLRNVLIAIGNSGEAALADEAVARLGEPDPVVRGAAVWACGRLLPRERLHDLFAAHGRGETEAHVREEWRAAAGLPMEADGPRES

SEQ ID NO: 78447 - protein, 379 aa, Methylorubrum salsuginis
  misc_feature (1)..(379): tr|A0A1I4BAQ4|A0A1I4BAQ4_9RHIZ Epoxyqueuosine reductase OS=Methylorubrum salsuginis OX=414703 GN=SAMN04488125_ 10392 PE=4 SV=1
MEARARKLGFDALRVTRPDAVPLTRERLPAWLAEGHHASMDWMEERADQRADPSALWPEARSVIVLGMNAGPEADPLALLAQKERGTIATYAQRRDYHEVIKGKLKELGGFLSARSGKPVKVFCDTAPVMEKPLAQAAGLGWQGKHTVLLSREHGNWLMLGAIFCVAELPVDPPETDHCGSCRRCLDACPTEAFPAPFRLDARRCIAYLTIEHAGPIPTEFREKIGNRIFGCDDCLAVCPWNKFARAARETRMAARADLAAPPLADLVRLDEAGFRSFFAGTPIKRTGRDRILRNVLIAIGNSGDAALAEEAARCLADPDPVVRGAAVWACGRLFPMARLDALYAAHGRDEPDPHVRAEWYALLPTAMEGPSASETCCA

SEQ ID NO: 78448 - protein, 376 aa, Methylorubrum sp.
  misc_feature (1)..(376): tr|A0A4Z0EH80|A0A4Z0EH80_9RHIZ tRNA epoxyqueuosine(34) reductase QueG OS=Methylorubrum sp. Q1 OX=2562453 GN=qu eG PE=4 SV=1
MEARARRLGFGAFRVTRPDAVPDLRERLPAWLAAGHHGTMDWMEERADQRAAPSALWAETRSIVMLGMNAGPERDPLELVRLKDRAAIAAYAQRRDYHDVIKGKLKELGGFLSARSGQPVKVFVDTAPVMEKPLAQAAGLGWQGKHTVLISREHGNWLMLGAIFARAELEPDAPETDHCGSCRRCLDICPTDAFPAPYQLDARRCIAYLTIEHQGPIPAEYREQIGNRVFGCDDCLAVCPWNKFAVAARETRMAARDDLAAPPLAELARLDDAGFRARFAGTPIKRTGRDRFLRNVLIAIGNSGDVTLAAEAVACLAEPDPVVRGAAVWACGRLLPRERLHELFAAHGHGETEAHVREEWREAAALPMEADGLRET

SEQ ID NO: 78449 - protein, 376 aa, Methylorubrum zatmanii
  misc_feature (1)..(376): tr|A0A1W6RRV3|A0A1W6RRV3_9RHIZ tRNA epoxyqueuosine(34) reductase QueG OS=Methylorubrum zatmanii OX=29429 GN=B2 G69_19545 PE=4 SV=1
MEARARRLGFEAFRVTRPDAVPDLRERLPAWLAAGHHGTMDWMEERADQRAAPSALWAETRSIVMLGMNAGPERDPLELIQLKDRAAIAAYAQRRDYHDVIKGKLKELGGFLSARSGQPVKVFVDTAPVMEKPLAQAAGLGWQGKHTVLISREHGNWLMLGAIFSRAELEPDTPETDHCGSCRRCLDICPTDAFPAPYQLDARRCIAYLTIEHQGPIPAEFREKIGNRVFGCDDCLAVCPWNKFAGAARESRMAARDDLAAPPLAELARLDDAGFRTRFAGTPIKRTGRDRFLRNVLIAIGNSGDAALAAEAVACLAEPDPMVRGAAVWACGRLLPQERLHELFDAHGHGETEAHVREEWREAAALPMEADGLRET

SEQ ID NO: 78450 - protein, 376 aa, Methylosinus sp.
  misc_feature (1)..(376): tr|A0A177P2I0|A0A177P2I0_9RHIZ Epoxyqueuosine reductase OS=Methylosinus sp. R-45379 OX=980563 GN=queG PE=3 SV= 1
MSLEQALRRRAAEFGFDLCAITTAQAPAEAGEHLAQWLESGAHGDMEWMAETADRRAAPKALWPQARSVIMLGVDYGASGDPLATLAKPDRGAVSLYARRRDYHEVIKGRLKQLAGFLLAQAGGGEVKVFVDTAPVMEKPLAQAAGLGWQGKHTNLVSRRFGSWLLLGAIFTDLPLQPDAPEEDHCGSCRACLDACPTKAFPAPYRLDARRCVAYLTIEHKGQIPREFRAAIGNRIFGCDDCLAVCPWNKFARATRDAKLALREELSELPLADLAALDDAGFRALFAGTPVKRLGHARFRRNVAIAIGNSKNRELAAAVEPLLSDSSPLARGASVWALARLLPPGDFSALAGKALAEEEDVAVREEWAKETHPAKK

SEQ ID NO: 78451 - protein, 413 aa, Methylosinus sp.
  misc_feature (1)..(413): tr|A0A4R8HMH5|A0A4R8HMH5_9RHIZ Epoxyqueuosine reductase QueG OS=Methylosinus sp. sav-2 OX=2485168 GN=EDE12_104 14 PE=4 SV=1
MREMALSAGADDVGFVSIDDPAIAFERAEILAAFPYARTLVSFVMRMNRENIRSPARSLANVEFHRVGDETDAVSHRLTRMLEDMGVRAAYPAMAFPMEAARWPAKMWVVSHKPVAVAAGLGKMGVHRNVIHPKFGNFILLGTVVVDVALDSYSRPLDYNPCLSCKLCVAVCPTGAIAPDGGFDFAACYTHNYREFMGGFMDWVETIADAKSAAGYREKVEDAESVSMWQSLAYGPNYKAAYCLAVCPAGEDVIGAYRGDRSGFLQSIVDPLKKKKETIYVTPLSDAEDYVKRRFPHKRVKRVANGMRAASIASFARGLSLRFQKKRAAGLSAVYHFAFSGAERKDLTVRIDNGRLEVGEGLIGKADLVIRADAQSWLRFLRKERSLLWALVTLEIRLRGDPRLLAAFGKCFP

SEQ ID NO: 78452 - protein, 376 aa, Methylosinus sporium
  misc_feature (1)..(376): tr|A0A549SDA8|A0A549SDA8_METSR Epoxyqueuosine reductase OS=Methylosinus sporium OX=428 GN=queG PE=3 SV=1
MTLEQALRRRAAALGFDLCAITSADAPAKAGERLAQWLESGGHGDMEWMAETAERRAAPKALWPQARSIIMLGVDYGASGDPLATLAKPDRGAVSLYARRRDYHEVIKGRLKQLAGFLLAQAGGGEVKVFVDTAPVMEKPLAQAAGLGWQGKHTNLVSRRFGSWLLLGAIFTDLSLTPDAPEEDHCGSCRACLDACPTKAFPAPYQLDARRCVAYLTIEHKGQIPREFREAVGNRIFGCDDCLSVCPWNKFAQATRDAKLALREDLAELPLADLAALDDAGFRALFAGTPVKRLGHARFRRNVAIAIGNSKRPALAFAVEPLLGDSSPLARGAAVWALARLLPRGDFSMLAGKALPEEDDGSVREEWAKETHPTKK

SEQ ID NO: 78453 - protein, 376 aa, Methylosinus sporium
  misc_feature (1)..(376): tr|A0A2U1SU47|A0A2U1SU47_METSR Epoxyqueuosine reductase OS=Methylosinus sporium OX=428 GN=queG PE=3 SV=1
MSLEQALRRRAAELGFDLCAITSADAPAEAGKRLAQWLAAGAQGDMEWMAETAERRAAPRALWPQARSVIMLGIDYGAPGDPLAILSRPDRGAISLYARRRDYHEVIKGRLKQLAGFLVAQTGGGEVKVFVDTAPVMEKPLAQVAGLGWQGKHTNLVSRRFGSWLLLGAIFTDLSLTPDAPEEDHCGSCRACLDACPTKAFPAPYRLDARRCVAYLTIEHKGQIPREFREAVGNRIFGCDDCLSVCPWNKFAQATRDAKLALREDLSALPLVDLAALDDAGFRALFAGTPVKRLGHARFRRNVAIAIGNSKRPALAFAVEPLLGDSSPLARGAAVWALARLLPMGDFSMLAGKALPKEDDGSVREEWAKETHPTKK

SEQ ID NO: 78454 - protein, 383 aa, Methylosinus trichosporium
  misc_feature (1)..(383): tr|A0A2D2D2T5|A0A2D2D2T5_METTR Epoxyqueuosine reductase OS=Methylosinus trichosporium OB3b OX=595536 GN=queG P E=3 SV=1
MLRRSRLLSLEEALRAQAAALGFDLCRIAPASAPPQAGERLAAWLASGAHGDMEWMAATPERRAAPQGLWSEARSIVLLGANYGADGDPLADLARRDHGAISLYARRRDYHEVIKGRLKQLAAFLLSRAGAGDAKVFVDTAPVMEKPLAQAAGLGWQGKHTNLVSRRFGSWLFLGSIFTDLTLAPDAPERDHCGSCRKCLDICPTNAFPAPYRLDARRCVAYLTIEHRGPIPRELRAAIGNRVFGCDDCLAVCPWNKFARAARDARLALRPELDAMPLAGLAALDDAGFRALFAATPVKRLGHARFLRNVAIAIGNSGEARLSAALRPLLDHASPVTRGAAVWALARLLPREELASLARAYAPREPDALVCTEWAKETQSEKK

SEQ ID NO: 78455 - protein, 358 aa, Methylotenera mobilis
  misc_feature (1)..(358): tr|A0A351RCS2|A0A351RCS2_9PROT Epoxyqueuosine reductase OS=Methylotenera mobilis OX=359408 GN=queG PE=3 SV=1
MSHSTKNLNDLSHAIKKWGLELGFNQVGITDTNLQTAEQEHQAWIEKGFHGDMDYMAKHGVKRTRPAELVPNTQRIISARLDYLPPEAENSTSILQDSHKAFISRYALGRDYHKVMRNKLQKLCEKIQSELQSFQIDQFEYRAFTDSAPVLEVALAEKAGLGWRGKHTLLIDKNNGSWFFIGEIYTNLPLPIDEPASNHCGSCSKCIEVCPTQAITAPYEVDARRCISYLTIELKTSIPEEYRPLIGNRVYGCDDCQLYCPWNKFAEITQEPDFSVKHGLADVNLIDCFNWTEDEFKSKMAGSAIYRIGYLQWLRNIAVGLGNAETTPEIIDTLKQHLHHENEMVQEHVRWALDRHLA

SEQ ID NO: 78456 - protein, 359 aa, Methylotenera mobilis
  misc_feature (1)..(359): tr|C6WUZ5|C6WUZ5_METML Epoxyqueuosine reductase OS=Meth ylotenera mobilis (strain JLW8 / ATCC BAA-1282 / DSM 17 540) OX=583345 GN=queG PE=3 SV=1
MSHSTKNLSDLSLAIKNWGLALGFSQIGITDTNLQAAESEHQAWIEKGLHGDMDYMAKHGTKRTRPHELVPNTQRIISARLDYLPPQAADSDTILQDGSKAFISRYALGRDYHKVMRNKLQKLCEKIQSELQHYQVDGFEYRAFTDSAPVLEVALAEKAGIGWRGKHTLLINKNHGSWFFLGEIYTNLALPIDEPASNHCGSCSKCMEVCPTQAITAPYEVDARRCISYLTIELKTSIPVEFRPLIGNRVYGCDDCQLYCPWNKFAEITKETDFAVKHGLDDVSLIDCFNWTEEEFKTKMAGSAIYRIGYTQWLRNIAVGLGNAETTPEVINALKQHQHHENETLQEHVRWALSRHTPA

SEQ ID NO: 78457 - protein, 359 aa, Methylotenera sp.
  misc_feature (1)..(359): tr|A0A2S5L2M3|A0A2S5L2M3_9PROT Epoxyqueuosine reductase OS=Methylotenera sp. OX=2051956 GN=queG PE=3 SV=1
MSNSTKNLSDLSVAIKDWGRALGFNDVGITDTNLRTAESQHQAWIEKGFHGDMDYMAKHGVKRTRPDELVPNTQRIISVRLDYLPPQAENSDKILQDSSKAFISRYALGRDYHKVMRNKLQKLCEKIQSELQYYQTPAFEYRVFTDSAPVLEVALAEKAGLGWRGKHTLLINKNKGSWFFLGEIYTNLPLPIDEPASNHCGSCSKCIEVCPTQAITAPYEVDARKCISYLTIELKTSIPLEYRPLIGNRVYGCDDCQLYCPWNKFAEVTKETDFAVKHGLDDIRLIDCFQWSEDDFKTRMAGSAIYRIGYLQWLRNIAVGLGNAETTPEVIQALQRHVHHENAMVQEHVRWALIRHNRA

SEQ ID NO: 78458 - protein, 367 aa, Methylotenera sp.
  misc_feature (1)..(367): tr|A0A1G1B1N7|A0A1G1B1N7_9PROT Epoxyqueuosine reductase OS=Methylotenera sp. RIFCSPLOWO2_02_FULL_45_14 OX=1801 615 GN=queG PE=3 SV=1
MSHYTKFNSTKNISQLSRDIKRWGLELGFNQIGITDTHLQTAETEHQAWIKKGFHGEMDYMAKHGTKRTRPAELVPNTNRIISARLDYLPPNAKDSEAILQNNSRAFISRYALGRDYHKVMRNKLQKLCEKIQAELAHDQTSHFEYRAFTDSAPVLEVTLAEKSGLGWRGKHTLLINKSHGSWFFLGEIYTNLPLEIDEPATNHCGTCTSCIDVCPTQAITAPYEVDARRCISYLTIELKGSIPVELRPLIGNRVYGCDDCQLYCPWNKFAEITKEPDFAVKHGLDDISLIDCFNWSEDEFKTKMAGSAIYRIGYTQWLRNIAIGLGNAETTTEIIETLKQHINHENDLVREHVCWALSCHLLDPTF

SEQ ID NO: 78459 - protein, 369 aa, Methylotenera versatilis
  misc_feature (1)..(369): tr|D7DII8|D7DII8_METV0 Epoxyqueuosine reductase OS=Meth ylotenera versatilis (strain 301) OX=666681 GN=queG PE= 3 SV=1
MTDLNETIQSKFTQLANDIKQWGLALGFNQIGITDTNLQEAEVEHQAWIAKGFHGEMDYMAKHGVKRTRPAELVPNTLRVISARLDYMPPNAVDSESIMQDSSKAFISRYAMGRDYHKVMRNKLQKLCEKIQSEMTKYKVDDFSYRAFTDSAPVLEVALAEKAGLGWRGKHTLLINKNRGSWFFLGEIYTNLPLPIDEAGTNHCGICTSCIDVCPTKAITAPYEVDARRCISYLTIELKTSIPIEFRSLIGNRVYGCDDCQLFCPWNKFAEITHESDFAVKNGLDNISLVQCFAWTEAQFKQNMAGSAIYRIGYEQWLRNIAVGLGNASTTPEILEALQNRKNDASALLREHIDWALEQHKLSSDTADI

SEQ ID NO: 78460 - protein, 356 aa, Methylothermaceae bacteria
  misc_feature (1)..(356): tr|A0A148NAI2|A0A148NAI2_9GAMM Epoxyqueuosine reductase OS=Methylothermaceae bacteria B42 OX=1798802 GN=queG P E=3 SV=1
MDINYRQLARQIKTWGAELGFQSVGITDTDLSQAEKEFNDWLANQYHGEMNYMGRHGHKRTRPQALVPATLSVISVRMEYLPESAQAMESVLNRPTMGYISRYALGRDYHKVIRKRLQQLANKIEKAVGPFGYRVFCDSAPVLEKPLANKAGLGWIGKHTNLIAYKNGSWFFLGEIYTDLPLPSDKPVETSHCGSCRACIDICPTKAIVAPYLLDARRCISYLTIELKGSIPEEFRKAIGNRIYGCDDCQIVCPWNRHAQMTLETDFLPRNHLDQPDLRELFLWDEPTFLAKTEGSAIRRLGHTRWLRNIAVALGNAPSSEAIIQVLKQRLNDASPLVREHVRWALNQHIELAVKR

SEQ ID NO: 78461 - protein, 368 aa, Methyloversatilis sp.
  misc_feature (1)..(368): tr|A0A257XC40|A0A257XC40_9PROT Epoxyqueuosine reductase OS=Methyloversatilis sp. 12-65-5 OX=1970398 GN=queG PE =3 SV=1
MPARPTFPPSLPGSPAALAAQIRGWAHELGFASVGFAGVDLGDAETRLMDWLAAGRHGEMHYMERHGTARARPAELVPGTLSVISVRLPYWPDPQQATDAQAVLEDPDAAYVSRYALGRDYHKVLRARLQALADRIEARVGPFGYRAFTDSAPVMEVEIARRAALGWRGKHTLLIHRDAGSLFFLGELYTNLPLPADTPQSDHCGTCTRCIDVCPTGAIVAPYQLDARLCVSYLTIELDGPIPELLRPAIGNRIYGCDDCQLVCPWNRHAQLAVEPDFAVRNGLDRASLTELFAWREDEFDKKLAGSAIRRIGHARWLRNIAVALGNAPASVANIAALNARADHSSAMVREHVTWALARQHSPDPLHD

SEQ ID NO: 78462 - protein, 368 aa, Methyloversatilis sp.
  misc_feature (1)..(368): tr|A0A1B3LIQ2|A0A1B3LIQ2_9PROT Epoxyqueuosine reductase OS=Methyloversatilis sp. RAC08 OX=1842540 GN=queG PE=3 SV=1
MPARTTTSPPLPCSPDELAAHVREWGQALGFASVGFAGINLGEAETRLMEWLAAGRHGDMHYMERHGTARARPAELVPGTLSIISVRLPYWPDPREAADAQAVLDDADAAYVSRYALGRDYHKVLRARLQALADRIEAQVGPFGYRAFTDSAPVMEVEIARRAALGWRGKHTLLIHRDAGSLFFLGELYTNLPLPADTAQPDHCGTCTRCIDVCPTGAIVAPYQLDARLCVSYLTIELDGSIPEPLRPAIGNRIYGCDDCQLVCPWNRHAQLAVEPDFAVRNGLDRASLTELFAWNEDEFDAKLAGSAIRRIGHARWLRNIAVALGNAPASAANIAALNARADHPSAMVREHVAWALARQHSPDPQHD

SEQ ID NO: 78463 - protein, 359 aa, Methyloversatilis universalis
  misc_feature (1)..(359): tr|F5RHL8|F5RHL8_METUF Epoxyqueuosine reductase OS=Meth yloversatilis universalis (strain ATCC BAA-1314 / JCM 1 3912 / FAM5) OX=1000565 GN=queG PE=3 SV=1
MSDALPCSPLELADRIRAWAHELGFASVGISGIDLGEAEARLLDWLAAGRHGDMDYMARHGVTRARPAELVPGTLSVISVRMPYWPDEAADAQGVLDDGELGYVSRYALGRDYHKVLRSRLQKLAERIETVTGPFGHRAFTDSAPVLEVEIARRAALGWRGKHTLLIHRDAGSMFFLGELFTTLPLPPDAPQPDHCGTCTRCIDVCPTGAIVAPYQLDARLCVSYLTIELDGPIPEPLRPAIGNRIYGCDDCQLVCPWNRHAKKAMEPDFAVRNGLDRAPLTALFAWSEDEFNRRLEGSAIRRIGHERWLRNIAVALGNAPAAPAISAALQARADHPSPVVREHIAWALARQHSPDTPT

SEQ ID NO: 78464 - protein, 377 aa, Methylovirgula sp.
  misc_feature (1)..(377): tr|A0A371WFA8|A0A371WFA8_9RHIZ Epoxyqueuosine reductase OS=Methylovirgula sp. 4M-Z18 OX=2293567 GN=queG PE=3 S V=1
MQSDHTAFKSRLAVAAKDLGFDLCRIAAPDALPLAPERLAAWLALDRHGSMDWMQDTAARRADPRVLWPEVRSIVMLGVNYGPEEDPRATLAARHKGTISVYARNRDYHDVIKGKLKLLAQWLVKAAKPEVCDVKVFVDTAPVMEKPLAMSAGLGWQGKHTNLVSREFGSWLFLGSIFTSLPLAPDEAEVDHCGSCRACLDVCPTDAFPAPYQIDARRCISYLTIEHKGPIPRALRQAMGNRIYGCDDCLAVCPWNKFAQASREAKLAARGDLNAPDLTFLASLDDAAFRTHFSGSPIKRIGRDRFLRNVLIAIGNAKDPAMADIAIGHLNDESPVVRGAAVWALARLAPPDVFQHHAAQAFARETDDEVRAEWIEA

SEQ ID NO: 78465 - protein, 370 aa, Methylovorus glucosetrophus
  misc_feature (1)..(370): tr|C6XDA4|C6XDA4_METGS Epoxyqueuosine reductase OS=Meth ylovorus glucosetrophus (strain SIP3-4) OX=582744 GN=qu eG PE=3 SV=1
MQFTSDSPVLPIDLPALALDIKRWAQELGFSQLGITDTDLSAAEPAHQAWLEKGFHGAMDYMAKHGSKRTRPQELVPGTLRILSVRMNYQPPATRDSWEVMADGESAFISRYALGRDYHKVLRSRLQQLCDRIAAHIAPLTDDSFDYRVFTDSAPVLEVELAQKAGLGWRGKHTLLLSRDAGSWFFLGEIYTNLPLPVDTPGQNHCGTCHACLDICPTQAIVAPYEVDARRCISYLTIELKDSIPESLRPLIGNRVYGCDDCQLACPWNKFGQLTAQEDFHVRHGLDNASLVELFGWDEATFKERMAGSAIYRIGHEQWLRNIAVGLGNAPSSPEVISALKKRLDHPSPLVNEHVRWALKQHEHLSAAAL

SEQ ID NO: 78466 - protein, 363 aa, Methylovorus sp.
  misc_feature (1)..(363): tr|A0A1A9T5R8|A0A1A9T5R8_9PROT Epoxyqueuosine reductase OS=Methylovorus sp. MM2 OX=1848038 GN=queG PE=3 SV=1
MQNTFSDLSKLAADIKQWGLELGFSQLGITDTNLSAAEPEYKEWLVKGFHGAMDYMAKHGDKRTRPAELVPGTVRVISVRMDYRPPNARNSDEVMLNGTQAFISRYALGRDYHKVMRNRLQKLCERISQEIGPFGFRVFTDSAPVMEVALAERSGLGWRGKHTLLLSRDAGSWFFLGEVYIDIPLPIDAPTSKHCGTCTACIDVCPTQAIVAPYEVDARRCISYLTIELKESIPEPLRPLIGNRVYGCDDCQLTCPWNKFAQITKEEDFHVRHGLDDVTLVELFAWDESTFKQKMTGSAIYRIGYSQWLRNIAVGLGNAPSSPEIISALESRQNDESALVKEHVEWALNRHKSAIPSAPYTAQ

SEQ ID NO: 78467 - protein, 357 aa, Methylovulum psychrotolerans
  misc_feature (1)..(357): tr|A0A1Z4BYB1|A0A1Z4BYB1_9GAMM Epoxyqueuosine reductase OS=Methylovulum psychrotolerans OX=1704499 GN=queG PE= 3 SV=1
MSEADTAMVELAQQIKQWGLALGFQQVGISDTDLAEAEGHLQGWLAQDFHGDMDYMQRHGLKRSRPALLQEGTRSIISVRMDYLPEAAAAMHSVLADPAAAYISRYALGRDYHKVLRNRLQKLADRIQAQCADLGYRVFVDSAPVLEKAIAEKAGLGWIGKHSNLLNRKAGSWFFLGEIYTDLPLPADTPTANHCGVCTACLAICPTQAIVAPYQVDARRCVSYLTIELHGPIPEDLRPLLGNRIYGCDDCQLVCPWNRFAHFSSESDFHPRHRLNSQQLLAVFAWDEAEFLRKTEGSAIRRIGHERWLRNIAVALGNAQPSPAIIAALTARLAHPSALVREHVQWALQCQTGLNDG

SEQ ID NO: 78468 - protein, 357 aa, Methylovulum psychrotolerans
  misc_feature (1)..(357): tr|A0A2S5CK73|A0A2S5CK73_9GAMM Epoxyqueuosine reductase OS=Methylovulum psychrotolerans OX=1704499 GN=queG PE= 3 SV=1
MSESDTAMVELAQQIKQWGLALGFQQVGISDTDLAEAEGHLQGWLAQDFHGDMDYMQRHGLKRSRPALLQEGTRSIISVRMDYLPEAAAAMHSILADRAAAYISRYALGRDYHKVLRNRLQKLADRIQAQCADLGYRVFVDSAPVLEKAIAEKAGLGWIGKHSNLLNRKAGSWFFLGEIYTDLPLPADTPTANHCGVCTACLAICPTQAIVAPYQVDARRCVSYLTIELHGPIPEDLRPLLGNRIYGCDDCQLVCPWNRFAHFSNESDFHPRHKLNSQQLLAVFAWDEAEFLRKTEGSAIRRIGHERWLRNIAVALGNAQPSPAIIAALTARLAHPSALVREHVQWALQCQTGLNDG

SEQ ID NO: 78469 - protein, 378 aa, Methylovulum sp.
  misc_feature (1)..(378): tr|A0A522DNB4|A0A522DNB4_9GAMM Epoxyqueuosine reductase OS=Methylovulum sp. OX=1916980 GN=queG PE=3 SV=1
MNADEACRLGLYALRLCAPQAPDEDMAKLARQIKQWGQELGFQQIGITDTDLSGAETHLQAWLASHFHGEMDYMQRHGVKRSRPGELHAGTIRIISVRMDYLPEPPLAMKQALADPSAAYISRYALGRDYHKLMRKRLQKLVDKIQAATASSPNSSPAMRAFVDSAPVLEKAIAEKAGLGWIGKHSNLINRKAGSWFFLGEIYTDLPLPVDSPATAHCGACTACIDICPTQAIVAPYRVDARRCVSYLTIELHGSIPEHLRPLIGNRIYGCDDCQLICPWNRFARLTGERDFNPRHRLDTQQLLEVFAWDEQTFLSKTEGSAIRRIGYERWLRNIAVALGNAPASEGIIGALTAKSGHLSGMVREHVQWALDRHCETR

SEQ ID NO: 78470 - protein, 377 aa, Microbacterium sp.
  misc_feature (1)..(377): tr|A0A542GT30|A0A542GT30_9BACI Epoxyqueuosine reductase OS=Microbacterium sp. SLBN-1 OX=1489561 GN=queG PE=3 S V=1
MDMEQLKSDIISYSKTIGIDKIGFTTADTFTEMKNRLIRQEMAGYQSGFEEPDIDKRVDPSLTFDQPRSIIAIALAYPSRMKDAPRSKRGERRGIFCRASWGTDYHHILRDRLKKLEEYIVSRIPEARFRSMVDTGELVDRAVSERAGIGWSGKNCSIITPEFGSYVYLGEMITNLPFSPDKPIEDGCGTCNKCVDVCPTGALIEGGRLDAQKCIAFLTQTKGFLQDEYRVKLGNRIYGCDTCQTVCPENKGKDFHLHEEMEPDPEVAKPLLKPLLTISNRDFKETYGHISGSWRGKKPIQRNAIIALAHYKDETAIPDLIRVLKNDVRPVMRGTSAWALGKIGGQEAEEALKHQIEKEADPEVLAEIQKGLHLMTE

SEQ ID NO: 78471 - protein, 370 aa, Microbulbifer agarilyticus
  misc_feature (1)..(370): tr|A0A1Q2M1B7|A0A1Q2M1B7_9GAMM Epoxyqueuosine reductase OS=Microbulbifer agarilyticus OX=260552 GN=queG PE=3 S V=1
MSNTPDPQTMAELATQIRVWGRELGFQQVGITDCQLEKHGERLQHWLDAGYNGDMEWMGAHGDKRWRPDLLEEGTLRVISVRLDYLPPDTQPVQVLKDPGKAYVSRYANGRDYHKLIRKRLAQLAQQIDRYCEERGIPAQGRAFTDSAPVMERALAEKAGLGWIGKNCMVINSQAGSWFFLGEIYTNLPLPIDVSDEPNRCGECTACLKVCPTDAFIDAYTLDARRCISYLTIENKGPIPEELREPMGNRVFGCDDCQIICPWNKFAKPTAEQDFHPRHGLDSGELTDLFRWTEQEFLKKTEGSAIRRIGFERWQRNLAVALGNADATAEVITALEEQLDSATPLVAEHIQWALARLRSGRRRKRKIKRS

SEQ ID NO: 78472 - protein, 370 aa, Microbulbifer aggregans
  misc_feature (1)..(370): tr|A0A1C9W657|A0A1C9W657_9GAMM Epoxyqueuosine reductase OS=Microbulbifer aggregans OX=1769779 GN=queG PE=3 SV= 1
MNRAVLAELADLIKLWGRELGFQQIGITDCQLTQDAEHLRAWLDAGHHGDMDWMAAHGDKRWRPEHLEPGTLRVISARLDYLPPDTEPVRVLKDSSKAYVSRYATGRDYHKLIRKRLAQLGERIRHFCEEREIETSGRAFTDSAPVMERALAQKAGLGWIGKNCMVINSGAGSWFFLGELFTSLPLPIDESDEPNQCGDCSACLKICPTDAFAGPYQLDARRCISYLTIENKGPIPEEFREPMGNRVFGCDDCQIICPWNRFAHPTAESDFHPRHGLADGDLLTLFQWSEEEFLERTAGSAIRRIGYERWRRNLAVALGNGEASAEAIAALESALEDSTPLVAEHVRWALERLRSGRRRRRKIRRTQTER

SEQ ID NO: 78473 - protein, 372 aa, Microbulbifer donghaiensis
  misc_feature (1)..(372): tr|A0A1M5EID2|A0A1M5EID2_9GAMM Epoxyqueuosine reductase OS=Microbulbifer donghaiensis OX=494016 GN=queG PE=3 S V=1
MTETLLAQLAAQIKIWGRELGFQQIGITDCQLEEHGERLRAWLDAGHNADMDWMGAHGEKRWRPELLQPGTLRAISARLDYLPPDTQPVRVLKDSSKAYVSRYANGRDYHKLIRKRLAQLAQRIDDFCNANGLESSGRAFTDSAPVMERALAEKAGLGWIGKNCMVINSGAGSWFFLGEIYTNLALPADNSTESNQCGDCSACLKVCPTDAFIGPYQLDARRCISYLTIENKGPIPEEFREPLGNRVFGCDDCQIICPWNKFAKPTAERDFHPRHGLDDGDLLTLFGWGEEEFLRKSEGSAIRRIGYERWQRNLAVALGNAEPCAEIVAALEGARHRATPLVAEHIEWALARLNSGRRRKRKIKRPTAGPTT

SEQ ID NO: 78474 - protein, 372 aa, Microbulbifer marinus
  misc_feature (1)..(372): tr|A0A1H3ZGR0|A0A1H3ZGR0_9GAMM Epoxyqueuosine reductase OS=Microbulbifer marinus OX=658218 GN=queG PE=3 SV=1
MTETLLTELATQIKIWGRELGFQQIGITDCQLEQHGERLRAWLDAGHNGDMDWMGAHGEKRWRPDLLQPGTLRVISARLDYLPPDTQPVRVLKDADKAYVSRYANGRDYHKLIRKRLAQLAQRIDDFCNANGMDSSGRAFTDSAPVMERALAEKAGLGWIGKNCMVINSGAGSWFFLGEIYTNLALPVDNSDETNQCGDCTACLKVCPTDAFVGPYQLDARRCISYLTIENKGPIPEEFREPMGNRVFGCDDCQIICPWNKFAKPTAERDFHPRHGLDDGDLLTLFGWSEEEFLRKTEGSAIRRIGFERWQRNLAVALGNGRPGADVIAALERALPEATPLVREHIEWALARLHSGRRRKRKIRRPATGSTL

SEQ ID NO: 78475 - protein, 369 aa, Microbulbifer sp.
  misc_feature (1)..(369): tr|A0A2S1JMG7|A0A2S1JMG7_9GAMM Epoxyqueuosine reductase OS=Microbulbifer sp. A4B17 OX=359370 GN=queG PE=3 SV=1
MTESLLADLAQQIKIWGRELGFQQVGITDCQLEEEGERLRAWIDAGYHADMDWMGAHGEKRWRPELLEPGTLRVISVRLDYLPPDTQPIKVLKDSSKAYVSRYANGRDYHKLIRKRLANLSKQIDTYCAERGIESKGRAFTDSAPVMEKALAAKAGLGWIGKNTLVLNSTAGSYFFLGEIYTNLPLPIDISEEHDQCGDCVACLRVCPTDAFIDDRTLDARRCISYLTIENKGPIPEEFREPIGNRIYGCDDCQIVCPWNKFAKPTKEKDFHPRHELDNGELLKLFTWSEEEFLRKTEGSAIRRIGHERWLRNLAVAIGNGETTPEVINTLESARANATPLVLEHIDWALERLRSGRRRKRKIKRKPAG

SEQ ID NO: 78476 - protein, 370 aa, Microbulbifer sp.
  misc_feature (1)..(370): tr|A0A0X3U473|A0A0X3U473_9GAMM Epoxyqueuosine reductase OS=Microbulbifer sp. ZGT114 OX=1685377 GN=queG PE=3 SV =1
MNQAALAELAALIKDWGRELGFQQIGITDCHLTEDAEHLRAWIDAGHHGDMDWMAAHGDKRWRPEKLEPGTLRVISARLDYLPPDTEPVRVLKDSSKAYVSRYATGRDYHKLIRKRLAQLGERIEHFCDERGIEVKGRAFTDSAPVMERALAQKAGLGWIGKNCMLINSGAGSWFFLGELFTSLPLPVDESDEPNQCGECSACLKVCPTDAFLGPNQLDARRCISYLTIENKGPIPEEFREPMGNRVFGCDDCQIICPWNRFAQPTAERDFHPRHGLADGDLLALFRWSEDEFLQRTAGSAIRRIGYERWQRNLAVAIGNGEPAAEAIAALESARGNATPLVAEHIHWALQRLRSGRRRRRKIRRQLNQD

SEQ ID NO: 78477 - protein, 370 aa, Microbulbifer thermotolerans
  misc_feature (1)..(370): tr|A0A143HQH3|A0A143HQH3_9GAMM Epoxyqueuosine reductase OS=Microbulbifer thermotolerans OX=252514 GN=queG PE=3 SV=1
MNEPLLVELAALIKTWGRELGFQQLGIADCHLEAHGERLRAWLEAGYHGDMEWMGAHGEKRWRPELLQPGTVRVISARLDYLPPDTQPVRVLKDARKAYISRYATGRDYHKLIRKRLAHLAQKIDAWCAERGFDSAGRAFTDSAPVMERALAEKAGLGWIGKNCMAINSSAGSWFFLGEIYTNLALPVDKSTQPNQCGECSACLKVCPTDAFIAPYQLDARRCISYLTIENKGPIPEVFREPMGNRVFGCDDCQIICPWNKFAKPTGERDFHPRHGLDDGDLLTLFKWGEEEFLRKTEGSAIRRIGYERWRRNLAVALGNAEACGEIVAALEAARPGSTPLVAEHIDWALARLRSGRRRKRKIKRPQSPA

SEQ ID NO: 78478 - protein, 378 aa, Microbulbifer thermotolerans
  misc_feature (1)..(378): tr|A0A1I1IKW4|A0A1I1IKW4_9GAMM Epoxyqueuosine reductase OS=Microbulbifer thermotolerans OX=252514 GN=queG PE=3 SV=1
MAPVAFNTMNEPLLVELAALIKTWGRELGFQQLGIADCHLEAHGERLRAWLEAGYHGDMEWMGAHGEKRWRPELLQPGTVRVISARLDYLPPDTQPVRVLKDARKAYISRYATGRDYHKLIRKRLAHLAQKIDAWCAERGFDSAGRAFTDSAPVMERALAEKAGLGWIGKNCMAINSSAGSWFFLGEIYTNLALPVDKSTQPNQCGECSACLKVCPTDAFIAPYQLDARRCISYLTIENKGPIPEVFREPMGNRVFGCDDCQIICPWNKFAKPTGERDFHPRHGLDDGDLLTLFKWGEEEFLRNTEGSAIRRIGYERWRRNLAVALGNAEACGEIVAALEAARPDATPLVAEHIDWALARLRSGHRRKRKIKRPKSPA

SEQ ID NO: 78479 - protein, 373 aa, Microbulbifer yueqingensis
  misc_feature (1)..(373): tr|A0A1G9CZ91|A0A1G9CZ91_9GAMM Epoxyqueuosine reductase OS=Microbulbifer yueqingensis OX=658219 GN=queG PE=3 S V=1
MSDSPDADKLLAELAAHIKTWGRELGFQQVGITDCRLEAHGERLRQWLAAGYQGEMDWMAAHGDKRWRPELLEPGTLRAISVRLDYLPPDTEPVRVLKDDSKAYVSRYATGRDYHKLIRKRLARLAAQVEEFCSRHGLAAKGRAFTDSAPVMERALAEKAGLGWIGKNCMVLNSGAGSWFFLGEIYTNLALPVDTSTEPNQCGECTACLKVCPTDAFVGPYQLDARRCISYLTIENKGAIPEEFREPMGNRVFGCDDCQIICPWNRFARPTAESDFHPRHGLDDGGLLALFGWSEQEFLERTAGSAIRRIGYERWQRNLAVALGNGDATPEVITALEQRLADTTPLVAEHIEWALARLRSGRRRRRKIKRGAA

SEQ ID NO: 78480 - protein, 373 aa, Micrococcus lylae; identical to SEQ ID NO: 78025
  misc_feature (1)..(373): tr|A0A378NYZ9|A0A378NYZ9_9MICC Epoxyqueuosine reductase OS=Micrococcus lylae OX=1273 GN=queG PE=4 SV=1

SEQ ID NO: 78481 - protein, 312 aa, Microcoleaceae bacterium
  misc_feature (1)..(312): tr|A0A355CGY6|A0A355CGY6_9CYAN Epoxyqueuosine reductase OS=Microcoleaceae bacterium UBA10368 OX=2055793 GN=que G PE=3 SV=1
MKAPISSILVKQKSLELGFHKVGIALVGCGTDEEAQRLQRWLDKGYQADMGWMANPKRQDIRASMSEVKSLICVAINYYTPHQRPESPEYAKISRYGWGRDYHKILHKKLKVLADWVRSQGEGIEARYYADTGPIQDKVWAQRAGIGWIAKNGNVISREYGSWVFLGEVLTNLELVPDSGHTQHCGTCTRCIDACPTGAITEPFVVNADQCIAYHTIENRAEKLPDEIASNLQGWVAGCDICQDVCPWNQRFAKPTDVAEFEPYPENIAPTLAELAAISDEEWNRRFTASALRRIKPEMLRRNARGNQINSH

SEQ ID NO: 78482 - protein, 312 aa, Microcoleaceae bacterium; identical to SEQ ID NO: 78481
  misc_feature (1)..(312): tr|A0A3D5GCT6|A0A3D5GCT6_9CYAN Epoxyqueuosine reductase OS=Microcoleaceae bacterium UBA9251 OX=2055794 GN=queG PE=3 SV=1

SEQ ID NO: 78483 - protein, 321 aa, Microcoleus sp.
  misc_feature (1)..(321): tr|K9WIX0|K9WIX0_9CYAN Epoxyqueuosine reductase OS=Micr ocoleus sp. PCC 7113 OX=1173027 GN=queG PE=3 SV=1
MSLSEEISVSSSQVKQEARSLGFHLCGIAAVDDQASSPTREHLEAWLALGYQADMAWMDNPQRFDIRACMPEVQSVICVALNYYTPHQRPQGSEYAKISRYGWGRDYHKVMHKKLKALTNWLSAQGEGILARYYADTGPVQDKVWAQRAGMGWIAKNANVITREYGSWVFLGEVLTNLPLTPDQPHTQHCGTCTRCLDACPTGAITKPFVVDANRCIAYHTIENRRQELPESLAPYLEGWVAGCDICQDVCPWNQRFAQETDVAEFQPYPWNVAPTLTELATLSDDEWNRRFPASALRRIKPEMLRRNAQANLKAAQASNQ

SEQ ID NO: 78484 - protein, 311 aa, Microcoleus vaginatus
  misc_feature (1)..(311): tr|F5UIJ1|F5UIJ1_9CYAN Epoxyqueuosine reductase OS=Micr ocoleus vaginatus FGP-2 OX=756067 GN=queG PE=3 SV=1
MKAPISSILVKQKALELGFHKVGIALVDEGTDKDAQRLQAWLNKGYQADMAWMANPKRQDIRAAMPEVKSLICVAINYYTPHQRPGGSEYAKISRYGWGRDYHKILHKKLKVLANWVRSQGEGIEARYYADTGPIQDKMWAQRAGIGWIAKNGNVISREYGSWVFLGEILTNLELASDEPHTEHCGTCTRCIEACPTGAITEPFVVNADRCIAYHTIENRAEKLPDEIGSNLQGWVAGCDICQDVCPWNQRFAKPTDVADFEPYPENIAPTLAELADISDEEWNRRFTASALRRIKPEMLRRNAKANQINP

SEQ ID NO: 78485 - protein, 315 aa, Microcystis aeruginosa
  misc_feature (1)..(315): tr|B0JWY3|B0JWY3_MICAN Epoxyqueuosine reductase OS=Micr ocystis aeruginosa (strain NIES-843) OX=449447 GN=queG PE=3 SV=1
MVTETQIKEKALELGFHGVGIASVDSQDSAVSHLKSWLERGYHADMDWMTNPKRQDITTLWPEVRSLICLALNYYTPQQHSQEQNHGKISRYAWGRDYHKVLSKKLKALSQWLESQGEQIQTRYYVDTGPVQDKVWAQRAGIGWIAKNGNLITRNYGSWVFLAEILTNLPLEPDRPHSDHCGTCSRCLSSCPTQAIVSPYVVDANRCIAYHTIENRAVTLPTEIAKNLQGWVAGCDICQDVCPWNQRFAQVTDVEDFQPRPENLSPRLDELANLTIEEWDRRFISSALRRIKPQQWRRNAQANLAHSPHPAQDDN

SEQ ID NO: 78486 - protein, 315 aa, Microcystis aeruginosa
  misc_feature (1)..(315): tr|L7E7R3|L7E7R3_MICAE Epoxyqueuosine reductase OS=Micr ocystis aeruginosa TAIHU98 OX=1134457 GN=yjeS PE=3 SV=1
MVTETQIKEKALELGFHGVGIASVDSQDSAVSHLKSWLERGYHADMDWMTNPKRQDIKTLWPEVRSLICLALNYYTPQQHSQEQNHGKISRYAWGRDYHKVLSKKLKALSQWLESQGEQIQTRYYVDTGPVQDKVWAQRAGIGWIAKNGNLITRNYGSWVFLGEILTNLPLEPDRPHSAHCGTCSRCLSACPTQAIVSPSVVDANRCIAYHTIENRAVTLPTEIAKNLQGWVAGCDICQDVCPWNQRFAQVTDVEDFQPRPENLSPKLEELANLTIEEWDRRFISSALRRIKPQQWRRNAQANLAHSPHPPQDDN

SEQ ID NO: 78487 - protein, 315 aa, Microcystis flosaquae
  misc_feature (1)..(315): tr|A0A3E0LS89|A0A3E0LS89_9CHRO Epoxyqueuosine reductase OS=Microcystis flos-aquae DF17 OX=2060470 GN=queG PE=3 SV=1
MVTETQIKEKALELGFHGVGIASVDSQDSAVSHLKSWLERGYHADMDWMTNPKRQNIKTLWPEVRSLIGLALNYYTPQQHSQEQNHGKISRYAWGRDYHKVLSKKLKALSQWLESQGEQIQTRYYVDTGPVQDKFWAQRAGIGWIAKNGNLITRNYGSWVFLAEILTNLPLEPDRPHSDHCGTCSRCLSSCPTQAIVSPYVVDANRCIAYHTIENRAVTLPTEIAKNLQGWVAGCDICQDVCPWNQRFAQVTDVEDFQPRPENLSPRLDELANLTIEEWDRRFISSALRRIKPQQWRRNAQANLAHSPHPAQDDN

SEQ ID NO: 78488 - protein, 315 aa, Microcystis flosaquae
  misc_feature (1)..(315): tr|A0A3E0L9F4|A0A3E0L9F4_9CHRO Epoxyqueuosine reductase OS=Microcystis flos-aquae TF09 OX=2060473 GN=queG PE=3 SV=1
MVTETQIKEKALELGFHGVGIASVDSQDSAVSHLKSWLERGYHADMDWMTNPKRQDIKTLWPEVRSLICLALNYYTPQQHSQEQNHGKISRYAWGRDYHKVLSKKLKALSQWLESQGEQIQTRYYVDTGPVQDKVWAQRAGIGWIAKNGNLITRNYGSWVFLGEILTNLPLEPDRPHSAHCGTCSRCLSACPTQAIVSPYVVDANRCIAYHTIENRAVTLPTEIAKNLQGWVAGCDICQDVCPWNQRFAQVTDVEDFQPRPENLSPKLEELANLTIEEWDRRFISSALRRIKPQQWRRNAQANLAHSSNPLQDDN

SEQ ID NO: 78489 - protein, 315 aa, Microcystis novacekii
  misc_feature (1)..(315): tr|A0A552IT75|A0A552IT75_9CHRO Epoxyqueuosine reductase OS=Microcystis novacekii Mn_MB_F_20050700_S1D OX=24862 66 GN=queG PE=3 SV=1
MVTETQIKEKALELGFHGVGIASVDSQDSAVSHLKSWLERGYHADMDWMTNPKRQDIKALWPEVRSLICLALNYYTPQQHSQEQNHGKISRYAWGRDYHKVLSKKLKALSQWLESQGEQIQTRYYVDTGPVQDKVWAQRAGIGWIAKNGNLITRNYGSWVFLAEILTNLPLEPDRPHSAHCGTCSRCLSACPTQAIVSPYVVDANRCIAYHTIENRAVTLPTEIAKNLQGWVAGCDICQDVCPWNQRFAQVTDVEDFQPRPENLSPRLGELANLTIEEWDRRFISSALRRIKPQQWRRNAQANLAHSPHPVQDDN

SEQ ID NO: 78490 - protein, 315 aa, Microcystis panniformis
  misc_feature (1)..(315): tr|A0A0K1S9H8|A0A0K1S9H8_9CHRO Epoxyqueuosine reductase OS=Microcystis panniformis FACHB-1757 OX=1638788 GN=qu eG PE=3 SV=1
MVTETQIKEKALELGFHGVGIASVDSQDSAVSHLKSWLERGYHADMDWMTNPKRQDIKTLWPEVRSLICLALNYYTPQQHSQEQNHGKISRYAWGRDYHKVLSKKLKALSQWLESQGEQIQTRYYVDTGPVQDKVWAQRAGIGWIAKNGNLITRNYGSWVFLAEILTNLPLEPDRPHSAHCGTCSRCLSACPTQAIVSPYVVDANRCIAYHTIENRAVTLPTEIAENLQGWVAGCDICQDVCPWNQRFAQVTDVEDFQPRPENLSPRLEELANLTIEEWDRRFISSALRRIKPQQWRRNAQANLAHSPHPAQDDN

SEQ ID NO: 78491 - protein, 315 aa, Microcystis panniformis
  misc_feature (1)..(315): tr|A0A552Q3X9|A0A552Q3X9_9CHRO Epoxyqueuosine reductase OS=Microcystis panniformis Mp_MB_F_20051200_S9 OX=2486 223 GN=queG PE=3 SV=1
MVTETQIKEKALELGLHGVGIASVDSQDSAVSHLKSWLERGYHADMDWMTNPKRQDIKTLWPEVRSLICLALNYYTPQQHSQEQNHGKISRYAWGRDYHKVLSKKLKALSQWLESQGEQIQTRYYVDTGPVQDKVWAQRAGIGWIAKNGNLITRNYGSWVFLGEILTNLPLEPDQPHSAHCGTCSRCLSACPTQAIVSPYVVDANRCIAYHTIENRAVTLPTEIAKNLQGWVAGCDICQDVCPWNQRFAQVTDVEDFQPRLENLSPKLEELANLTIEEWDRRFISSALRRIKPQQWRRNAQANLTHSPNPVQDDN

SEQ ID NO: 78492 - protein, 315 aa, Microcystis sp.
  misc_feature (1)..(315): tr|A0A2L2XLT0|A0A2L2XLT0_9CHRO Epoxyqueuosine reductase OS=Microcystis sp. 0824 OX=1502726 GN=queG PE=3 SV=1
MLTETQIKEKALELGFHGVGIASVDSQDSAVSHLKSWLERGYHADMDWMTNPKRQDIKTLWPEVRSLICLALNYYTPQQHSQEQNHGKISRYAWGRDYHKVLSKKLKALSQWLESQGEQIQTRYYVDTGPVQDKVWAQRAGIGWIAKNGNLITRNYGSWVFLGEILTNLPLEPDRPHSAHCGTCSRCLSACPTQAIVSPHVVDANRCIAYHTIENRSVTLPTEIAKNLQGWVAGCDICQDVCPWNQRFAQVTDVEDFQPRPENLSPRLDELANLTIEEWDRRFISSALRRIKPQQWRRNAQANLAHSPNPLQDDN

SEQ ID NO: 78493 - protein, 315 aa, Microcystis sp.
  misc_feature (1)..(315): tr|I4IJG8|I4IJG8_9CHRO Epoxyqueuosine reductase OS=Micr ocystis sp. T1-4 OX=1160279 GN=queG PE=3 SV=1
MVTETQIKEKALELGFHGVGIASVDSQDSAVSHLKSWLERGYHADMDWMTNPKRQDIKTLWPEVRSLICLAINYYTPQQQSQEQNHGKISRYAWGRDYHKVLSKKLKALSQWLESQGEQIQTRYYVDTGPVQDKVWAQRAGIGWIAKNGNLITRNYGSWVFLSEILTNLPLEPDRPHSAHCGTCSRCLSACPTQAIVSPYVVDANRCIAYHTIENRAVTLPTEIAKNLQGWVAGCDICQDVCPWNQRFAQVTDVEDFQPRPENLSPRLDELANLTIEEWDRRFISSALRRIKPQQWRRNAQANLAHSLNPAQDDN

SEQ ID NO: 78494 - protein, 315 aa, Microcystis viridis
  misc_feature (1)..(315): tr|A0A552H510|A0A552H510_MICVR Epoxyqueuosine reductase OS=Microcystis viridis Mv_BB_P_19951000_S68D OX=248627 0 GN=queG PE=3 SV=1
MVTETQIKEKALELGFHGVGIASVDSQDSAVSHLKSWLERGYHADMDWMTNPKRQDIKTLWPEVRSLIGLALNYYTPQQHSQEQNHGKISRYAWGRDYHKVLSKKLKALSQWLESQGEQIQTRYYVDTGPVQDKFWAQRAGIGWIAKNGNLITRNYGSWVFLGEILTNLSLEPDRPHSAHCGSCSRCLSACPTQAIVSPYVVDANRCIAYHTIENRAVTLPTEIAKNLQGWVAGCDICQDVCPWNQRFAQVTDVADFQPRPENLSPRLDELANLTIEEWDRRFISSALRRIKPQQWRRNAQANLAHSPNPVQDDN

SEQ ID NO: 78495 - protein, 315 aa, Microcystis viridis; identical to SEQ ID NO: 78485
  misc_feature (1)..(315): tr|A0A3G9K3I1|A0A3G9K3I1_MICVR Epoxyqueuosine reductase OS=Microcystis viridis NIES-102 OX=213615 GN=queG PE=3 SV=1

SEQ ID NO: 78496 - protein, 315 aa, Microcystis wesenbergii
  misc_feature (1)..(315): tr|A0A552MBY8|A0A552MBY8_9CHRO Epoxyqueuosine reductase OS=Microcystis wesenbergii Mw_MB_S_20031200_S109D OX=2 486241 GN=queG PE=3 SV=1
MVTETQIKEKALELGFHGVGIASVDSQDSAVSHLKSWLERGYHADMDWMTNPKRQDIKTLWPEVRSLIGLALNYYTPQQHSQEQNHGKISRYAWGRDYHKVLSKKLKALSQWLESQGEQIQTRYYVDTGPVQDKVWAQRAGIGWIAKNGNLITRNYGSWVFLGEILTNLPLEPDRPHSAHCGTCSRCLSACPTQAIVSPSVVDANRCIAYHTIENRAVTLPTEIAKNLQGWVAGCDICQDVCPWNQRFAQVTDVEDFQPRPENLSPRLEELANLTIEEWDRRFISSALRRIKPQQWRRNAQANLAHSPNPVQDDN

SEQ ID NO: 78497 - protein, 315 aa, Microcystis wesenbergii
  misc_feature (1)..(315): tr|A0A3E0LQZ1|A0A3E0LQZ1_9CHRO Epoxyqueuosine reductase OS=Microcystis wesenbergii TW10 OX=2060474 GN=queG PE= 3 SV=1
MPTETQIKEKALELGFHEVGIASVDSQDSAVSHLKSWLERGYHADMDWMTNPKRQDIKTLWPEVRSLICLALNYYTPQQHSQEQNHGKISRYAWGRDYHKVLSKKLKALSQWLESQGEQIQTRYYVDTGPVQDKVWAQRAGIGWIAKNGNLITRNYGSWVFLGEILTNLTLEPDRPHSAHCGTCSRCLSACPTQAIVSPSVVDANRCIAYHTIENRSVTLPTEIAKNLQGWVAGCDICQDVCPWNQRFAQVTDVEDFQPRPENLSPRLDELANLTIEEWDRRFISSALRRIKPQQWRRNAQANLAHSPNPAQDDN

SEQ ID NO: 78498 - protein, 314 aa, Microscilla marina
  misc_feature (1)..(314): tr|A1ZJ68|A1ZJ68_9BACT Epoxyqueuosine reductase OS=Micr oscilla marina ATCC 23134 OX=313606 GN=queG PE=3 SV=1
MNTVQIEKNTRLVKKKAKDLGFEFCGISEATFLEEEAPRLETWLKQKMQGEMGYMANHFDKRLDPRLLVDNAKSVVSLLYNYYPQEDIAQTQQNESYKVSKYAYGTDYHFVIKDKLKELFAFIQQEIGEVGGRVFVDSAPVMDKAWAQKSGVGWIGKHSNLLNRKMGSFFFIAELILDLTLMPDAPTQDYCGTCTRCIDACPTDAIVEPYVVNGSQCISYFTIELKDEIPQEVKGKFENWIFGCDICQDVCPWNRFSKPHQEPLFEPKPGLNQMTKQDWEEITEDVFRDLFRKSAVKRTKIKGLKRNISFVSNP

SEQ ID NO: 78499 - protein, 313 aa, Microscillaceae bacterium
  misc_feature (1)..(313): tr|A0A3C0IFB2|A0A3C0IFB2_9BACT Epoxyqueuosine reductase OS=Microscillaceae bacterium OX=2053581 GN=queG PE=3 S V=1
MITQQAIKSRNTQLIKQKAQELGFLYCGISAAGFLEQEAPKLAEWLQKNMHGEMAYMANHFDKRLDPRLLVEGAKSVITVLLNYFPKQDLAATTTLHVSKYAYGEDYHTVVKQKLKGLMEAIHEEIGQVSGRAFVDSAPVMDKAWAQKSGAGWIGKHSNLINRKAGSFFFIGELILDLPLVYDSPVGDYCGTCTRCIDACPTEAIVAPYVVDGSRCISYFTIELKNEIPNEVKGKFQDWVFGCDICQDVCPWNRFSTPHQVPAFEPIAELQQWSKQDWEEVTEEVFNRVFRKSALKRAKLKGLQRNIRFVATP

SEQ ID NO: 78500 - protein, 321 aa, Microscillaceae bacterium
  misc_feature (1)..(321): tr|A0A349E0E9|A0A349E0E9_9BACT Epoxyqueuosine reductase OS=Microscillaceae bacterium OX=2053581 GN=queG PE=3 S V=1
MNAIQVEKHTTLIKQKAKDLGFEFCGVSRAEFLEEEAPRLETWLKEKMQGEMAYMANHFDKRLDPRLLVEDAKSVVSLVYNYFPEEDLAQQNELEQSPEEESYKISKYAYGRDYHFVIKDKLRTLFEFIQENIGEVGGRVFVDSAPVMDKAWAKKSGLGWIGKHSNLINRQMGSFFFIAELILDLELIPDGPIKDYCGTCTRCIDACPTDAIIEPYVVDGSRCISYFTIELKEEIPTKVKGQFENWIFGCDICQDVCPWNRFSKPHQEPLFEPHPTLKNMRKQDWEEITEEVFRELFRKSAVKRTKLKGLKRNIRFVSSPE

SEQ ID NO: 78501 - protein, 363 aa, Microvirga aerophila
  misc_feature (1)..(363): tr|A0A512BPM8|A0A512BPM8_9RHIZ Epoxyqueuosine reductase OS=Microvirga aerophila OX=670291 GN=queG PE=4 SV=1
MVRIARPDAIPLAPERLQAWLAEGYHGSMDWMAETAERRADPQALWPEVRSVILLGLNYGPVDDPLATLGQKDRASISVYARNRDYHDVIKGKLKEAAGFLASRASSDVKVFVDTAPVMEKPLAEAAGLGWQGKHTVIVSREFGNWLFLGAIFTTAELPADAPERDHCGSCRRCLDVCPTKAFPAPYQLDARRCISYLTIEHKGHIPADLREGVGNRVFGCDDCLAVCPWNKFAQAGREARLVQRDDLAALPLAELARLDDPAFRVRFAGTPIKRTGRDRFIRNILIAIGNSGDPALAGEAVRLLDDASPLVRAMAVWAIGRLLPSETVAAHRNGRWEREDDADVREEWRRIAPAASRAEAAA

SEQ ID NO: 78502 - protein, 333 aa, Microvirga guangxiensis
  misc_feature (1)..(333): tr|A0A1G5LAC7|A0A1G5LAC7_9RHIZ Epoxyqueuosine reductase OS=Microvirga guangxiensis OX=549386 GN=SAMN02927923_0 4085 PE=4 SV=1
MDWMVETADRRADPRTLWPEVRSIILLGVNYGPTTDPLATLSQKDRGSISIYARNRDYHDVIKGKLKEIAGFLAAKASSDVKVFVDTAPVMEKPLAEAAGLGFQGKHTVIVSRDFGNWLFLGAIFTTAELPVDEPEQNHCGSCRRCLDVCPTNAFPAPFQLDARRCISYLTIEHKGHIPEELRPGIGNRIFGCDDCLAVCPWNKFAKASREAKLMQREDLAALPLAELARLDDPNFRTRFSGTPIKRTGRDRFIRNVLVAIGNSGDAALADEAVRLLDDPSPLVRAMAIWAIGRLMPRETVASLSTGRFERESEEDVRNEWNRVLSVREGAAA

SEQ ID NO: 78503 - protein, 329 aa, Microvirga lotononidis
  misc_feature (1)..(329): tr|I4YTX2|I4YTX2_9RHIZ Uncharacterized Fe-S protein OS= Microvirga lotononidis OX=864069 GN=MicloDRAFT_00039790 PE=4 SV=1
MAETAERRADPRTLWPEVRSIILLGLNYAPSGNPLAELARTDRGYISVYARNRDYHDVIKGKLKEAAGFLASKASSDVKVFVDTAPVMEKPLAEAAGLGWQGKHTVVVSREFGDWLFLGAIFTTAELPPDAPERDHCGSCRRCLDICPTNAFPAPYQLDARRCISYLTIEHKGHIPAELRPGIGNRIFGCDDCLAVCPWNKFAQAGREARLVQRNDLAALPLAELARLDDPSFRVRFAGTPVKRTGRDRFIRNVLIAIGNSRDAALADEALRLLDDASPLVRAMAVWALARLLPPEALARHAEERLKREDDPDVREEWRRGMTAARAVA

SEQ ID NO: 78504 - protein, 386 aa, Microvirga ossetica
  misc_feature (1)..(386): tr|A0A1B2EPL2|A0A1B2EPL2_9RHIZ Epoxyqueuosine reductase OS=Microvirga ossetica OX=1882682 GN=queG PE=3 SV=1
MRRPGLLESEELKRAFVARAKALGFEIVRIARPDAIPLAPERLKTWIEAGHHGSMDWMAETAERRADPRTLWPEVRSVILLGLNYGPAENPLAELERTDCGYISVYARNRDYHDVIKGKLKEVAGFLASRASSDVKVFVDTAPVMEKPLAEAAGLGWQGKHTVIVSREFGNWLFLGAIFTTAELPADEPERDHCGSCRRCLDICPTNAFPAPYRLDARRCISYLTIEHKGHIPAELRPGIGNRIFGCDDCLAVCPWNKFAQAGREARLVQREDLASLPLAELARLDDPAFRARFSGTPIKRTGRDRFIRNVLVAIGNAGDVGLAGEAVRLLDDASPLVRAMAAWAVGRLLPPETVARHAEERMEKETDPDVREEWRRAKAPIRALA

SEQ ID NO: 78505 - protein, 388 aa, Microvirga sp.
  misc_feature (1)..(388): tr|A0A2Z3IFU4|A0A2Z3IFU4_9RHIZ Epoxyqueuosine reductase OS=Microvirga sp. 17 mud 1-3 OX=2082949 GN=queG PE=3 S V=1
MGALRQPRLLEGEALKRAFVERAQALGFDTVRVARPDSIPLAPERLKAWLAEGYHGAMDWMVETAERRSDPRTLWPEVHSVILLGLNYGPAEDPLAALTLKDRGTISVYARNRDYHDVIKGKLKEAAGLLAAKGGADVKVFVDTAPVMEKPLAQAAGLGWQGKHTVIISRDFGNWLFLGAIFTTAELPVDAPERDHCGSCRRCLDICPTNAFPEPYRLDARRCVSYLTIEHKEHIPEDLRAGIGNRIFGCDDCLAVCPWNKFAQTAREARLAQRDDLAALPLAELARLDDPAFRTRFAGTPIKRTGRDRFVRNVLIAIGNSGERGLAAEAVRLLDDPSPLVRAMAVWALSRLAPDEVARHAAGRREHEADEDVRAEWERALAPGEVPA

SEQ ID NO: 78506 - protein, 384 aa, Microvirga sp.
  misc_feature (1)..(384): tr|A0A2T7U6E6|A0A2T7U6E6_9RHIZ Epoxyqueuosine reductase OS=Microvirga sp. KLBC 81 OX=1862707 GN=queG PE=3 SV=1
MKQDGEALKRAFVERAKQIGFDTIRIAAPDSIPLAPERLKAWLKAGHHGSMDWMVETAERRADPRTLWPEVRSIILLGVNYGPTSDPLAALSKKDCGSISIYARNRDYHDVIKGKLKEIAGFFAARASSDVKVFVDTAPVMEKPLAEAAGLGFQGKHTVIVSREFGNWLFLGAIFTTAELPADEPERNHCGSCRRCLDVCPTNAFPAPFQLDARRCISYLTIEYKGHIPEELRPGIGNRIFGCDDCLAVCPWNKFAQASREVKLMQRDDLAALPLSELARLDDPSFRTRFSGTPIKRTGRDRFIRNVLIAIGNSGDAALADEAVRLLDDPSPLVRAMAVWALGRLLPHEAIVPLSAERFEHESDADVRREWNRVLSVKEDAHAA

SEQ ID NO: 78507 - protein, 334 aa, Microvirga subterranea
  misc_feature (1)..(334): tr|A0A370HLL6|A0A370HLL6_9RHIZ Epoxyqueuosine reductase OS=Microvirga subterranea OX=186651 GN=DES45_104389 PE =4 SV=1
MEWMAETAERRSDPQALWPEVRSVILLGLNYGPAEDPLAGLALKDRASISVYARNRDYHDVIKGKLKEAAGFLAAKASSDVKVFVDTAPVMEKPLAAAAGLGWQGKHTVVVSREFGNWLFLGAIFTTAELLEDEPERDHCGSCRRCLDVCPTNAFPAPYQLDARRCISYLTIEHKGHIPADLREGIGNRVFGCDDCLAVCPWNKFAQAGREARLVQRDDLAALPLAELARLDDPTFRTRFAGTPIKRTGRDRFIRNVLIAIGNSGDASLAPEAVRLLDDASPLVRAMAVWAIARLLPAEEVSAHREARRDIETDEDVRREWRRALSGIPDEAAA

SEQ ID NO: 78508 - protein, 384 aa, Microvirga vignae
  misc_feature (1)..(384): tr|A0A0H1RGW2|A0A0H1RGW2_9RHIZ Epoxyqueuosine reductase OS=Microvirga vignae OX=1225564 GN=queG PE=3 SV=1
MKTNGEALKRAFVERAKQIGFDMIRIAAPDSIPFAPERLKAWLEAGHHGSMDWMVDTAERRADPRTLWPEVRSIILLGVNYGPTSDPLAALSHKDCGSISIYARNRDYHDVIKGKLKEVAGFLAAKASSDVKVFVDTAPVMEKPLAEAAGLGFQGKHTVIVSREFGNWLFLGAIFTTAELPVDEPERNHCGSCRRCLDICPTNAFPAPFQLDARRCISYLTIEHRGHIPEELRSGIGNRIFGCDDCLAVCPWNKFAQASREVKLMQRDDLAALPLSELARLDDPSFRMRFSGTPIKRTGRDRFIRNVLIAIGNSGEAALADEAIRLLDDPSPLVRAMAVWAIGRLLPHEAIVSLGSERFKHESDADVRGEWKRVLSVKEETHAA

SEQ ID NO: 78509 - protein, 368 aa, Microvirgula aerodenitrificans
  misc_feature (1)..(368): tr|A0A2S0PAI0|A0A2S0PAI0_9NEIS Epoxyqueuosine reductase OS=Microvirgula aerodenitrificans OX=57480 GN=queG PE= 3 SV=1
MSASIPENTDYRELTDRVKEWARDLGFTDIKITRASLPVGAETGLESWLAAGFHGDMDYMARHGFKRARPSELVPGSRTVISVRLNYWPGSAHDADQQLADPDRAYISRYALGRDYHKVLRNRLQKLAERIQQAVGPFGHRAFTDSAPVMEVALASQSGLGWRGKHTLLLTREQGSLFFLGELFTDLPLDVDQAIEPHCGRCTRCIDVCPTGAIVAPYTVDARRCISYLTIELQGAIPEQLRPLLGNRIYGCDDCQLVCPWNRFAVPTAEADFAPRHGLDSASLVGLFAWSAADFAERLAGSAIHRIGHERWLRNIAVALGNAPTTPAVLAALQSRLDDPSALVREHVHWAWARHGQSGGHESCADKE

SEQ ID NO: 78510 - protein, 368 aa, Microvirgula sp.
  misc_feature (1)..(368): tr|A0A329B929|A0A329B929_9NEIS Epoxyqueuosine reductase OS=Microvirgula sp. AG722 OX=2183901 GN=queG PE=3 SV=1
MSASIPENTDYRELTDRVKEWARDLGFTDIKITRASLPVGAETGLESWLAAGFHGDMDYMARHGFKRARPAELVPGSRTVISVRLNYWPGSAHDADQQLADPDRAYISRYALGRDYHKVLRNRLQKLAERIQQAVGPFGHRAFTDSAPVMEVALASQSGLGWRGKHTLLLTREQGSLFFLGELFTDLPLDVDQAIEPHCGRCTRCIDVCPTGAIVAPYTVDARRCISYLTIELQGAIPEPLRPLLGNRIYGCDDCQLVCPWNRFAVPTAEADFAPRHGLDSASLVGLFAWSAADFAERLAGSAIHRIGHERWLRNIAVALGNAPTTPAVLAALQSRLDDPSALVREHVHWAWARHGQSGGHESCADKE

SEQ ID NO: 78511 - protein, 352 aa, Minicystis rosea
  misc_feature (1)..(352): tr|A0A1L6L0E4|A0A1L6L0E4_9DELT Epoxyqueuosine (OQ) redu ctase QueG OS=Minicystis rosea OX=888845 GN=A7982_00579 PE=4 SV=1
MTAATTDPTTLVKERAHALGFDIVGIARADEPLGVEHERYRAFVDRGMHGSLGWLADHAAVRRRLDGAEILAGAKSVVCVGRRYARTAAEEAQDPPLARGIARYARGQDYHVFLRKKLRKLAAFVRGLGPEVEARAFLDTEPVLERAWAARAGIGFVGKNGLVITPGQGSYQILGEVVTTLALVPDVPIAERCGSCTRCLDACPTQAFPEPFVLDARRCISYWTIEEAGAPPDDLKAAIGEHLFGCDVCQEVCPFNRTAPPSAEKTVPFRPLERWGTLDLASLVTLPAERWEEVAEGSPMYRARQSGVARNAALVAANRLARGQGGDDERRAVEAAREHADPIVRATVKRSG

SEQ ID NO: 78512 - protein, 377 aa, Minwuia thermotolerans
  misc_feature (1)..(377): tr|A0A2M9FX42|A0A2M9FX42_9PROT Epoxyqueuosine reductase OS=Minwuia thermotolerans OX=2056226 GN=queG PE=3 SV=1
MTISISDPAGLKAAIRTRALDLGFAETGVTAPAGIALAGERLDAFLAAGRQGDMDWMAERAAWRRDPAALWPAARSIVMLATNYGPDHDPLALLDHPGRGAVSAYAARRDYHDVVKKRLKALGRWLVDETGCEIKVFVDTAPVMEKPLAAAAGLGWQGKHTNLVSRSAGSWTFLGAIFTTIDLPPDEAGGDHCGACRRCLDVCPTDAFPAPYQLDANRCIAYLTVEHRGPIPHEFRAAIGNRIFGCDDCLAICPWNKFAKVSRDDRLAMREEILNAPLAELLELDDAAFRRMFAQTPVKRLGRDRFLRNVLIAAGNAGDESLSTRVEVLLDDASPLVRGAAVWALSRIGGPGRLAAARARCEPVERDADVLAEWSRL

SEQ ID NO: 78513 - protein, 351 aa, Mitsuaria sp.
  misc_feature (1)..(351): tr|A0A1A9HTS0|A0A1A9HTS0_9BURK Epoxyqueuosine reductase OS=Mitsuaria sp. 7 OX=1658665 GN=queG PE=3 SV=1
MVEVRAWALEFGFSQIGVAHVDLSDAEAGLQAWLDAGFHGEMQYMAAHGLKRARPAELVPGTISILTARMDYLPEAAGDDWQDREWAAMRDPSRAQVSLYARGRDYHKVLRQRLQQLADRIQDRVGTMGHRVFTDSAPVLEVELASRSGIGWRGKHTLTLHRDSGSMFFLGEIYLDLELPASEPVTAHCGQCRACLDACPTGAIIAPYRLDARRCISYLTIEQDGPIPIEFREAIGNRIYGCDDCQLACPWNKFARRNALPDFDWREPLGNASLLSLFAWDEATFLKRTEGSAIRRIGHARWQRNIAVAMGNALRQDLTPDLRAQMRAALEAASQDATPLLAEHISWALDS

SEQ ID NO: 78514 - protein, 238 aa, Mitsuaria sp.
  misc_feature (1)..(238): tr|A0A5C6YW73|A0A5C6YW73_9BURK tRNA epoxyqueuosine(34) reductase QueG (Fragment) OS=Mitsuaria sp. TWR114 OX=26 01731 GN=queG PE=4 SV=1
MVEVRAWAHELGFSQIGVAHVDLSDAEAGLQAWLDAGFHGEMQYMAAHGLKRARPAELVPGTISILTARMDYLPEAIGPEWQAREWAALADPARAQVSLYARGRDYHKVLRQRLQQLADRLQARVGPMGHRVFTDSAPVLEVELASRSGIGWRGKHTLTLHRDSGSMFFLGEIYLDLALPPSEPVSAHCGQCRACLDACPTGAIIAPYRLDARRCISYLTIEQDGPIPVEFRAAIGNR

SEQ ID NO: 78515 - protein, 379 aa, Mixta gaviniae
  misc_feature (1)..(379): tr|A0A2L0IK06|A0A2L0IK06_9GAMM Epoxyqueuosine reductase OS=Mixta gaviniae OX=665914 GN=queG PE=3 SV=1
MSHPLDLQQLAQDIKQWGLSLGFQQVGICDTDLSAEEPRLQAWLDKQYHGEMEWMARHGMMRARPHELLPGTLRVISVRMNYLPAKAAFASTLKNPRLGYVSRYALGRDYHKVLRNRLKKLGDLIRERCETANFRPFVDSAPLLERPLAARAGLGWTGKHSLILNREAGSWFFLGELLINLPLPVDKPQEEQCGRCVACITTCPTGAIVEPYVVDARRCISYLTIELEGAIPEAFRPLIGNRIYGCDDCQLICPWNRFGQLTDEDDFSPRAALHAPPLTELFLWDEAKFLRITEGSAIRRIGHLRWLRNVAVALGNAPWDEAHIAVLSRRLGENAMLDEHIEWAIAQQKRRRAENAIEVQRPQQKRLVRAVEKGLPRDA

SEQ ID NO: 78516 - protein, 379 aa, Mixta sp.
  misc_feature (1)..(379): tr|A0A506V6K3|A0A506V6K3_9GAMM Epoxyqueuosine reductase OS=Mixta sp. BIT-26 OX=2562439 GN=queG PE=3 SV=1
MSHPLDLQQLAQDIKQWGLALGFQQVGICDTDLSLEEPRLQAWLEQQRHGEMEWMARHGMMRARPHELLPGTLRVISVRMNYLPAKAAFASTLKNPRLGYVSRYALGRDYHKVLRNRLKKLGDLIQQRCAEANFRPFVDSAPVLERPLAAKAGLGWTGKHSLILNREAGSWFFLGELLINLPLPIDRPQEAQCGRCVACITTCPTGAIVEPYVVDARRCISYLTIELEGAIPEELRPLIGNRIYGCDDCQLICPWNRFGQLTDEDDFSPRAALHAPPLTELFAWDEAKFLRITEGSAIRRIGHLRWLRNVAVALGNAPWEAANITALESRLGENSMLDEHIEWAIAQQLAKRRASAVEVQPSKKLRLIRAVEKGLPRDA

SEQ ID NO: 78517 - protein, 379 aa, Mixta theicola
  misc_feature (1)..(379): tr|A0A2K1QBB4|A0A2K1QBB4_9GAMM Epoxyqueuosine reductase OS=Mixta theicola OX=1458355 GN=queG PE=3 SV=1
MSHPLDLQQLAQDIKQWGLSLGFQQVGICDTDLSLEEPRLQAWLDKQYHGEMEWMARHGMMRARPHELLPGTLRVISVRMNYLPAKAAFASTLKNPRLGYVSRYALGRDYHKVLRNRLKKLGDLIRERCEAVNFRPFVDSAPLLERPLAAKAGLGWTGKHSLILSREAGSWFFLGELLIDLPLPVDRPQEEQCGRCVACITTCPTGAIVEPYVVDARRCISYLTIELEGAIPEAFRPLIGNRIYGCDDCQLICPWNRFAQLSDEDDFSPRAALHAPPLTELFAWDEAKFLRITEGSAIRRIGHLRWLRNIAVALGNAPWDAENIAALSSRLGENAMLDEHITWALEQQKIKRAENAIEVQRPQQKRLVRAIEKGLPRDA

SEQ ID NO: 78518 - protein, 364 aa, Mizugakiibacter sediminis
  misc_feature (1)..(364): tr|A0A0K8QR99|A0A0K8QR99_9GAMM Epoxyqueuosine reductase OS=Mizugakiibacter sediminis OX=1475481 GN=queG PE=3 S V=1
MSAPAPSPPAGIDYAALAADIRRWGAELGFQQVGIADVRLAEDEAHLLDWLQAGYHGSMDYMARHGVKRSRPAELQPGTLRVISVRMNYAPADIGEAWSVLRDPTLGYVSRYALGRDYHKLIRSRLQKLAERIAAVTGPFGYRAFADSAPVLEKALARNAGLGWTGKHTLLLNREAGSYFFLGELYTDLPLPVDAPVSAHCGRCTRCIDVCPTQAIVAPYKLDARRCISYLTIERREAIPPELRPLIGNRIFGCDDCQLVCPWNRYAQAATEPDFAPRHALGSSRLVELFAWSEEEFLARTEGMAIRRAGYEGWLRNVAVALGNAPYSGEVVAALQARADHPSALVREHVAWALEEQRRKRGQP

SEQ ID NO: 78519 - protein, 385 aa, Moellerella wisconsensis
  misc_feature (1)..(385): tr|A0A0H2QKQ9|A0A0H2QKQ9_9GAMM Epoxyqueuosine reductase OS=Moellerella wisconsensis OX=158849 GN=queG PE=3 SV= 1
MATQLDLNLLAQQIKQWGTDVGFQQIGICDTDLTAEEPKLQQWLDKQYQGEMDWMARHGMMRARPHELLPGTLRVISVRMNYLPAKASFASTLSNPNLAYVSRYALGRDYHKLLRQRLKKLGDRIKEYCQEFNYQDEINFRPFVDSAPILERPLAAKAGLGWVGKHSLILNREAGSWFFLGELLINLPLPVDQPVEEQCGRCVACMTTCPTGAIVAPYTVDARRCISYLTIELEGAIPEEFRPLMGNRIYGCDDCQLICPWNRFSQLTDEEDFSPRRALHTPELLDLFSWNEEKFLRITEGSAIRRIGYLRWLRNISVALGNAPYQDSIILALQEKRGIDAMLDEHLEWAISQQRQRREENAVNIQTSQQKRLVRAISKGLPRDA

SEQ ID NO: 78520 - protein, 385 aa, Moellerella wisconsensis
  misc_feature (1)..(385): tr|A0A0N0ZAE1|A0A0N0ZAE1_9GAMM Epoxyqueuosine reductase OS=Moellerella wisconsensis ATCC 35017 OX=1354267 GN=q ueG PE=3 SV=1
MAIQLDLNLLAQQIKQWGTDVGFQQIGICDTDLTAEEPKLQQWLDKQYQGEMDWMARHGMMRARPHELLPGTLRVISVRMNYLPAKASFASTLSNPNLAYISRYALGRDYHKLLRQRLKKLGDRIKEYCQDFNYQDEINFRPFVDSAPILERPLAAKAGLGWVGKHSLILNREAGSWFFLGELLINLPLPVDQPVEEQCGRCVACMTTCPTGAIVAPYTVDARRCISYLTIELEGAIPEEFRPLMGNRIYGCDDCQLICPWNRFSQLTDEEDFSPRRALHTPELLDLFSWNEEKFLRITEGSAIRRIGYLRWLRNISVALGNAPYQDSIILALQEKRGIDAMLDEHLEWAISQQRQRREENAVNIQTSQQKRLVRAISKGLPRDA

SEQ ID NO: 78521 - protein, 319 aa, Moheibacter sediminis
  misc_feature (1)..(319): tr|A0A1W1ZSK5|A0A1W1ZSK5_9FLAO Epoxyqueuosine reductase OS=Moheibacter sediminis OX=1434700 GN=queG PE=3 SV=1
MEFLTRNTANPNSLLKKSNLIKQRALELGFGSCGIAKAEFLEEEAKHLESWLHKGMHGKMSYMENHFDMRLDPRLLVDGAKSVVSLTYNYFPEKIQENHSYKIAKYAYGTDYHFVVKDKLKELLNFIQEEIGEVNGRAFVDSAPILEHAWAKKSGIGWVGKNSLTLSKQKGSFFFLAELILDLDLEYDSPIQTDHCGSCTKCIDSCPTEAILPNKTVDGSKCISYFTIELKEEIPSEMSGKFGDWIFGCDVCQDVCPWNRFSLPHREEKFNPNEELLNYSKSEWEDITEDVFRKIFAKSPVKRTKFEGIKRNIDFIKPN

SEQ ID NO: 78522 - protein, 341 aa, Monaibacterium marinum
  misc_feature (1)..(341): tr|A0A2C9CTR3|A0A2C9CTR3_9RHOB Epoxyqueuosine reductase OS=Monaibacterium marinum OX=1690039 GN=SAMN06273572_1 05180 PE=4 SV=1
MDAARIRVEAQAQGFARMGVCAPDAIPHAADRLGQFLAKDMHGQMGWMADRANWRGDPTALWPEARSVIMLAEPYTPDVDPLSLLEQPEIGAISVYARNKDYHDLVKKRLKRLGRWLVEQTGCQIKVFVDTAPVMEKPLAQAAGLGWQGKHTNLLSRDLGNWFFLGSIFTTLELEQDTAGVEKCGSCTACLDACPTGAFPAPFQLDARRCISYLTIEHKGLVDLELREKLGNRIYGCDDCLAVCPWNKFAQEARDAGYWARVELVAPRLDDLVKLTDATFREVFAGSPIKRIGRDRFVRNVLYAIGNSGQPDLRPCAQDLTDDPDPAVADAARWAAERLAT

SEQ ID NO: 78523 - protein, 324 aa, Mongoliibacter ruber
  misc_feature (1)..(324): tr|A0A2T0WGX7|A0A2T0WGX7_9BACT Epoxyqueuosine reductase OS=Mongoliibacter ruber OX=1750599 GN=queG PE=3 SV=1
MVGKCTITQQMEKDKYAKIIKNQAKNLGFDFCGIAKAGFLEEEAPKLESWLNQNHHGKMAYMANHFDKRLDPTKLVEGAKTVISLIYNYFPENELSAGVEDYKLAKYAYGTDYHFVIKDKLKKLLKDLQAEIGDFEGRVFVDSAPVMERQWAQKSGLGWLGKNSLLLNKQMGSFFFLAEMIIDLEVTADPPMVKDYCGTCTKCLDACPTDAIVQAGVVDGSRCISYLTIELKESIPSEFKGKTENWVFGCDICQDVCPWNRFSKPHQEPDFQPHPDLLGFSKHDWEEMTEETFQKVFKKSALKRTKFEGLKRNVSFASEKYNSE

SEQ ID NO: 78524 - protein, 317 aa, Moorea bouillonii
  misc_feature (1)..(317): tr|A0A1U7N172|A0A1U7N172_9CYAN Epoxyqueuosine reductase OS=Moorea bouillonii PNG OX=568701 GN=queG PE=3 SV=1
MDIPVTSTEVKQKARSLGFHKVGIAAVDVDHHDSAEQNLKAWLALGYQADMAWMANPRRLGIRGCMPEVKSVICVALNYYTPHQRPENPEYGKISRYGWGRDYHKVMHKKLKELTCWLQAQAEEIQVRYYADTGPVQDKVWAQRSGIGWIAKNGNVITREYGSWVFLGEVLTNLALTPDTPHTSHCGSCTRCIQACPTGAITKPFVVDANRCIAYHTIENRAANLPESIKPHLDGWVAGCDICQDVCPWNQRFAKETDVVEFQPYPENVAPRLTELATISDQEWNRRFPASALRRIKPNMLRRNAQANIDASQKSVD

SEQ ID NO: 78525 - protein, 317 aa, Moorea producens
  misc_feature (1)..(317): tr|F4XMK4|F4XMK4_9CYAN Epoxyqueuosine reductase OS=Moor ea producens 3L OX=489825 GN=queG PE=3 SV=1
MDISVTSTEVKQKAHSLGFHKVGIAAVDVDHNDSAEQNLKAWLGLGYQAEMDWMANPRRLDIRACMPKVKSVISVALNYYTPQQRPESPEYGKISRYGWGRDYHKVMHKKLKELTFWLQAQAEEIQVRYYADTGPVQDKVWAQRSGIGWIAKNGNVITREYGSWVFLGEVLTNLALTPDTPHTSHCGSCTRCIQACPTGAITKPFVVDANRCIAYHTIENRAENLPESIKPHLEGWVAGCDICQDVCPWNQRFAKETDVVEFQPYPWNVAPRLTELATISDQEWNRRFPASALRRIKPNMLRRNAQANIDASQKSVD

SEQ ID NO: 78526 - protein, 320 aa, Moorea producens
  misc_feature (1)..(320): tr|A0A1D8TPK4|A0A1D8TPK4_9CYAN Epoxyqueuosine reductase OS=Moorea producens PAL-8-15-08-1 OX=1458985 GN=queG P E=3 SV=1
MDIPVTSTEVKQKAHSLGFHKVGIAAVDVDHHDSAQQNLNAWLGLGYQADMAWMANPRRLDIRACMPEVESVISVALNYYTPHQRPESPEYGKISRYGWGRDYHKVMHKKLKELTFWLQAQAEEIQVRYYADTGPVQDKVWAQRSGIGWIAKNGNVITREYGSWVFLGEVLTNLALTPDTPHTSHCGSCTRCIQACPTGAITKPFVVDANRCIAYHTIENRAANLPESIKPHLEGWVAGCDICQDVCPWNQRFAKETDVVEFQPYPENVAPRLTELATISDQEWNRRFPASALRRIKPNMLRRNAQANIDASQKSVDYSD

SEQ ID NO: 78527 - protein, 374 aa, Moorella glycerini
  misc_feature (1)..(374): tr|A0A0C7N559|A0A0C7N559_9THEO Epoxyqueuosine reductase -QueG OS=Moorella glycerini OX=55779 GN=1326 PE=4 SV=1
MQAAELKDWAARRGLVLGIAPARPFERGEAALKWRAERGLKTPFASGRPEERCQPRLLYPAARSLVVVARPHLEPAGPPGPGEGLIACYALGPDYHGELQGHLQDLAGLLQQGGAGFTAIQVDSGPLLEREAACLAGLGYYGASCNLIIPGLGSGTSLGLVITDLELEPGVPLEPAACEDCGRCLAACPTGALVAPGRLDPERCLSYLTQKRGVIPGELRPLFGQYIWGCDACQDVCPANRRERAALREVARRQEGRVRVVAGAGHEVTWPDLATIITMDKEQFNRTFGPTALAWRGKTVLQRNAAIALGNLGDPGAMVSLAQALRAPAAILRGHAAWALGRLGAAARPALEKARREETDPWVRREIDEALAFL

SEQ ID NO: 78528 - protein, 449 aa, Moorella glycerini
  misc_feature (1)..(449): tr|A0A0C7NM76|A0A0C7NM76_9THEO Twin-arginine translocat ion pathway, signal sequence OS=Moorella glycerini OX=5 5779 GN=833 PE=4 SV=1
MERAKMDRRTFLKAMGLAGIVASVPEVALAAGAANIDPPYRTRASHGDEYRKVLPKAFYRTIENRPGYIGTTKIVGEIKPFEDAREHGFAQLVRRVAQKDWSGDWGAVIKEVVEEKAKLMAKFTPQQREDFLWSNAITMASDQWHVNLGPGRWESIPISKEKLELPPEIMTAKLKKVAKWYGIEQIGVCEIDESMRPFFYKIGRTQGTLRGGAPGFKDEGRPIPWPYPHKYCIVIGNFEDLQGTKANTGGLNNISVATECSDDDIYPLYLESIIRGLGYDARAQYIAGTEDFLQTPFAVKAGLGELGRNGQLVSPWGAHIRLAAVTTNMPLVPDRPIDFGLQEFCKTCKKCAENCPAGAISDANEPTNVNGTLRYEFDAKKCAKYRFVYGCATCAAVCPYSKPDNLVHSAGRVIGRNPAGARLLKTLDDFFYGRNPKPRDLERFAPWRL

SEQ ID NO: 78529 - protein, 367 aa, Moorella humiferrea
  misc_feature (1)..(367): tr|A0A2T0AWF9|A0A2T0AWF9_9THEO Epoxyqueuosine reductase OS=Moorella humiferrea OX=676965 GN=queG PE=4 SV=1
MREKELKEWALERGLVLGIAPALPFQRGLAALKWREERGIITPFACGSLEERCHPRLLYPMVRSLIVVAKPHPDPATVSLPAKEFIARYALGTDYHDELQNSLQELAQYLRQNGAEFTAVQVDSGPLLEREAAYLAGLGYYGANCNLIIPGMGSAVSLGILLTDLELEPGVPAEPVTCAECGRCLKACPTKALVAPGRLDPARCLSYLTQARGVVPSDLRPFFKRYLWGCDVCQEVCPAAGREPAQLWEQGAEGNSPEGSYRFTELAAILAMDNKQFTKVFGTTPLAWRGKTVIQRNAVLLLGNWGDLFALPLLEQALRSPSPIVRGHAAWALGRLGPSARSLLNKARLEEKDVLVRREIDEALEAI

SEQ ID NO: 78530 - protein, 374 aa, Moorella mulderi
  misc_feature (1)..(374): tr|A0A151ATK4|A0A151ATK4_9THEO Epoxyqueuosine reductase OS=Moorella mulderi DSM 14980 OX=1122241 GN=queG PE=4 SV=1
MQVAELKDWASRRGLVLGIAPVQPFERGEAALKWRAERGLKTPFASGRPEERCQPQLLYPAARSLVVVASPHPELAGPPGPGEGLIARYALGPDYHGELQGHLQDLAGLLQQGGAGFTALQVDSGPLLEREAACLAGLGYYGASCNLIIPGLGSGASLGLVITDLELEPGVPLEPAACEDCGRCLAACPTGALVAPGRLDPERCLSYLTQKRGVIPGELRPLFGQYIWGCDACQDVCPANRRERAALREVARRQEGRVRVVAGAGHEVTRPDLATIITMNKEQFHRTFGSTALAWRGKTVLQRNAAIALGNLGDPGAMVSLAQALRSPAAILRGHAAWALGRLGAAARPALEKARREETDPWVLLEIEEALAFL

SEQ ID NO: 78531 - protein, 364 aa, Moorella sp.
  misc_feature (1)..(364): tr|A0A101EB08|A0A101EB08_9THEO 4Fe-4S ferredoxin, iron- sulfur binding protein OS=Moorella sp. 60_41 OX=1635264 GN=XD51_0741 PE=4 SV=1
MGLTEELQQEAARLGLRLGAVPATTVFERGLDALQHRERENWATPFVGGSIEVRCRPYALFPGARTVIAVARPWYIPAVGPPGPGEGLVAMSFRGEDYHRVLERLLVPLAERLKDWGASWAVVQVDKGPLIEREAAFAAGLGYYGYNCSLMVPDMGSRVALGLIITDLRLEATLPLKEPKCRECGRCLAACPTGALVAPYTLHPGRCLSYLTQKRGFLPSDLRPYLGQRLFGCDVCQDVCPENEGLALRSGPSFVHPGLADLLRLRGGRFRELFGTTALAWRGKTVLQRNAVVALVNTGYDGEEAVRELQELLLHPSPVLRGHAAWALGKLGAAEGRRALERAYGEEGDPLVREEIGRALKGEG

SEQ ID NO: 78532 - protein, 365 aa, Moorella sp.
  misc_feature (1)..(365): tr|A0A4P6BLM1|A0A4P6BLM1_9THEO 4Fe-4S ferredoxin OS=Moo rella sp. E306M OX=2572683 GN=E306M_06820 PE=4 SV=1
MLASELKEWAARRGLVLGIALVRPFEFGEEALKWRAERGLKTPFANGSLEERCRPRLLYPAARSLVVVASPHPEPAVPPGPGEGLIARYALGPDYHAVLQGHLRDLAGLLQQAGASLTAIQVDSGPLLEREAAYLAGLGYYGASCNLIIPGLGSGASLGLLITDLDLEPGVPLEPAACEGCGRCLAACPSGALVAPGRLNPERCLSYLTQKRGVIPAELRPFFKQYIWGCDVCQEACPANRRERGGLRAEITSGSEQRLTWPDLAAIVTMDKDQFKQTFGPTALGWRGKTVLQRNAVLLLGNRGDPQALAPLAQALRAPAAVLRGHAAWALGHLGAAGRPVLEKARREETDPWVCREIEEALAFQ

SEQ ID NO: 78533 - protein, 386 aa, Moorella thermoacetica
  misc_feature (1)..(386): tr|A0A1D7X7U9|A0A1D7X7U9_MOOTH Epoxyqueuosine reductase OS=Moorella thermoacetica OX=1525 GN=queG PE=4 SV=1
MGSTKLTKELKEWAAARGLVLGVAPVRPFERGRQALAWLARRGLATPFATGRPEERYRPDLLYPAARSLIVVARPHPQPVRPPGPGEGRIARYALGPDYHLELRASLEALAGMLQRAGARLTAVQVDNGPLLEREAAYLAGLGYYGASCNLIIPGLGTGCALGLLITDLELEAGQPLTQATCRNCGRCLAACPTGALVAPGRLHPELCLSYLTQKRGVIPVELRPALGRHIWGCDACQEVCPENRAEFSPADRGASRAGPDGQWQGPGRDLPDGGTGTGLIYPELATIITMDKAGFNRVFGGTALAWRGKTLLQRNAAIALGNLGDARALGPLQQALRAPAAVLRGHAAWALGRLGPPARPALAVALATETDPWVRREIRTALDSC

SEQ ID NO: 78534 - protein, 445 aa, Moorella thermoacetica
  misc_feature (1)..(445): tr|A0A0S6UFP9|A0A0S6UFP9_MOOTH Uncharacterized Fe-S pro tein OS=Moorella thermoacetica Y72 OX=1325331 GN=MTY_15 63 PE=4 SV=1
MPDLRVQLRPGQVPAVGDIRRRLLGYSQENFGLALVHSEDQTNPARKRGIFKVKRGTGGVGSTKLTKELKEWAAARGLVLGVAPVRPFERGRQALAWLARRGLATPFATGRPEERYRPDLLYPAARSLIVVARPHPQPVRPPGPGEGRIARYALGPDYHLELRASLEALAGMLQRAGARLTAVQVDNGPLLEREAAYLAGLGYYGASCNLIIPGLGTGCALGLLITDLELEAGQPLTQATCRNCGRCLAACPTGALAAPGRLHPELCLSYLTQKRGVIPVELRPALGRYIWGCDACQEVCPENPPEFSPADRGASRAGPDGQWQGSGRDLPDGGTGTGLIYPELATIITMDKAGFNRVFGGTALAWRGKTILQRNAAIALGNLGDARALGPLQQALRAPAAVLRGHAAWALGRLGPPARPALAVALATETDPWVRREIRTALDSC

SEQ ID NO: 78535 - protein, 397 aa, Moraxella atlantae
  misc_feature (1)..(397): tr|A0A378Q406|A0A378Q406_9GAMM Epoxyqueuosine reductase OS=Moraxella atlantae OX=34059 GN=queG PE=3 SV=1
MPISTNAIPVNDLSPAHDVGLHALKTWIKAQAADLGFADCGVVHPDNPVFAKQLAALQTYLANGYHGELHFLQDHHDKRANPAQLVMGTQSIISVRMDYLTDAPTPRAVTDNALPNHGIIARYARGRDYHKTMRGRLKTLAERLRQHLATHYPTLAEGFIYRPFSDSAPIFERALAEQAGLGWTGKHTLLIHRAGGSFFVLGELFTSLPLPPDAPVGAHCGSCSACMAICPTQAIVAPYTVDARLCISYLTIELDGEIPPPLRPLMGNRVFGCDDCQLICPWNKFAKRAQVADFAPRHGLDDVGLLTLWAWDEAAFLRHTEGSALRRTGYANFMRNVAVALGNAPFDPTIVTALRAKRDSLNANTQRHVDWALAEQTRKQRQNTPSCATITPDLNAP

SEQ ID NO: 78536 - protein, 397 aa, Moraxella atlantae
  misc_feature (1)..(397): tr|A0A1B8QG04|A0A1B8QG04_9GAMM Epoxyqueuosine reductase OS=Moraxella atlantae OX=34059 GN=queG PE=3 SV=1
MPISTNAIPVNDLSPAHDVGLHALKAWIKAQAADLGFADCGVVHPDNPVFAKQLAALQTYLANGYHGELHFLQDHHDKRANPAQLVMGTQSIISVRMDYLTDVPTPRAVTDNALPNHGIIARYARGRDYHKTMRGRLKTLAERLRQHLATHYPTLAEGFIYRPFSDSAPIFERALAEQAGLGWTGKHTLLIHRAGGSFFVLGELFTSLPLPPDAPVEAHCGSCSACMAICPTQAIVAPYTVDARLCISYLTIELDGEIPPPLRPLMGNRVFGCDDCQLICPWNKFAKRAQVADFAPRHGLDDVGLLTLWAWDEAAFLYHTEGSALRRTGYANFMRNVAVALGNAPFDPTIATALRAKRDSLNANTQRHVDWALAEQTRKQRQNTPSCATITPDLNAP

SEQ ID NO: 78537 - protein, 384 aa, Moraxella canis
  misc_feature (1)..(384): tr|A0A1S9ZHT4|A0A1S9ZHT4_9GAMM Epoxyqueuosine reductase OS=Moraxella canis OX=90239 GN=queG PE=3 SV=1
MTKRIPAVCVQPIDKDGVKDWICAKAAEFGFSDCGFLSVHHPLFAKQTQALKAWLDQGLNGTLDFMHDNHDKRANPALLVDGAKTIITVRMDYLHDLPKPRSVMDNTRPNHAIIARYARGRDYHKTVRQQLKKLAKAIENELPQWQHLSIGADKPFVFRPFSDSAPIFERPIADAAGLGWTGKHTLLINRQAGSFFNLGELFISLDLVGDDETHAVKAHCGSCQACMDICPTRAIIAPYTLDAAACISYLTIEHKGSIDIKYRKAIGNRIFGCDDCQLICPWNRYAKLSTVSDYAPRHGLDDIELTEVWAWSEDDFLAKTEGSPLRRTGYLHLLRNTAIALGNCQATGIKSDRIIHALKSRLGMDRMLDEHINWAISELSGQDG

SEQ ID NO: 78538 - protein, 196 aa, Moraxella catarrhalis
  misc_feature (1)..(196): tr|A0A198UP02|A0A198UP02_MORCA Epoxyqueuosine oQ reduct ase QueG OS=Moraxella catarrhalis OX=480 GN=AO384_0328 PE=4 SV=1
MTKRIPAVCVQPIDKDGVKDWICAKSAEFGFSDCGFLSVHYPLFVKQTKALKAWLDQGLNGTLDFMHENHDKRANPALLVDGAKTIITVRMDYLHDLPKPCSVMDNTRPNHAIIARYARGRDYHKTVRQQLKKLAKAIENELPQWQHLSIGADKPFVFRPFSDSAPIFERPIADAAGLGWTGKHTLLINRQAGSFF

SEQ ID NO: 78539 - protein, 127 aa, Moraxella catarrhalis
  misc_feature (1)..(127): tr|A0A198UP75|A0A198UP75_MORCA Epoxyqueuosine oQ reduct ase QueG OS=Moraxella catarrhalis OX=480 GN=AO384_0326 PE=4 SV=1
MISNTEKAIGNRIFGCDDCQLIRPWNRYAKLSTVSDYAPRHGLDDIQLTEVLAWSEDDFLAKTEGSPLRRTGYLHLLRNTAIALGNCQATGIELDRIIHALKSRLGLDRMLDEHINWAISELSGQDG

SEQ ID NO: 78540 - protein, 396 aa, Moraxella caviae
  misc_feature (1)..(396): tr|A0A1S9ZXY6|A0A1S9ZXY6_9GAMM Epoxyqueuosine reductase OS=Moraxella caviae OX=34060 GN=queG PE=3 SV=1
MTLAQNTPKQNSTVQNSENPPDKEAVKTWIKEQALALGFSDCGFLSVSHPVFAKEIKRLQAWLDKGYGDCLPFLKENHHLRANPALLVEGAKTIISVRMDYLCDKPAPRCVEDDARPNHAIIARYARGRDYHKTMRQKLKQLAKLIEAKLPEWQHLTDGAPFVFRPFSDSAPIFEKAAAHHAGLGWEGKHTLLIHRQAGSFFNLGELFVSLDLAAPNEDNPAKNLCGSCSACIDVCPTRAIVGARTLNAAACIAYLTIEHDGSIPTEYRKGIGNRIFGCDDCQLICPWNKFAKITQVADYAPRHSLDDISLLQVWAWSEDEFLQKSEGSPLRRTGYLNLLRNTAIALGNAPFSKDIITALQGRIGQNPMLDEHIDWALNEQRQKQLKIDCQMICDE

SEQ ID NO: 78541 - protein, 384 aa, Moraxella cuniculi
  misc_feature (1)..(384): tr|A0A448GTW0|A0A448GTW0_9GAMM Epoxyqueuosine reductase OS=Moraxella cuniculi OX=34061 GN=queG PE=3 SV=1
MTDLIAMQPSDDIAEVRAWIRQKAQELGFADCGFLSVHHPLFAQQTQALKQWLNQGLNGTLDFLHENHELRANPHKLVEHAKTIISVRMDYLHTTPTPRCVEDNHRPNHAIIARYARGRDYHKTVRQQLKKLAIAIENELPNWQHLHIGADKPFVFRPFSDSAPIFERPIADAAGLGWTGKHTLLINRQAGSFFNLGELFISLDLAEKNQPHATKSHCGSCSACIDICPTGAIIAPHTLDAAACISYLTIEHKGSIDHKYRKAIGNRIFGCDDCQLICPWNRYAKISTVADYAPRHGLDDIWLLDVWQWSEAEFLTKTEGSPLRRTGYLHLLRNTAIALGNCQPTDRHALNTVLNALTQRLGDNEMLDEHILWAIEQLHALSVV

SEQ ID NO: 78542 - protein, 384 aa, Moraxella cuniculi; identical to SEQ ID NO: 78541
  misc_feature (1)..(384): tr|A0A1N7FFL1|A0A1N7FFL1_9GAMM Epoxyqueuosine reductase OS=Moraxella cuniculi DSM 21768 OX=1122245 GN=queG PE= 3 SV=1

SEQ ID NO: 78543 - protein, 384 aa, Moraxella macacae
  misc_feature (1)..(384): tr|L2F702|L2F702_9GAMM Epoxyqueuosine reductase OS=Mora xella macacae 0408225 OX=1230338 GN=queG PE=3 SV=1
MKIPTKTLDNSDNANLDNTNTLTILKHWIKEQALDLGFSDCGVVHPDNPIFPQQLAKLKQWLADGYHGNMNFFHENHDKRANPALLVAGTKSILSVRLDYLVTPPPKRSIPDNDYPNHAIIARYARGRDYHKIMRSRLKALALRIHDKLKTDYPQFADDFVFRPFSDSAPISERPLAEQAGLGWTGKHTLLINQKSGSFFVLGELFTSLPLPADSPVLPHCGSCSACMDICPTGAIVGEQLVDARRCISYLTIELDSEIPLELRPKMGNKIFGCDDCQLVCPWNKFAKLAKIDDFNPRHNLDSSSLLDLWGWDNAIFLANTEGSPLRRTGYDNFMRNIAVALGNAPFDQNIVDKLKQKYPTLSENAQIHIDWAIKQQLAKAKLT

SEQ ID NO: 78544 - protein, 375 aa, Moraxella osloensis
  misc_feature (1)..(375): tr|A0A1B8PT26|A0A1B8PT26_9GAMM tRNA epoxyqueuosine(34) reductase QueG OS=Moraxella osloensis OX=34062 GN=A9Z61 _01965 PE=4 SV=1
MLDTTNELNALKGWIKAQAKALGFADCGFVHPSNPIFSKQLDALQTWLAQGKHGDMLFFEDNHDKRANPALLVDKTQSIISVRLDYLVTPPPKRSVPDNERPNSAIIARYARGRDYHKTMRGLLKTLARLIQDKLTTDYPQYANDFVFRPFSDSAPIFERALAEQAGLGWTGKHTLLIHPQAGSFFVLGELFTSLPLAEDKKQIETTLSHCGSCRACIHVCPTHAIRKTPTGHYDVDARRCISYLTIELDGKIPVELRPKIGNRIFGCDDCQLICPWNKFAKLATIEDFNPRHRLDEVSLLELWAWDAQDFLTKTEGSPIRRTGYDNFMRNVAVALGNAPFSQAIIDKLKQKRPMLSENTQEHIDWAIQQQLSKS

SEQ ID NO: 78545 - protein, 375 aa, Moraxella osloensis
  misc_feature (1)..(375): tr|A0A2K8KAB0|A0A2K8KAB0_9GAMM tRNA epoxyqueuosine(34) reductase QueG OS=Moraxella osloensis OX=34062 GN=queG PE=4 SV=1
MLDTTNELNALKGWIKAQAKALGFADCGFVHPANPIFSKQLGALQTWLAQGKHGDMLFFEDNHDKRANPALLVDRTQSIISVRLDYLVTPPPKRSVPDNERPNSAIIARYARGRDYHKTMRGLLKTLAKLIQEKLTTDYPQYANDFVFRPFSDSAPIFERALAEQAGLGWTGKHTLLIHPKAGSFFVLGELFTSLPLAEDNKQIETVSSHCGSCRACIHVCPTHAIRKTPTGHYDVDARLCISYLTIELDGKIPVELRPKIGNRIFGCDDCQLICPWNKFAKLATIEDFNPRHRLDEVSLLELWAWDAQDFLTKTEGSPIRRTGYDNFMRNVAVALGNAPFSQAIIDKLQQKRPMLSENTQEHIDWAIEQQLSKS

SEQ ID NO: 78546 - protein, 401 aa, Moraxella pluranimalium
  misc_feature (1)..(401): tr|A0A1T0CIE0|A0A1T0CIE0_9GAMM Epoxyqueuosine reductase OS=Moraxella pluranimalium OX=470453 GN=queG PE=3 SV=1
MHSRSIAMTKPSPPPSSSQPSRIDSTTLPDVDDVKDWIRAKACELGFADCGFLSVHHPLFAEQTQALKAWLNQGLYGTLDFMHDNHELRANPHQLVDGAKTIISVRMDYLHTLPAPRRIEDNERPNHAIIARYARGRDYHKTVRQQLKKLARAIESELPNWTHLSIGADKPFVFRPFSDSAPIFERPIADAAGLGWTGKHTLLINRQAGSFFNLGELFISLDLMGDTESHPVKVHCGSCTACIDICPTQAIIAPHTLDAGACISYLTIEHKGSIDVKYRKAIGNRIFGCDDCQLICPWNRYAKIATVADYAPRHGLDEVRLLDVWAWDEDEFMAKTEGSPLRRTGYLNLLRNTAIALGNSQPDDTAKIDTITALQSRLGMDAMLDEHIYWAIDELTAAHDA

SEQ ID NO: 78547 - protein, 384 aa, Moraxella porci
  misc_feature (1)..(384): tr|A0A1T0CNJ7|A0A1T0CNJ7_9GAMM Epoxyqueuosine reductase OS=Moraxella porci DSM 25326 OX=573983 GN=queG PE=3 SV =1
MTKPSSQPSRIDSTTLPDVDAVKDWIRAKAMELGFADCGFLSVHHPLFAEQTQALKAWLNQGLHGTLDFMQDNHELRASPHKLVDGAKTIISVRMDYLHTLPNPRRIDDDNRPNHAIIARYARGRDYHKTVRQQLKKLARAIESELPNWTHLSIDADKPFVFRPFSDSAPIFERPIADAAGLGWTGKHTLLINRQAGSFFNLGELFISLDLVGKTESHPVKVHCGSCTACIDICPTKAIIAPYTLDAGACISYLTIEHKGSIDIKYRKAIGNRIFGCDDCQLICPWNRYAKLATVADYAPRHGLDEISLLEVWAWDEDEFLQKTEGSPLRRTGYLNLLRNTAIALGNSQPDDTTKADTIKALRSRLGMNAMLDEHIHWAIRELE

SEQ ID NO: 78548 - protein, 396 aa, Moraxella sp.
  misc_feature (1)..(396): tr|A0A496NCF3|A0A496NCF3_MORSP tRNA epoxyqueuosine(34) reductase QueG OS=Moraxella sp. OX=479 GN=queG PE=4 SV= 1
MLFSISFVKIDNFDMTTAKQIETACPKALIKAWIKTQALSLGFSDCGFLSVHHDLFAKSTTHLQARLSQNLHGELKFLEENHHLRANPSLLVAGAKTIISVRMDYLHELPKPRTISDNQKPNHAIIARYARGRDYHKTMRQKLKTLAHLIQNELPNWQGLGVGAEDDFIFRPFSDSAPIFERPLADACGLGWTGKHTLLINRQAGSFFNLGELFISLDLVEKNTSTPVSSHCGSCNACIDVCPTKAIIAPYTVDAKACISYLTIEHKGSIDIKYRKAIGNRVFGCDDCQLICPWNRYAKISLVADYAPRHHLDNITLNQLWQWQESDFLSFTEGSPIRRAGYFGFMRNIAIALGNSKPKTQQEKQEVVALLNTKLGQNAILDEHILWAIHEIYTDE

SEQ ID NO: 78549 - protein, 371 aa, Moraxella sp.
  misc_feature (1)..(371): tr|A0A229GXT1|A0A229GXT1_9GAMM tRNA epoxyqueuosine(34) reductase QueG OS=Moraxella sp. VT-16-12 OX=2014877 GN= queG PE=4 SV=1
MPTQNSRDAIKAWIKSQALKLGFADCGFLSVNHELFAQQTERLRTWLSWDLHGSLVFLKENHHLRANPSLLVAGAKTIISVRMDYLQTSPKLRTIEDNSRPNHAIIARYARGRDYHKTMRQKLKALAKIIENELPNWHGLGVGAENAFVFRPFSDSAPIFERAIGEAVGLGWTGKHTLLINRHGGSFFNLGELFVSLTLCDDNVSIPVKNLCGSCSACINICPTNAIIAPHTLDAGACISYLTIEHKGVIDIKYRKAIGNRIFGCDDCQLICPWNKFAKLASVPDYQARHGLDDISLLDIWGWSEDEFLAKTEGSPLRRTGYMGLMRNVAIALGNSQPTDRQAVLSVLQDKLGLNHLLDEHILWAMGELTR

SEQ ID NO: 78550 - protein, 58 aa, Moraxellaceae bacterium
  misc_feature (1)..(58): tr|A0A3D3KCK1|A0A3D3KCK1_9GAMM tRNA epoxyqueuosine(34) reductase QueG (Fragment) OS=Moraxellaceae bacterium OX =1889775 GN=DIS69_08395 PE=4 SV=1
MLDTTNELNALKGWIKAQAKALGFADCGFVHPANPIFVKQLDALQTWLAQGKHGDMLF

SEQ ID NO: 78551 - protein, 369 aa, Moraxellaceae bacterium
  misc_feature (1)..(369): tr|A0A345P474|A0A345P474_9GAMM Epoxyqueuosine reductase OS=Moraxellaceae bacterium HYN0046 OX=2283318 GN=queG PE=3 SV=1
MTRAKLPRNPDLRDNPIALKAWIQHEAKTLGFANLGVTSPNVSDQLPFLKQFLADGFAGDMHYLAENIEKRGDASLLLEGTTSVLCVQMNYLAEPPPHRYVPEAPNQAIVSRYAQGRDYHKVVRGRLKQLALRIEEQIGPFQWRPFADSAPILEKPLAERSGLGWTGKHTLLINKKAGSFFFLGELLTDLNLPFDSPATAHCGSCTACIDICPTQAIVAPYRLDARRCIAYLTIEFKGIIPIDLRHGIGNRVFGCDDCQLICPWNSFAKLSAEIDFQARHQLDRLSLLDLWQWSEQDFLSFTEGSPLRRTGYANLMRNVAVGLGNAPADPTILNALHARLGQLGDIVDEHILWAIEEQKQKAKRIDVTH

SEQ ID NO: 78552 - protein, 385 aa, Morganella morganii
  misc_feature (1)..(385): tr|A0A1M7MBK0|A0A1M7MBK0_MORMO Epoxyqueuosine reductase OS=Morganella morganii OX=582 GN=queG PE=3 SV=1
MSTHPDLHQLAARIKQWGRELGFQQVGICDTDLSAEEPKLQAWLDAGYQGEMDWMARHGMMRARPHELLPGTLRVISVRMNYLPAKASFAAVLQNPEQGYISRYALGRDYHKLLRQRLKQLGERIQAECDDLALENTLSYRPFVDSAPVLERPLAAKAGLGWVGKHSLILNREAGSWFFLGELLINLPLPVDTPAEEQCGRCVACMTTCPTQAIVAPYTVDARRCISYLTIELEGAIPEEFRPLMGNRIYGCDDCQLICPWNRFSQLTDEADFSPRKRLHTPELLDLFAWDEATFLRVTEGSAIRRIGYLRWLRNISVALGNAPYEDKIIIALTEKTGLADWLDEHIRWAVARQYAKRDESRIEIQTSQQKRLIRAISKGLPRDA

SEQ ID NO: 78553 - protein, 385 aa, Morganella morganii
  misc_feature (1)..(385): tr|J7UAY3|J7UAY3_MORMO Epoxyqueuosine reductase OS=Morg anella morganii subsp. morganii KT OX=1124991 GN=queG P E=3 SV=1
MSTHPGLHQLAARIKQWGRELGFQQVGICDTDLSAEEPKLQAWLDAGYQGEMDWMARHGMMRARPHELLPGTLRVISVRMNYLPAKASFAAVLQNPEQGYISRYALGRDYHKLLRQRLKQLGERIQAECDELALENTLSYRPFVDSAPVLERPLAAKAGLGWVGKHSLILNREAGSWFFLGELLINLPLPVDTPAEEQCGRCVACMTTCPTQAIVAPYTVDARRCISYLTIELEGAIPEEFRPLMGNRIYGCDDCQLICPWNRFSQLTDEADFSPRKRLHTPELLDLFAWDEATFLRVTEGSAIRRIGYLRWLRNISVALGNAPYEDKIIIALTEKTGLADWLDEHIRWAVARQYAKRDESRIEIQTSQQKRLIRAISKGLPRDA

SEQ ID NO: 78554 - protein, 385 aa, Morganella psychrotolerans
  misc_feature (1)..(385): tr|A0A1B8HL13|A0A1B8HL13_9GAMM Epoxyqueuosine reductase OS=Morganella psychrotolerans OX=368603 GN=queG PE=3 S V=1
MSNSPDLHALAAQIKLWGNELGFQQVGICDTDLSAEEPKLQAWLDAGYQGEMDWMARHGMMRARPHELLPGTLRVISVRMNYLPAKAAFAATLQNPALGYISRYALGRDYHKLLRQRLKQLGERIQAHCDALALNHSLSYRPFVDSAPVLERPLAAKAGLGWVGKHSLVLNRDAGSWFFLGELLINLPLPVERPVEEQCGRCVACMTTCPTQAIVAPYTIDARRCISYLTIELEGAIPEEFRPLMGNRIYGCDDCQLICPWNRFSQLTDEDDFSPRKQLHTPELLTLFAWDEATFLRITEGSAIRRIGYLRWLRNISVALGNASYEDNIVIALTAKKGLTDWLDEHIDWAIACQYVKREESGIEIQTSQQKRLIRAISKGLPRDA

SEQ ID NO: 78555 - protein, 385 aa, Morganella psychrotolerans
  misc_feature (1)..(385): tr|A0A1B8H8E0|A0A1B8H8E0_9GAMM Epoxyqueuosine reductase OS=Morganella psychrotolerans OX=368603 GN=queG PE=3 S V=1
MSNSPDLHALAAQIKQWGNELGFQQVGICDTDLSAEEPKLQAWLDAGYQGEMDWMARHGMMRARPHELLPGTLRVISVRMNYLPAKAAFAATLQNPAQGYISRYALGRDYHKLLRQRLKQLGERIQAHCDTLTSDHSLSYRPFVDSAPVLERPLAAKAGLGWVGKHSLVLNRDAGSWFFLGELLINLPLPVDQPVEEQCGRCVACMTTCPTQAIVAPYTIDARRCISYLTIELEGAIPEEFRPLMGNRIYGCDDCQLICPWNRFSQLTDEDDFSPRKQLHTPELLTLFAWDEATFLRITEGSAIRRIGYLRWLRNISVALGNAPYEDNIVIALTEKKGLADWLDEHIDWAVACQYVKRDESGIEIQTSQQKRLIRAISKGLPRDA

SEQ ID NO: 78556 - protein, 385 aa, Morganella sp.
  misc_feature (1)..(385): tr|A0A3D3HPB0|A0A3D3HPB0_9GAMM Epoxyqueuosine reductase OS=Morganella sp. (in: Bacteria) OX=1912315 GN=queG PE =3 SV=1
MSNSPDLHALAAQIKQWGTELGFQQVGICDTDLSAEEPKLQAWLDAGYQGEMDWMVRHGMMRARPHELLPGTLRVISVRMNYLPAKAAFAATLQNPAQGYISRYALGRDYHKLLRQRLKQLGERIQAHCDTLTLNHSLSYRPFVDSAPVLERPLAAKAGLGWVGKHSLVLNRDAGSWFFLGELLINLPLPVDQPVKEQCGRCVACMTTCPTQAIVAPYTIDARRCISYLTIELEGAIPEEFRPLMGNRIYGCDDCQLICPWNRFSQLTDEDDFSPRKQLHTPELLTLFAWDEATFLRITEGSAIRRIGYLRWLRNISVALGNAPYEDNIVIALTAKKGLADWLDEHIDWAVACQYVKRDESGIEIQTSQQKRLIRAISKGLPRDA

SEQ ID NO: 78557 - protein, 380 aa, Moritella marina
  misc_feature (1)..(380): tr|A0A5J6WM18|A0A5J6WM18_MORMI tRNA epoxyqueuosine(34) reductase QueG OS=Moritella marina ATCC 15381 OX=120296 2 GN=queG PE=4 SV=1
MPPIDYQQLTQQIKAWGAELGFQQVGIADTDLSTYEPHFQTWLDNGYHADMDYMSRYGTMRTHPEELYPGTIRVISVRMDYLPPDALMATTLKQKDKGYISRYALGRDYHKIVRKRLKKLGDKISEHCESLDARPFVDTGPLLERPLAEKAGLGWTGKHSLILNKEAGSWFFLGEILINLPLPVDKPIENQCGKCTACLQICPTQAIVAPYSVDANRCISYLTIELFGAIPEQYRSLIGNRIYGCDDCQLICPWNRFAAITGEQDFHPRSNLHSPDLLALYAWDETYFLKQTEGSPIRRIGHERWLRNISVALGNAAYSAEIIEALTAKFAETTEMVQEHITWALQQQRAKAENIIPVLQIDKTKDKLIRMVEKALPRDA

SEQ ID NO: 78558 - protein, 380 aa, Moritella sp.
  misc_feature (1)..(380): tr|A0A2G2C1Z1|A0A2G2C1Z1_9GAMM Epoxyqueuosine reductase OS=Moritella sp. OX=78556 GN=queG PE=3 SV=1
MPPIDYQQLTQKIKVWGAELGFQQVGITDTDLSTYEPHFQTWLDNGYHADMDYMSRYGTMRTHPEELYPGTIRVISVRMDYLPPDALMATTLKQKDKGYISRYALGRDYHKIIRKRLKHLGEKISEHCETLDARPFVDTGPLLERPLAEKAGLGWTGKHSLILNKEAGSWFFLGEILINLPLPVDKPIENQCGKCTACLQICPTQAIVAPYSVDANRCISYLTIELFGAIPEEFRPLIGNRIYGCDDCQLICPWNRFAALTDEQDFHPRSNLHSPDLLALYAWEETYFLKQTEGSPIRRIGHERWLRNISVALGNAAYSAEIVEALETKFVETTEMVQEHITWALQQQQAKADNIIPVLQIDKTKDKLIRMIEKALPRDA

SEQ ID NO: 78559 - protein, 380 aa, Moritella sp.
  misc_feature (1)..(380): tr|A0A2I0F5G0|A0A2I0F5G0_9GAMM Epoxyqueuosine reductase OS=Moritella sp. Urea-trap-13 OX=2058327 GN=queG PE=3 SV=1
MPPIDYQQLTQQIKAWGAELGFQQVGIADTDLSTYEPHFQTWLDNGYHADMDYMSRYGSMRTHPEELYPGTIRVISVRMDYLPPDALMATTLKQKDKGYISRYALGRDYHKIVRKRLKHLGDKISEHCETLDARPFVDTGPLLERPLAEKAGLGWTGKHSLILNKEAGSWFFLGEILINLPLPVDKPIENQCGKCTACLQICPTQAIVAPYSVDANRCISYLTIELFGPIPEQYRALIGNRIYGCDDCQLICPWNRFAAITGEKDFHPRSNLHSPALLTLYAWNETYFLKQTEGSPIRRIGHERWLRNISVALGNAAYSAEIVAALEAKFGETTAMVQEHITWALQQQQTKAGSIIPVLQIDKTKDKLIRMVEKALPRDA

SEQ ID NO: 78560 - protein, 380 aa, Moritella viscosa
  misc_feature (1)..(380): tr|A0A090I9R4|A0A090I9R4_9GAMM Epoxyqueuosine reductase OS=Moritella viscosa OX=80854 GN=queG PE=3 SV=1
MPPIDYQQLTQQIKVWGAELGFQQVGIADTDLSTYEPHFQTWLDNGYHADMDYMSRYGTMRTHPEELYPGTIRVISVRMDYLPPDALMATTLKQKDKGYISRYALGRDYHKIIRKRLKHLGQKISEHCETLDARPFVDTGPLLERPLAEKAGLGWTGKHSLILNKEAGSWFFLGEILINLPLPIDKPIENQCGKCTACLQICPTQAIVEPYTVDANRCISYLTIELFGAIPEQYRTLIGNRIYGCDDCQLICPWNRFAAITGEQDFHPRSNLHSPELLTLYAWNEAYFLKQTEGSPIRRIGHERWLRNISVALGNAAYSPEIVEALETKFVETTEMVQEHITWALQQQQAKANNIIPILQIDKTKDKLIRMVEKALPRDA

SEQ ID NO: 78561 - protein, 380 aa, Moritella yayanosii
  misc_feature (1)..(380): tr|A0A330LS72|A0A330LS72_9GAMM Epoxyqueuosine reductase OS=Moritella yayanosii OX=69539 GN=yjeS PE=3 SV=1
MPPIDYQQLTQKIKVWGAELGFQQVGITDTDLSTYEPHFQTWLDNGYHADMDYMSRYGTMRTHPEELYPGTIRVISVRMDYLPPDALMATTLKQKNKGYISRYALGRDYHKIIRKRLKHLGEKISAHCETLDARPFVDTGPLLERPLAEKAGLGWIGKHSLILNKEAGSWFFLGEILINLPLPVDKPIENQCGKCTACLQICPTQAIVAPYSVDANRCISYLTIELFGAIPEEFRPLIGNRIYGCDDCQLICPWNRFAALTDEQDFHPRSNLHSPDLLALYAWEETYFLKQTEGSPIRRIGHERWLRNISVALGNAAYSAEIVEALETKFVETTEMVQEHITWALQQQQAKADNIIPVLQIDKTKDKLIRMIEKALPRDA

SEQ ID NO: 78562 - protein, 374 aa, Motilimonas sp.
  misc_feature (1)..(374): tr|A0A418YAA2|A0A418YAA2_9GAMM Epoxyqueuosine reductase OS=Motilimonas sp. PLHSC7-2 OX=2303987 GN=queG PE=3 SV =1
MSNIDLHKLAQDIKQWGKALGFQKVGISDIDLSQHEATLQQWLDNQYHGEMEYMARHGMMRARPAELLPGTVRVISARMDYLPPDASFAKDLKQSDTAYISRYALGRDYHKVMRARLKQLGEKIKLQVSDLNYRPFVDSAPILERPLAAKAGLGWVGKHTLVLDEESGSWFFLGEILVNIPLPVDKPVQEKCGACVACIKICPTNAIIEPYVVDARRCISYLTIELDGPIPEEFRPLIGNRIYGCDDCQLICPWNRYAQITDEQDFHPRQLLKSQELLTLLNWTEAEFLERTQGSPIRRIGFERWQRNIAVGLGNANYSEDIIVALESALEASTSELVKEHIQWALSQQKSRPSVSKKTLRLTRSIEKGLPRDA

SEQ ID NO: 78563 - protein, 384 aa, Motiliproteus coralliicola
  misc_feature (1)..(384): tr|A0A369WGA1|A0A369WGA1_9GAMM Epoxyqueuosine reductase OS=Motiliproteus coralliicola OX=2283196 GN=queG PE=3 SV=1
MPSKPEPQAPTQPSISASPEQLTAQVKDWAKELGFSAVGITGIDTADAVQRLEAWLNKGFHGSMGYLANHRELRRHPEQLHPGTLKVISVRMDYLPPEVETVRVLQNPNQAYISRYALGRDYHKTLRKRLVRLAKQIEQHCGSFNYRPFVDSAPVMEKPMAQRAGLGWQGKHSLLIDRKAGSYFVLGELFTDLPLVDDAPYTEDHCSRCSACIDVCPTDAIPEPYVLDARRCISYLTIESKEPIPLELRPLIGNRVFGCDDCQLVCPWNRYCHFTGESDFNPRHQLDTIELAELFQWDEATFLKKTEGSPIRRSGYQGWLRNLAVGLGNSGDKAMIEVLKQQQDNPSELVREHVAWAIEQLSSEQGPSPLPLTDRQPRKVRHLL

SEQ ID NO: 78564 - protein, 393 aa, Motiliproteus sp.
  misc_feature (1)..(393): tr|A0A1R1LWD0|A0A1R1LWD0_9GAMM Epoxyqueuosine reductase OS=Motiliproteus sp. MSK22-1 OX=1897630 GN=queG PE=3 S V=1
MKSPGSHSQNTRQRTDSASSEESRLDSAQLTTSIKNWAHELGFQAVGIGDIDLSRHRQPLEDWLKQGYQGEMQFMERHLDLRTDPSQLHPGTLNAICVRMEYMPPDVETVKVLQNPEQAYISRYALGRDYHKVVRKRLAQLAKRIEADYGSFNSRPFVDSAPVMEKPLAQQAGLGWQGKHGLIIDRKAGSYFVIGELLTDLPLIPDLPYSENHCRRCTACMDVCPTNAFPAPYILDARRCISYLTIELKGSIPEELRPLIGNRVFGCDDCQLVCPWNRYCHFSDETDFKPRHSLDKAELIALFNWNEEEFLKKTEGSPIRRSGYQGWLRNLAVGIGNSGAGEPAIQALSAKREQCSEMVKEHIDWALRQLTASAAIAPLPLTEKHPRKVRHLL

SEQ ID NO: 78565 - protein, 315 aa, Mucilaginibacter auburnensis
  misc_feature (1)..(315): tr|A0A2H9VVF0|A0A2H9VVF0_9SPHI Epoxyqueuosine reductase OS=Mucilaginibacter auburnensis OX=1457233 GN=queG PE= 3 SV=1
MQQSRSAYSKLIKDEAKKLGFMFCGIAKAGFLEAEAPRLEAWLNAGMHGKMQYMENYFDKRLDPRLLVDGAKSVISLALNYYTDARQTDPSAPKISKYAYGQDYHAVIKDKLKQLLQTINEQIGEVGGRAFVDSAPVLDKAWAKKAGIGWVGKNSNLLNKKAGSFFFLAELIVDIELEYDSEPTADHCGTCTRCIDACPTDAIVGPYVVDGSKCISYLTIELKDELPAEFKGKMDNWMFGCDICQDVCPWNKFSVIHSEPPFDPHPDLLGLSRDDIQEITEDVFKKVFQKSAVKRTKYAGLKRNINFLKPGTTSL

SEQ ID NO: 78566 - protein, 312 aa, Mucilaginibacter frigoritolerans
  misc_feature (1)..(312): tr|A0A562TVN5|A0A562TVN5_9SPHI Epoxyqueuosine reductase OS=Mucilaginibacter frigoritolerans OX=652788 GN=queG PE=3 SV=1
MLQNKQQYSTLIKNEAKRLGFMFCGISKADFLEEEAPRLENWLKNNMQGEMHYMENHFDKRLDPRLLVDDAKSVISLSLNYFTDAQQIDPSGPKISKYAYGTDYHQVIKEKLKQLLDIINEQIGEVSGRAFVDSAPVLDKAWAKKAGLGWIGKNTNLISKKVGSFFFLAELIVDIELEYDIAPTADHCGTCTNCIDACPTQAIVGPYIVDGSRCISYLTIELKNEIPAEFKGKMDDWMFGCDVCQDVCPWNKFSVLHQEPAFTPHPDLLNLKKQDWEDITEDVFQKVFKNSAVKRTKYSGLKRNINFLGKDN

SEQ ID NO: 78567 - protein, 313 aa, Mucilaginibacter ginsenosidivorans
  misc_feature (1)..(313): tr|A0A5B8UYR1|A0A5B8UYR1_9SPHI Epoxyqueuosine reductase OS=Mucilaginibacter ginsenosidivorans OX=398053 GN=que G PE=3 SV=1
MQQHLTAYSKLIKKEAKNLGFMFCGIAKADFLEEEAPRLEAWLKKGMQGEMQYMENHFDKRLDPRLLVDGAKSVISLGLNYYTNQSQFDPAAPKISKYAYGDDYHQVIKAKLKQLLEIINEKIGEVHGRAFVDSAPVLDKAWAKKAALGWIGKNTNLINTKKGSFFFLAELIVDIELEYDVPATADHCGTCTRCIDACPTEAIVAPYVVDGSRCISYLTIELKNEIPGEFKGKMDNWMFGCDVCQDVCPWNRFSVLNHERSFQPKEDLLGMNKGDWEDITEDIFQKVFKNSPVKRTKYSGLKRNIEFLGNSDL

SEQ ID NO: 78568 - protein, 310 aa, Mucilaginibacter ginsenosidivorax
  misc_feature (1)..(310): tr|A0A5B8VVM5|A0A5B8VVM5_9SPHI Epoxyqueuosine reductase OS=Mucilaginibacter ginsenosidivorax OX=862126 GN=queG PE=3 SV=1
MQNRTVYSQLIKSEAQKLGFLFCGISKAGFLEEEAPRLENWLKKNMHGEMHYMENHFDKRLDPRLLVDGAKSVISLGFNYYTDNRQTDPTAPKISKYAYGIDYHTVIKDKLRLLLQIINEQIGEVGGRVFVDSAPVLDKAWAKKSGMGWIGKNANLLSKKAGSFFFLAELIIDLELEYDIAPTADHCGTCTNCIDACPTDAIVGPYVVDGSRCISYLTIELKNEIPAEFKGKMDNWMFGCDVCQDVCPWNRFSVLNTEPAFTPHPDLLHLKAADWQDITQDVFQKVFKNSAVKRTKFSGLKRNIDFLKEI

SEQ ID NO: 78569 - protein, 312 aa, Mucilaginibacter gossypii
  misc_feature (1)..(312): tr|A0A1G7NCQ8|A0A1G7NCQ8_9SPHI Epoxyqueuosine reductase OS=Mucilaginibacter gossypii OX=551996 GN=queG PE=3 SV =1
MQQNKAIYSQLIKNEAQKLGFLFCGIAKADFLEDEAPRLESWLNKNMHGEMAYMENHFDKRLDPRLLVDGAKSVISLGINYYTDQQQDDPLSPKISKYAYGIDYHTVIKDKLRLLLQIINDKIGEVGGRAFVDSAPVLDKAWARKAGMGWIGKNSNLLNKKAGSFFFLAELIIDLELEYDIAPTADHCGTCTNCIDACPTDAIVGPYVVDGSRCISYLTIELKNEIPQEFKGKMDNWMFGCDVCQDVCPWNRFSVLNTEPAFTPHPDLLHLKTADWQDITQDIFQKVFKNSAVKRTKFSGLKRNIDFLKVKG

SEQ ID NO: 78570 - protein, 312 aa, Mucilaginibacter gossypii
  misc_feature (1)..(312): tr|A0A5C1ICG5|A0A5C1ICG5_9SPHI Epoxyqueuosine reductase OS=Mucilaginibacter gossypii OX=551996 GN=queG PE=3 SV =1
MQQNKATYSQLIKSEAQKLGFLFCGIAKADFLEDEAPRLEAWLNKNMHGEMAYMENHFDKRLDPRLLVDGAKSVISLGINYYTDQQQDDPLSPKISKYAYGIDYHTVIKDKLRQLLQIINDKIGEVGGRAFVDSAPVLDKAWARKAGMGWIGKNSNLLNKKAGSFFFLAELIVDLELKYDIAPTADHCGTCTNCIDACPTDAIVGPYVVDGSRCISYLTIELKNEIPQEFKGKMDNWMFGCDVCQDVCPWNRFSVLNTEPAFTPHPDLLHLKTADWQDITQDIFQKVFKNSAVKRTKFSGLKRNIDFLKIRD

SEQ ID NO: 78571 - protein, 312 aa, Mucilaginibacter gossypiicola
  misc_feature (1)..(312): tr|A0A1H8JPY1|A0A1H8JPY1_9SPHI Epoxyqueuosine reductase OS=Mucilaginibacter gossypiicola OX=551995 GN=queG PE= 3 SV=1
MQQNKATYSQLIKNEAQKLGFLFCGIAKADFLEDEAPRLETWLNKNMHGEMAYMENHFDKRLDPRLLVDGAKSVISLGVNYYTDQQQDDPLSPKISKYAYGIDYHTVIKDKLRLLLQIINDKIGEVGGRAFVDSAPVLDKAWARKAGMGWIGKNSNLLNKKAGSFFFLAELIIDLELEYDIAPTADHCGTCTNCIDACPTDAIVGPYVVDGSRCISYLTIELKNEIPQEFKGKMDNWMFGCDVCQDVCPWNRFSVLNTEPAFTPHPDLLHLKTADWQDITQDIFQKVFKNSAVKRTKFSGLKRNIDFLKVKG

SEQ ID NO: 78572 - protein, 311 aa, Mucilaginibacter gotjawali
  misc_feature (1)..(311): tr|A0A110B380|A0A110B380_9SPHI Epoxyqueuosine reductase OS=Mucilaginibacter gotjawali OX=1550579 GN=queG PE=3 SV=1
MMPQKSTVYSSLIKKEAQKLGFLFCGISKADFLEDEAPRLEAWLKKGMQGEMHYMENHFDKRLDPRLLVDGARSVISLGLNYFTEVRQADPLSPKISKYAYGDDYHYVIKEKLKELLTIIREQIGEVNGRAFVDSAPVLDKVWAKKAGLGWIGKNTNLINKRVGSFFFLAELIIDLDLNYDIAPAADHCGTCTACIDACPTEAIVAPYIVDGSRCISYLTIELKNELPPAFQGKMDNWMFGCDVCQDVCPWNKFSVLHTEPAFKPKPQLLELNKKDWEEITEDVFQKVFKNSAVKRTKFKGLKRNIDFLKS

SEQ ID NO: 78573 - protein, 314 aa, Mucilaginibacter gracilis
  misc_feature (1)..(314): tr|A0A495J896|A0A495J896_9SPHI Epoxyqueuosine reductase OS=Mucilaginibacter gracilis OX=423350 GN=queG PE=3 SV =1
MMLQNAALYTKQIKTWAHELGFMFCGIAQADFLEEEAPRLEAWLKKGFHGEMQYMENHFDKRLDPRLLVDGAKSVISLGLNYYTDARQLDASAPLISKYAYGADYHDVIKDKLKQLLQLINEHIGEVSGRGFVDSAPVLDRAWAKKAGLGWIGKNANLIGKKTGSFFFLAELIIDLELDYDVEPTADHCGTCTRCIDACPTEAIVGPAVVDGSKCISYLTIELKNEIPASFKDKLDGWMFGCDICQDVCPWNRFSVLHNQPAFEPHPDLLGMTKQDWNEITEDVFKKVFKGSAVKRTKFAGLTRNISFLSPPAP

SEQ ID NO: 78574 - protein, 311 aa, Mucilaginibacter lappiensis
  misc_feature (1)..(311): tr|A0A1N7CVL4|A0A1N7CVL4_9SPHI Epoxyqueuosine reductase OS=Mucilaginibacter lappiensis OX=354630 GN=queG PE=3 SV=1
MTQNRTIYSQLIKNEAQKLGFLFCGISKAEFLEDEAPRLESWLKKNMHGEMQYMENHFDKRLDPRLLVDGAKSVISLGINYYTNNKQNDPDAPKISKYAYGIDYHTIIKDKLRQLLQIINEKIGEVGGRVFVDSAPVLDKAWAKKAGMGWIGKNSNLLNKKAGSFFFLAELIIDLELEYDIAPTMDHCGTCTNCIDACPTDAIVGPYVVDGSRCISYLTIELKNEIPAEFKGKMDNWMFGCDVCQDVCPWNRFSILNSEPAFNPHPELLHLKADDWQDITQDVFQKVFKNSAVKRTKFTGLKRNIEFLKEI

SEQ ID NO: 78575 - protein, 317 aa, Mucilaginibacter mallensis
  misc_feature (1)..(317): tr|A0A1H1V9I5|A0A1H1V9I5_9SPHI Epoxyqueuosine reductase OS=Mucilaginibacter mallensis OX=652787 GN=queG PE=3 S V=1
MYYLCAMHSNRSAYSELIKTEAKNLGFMFCGIAKAEFLEDEAPRLEQWLKKNMHGEMRYMENHFDKRLDPRLLVDGAKSVISLGLNYYSEHKQADPLAPKISKYAYGADYHQVIKDKLKQLMEIINEKIGEVGGRAFVDSAPVLDKAWAKKAGLGWTGKNSNLINKKSGSFFFLAELIIDLDLEYDIEPTADHCGSCTRCIDACPTEAIVAPYIVDGSRCISYLTIELKDAIPQEFKGKMDNWMFGCDICQDVCPWNKFSVLNNEPSFKATPELLDMNKNDWTDITQEVFQKVFKSSAVKRTKFSGLTRNIEFLRNS

SEQ ID NO: 78576 - protein, 311 aa, Mucilaginibacter oryzae
  misc_feature (1)..(311): tr|A0A316HCV1|A0A316HCV1_9SPHI Epoxyqueuosine reductase OS=Mucilaginibacter oryzae OX=468058 GN=queG PE=3 SV=1
MQQNKQAYSQLIKSEAQKLGFLFCGIAKADFLEEEAPRLEAWLNKNMHGEMAYMENHFDKRLDPRLLVDGAKSVISLGINYYTDQTQDDPSAPKISKYAYGMDYHTVIKDKLKQLLQIINEKIGEVGGRAFVDSAPVLDKAWARKAGMGWIGKNSNLLNKKAGSFFFLAELIIDLELEYDIAPTADHCGTCTNCIDACPTNAIVGPYVVDGSRCISYLTIELKNEIPQEFKGKMDNWMFGCDVCQDVCPWNRFSVIHTEPAFTPHPDLLHLKKADWQEITRDVFQKVFKNSAVKRTRFSGLTRNISFLNNS

SEQ ID NO: 78577 - protein, 308 aa, Mucilaginibacter paludis
  misc_feature (1)..(308): tr|H1Y387|H1Y387_9SPHI Epoxyqueuosine reductase OS=Muci laginibacter paludis DSM 18603 OX=714943 GN=queG PE=3 S V=1
MQNTALYTKQIKNWATELGFLFCGIAKAEFLEQEAPRLESWLKKGFHGEMQYMENHFDKRLDPRLLVDGAKSVISLGLNYYTDAQQLDSDAPRISKYAYGADYHDVIKNKLKQLLQLINEHIGEVNGRGFVDSAPVLDKAWAKKAGLGWVGKNANLLNKRSGSFFFLAELIVDLELKYDIEPTADHCGTCTRCIDACPTEAIVGPAVVDGSKCISYLTIELKNEIPVFFKDKMAGWMFGCDICQDVCPWNRFSVLHNEPAFQPPPDLLSMTKGDWDEITEDVFKKVFKSSAVKRTKFTGLKRNIDFIK

SEQ ID NO: 78578 - protein, 317 aa, Mucilaginibacter pedocola
  misc_feature (1)..(317): tr|A0A1S9PF70|A0A1S9PF70_9SPHI Epoxyqueuosine reductase OS=Mucilaginibacter pedocola OX=1792845 GN=queG PE=3 S V=1
MQNRHAYSQLIKTEAKNLGFLFCGISKAEFLEEEAPRLENWLAKGMHGEMKYMENYFDKRLDPRLLVDGAKSVISLGLNYYTDELQLDSSAPKISKYAYGADYHTVIKDKLKLLLEFINEQIGEVGGRAFVDSAPVLDKAWAKKAGLGWVGKNSNLISKQVGSFFFLAELIVDIELEYDIEPTADHCGTCTRCIDACPTDAIVGPYIVDGSRCISYLTIELKNEIPQEFKGKMDNWMFGCDICQDVCPWNRFSVLHNEPAFKPHPELHGLKKADWEDITRDVFQKVFKNSAVKRTKFEGLQRNIKFLVPQPPEGGAK

SEQ ID NO: 78579 - protein, 312 aa, Mucilaginibacter phyllosphaerae
  misc_feature (1)..(312): tr|A0A4Y8ABT8|A0A4Y8ABT8_9SPHI Epoxyqueuosine reductase OS=Mucilaginibacter phyllosphaerae OX=1812349 GN=queG PE=3 SV=1
MQQNLSAYSQMIKTEAKNLGFLFCGIAKAEFLEQEAPRLEAWLNKGMHGEMRYMENYFDKRLDPRLLVDGARSVISLGINYYTDTKQLDPSAPKISKYAYGTDYHSVIKDKLKALLEIINQKIGEVGGRAFVDSAPVLDKAWAKKAGLGWIGKNSNLLSKQVGSFFFLAELIVDIELEYDIEPTADHCGSCTRCIDACPTDAIVGPYVVDGSRCISYLTIELKNEIPQEFKGKMDNWMFGCDICQDVCPWNRFSVLHNEPAFIPHPDLHGLKKQDWEDITADVFQKVFKNSAVKRTKFEGLKRNIEFLKKSD

SEQ ID NO: 78580 - protein, 312 aa, Mucilaginibacter pineti
  misc_feature (1)..(312): tr|A0A1G6V1S8|A0A1G6V1S8_9SPHI Epoxyqueuosine reductase OS=Mucilaginibacter pineti OX=1391627 GN=queG PE=3 SV= 1
MQQSKIAYSQLIKNAALKLGFLFCGISKAEFLEEEAPRLEAWLKNNMHGEMQYMENHFDKRLDPRLLVDGAKSVISLGINYYTDSRQADPLAPKISKYAYGIDYHTVIKDKLRQLLHIINEKIGQVDGRVFVDSAPVLDKAWAKKSGMGWIGKNANLLNKKAGSFFFLAELIIDMELEYDIAPTADHCGTCTNCIDACPTDAIVGPYVVDGSRCISYLTIELKNEIPAEFKGKMDNWMFGCDVCQDVCPWNRFSVLNTEQAFTPHPDLLNLKAGDWQEMTQDVFQKVFKNSAVKRTKFSGLKRNIDFVSNRQ

SEQ ID NO: 78581 - protein, 311 aa, Mucilaginibacter polytrichastri
  misc_feature (1)..(311): tr|A0A1Q5ZZ37|A0A1Q5ZZ37_9SPHI Epoxyqueuosine reductase OS=Mucilaginibacter polytrichastri OX=1302689 GN=queG PE=3 SV=1
MLNNRNAYSQLIKAEAQKLGFLFCGIAKAEFLEQEAPRLESWLQKGMHGEMAYMENYFDKRLDPRLLVDGAKSVISLGLNYYSDHQQSDPNAPKISKYAFGADYHTVIKDKLKQLLAVINEQIGEVGGRAFVDSAPVLDKAWAKKAGLGWIGKNSNLISKKTGSFFFLAELIVDIELEYDIEPTADHCGTCTRCIDACPTEAIVAPQVVNGSRCISYLTIELKNEIPAEFKGKMDGWMFGCDICQDVCPWNKFSLLHQEQSFAPHPELLGMNTADWNDITEDVFRKVFKNSAVKRTKFDGLTRNISFLKKI

SEQ ID NO: 78582 - protein, 322 aa, Mucilaginibacter psychrotolerans
  misc_feature (1)..(322): tr|A0A4Y8SMB2|A0A4Y8SMB2_9SPHI Epoxyqueuosine reductase OS=Mucilaginibacter psychrotolerans OX=1524096 GN=queG PE=3 SV=1
MPQNRSAYSQMIKAEAKNLGFLFCGIAKAEFLEDEAPRLETWLNKGMHGEMRYMENHFDKRLDPRLLVDGAKSVISVALNYYTDEQQTDPSAPKLSKYAYGTDYHFVIKDKLKQLLAFINREIGEVGGRAFVDSAPVLDKAWAKKAGLGWVGKNANLLNKHAGSFFFLAELIVDIELEYDVEPTADHCGTCTRCIDACPTDAIVGPYVVDGSRCISYLTIELKDEIPAEFKGKMDNWMFGCDICQDVCPWNRFSVIHTEPAFAPHAELLGLKKEDWNDLTQDVFQKVFKNSAVKRTKFDGLKRNISFLAPQPPKGGAKNKPI

SEQ ID NO: 78583 - protein, 310 aa, Mucilaginibacter rubeus
  misc_feature (1)..(310): tr|A0A5C1HYX7|A0A5C1HYX7_9SPHI Epoxyqueuosine reductase OS=Mucilaginibacter rubeus OX=2027860 GN=queG PE=3 SV= 1
MQQNKATYSQLIKNEAQKLGFLFCGIAKAEFLEEEAPRLEAWLNKNMHGEMAYMENHFDKRLDPRLLVDGAKSVISLGINYYTDQRQDDPSAPKISKYAYGIDYHTVIKDKLRQLLQIINEQIGEVGGRAFVDSAPVLDKAWARKAGMGWIGKNSNLLNKKAGSFFFLAELIIDLELEYDIAPTADHCGTCTNCIDACPTDAIVGPYVVDGSRCISYLTIELKNEIPQEFKGKMDNWMFGCDVCQDVCPWNRFSVLNTEPAFSPHPDLLHLKTADWQDISQDIFQKVFKNSAVKRTKFSGLKRNIDFLNG

SEQ ID NO: 78584 - protein, 312 aa, Mucilaginibacter rubeus
  misc_feature (1)..(312): tr|A0A364WKZ5|A0A364WKZ5_9SPHI Epoxyqueuosine reductase OS=Mucilaginibacter rubeus OX=2027860 GN=queG PE=3 SV= 1
MQQNKSTYSQLIKNEAQKLGFLFCGIAKAGFLEDEALHLETWLNKNMHGEMAYMENHFDKRLDPRLLVDGAKSVISLGINYYTDKQQDDPLSPKISKYAYGIDYHTVIKDKLRLLMQIINNKIGEVGGRAFVDSAPVLDKAWARKAGMGWIGKNSNLLNKKAGSFFFLAELIIDLELEYDIAPTADHCGTCTNCIDACPTDAIVGPYVVDGSRCISYLTIELKNEIPQEFKGKMDNWMFGCDVCQDVCPWNRFSVLNTEPAFTPHPDLLHLKTADWQDITQDIFQKVFKNSAVKRTKFSGLKRNIDFLKVKG

SEQ ID NO: 78585 - protein, 359 aa, Mucilaginibacter sp.
  misc_feature (1)..(359): tr|A0A2J6H455|A0A2J6H455_9SPHI Epoxyqueuosine reductase OS=Mucilaginibacter sp. OX=1882438 GN=queG PE=3 SV=1
MRRQVFNKLQHIVIIHKGYNLFKKKNYYPKFNLGHNLPITRFIYLCIVQQKLQGYSQLIKKAAAELGFLFCGISPAGFLEEEAPRLENWLKKGMHGEMKYMENYFDKRLDPRLLVDGAKSVISLGLNYYTNQKAEDPLAPKISKYAYGADYHGVIKDKLKVLLQTINEQIGEVGGRAFVDSAPVLDKAWAKKAGLGWIGKNANLISKKRGSFFFLAELIVDIELAYDVAPTADHCGDCTRCIDACPTQAIVGPYIVDGSRCISYLTIELKNEIPQEFKGKMDNWMFGCDVCQDVCPWNRFSVLHQEPAFKPNADLLGLKQQEWEELTTDVFQKVFKNSAVKRTKYDGLKRNINFLKNNS

SEQ ID NO: 78586 - protein, 309 aa, Mucilaginibacter sp.
  misc_feature (1)..(309): tr|A0A367GT15|A0A367GT15_9SPHI Epoxyqueuosine reductase OS=Mucilaginibacter sp. ZR32 OX=2201324 GN=queG PE=3 S V=1
MSRTAYSRLIKEEAKKLGFLFCGISEAGFLEEEAPRLEKWLEQNMHGEMQYMENHFDKRLDPRLLVEGAKSIISLGINYYTDAAQADPLAPKISKYAYGIDYHHVIKDKLKLLLQVINAKIGEVGGRAFVDSAPVLDKAWAKKAGLGWIGKNANLINRETGSFFFLAELIVDIELEYDIEPTADYCGTCTRCIDACPTNAIVEPYVVDGSRCISYLTIELKNEIPVEFKNKMDGWMFGCDVCQDVCPWNKFSVLHNEPSFQPRAELLELNKKEWEEITEDVFHKVFHKSAVKRTKYNGLKRNINFLKVT

SEQ ID NO: 78587 - protein, 302 aa, Mucilaginibacter yixingensis
  misc_feature (1)..(302): tr|A0A2T5J5U4|A0A2T5J5U4_9SPHI Epoxyqueuosine reductase OS=Mucilaginibacter yixingensis OX=1295612 GN=queG PE= 3 SV=1
MIKAEAKNLGFLHCGIAKAGFLEEEAPRLEAWLNNNMNGQMQYMENYFDKRLDPRLLVDGAKSVISLALNYYTDNKQVDASSPKISKYAYGIDYHTVIKDKLKHLLNFIRENIGEVDGRAFVDSAPVLDKAWAKKAGLGWVGKNSNLINKQAGSFFFLAELIVDLELEYDVAPTADHCGTCTRCIDACPTDAIVGPYVVDGSKCISYLTIELKDEIPAEFKDKMDSWMFGCDVCQDVCPWNKFSVIHSEPAFNPHPDLLNLTQNDWQDISEEVYQKLFKGSAVKRTKFAGLKRNIKFLGDKD

SEQ ID NO: 78588 - protein, 287 aa, Mucinivorans hirudinis
  misc_feature (1)..(287): tr|A0A060REI3|A0A060REI3_9BACT Epoxyqueuosine (OQ) redu ctase QueG OS=Mucinivorans hirudinis OX=1433126 GN=BN93 8_3051 PE=4 SV=1
MTNLMKIIDISNSNFDDIAVVRYEMLDLEGERLKCWLSRGMEGELEYMRRSADLRRDPRAVFADVKSIIVTLTAIKKVKPHSPTLAAFAHNNPDYHILIKNKLNLLLSNIREIEPQIEGRAVVDSAPIFEKGLAVRAGLGWIGRNSLLIHPRLGSYTHIGLLLLNKDLSSECQVIEDQCPKGCSICKDNCPNGAINGDRTVDCRKCIAAMTIENCSDAYALHNHIFGCDLCQQYCPYNSDIEEIEPTIKEDWSTITKDSFRAKYRKTSLGRVSFEKIKNSLQCAKNQ

SEQ ID NO: 78589 - protein, 312 aa, Muribaculaceae bacterium
  misc_feature (1)..(312): tr|A0A4S4GH33|A0A4S4GH33_9BACT tRNA epoxyqueuosine(34) reductase QueG OS=Muribaculaceae bacterium OX=2498093 G N=queG PE=4 SV=1
MSSGPSICKDDLIDEARRLGITDIGIAAAEPVDSETMSRYRQWIADGCHGTMSYLERYPDLRADPRLIFPEARSIITAAFNYYPAQFRQPDNPRFAYYAYGRDYHEVVRERLSRLADYVTQLTGAATRVCVDTAPVLERYWAVKSGLGFKGLNSLLILPSRGSYFFLGEILTTAEITPTEPCNRRCGDCGACQRACPAGAIRGDGTVDASRCLSYLTIEYRGELPDSVNLGNRIYGCDTCQRVCPHNRKSRPTEIEDFTPSPEFLALDRDDIANLTPERFNALFRHSAIKRTKLSGLLRNLNRLSPDNQNLT

SEQ ID NO: 78590 - protein, 324 aa, Muribaculaceae bacterium
  misc_feature (1)..(324): tr|A0A3N2NQC8|A0A3N2NQC8_9BACT tRNA epoxyqueuosine(34) reductase QueG OS=Muribaculaceae bacterium Isolate-114 (HZI) OX=2486475 GN=queG PE=4 SV=1
MMIKRELFLTDCDKESIRSILFASGACAVGFAKAEPVDSEVWRGFTDWLSRGDNAGMEYMYNYPDLRRDSRLLLDGARTVISIAYSYAPAKWRNPDLGEIAAYAYGKDYHKVLRKLLKPALNEISATYSDSAFRICIDSAPVLERYWAQKAGIGFIGDNSALIVPGYGSMVFLVEILTTLDIAPDNPDTRDCGHCGACRKACPGKAIIDNCQIDCRRCISYLTIEHRGEWTLEESSEVMKTEAARNSIFGCDTCLRVCPHNRGVPPTSIEDFHPSIQMLSLYFEDIKSLKNSEDLQRLIPGSPMTRAGVSGLLRNISPDCRHCR

SEQ ID NO: 78591 - protein, 315 aa, Muribaculum intestinale
  misc_feature (1)..(315): tr|A0A1B1SCE0|A0A1B1SCE0_9BACT tRNA epoxyqueuosine(34) reductase QueG OS=Muribaculum intestinale OX=1796646 GN =A4V02_12500 PE=4 SV=1
MNTEQLDSIMRSSGAVAWGVATAESVDSEAWERRERWISDGNNARMDYLDRYPDVRRDPRNLLEEARSVIVAAYSYYPSRRQPADAPQFAWYAYGRDYHEVVRARLERVASRLDEVYDGARFRICVDTAPLMERYWAVKAGVGFVGRNAQLIVPGHGSACFLGEIVTTIPLPASTPSEGACPDGCDLCIRACPGGAISRECTVDARRCLSYLTIEHRGAFTDGMPQLGRRIYGCDACQSACPLNRGISPTDIPEFLPSEALMSLTDSDIATLTPERFSSIFSHSAVKRAKLAGLLRNLSALTPRSAAGPPSEDKI

SEQ ID NO: 78592 - protein, 317 aa, Muribaculum intestinale
  misc_feature (1)..(317): tr|A0A4S2G044|A0A4S2G044_9BACT tRNA epoxyqueuosine(34) reductase QueG OS=Muribaculum intestinale OX=1796646 GN =queG PE=4 SV=1
MMNTEQLDSIMRSSGAVAWGVATAEPVDSEAWERRERWISDGNNAGMDYLDRYPDVRRDPRNLLEEARSVIVAAYSYYPSRRQPADAPQFAWYAYGRDYHEVVRARLELAASRLEEVYAGARFRICVDTAPLMERYWAVKAGVGFIGRNAQLIVPGHGSACFLGEIVTTIPLPASTPSEGACPDGCDLCIRACPGRAISRECTVDARRCLSYLTIEHRGAFTDGMPQLGRRIYGCDACQSVCPLNRGISPTDISEFSPSEALMSLTDSDIATLTPERFSSVFSHSAVKRAKLAGLLRNLSALTPRSAAGPPSEDEIQ

SEQ ID NO: 78593 - protein, 331 aa, Muribaculum sp.
  misc_feature (1)..(331): tr|A0A1Y4CCX0|A0A1Y4CCX0_9BACT 4Fe-4S ferredoxin-type d omain-containing protein OS=Muribaculum sp. An287 OX=19 65623 GN=B5F81_08900 PE=4 SV=1
MPETARLIIETATREGFTGAGIAPVSETALQPLSDWLAKGYNAGMEYMGRNIRLRGNPAGLLEGARSIMVFTMPYPDSITGKSGEKYAGFAIGKDYHYIIKERLSRIAATCLPSGSRYRVFCDSAPVMERYWAEKCGLGAIGKNNFLISKASGARVLIGEILTCETFDKKTAGALRDWNDSNDRLHFNPGFCAGCGRCIEACPNGALKGRGLLDASKCISYHTVESKDRIPEYMETKGWVLGCEECLLACPFSRQPCPEQAISTEQAIRNADNDGARLCATEFYTNAGLLESLGKEGWERMDNAAFKAHFKGTAFERPGLEKLKDNINKAK

SEQ ID NO: 78594 - protein, 312 aa, Muribaculum sp.
  misc_feature (1)..(312): tr|A0A4P7VQU5|A0A4P7VQU5_9BACT tRNA epoxyqueuosine(34) reductase QueG OS=Muribaculum sp. TLL-A4 OX=2530390 GN= queG PE=4 SV=1
MSSGPSICKDDLIDEARRLGITDIGIAAAEPVDPETMSRYSQWIAEGCHGTMSYLERYPDLRADPRLILPEARSIITAAFNYYPAQFRQPDNLRFAYYAYGRDYHEVVRERLSRLADYVTQLTGAATRVCVDTAPVLERYWAIKSGLGFKGLNSLLILPSRGSYFFLGEILTTAEITPTEPCNRRCGDCGACQRACPAGAIRGDGTIDASRCLSYLTIEYRGELPDSVDLGNRIYGCDTCQRVCPHNRKSRPTEIEDFTPSPEFLALDRDEIANLTPERFNALFRHSAIKRTKLSGLLRNLNRLSPDNQNLT

SEQ ID NO: 78595 - protein, 303 aa, Muricauda antarctica
  misc_feature (1)..(303): tr|A0A1M6TH87|A0A1M6TH87_9FLAO Epoxyqueuosine reductase OS=Muricauda antarctica OX=1055723 GN=queG PE=3 SV=1
MIKTEAKRLGFLSCGVSKAGFLEEEAPRLEKWLNQNRHGEMQYMENHFDKRLDPTKLVEGSKSVISLLLNYFPSEQQNPDSYKISKYAYGTDYHFVIKDKLKSLLHFIQEEIGEVHGRAFVDSAPVLDKAWASRSGLGWIGKHSNLLTQKVGSFYFIAELIVDLELEYDTPVTDHCGTCTACIDACPTEAIMEPYVVDGSKCISYFTIELKNEIPGEFQGKFDEWMFGCDVCQDVCPWNRFSKPHREPLFDPHPELLSFTKKDWEEITEDVFKKVFQKSAVKRAKLSGLKRNIDFIKNKNHSV

SEQ ID NO: 78596 - protein, 307 aa, Muricauda lutaonensis
  misc_feature (1)..(307): tr|A0A0D5YTA5|A0A0D5YTA5_9FLAO Epoxyqueuosine reductase OS=Muricauda lutaonensis OX=516051 GN=queG PE=3 SV=1
MDKVQKHTTLIKTEAKRLGFLSCGISKAGFLEQEAPRLEKWLDDSMHGEMQYMENHFDKRLDPTKLVPGAKSVISFLLNYFPKETQKENTFKVSKYAYGTDYHFVIKHKLKSLLNFIREEIGEVHGRAFVDSAPVLDKAWATKSGLGWMGKHSNLLTKEVGSFYFIAELIVDLELEYDSAVTDHCGTCTACIDACPTEAIVEPYVVDGSKCISYLTIELKNEIPSEFQGKMEDWIFGCDVCQDVCPWNRFSKPHREPLFDPHPELLSMTKNDWEEITEDVFKRIFKKSAVKRTKFAGLKRNIDFLGK

SEQ ID NO: 78597 - protein, 306 aa, Muricauda lutimaris
  misc_feature (1)..(306): tr|A0A3A1N913|A0A3A1N913_9FLAO Epoxyqueuosine reductase OS=Muricauda lutimaris OX=475082 GN=queG PE=3 SV=1
MNAEKNTQLIKTEAKRLGFLSCGISKAEFLEEEAPRLEKWLNQNMHGEMQYMENHFDKRLDPTKLVEGSKSVISLLLNYFPSEEQNSDSYKISKYAYGTDYHFVIKDKLKTLLHFIREEIGEVHGRAFVDSAPVLDKAWAAKSGLGWIGKHSNLLTQQVGSFYFVAELIVDLELEYDTPVTDHCGTCTACIDACPTDAIVQPYVVDGSKCISYITIELKNEIPSEFDGKLDDWMFGCDVCQDVCPWNRFSKSHNEPLFNPNPELLAFTKKDWEEITQDVFKKVFKKSAVKRTKLSGLKRNIDFLKK

SEQ ID NO: 78598 - protein, 306 aa, Muricauda olearia
  misc_feature (1)..(306): tr|A0A444VID0|A0A444VID0_9FLAO Epoxyqueuosine reductase OS=Muricauda olearia OX=552546 GN=queG PE=3 SV=1
MNATKRTQMIKTEAKRLGFLSCGISKAQFLEEEAPRLEKWLKNNMHGEMQYMENHFDKRLDPTKLVEGSKSVISLLLNYFPSQEQNQDSYKISKYAYGTDYHFVIKDKLKSLLHFIQDEIGEVHGRAFVDSAPVLDKAWAARSGLGWIGKHSNLLTQQVGSFYFIAELIVDLDLEYDAPTTDHCGTCTACIDACPTEAIVEPYVVDGSKCISYFTIELKNEIPTGFKGKLDDWMFGCDVCQDVCPWNRFSKPHSEPLFDPNPQLLSMTKKDWEEITEEVFRKVFKKSAVKRTKYGGLQRNITFLKS

SEQ ID NO: 78599 - protein, 305 aa, Muricauda pacifica
  misc_feature (1)..(305): tr|A0A2T0MJG2|A0A2T0MJG2_9FLAO Epoxyqueuosine reductase OS=Muricauda pacifica OX=1080225 GN=queG PE=3 SV=1
MSKSRYTKLIRDEAKRLGFLSCGISKAEFLEEEAPRLEKWLNANMHGEMTYMENHFDKRLDPTKLVEGSKSVISLLLNYFPLEEQNPNSYKISKYAYGTDYHFVIKDKLKQLLHCIHEEIGEVNGRAFVDSAPVMDKAWAAKSGLGWMGKHSNLLTQQVGSFYFIAELIVDLELEYDLPVTDHCGTCTACIDACPTEAIVEPYVVDGSKCISYFTIELKSEIPTEFEDKFEDWMFGCDVCQDVCPWNRFSKPHSEPLFNPTPELLFFSKKDWEEITEDVFKKIFKKSPVKRTKFSGLKRNIDFVK

SEQ ID NO: 78600 - protein, 307 aa, Muricauda ruestringensis
  misc_feature (1)..(307): tr|G2PJV0|G2PJV0_MURRD Epoxyqueuosine reductase OS=Muri cauda ruestringensis (strain DSM 13258 / CIP 107369 / L MG 19739 / B1) OX=886377 GN=queG PE=3 SV=1
MGSKQKHTNLIKTEAKRLGFLSCGVSKAEFLEEEAPRLEKWLNQNMHGEMQYMENYFDKRLDPTKLVEGSKSVISLLLNYFPSKEQNPDSYKISKYAYGMDYHFVIKDKLKSLLHFIQEEIGDVHGRAFVDSAPVLDKAWAAKSGLGWIGKHSNLLTQQVGSFYFIAELIVDLDLEYDTPVTDHCGTCTACIDACPTDAIVQPYMVDGSKCISYLTIELKNEIPSEFDGKLDDWMFGCDVCQDVCPWNRFSKPHSEPLFNPTPELLSYTKKDWEEITEDVFKKIFKKSAVKRTKLSGLKRNVDFIKK

SEQ ID NO: 78601 - protein, 308 aa, Muricauda sp.
  misc_feature (1)..(308): tr|A0A2E3VRF2|A0A2E3VRF2_9FLAO Epoxyqueuosine reductase OS=Muricauda sp. OX=192149 GN=queG PE=3 SV=1
MLNSITKHTSMIKTEAKRLGFLSCGISKAGFLEEEAPRLEKWLNQNMHGEMQYMENHFDKRLDPTKLVEGSKSVISLLLNYFPSEEQNPDSYKISKYAYGMDYHFVIKDKLKSLLQFIQEEIGDVHGRAFVDSAPILDKAWAAKSGLGWIGKNSNLLTQQVGSFYFIAELIVDLELEYDTPVTDHCGTCTACIDACPTEAIVQPYVVDGSKCISYLTIELKNEIPSEFDGKLDEWMFGCDVCQDVCPWNRFSKPHSEPLFNPNPDLLSFTKKDWEEITEDVFKKIFKKSAVKRTKLSGLERNINFLKK

SEQ ID NO: 78602 - protein, 307 aa, Muricauda sp.
  misc_feature (1)..(307): tr|A0A424LKM0|A0A424LKM0_9FLAO Epoxyqueuosine reductase OS=Muricauda sp. TMED12 OX=1986608 GN=queG PE=3 SV=1
MNALQKNTELIKTEAKRLGFLSCGISKAEFLEEEAPRLEKWLNQNMHGEMQYMENHFDKRLDPTKLVEGSKSVISLLLNYFPSEEQNSDSFKISKYAYGTDYHFVIKDKLKTLLHFIQEEIGEVCGRAFVDSAPVLDKAWAAKSGLGWIGKHSNLLTQQVGSFYFVAELIVDLELDYDSPVTDHCGTCTACIDACPTDAIVQPYMVDGSKCISYLTIELKNEIPSEFDGKLDDWMFGCDVCQDVCPWNRFSKPHNEPLFNPNPELLAFTKKDWEEITEDVFKKVFKKSAVKRTKLSGLKRNIDFLKK

SEQ ID NO: 78603 - protein, 313 aa, Muricauda taeanensis
  misc_feature (1)..(313): tr|A0A3A1NP25|A0A3A1NP25_9FLAO Epoxyqueuosine reductase OS=Muricauda taeanensis OX=1005926 GN=queG PE=3 SV=1
MTNSKRVHTDLIKTEAKRLGFLSCGVSKAGFLEEEAPRLEKWLNQNRHGEMQYMENHFDKRLDPTKLVEGSKSVISLLLNYFPSEQQNPDSYKISKYAYGTDYHFVIKDKLKSLLHFIQEEIGEVYGRAFVDSAPVLDKAWASRSGLGWIGKHSNLLTQKVGSFYFIAELIVDLELEYDTPVTDHCGTCTACIDACPTEAIVEPYVVDGSKCISYFTIELKNEIPGEFQGKFDEWMFGCDVCQDVCPWNRFSKPHREPLFDPHPELLSFTKKDWEEITEDVFKKVFQKSAVKRAKLSGLKRNIDFIKNKNHST

SEQ ID NO: 78604 - protein, 306 aa, Muricauda zhangzhouensis
  misc_feature (1)..(306): tr|A0A1H2WZS0|A0A1H2WZS0_9FLAO Epoxyqueuosine reductase OS=Muricauda zhangzhouensis OX=1073328 GN=queG PE=3 SV =1
MNAAKRTQLIKAEAKRLGFLSCGVSKADFLEEEAPRLEQWLNKQMHGEMQYMEDHFDKRLDPTKLVEGSKSVISMLLNYYPSEQQNADSYKISKYAYGTDYHFVIKDKLKNLLHFIQEEIGEVHGRAFVDSAPVLDKAWAAKSGLGWIGKNSNLLTQQVGSFYFIAELIVDLELEYDNPVTDHCGTCTACIDACPTDAIVQPYVVDGSKCISYFTIELKNEIPNEFQGKLDEWMFGCDVCQDVCPWNRFSKPHSEPLFNPNPELLSFTKKDWEEITEDVFKQVFKKSPVKRTKLSGLQRNIKFLKD

SEQ ID NO: 78605 - protein, 306 aa, Muriicola sp.
  misc_feature (1)..(306): tr|A0A411E707|A0A411E707_9FLAO Epoxyqueuosine reductase OS=Muriicola sp. MMS17-SY002 OX=2507538 GN=queG PE=3 S V=1
MSSQSKNTRLIKEEAKRLGFLSCGISKSEFLEEEAPRLERWLKESMHGEMAYMENHFDKRLDPTKLVEGSKSVISLILNYYPAAVQKEDTLKVSKYAYGKDYHHVIKAKLKDLLNFIEEEIGDVHGRAFVDSAPVLDKAWAARSGLGWIGKHSNLLTQQVGSFYFIAELIVDLELDYDSPVTDHCGSCTACIDACPTEAIIQPYVVDGSKCISYLTIELKNEIPTSFKGLMDDWIFGCDVCQDVCPWNRFSKAHAEPLFNPHPDILEMNRKDWEEITEEVFKKVFRGSAVKRTKFTGLKRNIEFLK

SEQ ID NO: 78606 - protein, 414 aa, Mycoavidus cysteinexigens
  misc_feature (1)..(414): tr|A0A2Z6EY34|A0A2Z6EY34_9BURK Epoxyqueuosine reductase OS=Mycoavidus cysteinexigens OX=1553431 GN=queG PE=3 S V=1
MNANVDNLPDKPKQVTPLGGSQLDAGALAALVPRIRAWAQELGFNALGITDTDLSAAEPGFLAWLAAGFHGEMDYMAKHRAQRLQPAELVAGTVRVISVRMPYLPAQTTLNSEAEQGAAQADWRAIEAARLEDPTQAVISIYARGRDYHKVLRQRLQKLADRIQVEIGPFGYRAFTDSAPVFEVALAQKAHLGWRGKHTLLLHRDEGSLFFLGEIFVDLPLPVDVPQSSAPAPLENSDNPQQTEDGAYCGRCTRCIDVCPTGAIVAPYRLDARRCISYLTIELKGSIPEPLRPLLGNRVYGCDDCQLVCPWNKFARPSSVGDFAVRNKLDQASLIELFAWSESDFETRLAGSAIRRIGYQRWLRNLAVGLGNARRAAWAAGRNLEHRQLTQALHERAQDSSALVREHVQWALCQ

SEQ ID NO: 78607 - protein, 376 aa, Mycobacterium sp.
  misc_feature (1)..(376): tr|A0A554UBD1|A0A554UBD1_9MYCO Epoxyqueuosine reductase OS=Mycobacterium sp. KBS0706 OX=2578109 GN=queG PE=3 S V=1
MSGAADIKDRIRAEAFALGFDSAGFAAATPDPRLRERLELFLGEGQHGDMGWLEANADRRADPQTLWPDALTVLSLGLNYGPAEDPLLLLQQQERGVISVYAQGRDYHDVVKKKLKALGGWIHRTFKTELKVFVDTAPVMEKPLAMRAGIGWQGKHTNLVSRDWGSWLFLGEIYLAIALPPDAPEQDRCGSCHACLDICPTAAFPAPYRLDARRCISYLTIEHKGPIPREMRSLLGNRIYGCDDCLAVCPWNKFAAAGREAALAPRPELNGPALVSLLRFDDAGFRAAFSGSPIKRIGRDRFLRNVLIAIGNSADPALAPAVEPLLDDASPLVRGAAVWALGRLLGPDGLRRLAMARAEDPEAEVRDEWRAGLQAA

SEQ ID NO: 78608 - protein, 341 aa, Mycolicibacterium aichiense
  misc_feature (1)..(341): tr|A0A378RFE2|A0A378RFE2_9MYCO 4Fe-4S ferredoxin OS=Myc olicibacterium aichiense OX=1799 GN=queG PE=4 SV=1
MRPQLSDHPTVQAVRARRRATPAPVIDADWLREICLAAGADDVAFAAVDNPDLESEREHVEAALPGTRSYISLVVRMNRDNVRSVARSVANQEFHRSGEIINEAAHRITRALEDAGHRALNPSATFPMEMDRYPGRIWVVAHKPVAVAAGLGVMGIHRNVIHPKFGNFVLLATILVDAPVSSYGAPLDYSPCLECKLCVAACPVGAIKKDGEFDFLACSVHNYREFMGGFTDWAQTIADSEDAADFRSRVTDSENASMWQSLSFKANYKAAYCLAVCPAGEDVIEPYLDDRKAFMDLVLRPLQEKVETLYVLPNSAAKAHAERRYPHKPVKVVDSGVRGRA

SEQ ID NO: 78609 - protein, 346 aa, Mycolicibacterium chlorophenolicum
  misc_feature (1)..(346): tr|A0A0J6V9K6|A0A0J6V9K6_9MYCO Epoxyqueuosine reductase OS=Mycolicibacterium chlorophenolicum OX=37916 GN=queG PE=4 SV=1
MAQKLPPRLADHPTVRKVQAHPSRPPGVIDAGWLRAICREAGVDDVGFARVADPALASEVEHVQAALPGAVSYLSLVVKMNRDNVRSTARSVANQEFHRSGEIMNEAAHRITRILQDAGYRVVNPSATFPMEMDRYPGRIWVVAHKPVAVAAGMGVMGIHRNVIHPRFGNFILLGTILVAADISTYDAPLDYSPCLECKLCVAACPVGAIKKNGDFDFVACSVHNYREFMGGFTDWVQTVADSEDAEDFRSRVSDSENASMWQSLSFKANYKAAYCLAVCPAGEEVIEPYLDDRKGFMDLVLKPLQDKVETLYVLPGSEAEAHAVKRYPHKPLKRVDSGIRGVRGR

SEQ ID NO: 78610 - protein, 346 aa, Mycolicibacterium chubuense
  misc_feature (1)..(346): tr|A0A0J6VWQ7|A0A0J6VWQ7_MYCCU Epoxyqueuosine reductase OS=Mycolicibacterium chubuense OX=1800 GN=queG PE=4 SV =1
MAQKLPPRLADHPTVRKVQAHPSRPPGVIDADWLRAICREAGVDDVGFARVADPALASEVEHVQAALPGAVSYLSLVVKMNRDNVRSTARSVANQEFHRSGEIMNEAAHRITRILQDAGHRVVNPSATFPMEMDRYPGRIWVVAHKPVAVAAGMGVMGIHRNVIHPRFGNFILLGTILVAADISTYDAPLDYSPCLECKLCVAACPVGAIKKNGDFDFVACSVHNYREFMGGFTDWVQTVADSEDAEDFRSRVSDSENASMWQSLSFKANYKAAYCLAVCPAGEEVIEPYLDDRKGFMDLVLKPLQDKVETLYVLPGSEAEAHAVKRYPHKPVKRVDSGIRGVRGR

SEQ ID NO: 78611 - protein, 344 aa, Mycolicibacterium hassiacum
  misc_feature (1)..(344): tr|A0A3P4A278|A0A3P4A278_MYCHD Epoxyqueuosine reductase OS=Mycolicibacterium hassiacum (strain DSM 44199 / CIP 105218 / JCM 12690 / 3849) OX=1122247 GN=queG PE=4 SV= 1
MAGQISARLADHPTVQAVRNRPRRDPGVIDAAWLRQVCLDAGVDDVGFARADDPELAAEREHADAALPGVRSYISLVVRMNRDNVRSTARSVANQEFHRSGELVNEAAHRITRALQDAGYRAINPSMSFPMEMHRYPGRIWVVAHKPIAVAAGMGVMGIHRNVIHPKFGNFILLGTVLVDGRISEYGAPLDYSPCLECKLCVAACPVGAIGKDGDFDFVACSVHNYREFMGGFTDWAQTIADSADAEDFRNRVSDAENASMWQSLSFKANYKAAYCLAVCPAGEEVIGPYLEDRKAFMDLVLRPLQEKRETLYVLPNSAAKAHAERRYPHKTVKVVDSGIRGLR

SEQ ID NO: 78612 - protein, 345 aa, Mycolicibacterium obuense
  misc_feature (1)..(345): tr|A0A0J6W1T0|A0A0J6W1T0_9MYCO Epoxyqueuosine reductase OS=Mycolicibacterium obuense OX=1807 GN=queG PE=4 SV=1
MVQKLPPRLAAHPTVRAVQERPSQPPGVIDADWLRTVCREAGVDDVGFARVDNPALASEVEHVEAALPGAVSYLSLVVKMNRDNVRSTARSVANQEFHRSGEIMNEAAHRVTRVLQDAGHRVINPSATFPMEMDRYPGRIWVVAHKPVAVAAGMGVMGIHRNVIHPRFGNFILLGTIVVGSEITEYGAPLDYSPCLECKLCVAACPVGAIKKNGEFDFIACSVHNYREFMGGFTDWVQTVADSADGEDFRSRVSDSENASMWQSLSFKANYKAAYCLAVCPAGEEVIEPYLDDRKAFMEVVLKPLQEKQETLYVLPGSAAEEHALKRFPHKPVKHVGSGIRGVRE

SEQ ID NO: 78613 - protein, 345 aa, Mycolicibacterium smegmatis
  misc_feature (1)..(345): tr|A0A0D6IYI3|A0A0D6IYI3_MYCSM 4Fe-4S ferredoxin OS=Myc olicibacterium smegmatis OX=1772 GN=queG PE=4 SV=1
MGDRIPARLAEHPTVRAVRSRGAAGPRVPIDADWLRALCLEAGVDDVGFVSVDDPAVESEREHADAALPGVRSYISLVVRMNRDNVRSTARSVANQEFHRSGEALNEAAHRITRSLEDAGYRAVNPSATFPMEMDRYPGRIWVIAHKPVAVAAGMGVMGIHRNVIHPKYGNFILLGTILVAAPITSYGEPLDYSPCLECKLCVAVCPVGAIGKNGEFDFRACSVHNYREFMGGFTDWVQTVADSADADDFRSRVSDSENASMWQSLSFKPNYKAAYCLAVCPAGEDVIEPYLDDRKAFMDLVLKPLQDKKETLYVLPNSAAKEYAEKRYPHKTVKVVDGGLPRGQ

SEQ ID NO: 78614 - protein, 387 aa, Mycoplana dimorpha
  misc_feature (1)..(387): tr|A0A2T5BEU8|A0A2T5BEU8_MYCDI Epoxyqueuosine reductase OS=Mycoplana dimorpha OX=28320 GN=queG PE=3 SV=1
MPGAAERTDRQTQRREKLKDFLLAEAAEKGFEVCRVTRPDAIPDAPARLKEFIEAGYQGTMEWMAETRERRADPRVLWGEVRSIVLFGLNYGPDEDPRSVLARPDRAAISVYARNRDYHDVVKGRLKEIATRFAARAGEDVKVFVDTAPVMEKPLAMQAGLGWQGKHTNLVSREFGSWLFLGSMFTTADLSLDEPERDHCGSCRACLDSCPTNAFPAPYKIDARRCISYLTIEHKGPIDRELRPLIGNRIYGCDDCLAACPWNKFAATASEMKFHARDDLRAPRIAELLELDDTAFRTLFSGSPVKRIGRDRFVRNVLIAAGNSGDAALIPACERLAEDPSPLVRGMAVWALGQLMERQDFERLAARAAGEADPQVRAEYELAMEDR

SEQ ID NO: 78615 - protein, 306 aa, Myroides indicus
  misc_feature (1)..(306): tr|A0A4R7F624|A0A4R7F624_9FLAO Epoxyqueuosine reductase OS=Myroides indicus OX=1323422 GN=queG PE=3 SV=1
MNKAKYSLMIKKEALRLGFMSCGISKADFLEVEAPRLEKWLNQNMHGQMQYMENHFDKRLDPRLLVEGAKSVVSLTLNYYPQEQQREDTFKISKYAYGEDYHFVIKDKLKDLLAFIQDNIGEVDGRVFVDSAPVLDKAWAAKSGLGWIGKNNNLISRQSGSFFFIAELILDLELDADGITTDHCGTCTKCIDACPTNAIEQPYIVNGSKCISYLTIELKDAIPDEFQGEIDDWMFGCDVCQDVCPWNRFAKPHSEPRFSPKEELINYNKQEWKELTRELFNGIYKKSAVKRTKYEGLMRNIDFLSR

SEQ ID NO: 78616 - protein, 298 aa, Myroides marinus
  misc_feature (1)..(298): tr|A0A1H6TMN8|A0A1H6TMN8_9FLAO Epoxyqueuosine reductase OS=Myroides marinus OX=703342 GN=queG PE=3 SV=1
MIKTEAKRLGFSSCGISKATFLETEAPRLERWLNNQMHGEMSYMENHFDKRLDPRLLVEGAKSVVSLTLNYYPEERQVDDNYKISKYAYGEDYHYVIKDKLKELLAFINDEIGAVDGRVFVDSAPVLDKAWAAKSGLGWVGKNNNLINRKSGSFFFIAELIIDLELEEDGPTTDHCGTCTKCIDACPTGAIESAHIVNGSKCISYLTIELKDDIPEEFSGKLDNWMFGCDVCQDVCPWNRFSSPHKEARFIPNNELIQFSEREWKELTKETFNEIFKKSAIKRTKYEGLLRNMQFLGE

SEQ ID NO: 78617 - protein, 308 aa, Myroides marinus
  misc_feature (1)..(308): tr|A0A163W780|A0A163W780_9FLAO Epoxyqueuosine reductase OS=Myroides marinus OX=703342 GN=queG PE=3 SV=1
MIENKNKYTTMIKTEAKRLGFSSCGISKATFLETEAPRLERWLNNQMHGEMSYMENYFDKRLDPRLLVEGAKSVVSLTLNYYPEERQVDDNYKISKYAYGEDYHYVIKDKLKELLAFINDEIGAVDGRVFVDSAPVLDKAWAAKSGLGWVGKNNNLINRKSGSFFFIAELIIDLELEEDGPTTDHCGTCTKCIEACPTGAIESAHIVNGSKCISYLTIELKDDIPEEFSGKLDNWMFGCDVCQDVCPWNRFSSPHKEARFIPNNELIQFSKREWKELTKETFNEIFKKSAIKRTKYEGLLRNMQFLGE

SEQ ID NO: 78618 - protein, 308 aa, Myroides odoratimimus
  misc_feature (1)..(308): tr|A0A0U2VJN3|A0A0U2VJN3_9FLAO Epoxyqueuosine reductase OS=Myroides odoratimimus OX=76832 GN=queG PE=3 SV=1
MIENKSKYSNIIKAEAKRLGFSSCGISKADFLEVEAPRLEQWLNKQMHGQMSYMENHFDKRLDPRLLVEGAKSVVSLTLNYYPEERQVSDSYKISKYAYGEDYHHVIKDKLKELLHFIESEIGAVDGRVFVDSAPVLDKAWAAKAGLGWVGKNNNLINRKSGSFFFIAELIIDLELEEDGPTTDHCGTCTKCIDACPTEAIESPHIVNGSKCISYLTIELKDDIPTDFSGKLDDWMFGCDVCQDVCPWNRFASPHKEQRFIPNNALIEYSKHEWKELTKETFNEIFKKSAIKRTKYEGLLRNMQFLGE

SEQ ID NO: 78619 - protein, 308 aa, Myroides odoratimimus
  misc_feature (1)..(308): tr|H1H3E7|H1H3E7_9FLAO Epoxyqueuosine reductase OS=Myro ides odoratimimus CIP 101113 OX=883154 GN=queG PE=3 SV= 1
MIENKSKYSNIIKAEAKRLGFSSCGISKADFLEVEAPRLEQWLNKQMHGQMSYMENHFDKRLDPRLLVEGAKSVVSLTLNYYPEERQISDSYKISKYAYGDDYHHVIKDKLKELLYFIESEIGAVDGRVFVDSAPVLDKAWAAKAGLGWVGKNNNLINRKSGSFFFIAELIIDLELEEDGPTTDHCGTCTKCIDACPTEAIESPYIVNGSKCISYLTIELKDDIPSEFSGKLDNWMFGCDVCQDVCPWNRFASPHKEQRFIPNNALIEYSKHEWKELTKETFNEIFKKSAIKRTKYEGLLRNMQFLGE

SEQ ID NO: 78620 - protein, 307 aa, Myroides odoratus
  misc_feature (1)..(307): tr|A0A378RUF8|A0A378RUF8_MYROD Epoxyqueuosine reductase OS=Myroides odoratus OX=256 GN=queG PE=3 SV=1
MDKKSHYAALIKAEAKRLGFLSCGISEAGFLEEEAPRLEKWLNANMHGSMQYMENHFDKRLNPTLLVEGAKSVVSLLFNYYPEQEQTDGAYKISKYAYGEDYHYVVKDKLKELLHFIHDNIGAVDGRAFVDSAPILDKAWAAKSGLGWVGKNSNLISKQVGSFFFIAELIIDLELESDGATTDHCGKCTRCIDACPTGAIESAYIVNGSKCISYFTIELKDDIPAELAGQFDNWMYGCDVCQDVCPWNRFAKPHNEPRFTPNEALMNYSNKEWEELTNEVFNDIFRKSAVKRTKYTGLVRNIKFLKE

SEQ ID NO: 78621 - protein, 307 aa, Myroides odoratus; identical to SEQ ID NO: 78620
  misc_feature (1)..(307): tr|H1Z5V4|H1Z5V4_MYROD Epoxyqueuosine reductase OS=Myro ides odoratus DSM 2801 OX=929704 GN=queG PE=3 SV=1

SEQ ID NO: 78622 - protein, 308 aa, Myroides phaeus
  misc_feature (1)..(308): tr|A0A1G8BZK0|A0A1G8BZK0_9FLAO Epoxyqueuosine reductase OS=Myroides phaeus OX=702745 GN=queG PE=3 SV=1
MIENKSKHAALIKAEALRLGFMSCGISKADFLEVEAPRLERWLNKQMHGQMSYMENHFDKRLDPRLLVEGAKSVVSLTLNYYPEETQIEDSYKISKYAYGEDYHYVIKDKLKELLYFIQSEIGDVDGRVFVDSAPVLDKAWAAKSGLGWVGKNNNLINRKNGSFFFIAELIIDLDLETDGPTTDHCGTCTKCIDACPTGAIESPYIVNGSKCISYLTIELRDDIPTEFANKLDDWMFGCDVCQDICPWNRFAKPHNEPRFIPNNELMRLEKREWRELTKETFSEIFKKSAIKRTKYDGLLRNMKFLAD

SEQ ID NO: 78623 - protein, 308 aa, Myroides profundi
  misc_feature (1)..(308): tr|A0A0B5RTX0|A0A0B5RTX0_9FLAO Epoxyqueuosine reductase OS=Myroides profundi OX=480520 GN=queG PE=3 SV=1
MIENKSKYSNMIKAEAKRLGFSSCGISKADFLEVEAPRLEQWLNKQMHGQMSYMENHFDKRLDPRLLVEGAKSVVSLTLNYYPEERQVSDSYKISKYAYGEDYHHVIKDKLKELLYFIESEIGAVDGRVFVDSAPVLDKAWAAKAGLGWVGKNNNLINRKSGSFFFIAELIIDLELEEDGPTTDHCGTCTKCIDACPTEAIESAHIVNGSKCISYLTIELKDDIPTEFSGKLDNWMFGCDVCQDVCPWNRFASPHKEQRFIPNNALIEYSKHEWKELTKETFNEIFKKSAIKRTKYEGLLRNMQFLGE

SEQ ID NO: 78624 - protein, 339 aa, Myxococcaceae bacterium
  misc_feature (1)..(339): tr|A0A4Q5ZJU7|A0A4Q5ZJU7_9DELT tRNA epoxyqueuosine(34) reductase QueG OS=Myxococcaceae bacterium OX=2484252 GN =queG PE=4 SV=1
MTPLPTARLRDLAQQVGFDLIGFARAEPIPPSSLLSWLEAGYDADMDWMGSRAEERLDVSVLLPGAKTVLSFANNYYRDDEPSRGSPIARYARGRDYHSTLRDRMKAFRKTINEWYPGLGTYGGVDSGPMMEKVWAARGGLGYVGKNGCLITESHGSWVLLATLILDAEVDEYPPGPVADRCGSCRRCLMACPTGALVGHRQVDARACLSYQSIENRDRDVPEAFRFKFDNLIFGCDICQQVCPLNRKPVHAEDARFTPRAVASLGTAELAALTPEQYKELIPGTALARARYDGLRRNAVYALGVARQGHVRPLLEKLSDDSSELVRSAAKWALLQLES

SEQ ID NO: 78625 - protein, 282 aa, Myxococcaceae bacterium
  misc_feature (1)..(282): tr|A0A3N5H5F3|A0A3N5H5F3_9DELT tRNA epoxyqueuosine(34) reductase QueG (Fragment) OS=Myxococcaceae bacterium OX =2484252 GN=queG PE=4 SV=1
MRALAHEAGFDLCGFARPEPIPPAVLLDWLAAGMGADMDWLAERAMDRLEPRRLLPDARTVVALGCNYWTEAEGAEASPIARYARGRDYHATMRDRLRAFRRLLRAEWPELRTYGSVDHGPFMEKVWAARAGLGVIARNGCLVTPRFGSWVVLAVLLVELEVDAYADGPGADRCGSCRLCVDACPTGALDGAGRVDSRACLSYQTIENEGPVPAEHREAMAPHVFGCDVCQDVCPLNAAPLPAVGSRFLPRPVAGVDARGLAAMTPERYAELVPGTALARAG

SEQ ID NO: 78626 - protein, 368 aa, Myxococcales bacterium
  misc_feature (1)..(368): tr|A0A2E8RY16|A0A2E8RY16_9DELT tRNA epoxyqueuosine(34) reductase QueG OS=Myxococcales bacterium OX=2026763 GN= queG PE=4 SV=1
MINGARVALLDTENLRGQAAISLSVDGDPLQPGHATNPARDAARVRTLALQQGYSLAGVGPIGPHPEHVHLQEFLDRGYAGTMDYLRKTATKRMDPSEVSPWARSALVVGLIYETPFPHTDALIDPESDQAYPDADERLWISRYGWGRDYHRVLTRMNRRLVRQLKEAFGPEHDFRQWVDTGPLMEKVLATHAGLGWMAKNTLVVNPMVGSWFFLGVILTSLDLQPTGAVPDHCGSCTACLDVCPTDAFVEPYVLDATRCISYRTIETRENELPVDQSSGLAPHLFGCDLCQDVCPFNRKSPMTTLNDFHPRNLGEAPRRADVDAFLKRPEQARERLIGTPLKRTGPEGLQRTVRWLDEVQSKDGDLE

SEQ ID NO: 78627 - protein, 352 aa, Myxococcales bacterium
  misc_feature (1)..(352): tr|A0A0S8F0B4|A0A0S8F0B4_9DELT Uncharacterized protein OS=Myxococcales bacterium SG8_38_1 OX=1703408 GN=AMJ63_ 07010 PE=4 SV=1
MKPERTLNERVRAAAEEAGFSSVGFAEAQRLEEEAAHLDAWLAAGRQGQMSWMEETAEVRKDPRDPRMLDAAKSVIVMAAPYRHAQGYQGPPPARIAKYALGRDYHNVLTKKARRVAKSLRDAGHLARVAVDSKPVFERAWAERAGVGFVGKNCCLIVPGIGSHVFLACIVTTAPLEPSAPIPRRCGSCTACLDACPTKAFVETRTLDARRCISYLTIEQRGPIPESLRPEVGPWLFGCDVCQDVCPYNQAAGATPQSMSAFEPDDRWAQTEVAEFLGMSEDAFRARFEGSPVKRASPEGLARNAAIVLGNRGEARHLPVLDEAGRHHPSEVVRDAAEWAGRELKRRLADGE

SEQ ID NO: 78628 - protein, 337 aa, Myxococcus fulvus
  misc_feature (1)..(337): tr|A0A511SYJ3|A0A511SYJ3_MYXFU Epoxyqueuosine reductase OS=Myxococcus fulvus OX=33 GN=queG PE=4 SV=1
MLPTAPLRDLARSVGFDLVGFARAEPIEPRFLLSWLEAGYAADMDWMGERAEERLDVGRLLPGAKTVISFVNNYYRDEEPSKGSPIARYARGRDYHSTLRDRMKAFRKAIIQMAPGLGTYGSVDSGPLMEKVWAARAGLGYVGKNGCFITEPFGSWVLLATLVIDVEVDEYADGPTADRCGACRRCLVSCPTGALVGNSQVNAGACLSYQTIENREREVPEPFRFKFNNLIFGCDICQQVCPLNRKPVFAEHPRFAPRAVAELGTLELAGLTTEQYEQLIPGTALARARYDVLRRNAVYALGVARQADARHLLEKLSDDSSELVRSAAQWALRQLVP

SEQ ID NO: 78629 - protein, 339 aa, Myxococcus fulvus
  misc_feature (1)..(339): tr|F8CL91|F8CL91_MYXFH Putative iron-sulfur cluster bin ding protein OS=Myxococcus fulvus (strain ATCC BAA-855 / HW-1) OX=483219 GN=LILAB_16565 PE=4 SV=1
MTVLPTAHLRDLASSVGFDLVGFARAEPIPPDFLLSWVAAGYAADMDWMGERAAERLDVSVLLPGARTVISFANNYWRDDAETVDSPIARYARGRDYHSTLRDRMKAFRKALTVMYPGLGTYGGVDSGPLMEKVWAARAGLGYVGKNGCFITEPYGSWVLLATLVLDVEVDDYGTGPAADRCGACRRCLVSCPTGALVGNGRVDARACLSYQTIENREQQVPEAFRLKFDNLIFGCDICQQVCPLNRRPVFAEHPRFAPRAVAELGVRELAGLTVEQYEHLIPGTALARARYDGLRRNAVYALGVAKQADAKPLLEKLCGDSSELVRTAAQWALLQLDP

SEQ ID NO: 78630 - protein, 339 aa, Myxococcus hansupus
  misc_feature (1)..(339): tr|A0A0H4WR59|A0A0H4WR59_9DELT Epoxyqueuosine (OQ) redu ctase QueG OS=Myxococcus hansupus OX=1297742 GN=A176_00 0955 PE=4 SV=1
MNVLPTAHLRDLARSVGFDLVGFARAEPIPPDFLMSWVAAGYAADMDWMGERAAERLDVSLLLPGAKTVISFVNNYWRDDAESVDSPIARYARGRDYHSTLRDRMKAFRKALNVMFPGLGTYGSVDSGPLMEKVWAARAGLGYVGKNGCFITEPYGSWVLLATLIVDAEVDDYGNGPAADRCGACRRCLMSCPTGALVGNGRVDARACLSYQTIENREQQVPEAFRLKFDNLIFGCDICQQVCPLNRRPVFAENPRFAPRAVAALGVRELAGLTLEQYEHLIPGTALARARYDGLRRNAVYALGVAKQADAKVLLEKLSGDSSELVRTAAQWALLQLDP

SEQ ID NO: 78631 - protein, 339 aa, Myxococcus macrosporus
  misc_feature (1)..(339): tr|A0A250K236|A0A250K236_9DELT Epoxyqueuosine reductase OS=Myxococcus macrosporus DSM 14697 OX=1189310 GN=MYMA C_005728 PE=4 SV=1
MTVLPTAHLRDLASSVGFDLVGFARAEPIPPDFLLSWVAAGYAADMDWMGERAAERLDVSVLLPGARTVISFANNYWRDDAETVGSPIARYARGRDYHSTLRDRMKAFRKALTVMYPGLGTYGGVDSGPLMEKVWAARAGLGYVGKNGCFITEPYGSWVLLATLVLDVEVDDYGTGPAADRCGACRRCLVSCPTGALVGNGRVDARACLSYQTIENREQQVPEAFRLKFDNLIFGCDICQQVCPLNRRPVFAEHPRFAPRAVAELGVRELAGLTVEQYEHLIPGTALARARYDGLRRNAVYALGVAKQADAKPLLEKLCGDSSELVRTAAQWALLQLDP

SEQ ID NO: 78632 - protein, 337 aa, Myxococcus sp.
  misc_feature (1)..(337): tr|A0A540WRD8|A0A540WRD8_9DELT tRNA epoxyqueuosine(34) reductase QueG OS=Myxococcus sp. AM401 OX=2590453 GN=qu eG PE=4 SV=1
MLPTAHLRDLARSVGFDLVGFARAEPIPPTFLMEWLEAGFAADMDWMGERAAERLDVDRLLPGARTVISFINNYWRDDEESVGSPIARYARGRDYHSTLRDRMKSFRKAVTVMFPGLGTYGSVDSGPLMEKVWAARAGLGYVGKNGCFITEPYGSWVLLATLILDAEVDDYGTGPAADRCGACRRCLMSCPTGALVGNGRVDARACLSYQTIENREQQVPEAFRLKFDNLIFGCDICQQVCPLNRRPVFAEHPRFAPRAVAELGTLELAGLTPTQYEQLIPGTALARARYDVLRRNAVYALGVARQADSRYLLEKLCGDSSELVRTAAQWALCKLDP

SEQ ID NO: 78633 - protein, 337 aa, Myxococcus stipitatus
  misc_feature (1)..(337): tr|L7UMY9|L7UMY9_MYXSD Uncharacterized protein OS=Myxoc occus stipitatus (strain DSM 14675 / JCM 12634 / Mx s8) OX=1278073 GN=MYSTI_06561 PE=4 SV=1
MLLTAHLRDLARSVGFDLVGFARAEPIPPKFLMEWLEAGFAADMDWMRERADERLDVANLLPGAKTVISFVNNYWRDDEQSVDSPIARYARGRDYHSTLRDRMKAFRKALTGRFPGLGSYGSVDSGPLMEKVWAARAGLGYVGKNGCFITEPFGSWVLLATLVIDAEVDEYASGPAADRCGACRRCLMSCPTGALVGNGQVNAGACLSYQTIENREQQVPEAFRLKFDNLIFGCDICQQVCPLNRRPVFAEHPRFAPRAVAELGTLELAGLTEAQYEQLIPGTALARARYDGLRRNAVYALGVARQADSRHLLEKLSGDSSELVRTAAQWALRQLDP

SEQ ID NO: 78634 - protein, 339 aa, Myxococcus virescens
  misc_feature (1)..(339): tr|A0A511HJF7|A0A511HJF7_9DELT Epoxyqueuosine reductase OS=Myxococcus virescens OX=83456 GN=queG PE=4 SV=1
MNVLPTTHLRDLASSVGFDLVGFARAEPIPPDFLLEWVAAGYAADMDWMGERAAERLDVSLLLPGAKTVISFANNYWRDDAETVDSPIARYARGRDYHSTLRDRMKAFRKALNVMYPGLGSYGGVDSGPLMEKVWAARAGLGYVGKNGCFITEPYGSWVLLATLVVDAGVDDYGNGPAADRCGACRRCLMSCPTGALVGNGRVDARACLSYQTIENREQQVPEAFRFKFDNLIFGCDICQQVCPLNRRPVFAEHPRFAPRAVAELGVRELAGLTVEQYEHLIPGTALARARYDGLRRNAVYALGVAKQADAKPLLEKLCGDSSELVRTAAQWALLQLDP

SEQ ID NO: 78635 - protein, 339 aa, Myxococcus xanthus
  misc_feature (1)..(339): tr|A0A4Y6CMC4|A0A4Y6CMC4_MYXXA tRNA epoxyqueuosine(34) reductase QueG OS=Myxococcus xanthus OX=34 GN=BHS06_279 75 PE=4 SV=1
MNVLPTAHLRDLASSVGFDLVGFSRAEPIPPDFLLEWVAAGYAADMDWMGERAAERLDVSLLLPGAKTVISFANNYWRDDAETVDSPIARYARGRDYHSTLRDRMKAFRKALNVMYPGLGSYGGVDSGPLMEKVWAARAGLGYVGKNGCFITEPYGSWVLLATLVVDAEVDDYGHGPAADRCGACRRCLMSCPTGALVGNGRVDARACLSYQTIENREQQVPEAFRFKFDNLIFGCDICQQVCPLNRRPVFAEHPRFAPRAVAELGVRELAGLTPEQYEHLIPGTALARARYDGLRRNAVYALGVAKQADAKSLLEKLSGDSSELVRTAAQWALLQLDP

SEQ ID NO: 78636 - protein, 339 aa, Myxococcus xanthus
  misc_feature (1)..(339): tr|Q1CZU6|Q1CZU6_MYXXD Putative iron-sulfur cluster bin ding protein OS=Myxococcus xanthus (strain DK 1622) OX= 246197 GN=MXAN_5940 PE=4 SV=1
MNVLPTAHLRDLASSVGFDLVGFARAEPIPPDFLMEWVAAGYAADMDWMGERAAERLDVSLLLPGAKTVISFANNYWRDDAETVDSPIARYARGRDYHSTLRDRMKAFRKALNVMYPGLGSYGGVDSGPLMEKVWAARAGLGYVGKNGCFITEPYGSWVLLATLVVDAEVDDYGNGPAADRCGACRRCLMSCPTGALVGNGRVDARACLSYQTIENREQQVPEAFRFKFDNLIFGCDICQQVCPLNRRPVFAEHPRFAPRAVAELGVRELAGLTVEQYEHLIPGTALARARYDGLRRNAVYALGVAKQADAKSLLEKLCGDSSELVRTAAQWALLQLDP

SEQ ID NO: 78637 - protein, 426 aa, Nannocystis exedens
  misc_feature (1)..(426): tr|A0A1I1UDJ3|A0A1I1UDJ3_9DELT Epoxyqueuosine reductase OS=Nannocystis exedens OX=54 GN=SAMN02745121_00990 PE= 4 SV=1
MNQPVPKDSPPGPDVTPAGEATPRGSPVPEDSAASTPALADEAPVLTPAILARLAAVAEGNGLLKLGVVRLDHPGFAPARAALDAYVAAGKAGDMDFIPRTVDLRKHPEGMLPGARSLLVAAVPYGGEPGPIARYARSRDYHTVVHQRLIALEAALHAELPGVRSLICVDTKPVLERSAAALAGLGFLGKHGCLIVPGLGSYVLLGELLCTATWPEGHPTAAPTSPPWDACGACTRCLDACPTAAFDAPGQLDPRRCLSYLTIEHRGHVPEDMSEKFGERLAGCDVCQEVCPYNAGLGRNARIPAVAWLPPAPRPAPTVTAMAALGGAQYRGFVRHTALRRIPHRLMRRNALLALGNRTGAPDPGERHAFAAGLLEPDPRVHDAARWAAARRGLDEQALAPELEELRRLREAAAAAAEAREREDDD

SEQ ID NO: 78638 - protein, 404 aa, Natranaerobius thermophilus
  misc_feature (1)..(404): tr|B2A678|B2A678_NATTJ Uncharacterized protein OS=Natra naerobius thermophilus (strain ATCC BAA-1301 / DSM 1805 9 / JW/NM-WN-LF) OX=457570 GN=Nther_0493 PE=4 SV=1
MNSLSKLRQMALNNGFVSTGVISPDEYKEGKSRQEQAQARGHLMPFINKSQNLATRVNPSKYANWVKTVILVLYPYGGSNGNHPPKPDDGVLRGRFSKISWGRDYHLVVKKALQDLASDLVNEDIISETYETFIDTSPFAERELAFRAGLGYPGRHGCLINPTYGSFVVIGGILTDTMLPTNEQPVDEIFSTCKSCDECITVCPGKALEDSNHESKIQLENCAAYLTVVKGIIPRKKRPIIKDYLYGCDECQNVCPENSSNNFGSTNNDCVKTFSLPKWDEQHLTIEDLYPQITKILNLSNQTFRKKYKDNAVFWRGKQVLKRNAVIALGNLKDPKGLPLILETLANPSPIIRAHVPWSLEQISTQLPIHKKSWIYHKLEQQYLKESDPLVIDELKSSLLNLSK

SEQ ID NO: 78639 - protein, 390 aa, Natranaerobius trueperi
  misc_feature (1)..(390): tr|A0A226C0E6|A0A226C0E6_9FIRM tRNA epoxyqueuosine(34) reductase QueG OS=Natranaerobius trueperi OX=759412 GN= queG PE=4 SV=1
MNLHQKITQLAKKTGFPLVSVIPTDRYECGYNRLATIQKNLGEYPFVKNDPDYRTTPNKYTTWAKSLIIGLYPYGCAPEKTSPKPNDQFIRGRFARVAWGRDYHLVVKEALVDLAQKLKKHSIISSNFLPIVDTSPLAERELAFRGELGIKGNHNCLMVPGLGSFFFIGGLLIDTELPQMNNLNLTTSKCLNCERCINSCPGSALDSKSYLDLNNCAAYLTVKKGFLTRKQRNIIGDYLYGCDKCQVVCPENRNNDDYSPDCMPEWGEEVLNIDDIYPKISDILKLSNKQFKNRFKDNAIFWRGKKVLQRNALIVLGNLKDPRSTQLVLDSFHDQREIIRTMSVWASEKIYENLNNKEREQVLKELNVLYNNEKSEMVLNELKQTLNNIS

SEQ ID NO: 78640 - protein, 368 aa, Natranaerovirga hydrolytica
  misc_feature (1)..(368): tr|A0A4R1N061|A0A4R1N061_9FIRM Epoxyqueuosine reductase OS=Natranaerovirga hydrolytica OX=680378 GN=EDC19_0690 PE=4 SV=1
MAIKDEIIQYSQGIHIDTIGFCDAKPFLEYKKILEERRKRGYYIPFEEQDIQKRIDPSQSLPNAKTFIVIGESYQYNAKKHKTEILKGHIAISAIGKDYHKVVMEKLDLLEKYILSLTQCQIKKFVDISPLPDRQIAKRAGLGFVGKNNMLIHPDFGSRFNIGYLLTDLEIQPDVTNDFMGCGGCNRCEIACPTKAIIGDYSMNPNRCIAYLTQHKGDIEDELKEKMGKQIYGCDICQQVCPYNQSLPNNKTIEPLLDHEMSIEKLLNLSNKAFKDLFGPTSAAWRGKKTIQRNAVIALGNMKEDRSIELLEMMSKDLRKEIKQEVIWALGKKKNEKARCILKEMLDVEQDEALTEAIKTILNESLMK

SEQ ID NO: 78641 - protein, 363 aa, Natranaerovirga pectinivora
  misc_feature (1)..(363): tr|A0A4R3MP06|A0A4R3MP06_9FIRM Epoxyqueuosine reductase OS=Natranaerovirga pectinivora OX=682400 GN=EDC18_1013 11 PE=4 SV=1
MSTIKDKIIEYSKKVNIDMIGFCSAKPFYEYKSILEERKEKKYHVPFEEQDIDKRIYPELTLPGAKAFIVIGESYNVIPKAYNNQLTGKISISAIGKDYHQVVMEKLDLLERYIFSLQQCQIKKFVDISPLPDRQIAKRAGLGFFGKNSMLINSQYGSHFNIGYILTDLEIEPDTVEEYKGCSKCNRCFEVCPTNAIIGDGSLNCSICVAYLTQHKGDIPNELKEKMGTQLYGCDRCQKVCPYNQKIKNKLIEPILDEAMDLKRILSLSNKEFKELFGPTSAGWRGKKTIQRNAIICLGNTEDENAIDLLEAISNDDRKDIRKEVIWALSKKKNDKAIEVLNKMLLKENDLVLKGIIMSSLGG

SEQ ID NO: 78642 - protein, 375 aa, Natribacillus halophilus
  misc_feature (1)..(375): tr|A0A1G8NT10|A0A1G8NT10_9BACI Epoxyqueuosine reductase OS=Natribacillus halophilus OX=549003 GN=queG PE=3 SV= 1
MTNAQLKEELIAYSKTIGIDKIGFASADPFLTLKERLRTQQQLGYQSGFEEEDIDLRTEPERLLPYAKTIISIALAYPAKLENPPKGVKGKRRGIFCRASWGEDYHRVLNDRLQKLETFIQKRVPNAKMASMVDTGALSDRAVAERAGIGWSGKNCAIITPEFGSYVYLGEMITTIALEPDIPIDDQCGSCNKCVDACPTDALIQGGQLDANKCIAFLTQTKEMIPERYRKKIGNRLYGCDTCQVVCPENKGKGEEYQPEFTPEPEKVKPELLPLLSISNREFKETYGNMAGSWRGKKPIQRNAIMALGHFREEGAVPQLQTMLMNDSRPVIRGTAAWSLGKIGTDDARETLQEVNESEEDPTVREEIQHALTMG

SEQ ID NO: 78643 - protein, 360 aa, Natronincola ferrireducens
  misc_feature (1)..(360): tr|A0A1G9DZ45|A0A1G9DZ45_9CLOT Epoxyqueuosine reductase OS=Natronincola ferrireducens OX=393762 GN=SAMN0566047 2_01782 PE=4 SV=1
MGLKDRIIQYAKLIDVDLIGFTNAEAFEDIRDILEKRKQAGHLSGFEEEDIELRINPKKTMENAKSIIVIGVSYYLDDEKLQGKKIPKFYGELARTAWGRDYHYVLKEKLERIGDFIKEEREDFQYKSFVDTGPLVDRHVAYRAGLGWYGYNSLLINETYGSWFFIGYMINNLAFQEDKPLENKSCLRCNLCIKHCPKGAIEKPYGFNAQHCISNLLQQKENIDEKDRKLLGKNLYGCDICQGVCPHNRKVKQGSQNHFVPKDLFVKPDLVELLNMSNKRFRETYGETSAGWRGKKILQRNAIVAIVNHGDKEGIAYLLPLLKDPRPEIRKYALWGIYKLDPEGAYEILKQAKEYEKDGF

SEQ ID NO: 78644 - protein, 194 aa, Natronincola peptidivorans
  misc_feature (1)..(194): tr|A0A1I0FSU2|A0A1I0FSU2_9CLOT Epoxyqueuosine reductase OS=Natronincola peptidivorans OX=426128 GN=SAMN0566029 7_02925 PE=4 SV=1
MKIHDDLTYYIKKQALDAGALLAGFTKIRRVEPVIILGFSFTDTWFFKHPLSISKLLGKTSATSIHVQDVIAKTLKSQGYKAEYKTIWSLYGDFRPLAVSAGLGDWGRNGIIVNKEHGAGLLFAAIFTDAPLEITSPKARPTQDHQQHCIDCQQCISSCPAKAFENNKFHTFRCLPYAIKGCSECLKICKGRLS

SEQ ID NO: 78645 - protein, 378 aa, Natronincola peptidivorans
  misc_feature (1)..(378): tr|A0A1I0DKX1|A0A1I0DKX1_9CLOT Epoxyqueuosine reductase OS=Natronincola peptidivorans OX=426128 GN=SAMN0566029 7_02039 PE=4 SV=1
MMMLKNKVIDYGRSIGIDMMGFTSAEAFEDLRDIINMRKKAGYLSGFAENDIELRVNPKKTMSEAKSILVIGVPYYVKDEMQHQEKLPEFYGELARTAWGKDYHQVLKEKMENIASFIKKEEKDFQYKIFVDTGPLVDRHVAYRAGLGWYGYNSLLMNKKYGSWFFIGYMLNNIAFEADKESICTTCYQCNLCIKHCPKGAIEAPYKFNAQKCLSNILQQKGDIGEEDRSILGQRLYGCDICQSVCPHNKEIEGISENYFYPKDVSCKPDLIELLNISNKEFKETYGKTSAGWRGKTVLQRNAIIAIVNQQKSTALPHLLPLLQDIRPEIRKYAVWAISVLAPQEACKILMKTKAKEKNQEVLKIIEYYLDKLTDEEQ

SEQ ID NO: 78646 - protein, 319 aa, Natronoflexus pectinivorans
  misc_feature (1)..(319): tr|A0A4R2GID8|A0A4R2GID8_9BACT Epoxyqueuosine reductase OS=Natronoflexus pectinivorans OX=682526 GN=queG PE=3 SV=1
MNLTQQHIANTIRDKALELGFDDVGFSPATELTEDKERLRKWLNNGYNAGMKYMNNHFEKRVNPALLVEGSLSVITVLKNYNQQNNQLSAGFPKISRYAYGKDYHDTIRQKLSHLFNFIREHINPELQGRYFVDSAPLLERAIATRAGLGWIGKNSMLINRKLGSWVFIAELVVNIKLPYNHTTVNDGCGGCTRCIEACPTQAILPHRQIDSNRCISYLTIENRNDIPENFKGKLDGWVFGCDICQEVCPWNRKAVETDEPDFKPSEQLLNMIAVEWENLTPEKFSKLFRGSAVKRTKHKGFMRNYYFSLKPQMSHNKT

SEQ ID NO: 78647 - protein, 361 aa, Natronospirillum operossus
  misc_feature (1)..(361): tr|A0A4Z0W7L7|A0A4Z0W7L7_9BACT Epoxyqueuosine reductase OS=Natronospirillum operossus OX=2562806 GN=queG PE=3 SV=1
MRLQALDLTDIKARLHDKALSLGFADMGVTGTDVSAEKPRFDAWLARGYHGSMGFLAAHGDKRFHADKLVPDTRSVISVRLDYLPDTRTHELLDHPEQAYIARYALGRDYHKLMRKRLVQLARWLEEVVGPFGYRAFADSAPVLERAVARNAGLGWVGKHTLVLNRHAGSWFFLGELYTDLELPPDPPQATQHCGSCTRCLDVCPTNAFTGPWELDARKCISYLTIEHDGPIPEPLRAPMGNRIFGCDDCQIYCPWTKFTPHTREADFTPRHQLDEADMVALFLWDEATFLQRTEGMAIRRTGYENWLRNLAVALGNGSPRPEALQALRRRRPECSELVQEHIDWALQRLRAKTLGTPARQ

SEQ ID NO: 78648 - protein, 384 aa, Negativibacillus sp.; identical to SEQ ID NO: 74899
  misc_feature (1)..(384): tr|A0A3A8XMM4|A0A3A8XMM4_9FIRM Epoxyqueuosine reductase OS=Negativibacillus sp. 1xD8-3 OX=2320085 GN=queG PE=3 SV=1

SEQ ID NO: 78649 - protein, 311 aa, Negativicoccus succinicivorans
  misc_feature (1)..(311): tr|W1U7Y6|W1U7Y6_9FIRM Uncharacterized protein OS=Negat ivicoccus succinicivorans DORA_17_25 OX=1403945 GN=Q612 _NSC00213G0006 PE=4 SV=1
MDKNKIITTQANRLGLTEVGFVRLPLPETLAATLHAAGEPSPFTPPDVTTRLDPAALLPGAQSVIVCLFPYRPDSAAAENAAEPPANLPEYARARDYHIIVQHYLTRLQARLRTHFPDAAFSPFVDTSPLPDRALAYLAGLGFFGWNKALINDRYGTHTVIGGLVTTLALTPSEPLRKTCLQCGRCRRFCPGQALTPERFIWPRCKSYITQKKGDLTAAEAAIIAKNHYIFGCDVCQEVCPHNTAAEPTPLPEFQNDRIARITAAEISRYSNRTFQAAYGDRAWAWRGKKILLRNAALLAESSAHRNNDKH

SEQ ID NO: 78650 - protein, 136 aa, Neisseria gonorrhoeae
  misc_feature (1)..(136): tr|A0A4T9VI20|A0A4T9VI20_NEIGO DUF1730 domain-containin g protein (Fragment) OS=Neisseria gonorrhoeae OX=485 GN =E8M63_14190 PE=4 SV=1
AGKYFLEFLGSDGHGDMDWLAANPERRTDPRALWAGVRSIIMLGVNYGPDDDPLKLIARRSQGAISVYAQGDDYHDVIKKRLKVLARWLAATTGDEVKVFVDTAAVMEKPLAQAAGIGWQGKHTNLVSRAFGSWLF

SEQ ID NO: 78651 - protein, 304 aa, Neisseriaceae bacterium
  misc_feature (1)..(304): tr|A0A431I3Y4|A0A431I3Y4_9NEIS tRNA epoxyqueuosine(34) reductase QueG (Fragment) OS=Neisseriaceae bacterium OX =2014784 GN=queG PE=3 SV=1
MHGETPERDSINWDQLKANINLWATELGFSGAGVAGIDLSSAEQGLRDWLAAGFHGAMDYMAKHGLKRARPAELLPGTVSVISLRMNYLAVGPASAIDMLGQPQQAYISRYALGRDYHKVLRNRLQALAERISAAVGPYGYRVFTDSAPVLEVEIASRTLQGWRGKHTLLLNRDEGSFFFLGDILTDLPLPPDVPQSGHCGNCSRCIEVCPTQAIVAPYRLDARRCISYLTIELHGAIPLEFRPLIGNRVYGCDDCQLFCPWNRFARPSSEADFDVRNGLDQATLVALFAWTEAEFQQRLAGTA

SEQ ID NO: 78652 - protein, 362 aa, Neisseriaceae bacterium
  misc_feature (1)..(362): tr|A0A2I7N6A1|A0A2I7N6A1_9NEIS Epoxyqueuosine reductase OS=Neisseriaceae bacterium DSM 100970 OX=2052837 GN=qu eG PE=3 SV=1
MVDSVSLQNLKEEIRKKAKRLGCLDITIAATIISNEAKEKYQQWLNEKLHGSMDYLARNTELRFNPTLIHENTVTIICVKIPYLINPINLHKERLNSEEMAYVSSYALGRDYHKVVKQILNNLATFINEQLESSDIEHNYRAFTDSAPVMEVQLSSQSGLGWRGKNTLLITKNQGSMFFLGELFTNLPLPEDKEINNHCGSCNKCIDICPTKAFIAPYKLDARRCISYLTIENKGAIPPELRKLIGNRIYGCDDCQLFCPWNKFSQQSPIKDFNTRNHLDSSSLLELFNWDEEEFFKKTEGSAIRRIGYNSWIRNLAVAIGNSEPSLEKIKVLQSKLPYPDEMVTEHITWAINELTNRLTTD

SEQ ID NO: 78653 - protein, 362 aa, Neisseriales bacterium
  misc_feature (1)..(362): tr|A0A5C8BH15|A0A5C8BH15_9NEIS Epoxyqueuosine reductase OS=Neisseriales bacterium OX=2053582 GN=queG PE=3 SV=1
MVDYNILKALIKDKAQELGFLELTVSSCTIDSAAQQKFQDWLAQGYAGDMQYLENNQNLRFNPQELHPTSVRIISVKTPYLTQNITELKNRLRNKPEHAYISSYALGRDYHKVVKQQLNKLATWINQYLSEMGFEHHYRAFSDSAPIMEVQIAAQSGSGWRGKNTLLLNKNHGSMFFLGELFTNLPLEVDKPISSHCGSCNKCIEVCPTQAFISPYVLNAKKCISYLTIENKGSIPLELRSLMGNRIYGCDDCQLFCPWNKFSTLTTYTDFTPRHKLDSSSLLELFKWNIAEFTQKMQGSAILRIGYDSWQRNLAVALGNAPYQAEIITELEFKSRTSSTMVKEHITWAIAQQQNKRSTSNS

SEQ ID NO: 78654 - protein, 332 aa, Neisseriales bacterium
  misc_feature (1)..(332): tr|A0A3D5YTA2|A0A3D5YTA2_9NEIS tRNA epoxyqueuosine(34) reductase QueG OS=Neisseriales bacterium OX=2053582 GN= queG PE=4 SV=1
MEAKISSIIIDQQAQSKFAEFLNNGYAGEMTYLKNNQNLRYHPAELHPTTLAIISVKMPYLSENINCHQQRLKDSNHAYVSSYALGRDYHKVVKQQLQKYAQWINQLLATHQLEQNYRVFTDSAPIMEVQLATQAGNGWRGKNTLLINKNHGSMFFLGEIFTSLPLPPDEATTQHCGSCQKCLEICPTQAFVTPYVLDARKCIAYLTIENPGAIPVELRSKIGNRIYGCDDCQLFCPWNKFSQLSQLNDFTPRNQLDSSSLLELFAWSETEFKQRLQGSPILRIGYQAWQRNIAVGLGNAAPSNAIRQALELALPNSSPLVAEHILWALEQQ

SEQ ID NO: 78655 - protein, 344 aa, Neoasaia chiangmaiensis
  misc_feature (1)..(344): tr|A0A1U9KSE8|A0A1U9KSE8_9PROT Epoxyqueuosine reductase OS=Neoasaia chiangmaiensis OX=320497 GN=queG PE=3 SV=1
MKKSVEDRIAEYARRLGFDAVGFCRAELPDEARARLHEFVANGWHGTMGWMEQRLDQRGDPKALWPDVRSVISLGLSYAPETDPLATLAMADRGNISVYARNRDYHDIIKGMLKHVAQFVVKQGTDTQVKVFVDTAPVSEKPLAEAAQLGWQGKHTNVVSRDHGSWLLLGEIFTTLDLQPSAPRAGACGSCTRCLVACPTNAFPAPYRMDARRCISYLTIEHAGPIPHEFRPLIGNHIYGCDDCLAVCPWNRFAQAGHEAKLAARSELVAPRLAELVALDDAAFRTLFSGSPIKRIGRNRFVRNVLIAIGNSGDASLADHARTRTQNDDAVVAEAARWAVERLS

SEQ ID NO: 78656 - protein, 324 aa, Neochlamydia sp.
  misc_feature (1)..(324): tr|A0A0C1JNP0|A0A0C1JNP0_9BACT Epoxyqueuosine reductase OS=Neochlamydia sp. EPS4 OX=1478175 GN=queG PE=4 SV=1
MQKNKSERAIFTDVKYKKMTLSFDEIKVKALELGWDDVGITPANVRQEDIQAYKEWLAEGKHADLAYMEKEIRCYPQQYFPQAKTALIFLSYYKQPKENLLAGQGLIASYARGRDYHHVHRKRLKKFIQWLEERVGEQGIAKGFSDSSPLLEKALAVQAGLGWFGKNTLLIHRRFGTYTLISGILTSLEIPGAVISLRLPRCGSCTRCIDACPTQALTSPYKLDAAKCLSYHLIESKKPIPLEIQQKNPGYIFGCDICQDACPHNQRTLPSLTAAFSPASGNGTYLDLKKLEECEKNPEKLFGTPLQRRGITGLKYTAETLKLK

SEQ ID NO: 78657 - protein, 306 aa, Neochlamydia sp.
  misc_feature (1)..(306): tr|A0A0C1KCA5|A0A0C1KCA5_9BACT Epoxyqueuosine reductase OS=Neochlamydia sp. TUME1 OX=1478174 GN=queG PE=4 SV=1
MTLSFDEIKVKALELGWDDVGITPANVRPEDIQAYKEWLAEGKHADLAYMEKEIRCYPQQYFPQAKTALIFLSYYKQPKENLLAGQGLIASYARGRDYHHVHRKRLKKFIQWLEERVGEQGIAKGFSDSSPLLEKALAVQAGLGWFGKNTLLIHRRFGTYTLISGILTSLEIPGAVISLRLPRCGSCTRCIDACPTQALTSPYKLDAAKCLSYHLIESKKPIPLEIQQKNPGYIFGCDICQDACPHNQRTLPSLTAAFSPASGNGTYLDLEKLEECEKNPEKLFGTPLQRRGITGLKYTAETLKLK

SEQ ID NO: 78658 - protein, 402 aa, Neokomagataea sp.
  misc_feature (1)..(402): tr|A0A506USZ3|A0A506USZ3_9PROT tRNA epoxyqueuosine(34) reductase QueG OS=Neokomagataea sp. Jb2 OX=2558904 GN=q ueG PE=4 SV=1
MLCSALSGKLGELPGSAVPSPLHPLRCIVTEKKNTLESRILHQARILGFNTAGITATVLPPEVEQGLRAFVAENRHGTMHWMEERITQRAQPAALWPEVQSVISLGLSYAPPSPDIAFTTLARPECGNISVYARNRDYHDVMKGMLKHLAQQVVKLGGEGTQVKVFVDTAPVAERDLAVAAGLGWRGKHGCVVSRRYGSWLFLGEIYTTLSLERLRAPLSPQPEQPGSSRPCRKSAPTTAPGRCGSCTRCLVSCPTDAFLEGGGMDARRCISYLTIEHEGPIPLELRPLMGNRIYGCDDCVAVCPWNRFAPPGQIAKLQSRPDRDTPLLADLARLDDAGFRRMFSGSPVKRIGRNRFIRNVLIAIGNSGLPALRPAAERLCRDPDATVAECARWAAGRLRAV

SEQ ID NO: 78659 - protein, 385 aa, Neorhizobium alkalisoli
  misc_feature (1)..(385): tr|A0A561QRI5|A0A561QRI5_9RHIZ Epoxyqueuosine reductase OS=Neorhizobium alkalisoli OX=528178 GN=queG PE=3 SV=1
MIDDRAAAKAQARREKLTAFIREEAKAQGFDLCRVTGPDSIPRAPERLEIFLADGHHGTMDWMEETRERRGDPKVLWSDVRSIVMFAMNYGPEEDPRGILDRPDKAAISVYARNRDYHDIIKGRLKEVATRFAARAGEDVKVFVDTAPVMEKPLGEAAGLGWQGKHTNLVSRTHGSWLFLGSMFTTADLIVDEPERDHCGSCRACLDACPTSAFPAPYRLDARRCISYLTIEHKGTIAPAFRPLIGNRIYGCDDCLATCPWNKFAASASEMKLKAREDLKEPAIADLLTLDDADFRALFSGSPVKRIGRDRFVRNVLIAAGNSSDGSLIAQCRVLSADSSPVVRGMAIWALKQLMTDEVFRAFADERGAEEDPDVLEEWRMAGAA

SEQ ID NO: 78660 - protein, 391 aa, Neorhizobium galegae
  misc_feature (1)..(391): tr|A0A0T7G9J9|A0A0T7G9J9_RHIGA Epoxyqueuosine reductase OS=Neorhizobium galegae bv. officinalis OX=323656 GN=q ueG PE=3 SV=1
MRTLISDATSREEEKALRRREKLTAFIREEAKAQGFDLCHVTGPDSIPRAPERLEVFLAEGHHGSMDWMAETRLRRADPKVLWDQVRSIVMFGLNYGPDEDPRGVLEKHDKAAISVYARNRDYHDVIKGRLKEIATRFAARAGEDVKVFVDTAPVMEKPLAEAAGLGWQGKHTNLVSRTHGSWLFLGSLFTTADLVIDAPETDHCGSCRACLDACPTAAFPSPYRLDARRCISYLTIEHKGPIDPEFRPLIGNRIYGCDDCLAACPWNKFAASASEMKLQAREDLKEPSIAFLLTLDDAAFRTFFSGSPVKRIGRDRFIRNVLIAAGNSDDASLIAQCLELAGDPSPTVRGMAIWALKRLMTDMDFAELAGARGTEDDPEVREEWRLAGAA

SEQ ID NO: 78661 - protein, 391 aa, Neorhizobium galegae
  misc_feature (1)..(391): tr|A0A068SZM3|A0A068SZM3_RHIGA Epoxyqueuosine reductase OS=Neorhizobium galegae bv. orientalis str. HAMBI 540 OX=1028800 GN=queG PE=3 SV=1
MRTLISDAPAREEEKALRRREKLTAFIREEAAAQGFDLCRIAGPDSIPQAPERLEIFLADGHHGSMDWMAETRLRRADPRMLWDQVRSIVMFGLNYGPDEDPRGILDKPDKAAISVYARNRDYHDVIKGRLKEIATRFAARAGEDVKVFVDTAPVMEKPLAEAAGLGWQGKHTNLVSRTHGSWLFLGSLFTTADLIIDAPEIDHCGSCRACLDACPTAAFPAPYRLDARRCISYLTIEHKGPIDPEFRPLIGNRIYGCDDCLAACPWNKFAASAAEMKLKARDDLKEPSIAFLLTLDDATFRTFFSGSPVKRIGRDRFIRNVLIAAGNSGDASLIGQCLELAGDPSPVVRGMAIWALKRLMTDADFARFAEARGAEEDPEVREEWRLAGAA

SEQ ID NO: 78662 - protein, 403 aa, Neorhizobium sp.
  misc_feature (1)..(403): tr|A0A4R2ZW36|A0A4R2ZW36_9RHIZ Epoxyqueuosine reductase OS=Neorhizobium sp. JUb45 OX=2485113 GN=queG PE=3 SV=1
MRISTSETKPEAARADAPSRHDGRSEKDRLRASKLTALIRTEAEAQGFDLCRITPPDSIPHAPARLIEFVEAGRHGTMAWMEETRERRGDPKVLWSDVRSIVMFGMNYGPDEDPRGLLSKPDKGNISVYARNRDYHDVIKGRLKEIATRFAARAGVDVKVFVDTAPVMEKPLAAAAGLGWQGKHTNLVSRTHGSWLFLGSLFTTADLDFDEAERDHCGKCRACLDACPTSAFPAPYQIDARRCISYLTIEHKGPIAHEFRPLIGNRIYGCDDCLAACPWNKFAASASEMKLQAREDLKEPSLAFLLTLEDAQFRTFFSGSPVKRIGRDRFVRNVLIAVGNSGDRGFIEACKGLAADPSAAVRGMAVWALSRLMTKDEFERFASARVIDEDDEVEAEWAMAGVA

SEQ ID NO: 78663 - protein, 391 aa, Neorhizobium sp.
  misc_feature (1)..(391): tr|A0A346YRN8|A0A346YRN8_9RHIZ Epoxyqueuosine reductase OS=Neorhizobium sp. SOG26 OX=2060726 GN=queG PE=3 SV=1
MRTLISEPVGREEEKALRRRAKLTAFIREEAAAQGFDLCRITSADSIPQATERLDMFLAEGHHGTMEWLAETRDRRSDPRVLWDQVNSVVMFGLNYGPDEDPRALLDKPGSAAISVYARNRDYHDVIKGRLKEIATRFAARAGEDVKVFVDTAPVMEKPLAEAAGLGWQGKHTNLVSRSHGSWLFLGSIFTTADLERDAPETDHCGSCRACLDACPTAAFPAPYRLDARRCISYLTIEHKGPIEPHFRPMIGNRIYGCDDCLAACPWNKFAASASEMKLKAREDLKEPSIAFLLTLDDPTFRSFFSGSPVKRIGRDRFVRNVLIAAGNSGDRALIPQVEKLAGDPSPVVRGMAVWALKRLMLDEEFLLFAQRRPTETDPEVQEEWKLAGVS

SEQ ID NO: 78664 - protein, 324 aa, Neosynechococcus sphagnicola
  misc_feature (1)..(324): tr|A0A098THZ5|A0A098THZ5_9CYAN Epoxyqueuosine reductase OS=Neosynechococcus sphagnicola sy1 OX=1497020 GN=queG PE=3 SV=1
MLPDSTDATEQIKAQALTLGFHKVGIAAVDSAAAPTTVSDPNRTGLQAWLTQGYQAQMQWMATPKRQDIQQVMPTVRSLICVALNYYTPLVRPEGRQYGKISRYGWGRDYHRVLQRKLKAFSTWLEGLDPGVQTRYYADTGPIQDKVWAQRAGLGWIAKNSNLITREYGSWVFLGEILTNLTLQPDPPHTAHCGTCRRCIDACPTAAIVQPFVVDANRCIAYHTIENRAATLPGAIAPHLQGWVAGCDICQDVCPWNQRFASETDIPDFQPYPQNVAPPLTELATLSDQEYQQRFPASALRRIKPEMMRRNARANLTPNSLADP

SEQ ID NO: 78665 - protein, 381 aa, Neptunomonas antarctica
  misc_feature (1)..(381): tr|A0A1N7P8E3|A0A1N7P8E3_9GAMM Epoxyqueuosine reductase OS=Neptunomonas antarctica OX=619304 GN=queG PE=3 SV=1
MTDSDVSTQHLTSPQPSPQLSPEKLAELAKQIHIWASEYGFQQCGIVDPDLKEDAARLQAWLEKQYHGEMNYLAANADKRRDPYSLVPGSCRIISVRMDYTPPAFSSLKILNSPEKAYIARYTLGRDYHKMMRKRLTQLGKRIEEAAGEMGYRAFVDSAPVMERPIAQQAGLGWTGKHTLILNRHAGSWFFLGELFIDLPLPTDLPEKKTHCGSCTACLDICPTNAFTGPYELDATRCISYLTIEKKGSIPEELRSLMGNRIFGCDDCQLVCPWNRFAKHTAETDFHPRHQLDDISLVDLFNWDEATFLKRTEGSAIRRTGYEGWLRNIAIALGNSGGGNDIITTLEAKRPICSEMVIEHIDWAINQLKAGQTRLSPIQFK

SEQ ID NO: 78666 - protein, 393 aa, Neptunomonas qingdaonensis
  misc_feature (1)..(393): tr|A0A1I2UAV5|A0A1I2UAV5_9GAMM Epoxyqueuosine reductase OS=Neptunomonas qingdaonensis OX=1045558 GN=queG PE=3 SV=1
MTDSVLSTSAQLTKPARQELSSGQELSAEQAFSSEKLAALAKQVHLWAAEAGFQECGIVNPDLEEDTERLQAWLDKQHHGEMSYLAANADKRRDPYLLVPGSCRIISVRMDYTPPAFSALKVLNSPEKAYIARYTLGRDYHKMMRKRLTQLGKRIAEAAGTMGYRAFVDSAPVMERPIAQQAGIGWTGKHTLILNRHAGSWFFLGELLIDLPLPTDPPIEKQHCGSCTACLDICPTKAFSGPYELNATRCISYLTIEKKGAIPEELRPLMGNRIFGCDDCQLVCPWNRFAKHTAEADFHPRHQLDDVSLIDLFNWDETTFLKRTEGSAIRRTGYQGWLRNIAVALGNSGGGNEIIAALEAKRPHCSEMVIEHIDWAINRLTKGTTLLSPIQLK

SEQ ID NO: 78667 - protein, 363 aa, Neptunomonas sp.
  misc_feature (1)..(363): tr|A0A437Q6H9|A0A437Q6H9_9GAMM Epoxyqueuosine reductase OS=Neptunomonas sp. HPM-16 OX=1815562 GN=queG PE=3 SV= 1
MSHSLTDEQLLSLSEQIPVWAAELGFQQCGIVDPDLDSDFAQLQAWLEKGYHGQMNYLADHGEKRRKPYELVPGSCRIISLRMDYTPPAFDALKLIGQPDKAYIARYTLGRDYHKTMRKRITQLGQRIEKETSALGYRAFVDSAPVMERPIAQQAGIGWTGKHTLILNRHAGSYFFLGELFIDLPLPVAEPITKNHCGRCTACLDICPTNAFIGPYELDARRCISYLTIEHKGAIPLNLRPLMGNRIFGCDDCQLVCPWNRFAKLTEESDFHPRHSLDDVSLLTLFAWDEATFLKRTEGSAIRRTGFEGWQRNLAIALGNSSGGAAVIDALKAKREASSPLVQEHIDWAINQLQQNATARREA

SEQ ID NO: 78668 - protein, 341 aa, Nereida ignava
  misc_feature (1)..(341): tr|A0A0U1NK01|A0A0U1NK01_9RHOB Epoxyqueuosine reductase OS=Nereida ignava OX=282199 GN=queG PE=3 SV=1
MSLKARLWDVAQDAGFAKMGVCKPDAAPETAQRLSAFVEAGYHGQMSWMAERMNWRGSPQDLWPECRSVIMLAEMYTPEHDPRTVLSRPELGAISVYAQNKDYHDVAKKRLKKVGRWLVEQGDIQIKVFVDTAPVMEKPLAQAAGLGWQGKHTNLLARDLGNWFFLGAIFTTAELEPDEAQTDNCGSCTACLDACPTDAFPAPFQLDARRCISYLTIEHKGPVAPELREKMGNHIYGCDDCLAACPWNKFAVAATEMKYAAREELKAPKLAALVSFDDASFRARFSGSPIKRIGRDRFTRNVLYAIGNSGKPELKSHAQALLNDNDPVVRDAAEWAVGRLS

SEQ ID NO: 78669 - protein, 385 aa, Nesiotobacter exalbescens
  misc_feature (1)..(385): tr|A0A1U7JI03|A0A1U7JI03_9RHOB Epoxyqueuosine reductase OS=Nesiotobacter exalbescens OX=197461 GN=queG PE=3 SV =1
MLTDRQANRVKSDLIKRAHALGFGQVRIARPDAIPHAPERLRQFIEAGYHATMNWMPETEARRSDPRVLWPEVRSIIMLAMNYGPDEDPLALQEKPEKAAISVYARNRDYHDVVKGKLKELANLVASRGGGDVKVFVDTAPVMEKPLAQAAGLGWQGKHTNLVSRELGSWFFLGSIFSTLELPVDETEVDHCGRCRRCLDACPTKAFPAPYQLDANRCISYLTIEHHGPIPHEFRRPMGNRIYGCDDCLGVCPWNKFAQEASEAKLRAREDLKEPSIADLLKLDDASFRRFFTGSPIKRVGRDRFIRNVLIAAGNSGKAELLGDVIRLLEDPAPVVRATAVWALGELGSPAQQADLHDGLAPSETAREVQEEWQRLKQAAGRNSV

SEQ ID NO: 78670 - protein, 363 aa, Nevskiales bacterium
  misc_feature (1)..(363): tr|A0A2E9ZU31|A0A2E9ZU31_9GAMM Epoxyqueuosine reductase OS=Nevskiales bacterium OX=2026766 GN=queG PE=3 SV=1
MRVKTQPPNTTPSPEVLAGRIRDWAAELGFDGVGITGFDLAEDVEHLHQWLREGRHGSMDYMARHADLRADPARLQPEAIRCISVRMNYLTQSADAMQACLDDPDRAYVSRYALGRDYHKLMRGRLKQLTRQLQEAAPEALSRPFVDSAPVLEKALGRDARLGWIGKHSLLLHRDAGSWFFLGEILTNVALPVDDDPPVKNLCGSCTACMEICPTQAITGPRQLDARRCIAYLTIEHKGSIPEGLRKPMGNRIFGCDDCQLVCPWNRYAQATREPDFAPRHGLDTARLVDLFAWSEDEFLSRTEGMPIRRTGYVGWRRNIAVALGNATASDESRQALRGALDDPSPLVREHVQWALQQLEAAD

SEQ ID NO: 78671 - protein, 310 aa, Niabella drilacis
  misc_feature (1)..(310): tr|A0A1G6L1A3|A0A1G6L1A3_9BACT Epoxyqueuosine reductase OS=Niabella drilacis OX=1285928 GN=queG PE=3 SV=1
MNPAAAHTHLIKQYSRELGFSYCGIAKAVQLDEDARRLEQWLSKGMHGSMQYMENYFDLRIDPAKLVPGARSVITLLMNYFPQQQQQTDGPRISKYAYGHDYHEVIRARLNILLQYIREQVGEINGRGFVDSAPVLERSWARQSGLGWIGKNGNLLVKGAGSFYFIATLITDLPLQYDDPYSADFCGSCTKCLDACPTGAILPGRVVNGSQCISYFTIELKDALIPDAVKGQFQNWAFGCDICQDVCPWNRFSKPNQQQEFTPLPEILNLSTTEWEQFSEEQFRKIFKHSPIKRTKLKGIQRNLKFINSH

SEQ ID NO: 78672 - protein, 309 aa, Niabella ginsenosidivorans
  misc_feature (1)..(309): tr|A0A1A9HXN4|A0A1A9HXN4_9BACT Epoxyqueuosine reductase OS=Niabella ginsenosidivorans OX=1176587 GN=queG PE=3 SV=1
MNTALHYTQLIKRFSKELGFDYCGIAKAERLDEDARRLEKWLSKGMHGQMGYMENHFELRIDPTRLVPGARSVITLLMNYFPGQQQQTDGPKISKYAYGNDYHEVIRGRLKTLLALINENIGEVQGRGFVDSAPVLERAWAKKSGLGWIGKNGNLLTRDAGSFFFIATLITDLTLLYDDPYAKDFCGTCTRCINACPTNAILPDKVIDGSKCISYFTIELKDALIPGEMQGRFDNWAFGCDVCQDVCPWNRFSKPTQEADFQPLPEVLNFSTKEWEQFSEEQFRRIFKHSPIKRAKLKGLQRNLKFIEL

SEQ ID NO: 78673 - protein, 306 aa, Niabella soli
  misc_feature (1)..(306): tr|W0F6K4|W0F6K4_9BACT Epoxyqueuosine reductase OS=Niab ella soli DSM 19437 OX=929713 GN=queG PE=3 SV=1
MNATQHIKIVSKELGFDYCGIAKAEKLDDDARRLEQWLSRGMHGTMKYMENYFDLRIDPSRLVPGAKSVITLLMNYFPQQLQQTDGAKIAKYAYGNDYHEVIRAKLNALLSFINEQIGAVNGRGFVDSAPVLERSWAQKSGLGWIGKNGNLLTKDSGSFYFIATLITDLELEYDSPYTKDFCGTCTRCIDACPTNAILPGKIIDGSRCISYFTIELKDSIIPAEMQGKFENWAFGCDTCQDVCPWNRFSKPTQEAAFEPLPQILNLSSKEWESFSEEQFRKIFKHSPVKRTKLKGLQRNLKLIREK

SEQ ID NO: 78674 - protein, 309 aa, Niabella sp.
  misc_feature (1)..(309): tr|A0A5C7W8C9|A0A5C7W8C9_9BACT Epoxyqueuosine reductase OS=Niabella sp. OX=1962976 GN=queG PE=3 SV=1
MSRISEHTFLVKQTGKQLGFDYCGIARAQPLDEDARRLEAWLNKGMNGTMKYMENYFELRVDPTKLVPGAKSVITLLLNYFPPQHQEGNGPKISKYAYGNDYHEVIRTKLNEFLFMVREKVGAVEGRGFVDSAPVLERAWAQRSGLGWVGKNGNLITKKSGSFFFIATLITDLELEHDDPLAKDFCGSCTKCIDACPTDAIMPNKVINGSKCISYFTIELKEMLIPSEMQGKFDDWMFGCDICQDVCPWNRFSKPNTVEDFTPIPEVLNLTTTEWEAMTEESFRKIFKHSPIKRSKFKGIQRNLNFLLE

SEQ ID NO: 78675 - protein, 309 aa, Niastella koreensis
  misc_feature (1)..(309): tr|G8TFD2|G8TFD2_NIAKG Epoxyqueuosine reductase OS=Nias tella koreensis (strain DSM 17620 / KACC 11465 / GR20-1 0) OX=700598 GN=queG PE=3 SV=1
MNFKLQHTQQIKSFVRELGFDFCGIARAQQLDEEARRLEQWLNKGLHGNMQYMENYFDLRIDPTKLVPGAKSVITVLLNYFPQQTQQSDTPNISKYAYGNDYHEVIKKKLHTLMALINEHIGEVQGRGFVDSAPVLERSWAHRSGLGWIGKNGNLINKQQGSFFFIATLIVDIELEYDDPIAKDYCGSCRKCIEACPTGAITEGKVINGSQCISYYTIELKDLLLPDDKKGQFADWMFGCDVCQDVCPWNRFAKPTSEAGFKPIPEILNFTTKEWESLTEDAFKQIFRHSPLKRAKFQGIQRNVKFLKG

SEQ ID NO: 78676 - protein, 309 aa, Niastella populi
  misc_feature (1)..(309): tr|A0A1V9FDL1|A0A1V9FDL1_9BACT Epoxyqueuosine reductase OS=Niastella populi OX=550983 GN=queG PE=3 SV=1
MNHKQHHTQQIRSFIRELGFNFCGIARAQQLDDDARRLEQWLNKGLHGNMQYMENYFDLRIDPTKLVPGAKSVITVLLNYFPQQAQRAGTPHISKYAWGNDYHEVIKKKLHTLLALINEHIGEVQGRGFVDSAPVLERSWAHRSGLGWIGKNGNLITKQQGSFFFIATLIVDLELEYDDPIAKDYCGSCRRCIDACPTGAITEGKVINGSQCISYYTIELKDLLLPDDKKGQFADWMFGCDVCQDVCPWNRFAKPTQETGFTPIPEILNFTTKEWESLTEEAFKKIFRNSPLKRAKFQGIQRNVKFLKG

SEQ ID NO: 78677 - protein, 260 aa, Niastella sp.
  misc_feature (1)..(260): tr|A0A4R2W672|A0A4R2W672_9BACT Epoxyqueuosine reductase OS=Niastella sp. CF465 OX=2135684 GN=C8K05_103651 PE=4 SV=1
MQYMENYFDLRIDPTKLVPGARSVITVLMNYFPQQTQQEGTPHISKYAWGNDYHEVIKKKLNTLLALINEHIGEVQGRGFVDSAPVLERSWAHRSGLGWIGKNGNLINKQQGSFFFIANLIVDLELEYDDPIAKDYCGSCRRCIDACPTNAITEGKVINGSQCISYYTIELKDLLLPDDKKGQFADWMFGCDVCQDVCPWNRFAKPTSEAGFTPIPEILNFTTKEWESLTEDAFKQIFRHSPLKRAKFQGIQRNVKFIKG

SEQ ID NO: 78678 - protein, 307 aa, Niastella sp.
  misc_feature (1)..(307): tr|A0A1E4E6T8|A0A1E4E6T8_9BACT Epoxyqueuosine reductase OS=Niastella sp. SCN 39-18 OX=1660119 GN=queG PE=3 SV= 1
MSVTDKNTAIVKQTAAQLGFDYCGIAKAGYLSDDARRLESWLSKGMHGTMQYMQNHFDLRVDPTLIVPGAKSIITILYNYYPAEQQVDGAPKISKYAYGKDYHEIIRKKLNEFLSLLQQQIGDIQGRGFVDSAPVLERSWAQKSGLGWVGKNGNLIHKAQGSFFFIASLIVDLPLTYDDPFAKDYCGSCTRCIDACPTEAILPDKVINAQKCISYFTIELKEELIPEKNKWDDWIFGCDVCQDVCPWNRFSKQTRHAALKPITEIINFNKQDWDELTEEKFKLIFSKSALKRTKYAGIKRNLKFIQK

SEQ ID NO: 78679 - protein, 310 aa, Niastella vici
  misc_feature (1)..(310): tr|A0A1V9FT06|A0A1V9FT06_9BACT Epoxyqueuosine reductase OS=Niastella vici OX=1703345 GN=queG PE=3 SV=1
MSNTSYHTQQIKSFVRELGFDFCGIARAQQLDEEARRLEQWLKKGLHGNMQYMENYFDLRIDPSKLVPGAKSVITVLLNYFPQQSQQAGTPKISKYAWGKDYHEVIKKKLHALLALINEHIGEVQGRGFVDSAPVLERSWAHRSGLGWIGKNGNLITRQQGSFFFIATLIVDLELEYDDPIAKDYCGSCRRCIEACPTGAISEGKVINGSQCISYYTIELKDLLLPDDKKGQFADWMFGCDVCQDVCPWNRFSQPTREAGFAPIPEILNFTTKEWESLTEEAFKQIFRHSPLKRAKYQGIQRNVKFLQHK

SEQ ID NO: 78680 - protein, 309 aa, Niastella yeongjuensis
  misc_feature (1)..(309): tr|A0A1V9F8B3|A0A1V9F8B3_9BACT Epoxyqueuosine reductase OS=Niastella yeongjuensis OX=354355 GN=queG PE=3 SV=1
MANKAYHTQQIKSFVRELGFDFCGIARAQQLGDDARRLEQWLSKGLHGNMQYMENYFDLRIDPTKLVPGARSVITVLLNYFPQQTQQTNTPHISKYAFGNDYHEVIKKKLHALLVLINEHIGEVQGRGFVDSAPVLERSWAHRSGLGWIGKNGNLINKQQGSFFFIATLIVDLELEYDDPIAKDYCGSCRRCIDACPTGAITEGKVINGSQCISYYTIELKDLLLPDDKKGQFADWMFGCDVCQDVCPWNRFAKPTSEAGFTPIPEILNFTTKEWESLTEEAFKQIFRHSPLKRAKFQGIQRNVKFLKG

SEQ ID NO: 78681 - protein, 389 aa, Nibricoccus aquaticus
  misc_feature (1)..(389): tr|A0A290Q8E5|A0A290Q8E5_9BACT tRNA epoxyqueuosine(34) reductase QueG OS=Nibricoccus aquaticus OX=2576891 GN=q ueG PE=4 SV=1
MSEAREELRRRLRALGFDEVRFARMDAPFGAGLRARMEAGQFADMDWMGRTADKRTNPDLVLPGVKTMIMLGVNYWPGAEAMSSGGGDEVGKPVWARYALHADYHDTIKPALVAAGKVLEELCGATAEDYRYYVDTGPVQERGWAERAGLGFIGKNAMLISREFGNWLFLATILTRVEIAPDEPLSAKHQPHESGEPRVGLLCGKCSRCMDECPTEAIVAPGVVDARRCVSYQTIENKGTIPRELRAGIGRRIYGCDVCAEVCPWNRFAQESRKVLLAARYELADLSLREVLELTPVRFAEVFRKTAIKRVKLAGLLRNACVVAGNTRAEECVEILVRLAGHESALVRGHAVWAVYRIAGHARAGELLAVAKAGERDEGVLAEYGAEGG

SEQ ID NO: 78682 - protein, 343 aa, Nioella sp.
  misc_feature (1)..(343): tr|A0A2E2EYZ0|A0A2E2EYZ0_9RHOB Epoxyqueuosine reductase OS=Nioella sp. OX=1912091 GN=queG PE=3 SV=1
MTDLKTQLEAKALEEGFAKMRVCRPDAIPQAAARLAEYVAKGRHGQMGWIEARMGWRGDPTALWPEARSVVMLAEPYTPEIDPLEPLKARDCGTISVYAQNRDYHDALKKRLKRVGRWLLEQAPGEEIKVFVDTAPVMEKPLGQASGLGWQGKHTNLLARDLGNWFFLGSIFTTLELPADPADSDHCGNCTACLDICPTDAFPAPYQLDARRCISYLTIEHHGPVDEELRPLMGNRIFGCDDCLAICPWNKFAVEAREMRYSGRPELQGPKLAELARLDDAAFRTMFSGNPVKRIGRNRFIRNVLYAIGNSGDSGLLDTAQGLLDDADDTVKDAARWAVERLR

SEQ ID NO: 78683 - protein, 371 aa, Nisaea sp.
  misc_feature (1)..(371): tr|A0A2D7Z6D8|A0A2D7Z6D8_9PROT tRNA epoxyqueuosine(34) reductase QueG OS=Nisaea sp. OX=2024842 GN=queG PE=4 SV =1
MIVTDIRARAANLGFSAVGIARPEVSATVQARFDAMVAADAFGDMSWMATTAARRRDPAVLWPAARSVIVLAQSYTPDHDPMTALAAPTRGNVSVYARFKDYHDVMKKRLKALARWLVATHGGEVKVFVDTAPILEKPLAQRAGVGWQGKHSNLVSRALGSWFFLGEVFTTLDLPVDAPGEDHCGACTRCIDICPTAAITAPYHLEPGRCIAYLTIEHKGHIDRAFRPAIGNRVFGCDDCLAVCPWNKFATPPMEAAYRPAPASSLPDLADLVALEDDGFRARFRGTPVRRLGRDRFLRNVLIAIGNSAQPALAPAAAARLDDSAAVVRAMAVWALARLLPASDFAALRQAHAGREADPDVRGEWAMAAAD

SEQ ID NO: 78684 - protein, 373 aa, Nisaea sp.; identical to SEQ ID NO: 75450
  misc_feature (1)..(373): tr|A0A2D7JN13|A0A2D7JN13_9PROT Epoxyqueuosine reductase OS=Nisaea sp. OX=2024842 GN=queG PE=3 SV=1

SEQ ID NO: 78685 - protein, 384 aa, Nissabacter sp.
  misc_feature (1)..(384): tr|A0A4P8SF88|A0A4P8SF88_9GAMM Epoxyqueuosine reductase OS=Nissabacter sp. SGAir0207 OX=2126321 GN=queG PE=3 S V=1
MTFPFDLHQLSQHIKQWGQSLGFQQVGICDTDLSLEEPKLQDWLDKQYHGEMEWMARHGMLRARPHELLPGTLRVISVRMNYLPAKAAFASTLKNPALGYVSRYALGRDYHKLLRQRLKKLGEMIQSWCSEQGGGEVGFRPFVDSAPIMERPLAAKAGIGWVGKHSLILNREAGSWFFLGELLIDLPLPVDQPQPEQCGKCVACMTTCPTGAIVAPYTVDARRCISYLTIELEGAIPEEFRPLMGNRIYGCDDCQLICPWNRFSQLTDEADFSPRAALHAPELLELFAWSEEKFLRVTEGSAIRRIGHLRWLRNVSVALGNAPYQAEIVLALQQRLGENEMLDEHLHWAIAQQFQKRDANKLEVQLPQQKRLVRAVEKGLPRDA

SEQ ID NO: 78686 - protein, 376 aa, Nitratireductor aquibiodomus
  misc_feature (1)..(376): tr|I5BWK6|I5BWK6_9RHIZ Epoxyqueuosine reductase OS=Nitr atireductor aquibiodomus RA22 OX=1189611 GN=queG PE=3 S V=1
MKSAQADRLRAFVEKEARALGFDAVAVASAERAPSRAVELGHFLKEGRHGSMQWMEETADRRAHPRDLWPQARSVIMLGMNYGPDENPLEILERRDRAAISVYARNRDYHDVIKGRLKQLAGKLAARTGEDVKVFVDTAPVMEKPLAREAGLGWQGKHTNLVSREYGSWLFLGSVFTTAELAPDAPEHDHCGSCRACLDICPTRAFPAPYQIDARRCISYLTIENKGPIPREFRIPMGNRIYGCDDCLAACPWNKFAQGAAEAKLQAREDLKEPPLSALLELDDAGFRALFSGSPVKRIGRDRFIRNVLIAAGNSGEASLVDPCRRLAEDDAPLVRGAAVWALSRLLDDKAFRAIETRLRPQETDAQVQTEWDGRS

SEQ ID NO: 78687 - protein, 378 aa, Nitratireductor basaltis
  misc_feature (1)..(378): tr|A0A084U5Q3|A0A084U5Q3_9RHIZ Epoxyqueuosine reductase OS=Nitratireductor basaltis OX=472175 GN=queG PE=3 SV= 1
MGAGAPADRLRAFVEEKARAAGFDVVAFTTPDAAPHTPERLRRFIEAGRHGTMEWMAETEERRARPRNLWQDVRSIIMLGMNYGPDENPLDLLEQKDRAAISVYARNRDYHDVIKGKLKQVAGQIAAHAGEDVKVFVDTAPVMEKPLAAAAGLGWQGKHTNLVSREFGSWLFLGSIFTTAQLAPDQPERDHCGSCRACLDICPTNAFPAPYQIDARRCISYLTIEHKGPIPHEFRAAMGNRIYGCDDCLAVCPWNKFAQEASEAKLQARDDLKAPALAELLELDDAAFRMRFSGSPVKRIGRGRFVRNVLIAAGNSEDPRLVPQCEALLQDEDAQIRGAAVWALSRLISAENIRALAAMQNEEDAMVLEEWKMAGAAA

SEQ ID NO: 78688 - protein, 375 aa, Nitratireductor indicus
  misc_feature (1)..(375): tr|K2NQQ8|K2NQQ8_9RHIZ Epoxyqueuosine reductase OS=Nitr atireductor indicus C115 OX=1231190 GN=queG PE=3 SV=1
MSGAEADRLRAFIEKEARAVGFDAVAIASAEEAPSRAVELRHFLDEGRHGTMLWMEDTADRRAHPRDLWPEVRSVIMLGMNYGPDENPLALLDKPDKASISVYARNRDYHDVVKGKLKQLAGKLAARTREDVKVFVDTAPVMEKPLAREAGLGWQGKHTNLVSRDFGSWLFLGSIFTTARLAADEPERDHCGSCRACLDICPTDAFPAPYQLDARRCISYLTIEHKGPIPRAFRARMGNRIYGCDDCLAVCPWNKFAVTAAEAKLKARDDLNEPALADLLLLDDPAFRTLFSGSPVKRIGRDRFIRNVLIAAGNSRDDGLAARCEELASDPSPLVRGAAVWALEQLLAPQEFARLAERLYASEEDLAVRAEWRKQ

SEQ ID NO: 78689 - protein, 376 aa, Nitratireductor pacificus
  misc_feature (1)..(376): tr|K2LGF8|K2LGF8_9RHIZ Epoxyqueuosine reductase OS=Nitr atireductor pacificus pht-3B OX=391937 GN=queG PE=3 SV= 1
MRPAQADRLRAFVDKEARAAGFDAVAIASAERAPSRAAELRHFLNEGRHGTMQWMEETAERRAHPRDLWPEARSVIMLAMNYGPEDNPLAILEHRSRAAISVYARNRDYHDVVKGRLKQVAGKLAARAGAEVKVFVDTAPVMEKPLAREAGLGWQGKHTNLVSREFGSWLFLGSIFTTAELAPDAPERDHCGSCRACLDICPTDAFPAPYQLDARRCISYLTIEHKGPIPREFRAAMGNRIYGCDDCLAVCPWNKFAREAAETKLRAREDLNAPPLADLLTLDDAAFRAFFSGSPIKRIGRDRFVRNALIAAGNSGDPALAGACEVLAGDPSALVRGAAVWALERLLDAERFAVLDARLRPREKDAEVLAEWGARS

SEQ ID NO: 78690 - protein, 376 aa, Nitratireductor sp.
  misc_feature (1)..(376): tr|A0A2E0JCH2|A0A2E0JCH2_9RHIZ Epoxyqueuosine reductase OS=Nitratireductor sp. OX=1872084 GN=queG PE=3 SV=1
MKSAQADRLRAFVEKEARALGFDAVAVASAERAPSRAVELGHFLKEGRHGSMQWMEETADRRAHPRDLWPQARSVIMLGMNYGPDENPLEILERRDRAAISVYARNRDYHDVIKGRLKQLAGKLAARTGEDVKVFVDTAPVMEKPLAREAGLGWQGKHTNLVSREFGSWLFLGSVFTTAELAPDAPERDHCGSCRACLDICPTSAFPAPYQIDARRCISYLTIENKGPIPREFRIPMGNRIYGCDDCLAVCPWNKFAQNAAETKLQAREDLKEPPLSSLLELDDAGFRAFFSGSPVKRIGRDRFIRNVLIAAGNSGEASLVDPCERLAEDGSPLVRGAAVWALSRLLDEKAFAAIETRLRPQESDTQVQAEWDGRS

SEQ ID NO: 78691 - protein, 426 aa, Nitratireductor sp.
  misc_feature (1)..(426): tr|A0A5B8KVC5|A0A5B8KVC5_9RHIZ Epoxyqueuosine reductase OS=Nitratireductor sp. SY7 OX=2599600 GN=queG PE=3 SV= 1
MVRPDQVATFLPAATFRPCLRPVAGLALRGPGFLTVASSARHDKSPLRTLVQREAKAAGFDLVRITRPDAVPQLPERLQAFVDAGHHATMAWLAERADTRADPRRLWPDVRSIIMLGMNYGPEHDPLLDLQKRSSGVISVYAQNRDYHDVVKGRLKLVAGKLAARSGAGVKVFVDTAPVMEKPLAEAAGLGWQGKHTNLVSRDYGSWLFLGSIFTTADIAPDEAEEDHCGSCRACLDICPTDAFPAPYQLDARRCISYLTIEHHGPIPRQFRVAMGNRIYGCDDCLAVCPWNKFAQRASEAKLAGRADRKAPRLNELLALDDAAFRQRFAGSPVKRTGRDRMVRNALVAAGNSGDATLVPKCRDLLDDAAPVVRGAAVWALSRLMPAGHFRAVATEQPAESDEGVRQEWRDALAETGGARGTQEHA

SEQ ID NO: 78692 - protein, 378 aa, Nitrincola lacisaponensis
  misc_feature (1)..(378): tr|A0A063Y4H4|A0A063Y4H4_9GAMM Epoxyqueuosine reductase OS=Nitrincola lacisaponensis OX=267850 GN=queG PE=3 SV =1
MPSEQSKQNSTPPSTEDLATLALKIKHWAKEFGFQQCAITGTDLSAEAEGLDQWLEQGMQGEMHWLAEHREKRLDASQLLPGTQRIISLRMDYLPPDVQTLHILNNPDKAYIARYTLGRDYHKLMRNRLKQLGLRINQELQQDSIFRPFVDSAPVLERPLARNAGLGWIGKHTLLLNRQAGSWFFLGELFINLPLPLDSPQQESHCGKCTACLDVCPTQAFPRPYVLDARRCISYLTIENKGSIPVSLRSAIGNRIFGCDDCQLVCPWNRFAKHSQEDDFKPRHQLDDIELLTLFRWDEATFLKRTEGSAIRRTGFIGWQRNLAVALGNSRGGSDVEQALEQRLQHADCPDMLREHIQWALQQLRGETGGDGSDAALQ

SEQ ID NO: 78693 - protein, 369 aa, Nitrincola nitratireducens
  misc_feature (1)..(369): tr|W9VNT4|W9VNT4_9GAMM Epoxyqueuosine reductase OS=Nitr incola nitratireducens OX=1229521 GN=queG PE=3 SV=1
MISASLHQDLTNDLAQLADQIKIWASEIGFQGCAITGTDLSQEQTSLTEWLDQGMHGEMHYLSENIEKRLDASLLVPGTQRIISVRMDYLPADIKTLELLSQPDKAYIARYTLGRDYHKLIRQRLKQLGNKIQTSTGHEVSFRPFTDSAPVLERPIARNAGLGWIGKHTLLLNRKAGSWFFLGELFINLPLPIDPPETEQHCGRCTACLDICPTRAFPKPYVLDARRCISYLTIEYRGSIPTELRPLMGNRIFGCDDCQLVCPWNRFAKHSQEDDFKPRHGLDDIELIELFEWDEATFLKRTEGSAIRRTGFEGWQRNIAVALGNSSGNPRIIKALNERYPLASPLVQEHIEWALNELASKAPKPDLIT

SEQ ID NO: 78694 - protein, 366 aa, Nitrincola sp.
  misc_feature (1)..(366): tr|A0A099PDQ4|A0A099PDQ4_9GAMM Epoxyqueuosine reductase OS=Nitrincola sp. A-D6 OX=1545442 GN=queG PE=3 SV=1
MVDDLSLRELADKIKHWASELGFQQCAITGTDLSAEADNLTEWLDQGMQGEMRWLEQHQAKRLDASQLLPGTQRIISLRMDYLPPETETLRILNNPDKAYIARYTLGRDYHKLMRKRIQQLGQRIDAHMQQDSAFRPFVDSAPVLERPIARNAGLGWIGKHTLLLNRQAGSWFFLGELFINLPLPVDAAETSSHCGSCRACLDICPTQAFPQPYVLDARRCISYLTIELKGAIPVELRAKMGNRIFGCDDCQLICPWNRFAKHSQESDFKPRHQLDDIDLLSLFEWDEATFLKRTEGSAIRRTGFEGWQRNLAVALGNSRGGAEVEAALNRRLQSGCSDMLAEHIHWALAQLRGGTDGGGNDATLQ

SEQ ID NO: 78695 - protein, 370 aa, Nitrincola sp.
  misc_feature (1)..(370): tr|A0A5A9W3G5|A0A5A9W3G5_9GAMM Epoxyqueuosine reductase OS=Nitrincola sp. MEB193 OX=1708751 GN=queG PE=3 SV=1
MSDLSPEYLFDLAQKIKTWAQELGFQQCAITHTQVAAEGPALTRWVEQGMHGEMRWFEQNHELRLHPEQLHPGTQRILSLRMDYLTPGIETLSLLQQPSKAYIARYTLGRDYHKLLRQRLRQLAERIAQEGLPISFRPFVDSAPVLERPIARNAGLGWIGKHTLLLNRQAGSWFFLAELFIDLPLPIDPPQTRGHCGQCRACLDICPTQAFPEPYVLDARRCISYLTIEHPGSIPEPLRAKMGNRIFGCDDCQLVCPWNRFAQHSSESDFHPRHQLDDIDLLTLWEWDEPTFLKHTEGSAIRRTGYQGWQRNLAVALGNSRGGQQVVEALRKRLDTCSELVREHIHWALDQLSNKVRDAGNDDGNNVTPQ

SEQ ID NO: 78696 - protein, 362 aa, Nitrincola tibetensis
  misc_feature (1)..(362): tr|A0A364NJJ1|A0A364NJJ1_9GAMM Epoxyqueuosine reductase OS=Nitrincola tibetensis OX=2219697 GN=queG PE=3 SV=1
MTNDLAQLAAQIKIWATEVGFQGCAITGTDLSQEKTPLTEWLDQGMQGEMHYLSDNIEKRLDASLLVPGTQRIISVRMDYLPADIKTLELLSQPDKAYIARYTLGRDYHKLIRQRLKQLGNKIQASTGHEVSFRPFTDSAPVLERPIARNAGLGWIGKHTLLLNRKAGSWFFLGELFINLPLPIDPPETEQHCGRCTACLDICPTRAFPKPYVLDARRCISYLTIEYKGSIPIELRPLMGNRIFGCDDCQLVCPWNRFAKHSQETDFKPRHGLDDIELIELFEWDEATFLKRTEGSAIRRTGFEGWQRNIAIALGNSRGGPRILKALQERHPMASPLVQEHIEWALNELVSKTSKPEPSLTI

SEQ ID NO: 78697 - protein, 357 aa, Nitrococcus mobilis
  misc_feature (1)..(357): tr|A4BLN8|A4BLN8_9GAMM Epoxyqueuosine reductase OS=Nitr ococcus mobilis Nb-231 OX=314278 GN=queG PE=3 SV=1
MNDARPALDLHALARDIKRWGQELGFDRVGIAKPNLAVDEARLLQWLRRGFHGEMAYMARHGVKRARPQRLLAGTLRVISVRLNYRPPGIEPDARVLQDARRAFIARYALGRDYHKLMRKRLQRLAHRIEATAGPFGYRALVDSAPVLEKALARDAGLGWIGKHTLLLSREAGSYFFLGELFTDLPLPPSAPSSEHCGSCRACLNICPTGAIVGPYQLDARRCISYLTIEHQGSIPESLRPLIGNRVFGCDDCQAVCPWNKFARPTDEADFRPRHGLDTAALTALMRWDEAEFLERTAGSAIHRLGHVRWLRNLAVALGNSPCDEAARDVLRARSQHPSALVREHVAWALARQSDKS

SEQ ID NO: 78698 - protein, 376 aa, Nitrolancea hollandica
  misc_feature (1)..(376): tr|I4EGI2|I4EGI2_9CHLR Uncharacterized protein OS=Nitro lancea hollandica Lb OX=1129897 GN=NITHO_2720001 PE=4 S V=1
MLTRERVRELAAAAGLNVARVSSADPFDGLAEKLEAHIDAGRMAGLDWFTVERARFSADPRNLHAGGRSIIAVGLPYWQPDIQPPDDDEPRGRISRYAWGRDYHKTLKNRMRDLQQRLEQDVGHAIEARLLVDTARIVDRAVAARSGLGWYGKNAMILVPGHGSWVMLGELVVDVEIEVDPSLKPRCGQCTGCLDACPTGALVAPYTVDTPRCISFLTIELRGPIPRELRPQMGNWVFGCDACQDVCPYTGAARPADDEAFRPARIENAFPSLRWLLRMTEPEFREVYRGTAVLRTKRAGLARNAAIALGNTGTARDLAVLEDALISHDEPLVRGHAAWAMARIDRSVASAALLQRLVREEDASVRAAIADALKEG

SEQ ID NO: 78699 - protein, 373 aa, Nitrosococcus halophilus
  misc_feature (1)..(373): tr|D5C1A4|D5C1A4_NITHN Epoxyqueuosine reductase OS=Nitr osococcus halophilus (strain Nc4) OX=472759 GN=queG PE= 3 SV=1
MSIIDTMHGRESGTLDLNALAADIKQWGRKLGFQHIGIADIALGEAEKHLLDWLQAGRHGEMAYMARHGLKRTRPGELVPGTVRIISARMDYWPEADDDPWRILEDDSLGYISRYALGRDYHKVLRKRLQRLAKQMEAAIGPFGYRVFSDSAPVMEKALAEKAGLGWVGKHTNLLARDAGSWFFLGEIYTDLPLPPDSATTSHCGTCQACIDICPTQAIVAPYQLDARRCISYLTIELRGSIPEPLRPLIGNRIYGCDDCQLVCPWNRYAQVTREKDFSPRHGLAAPQLLDLFAWSEEEFLSRTEGSAIRRIGYLGWLRNIAVALGNAAPHPHIIRALQSRADHSSALVREHVAWALGEQARKSRAAAPTEEN

SEQ ID NO: 78700 - protein, 368 aa, Nitrosococcus oceani
  misc_feature (1)..(368): tr|Q3JE80|Q3JE80_NITOC Epoxyqueuosine reductase OS=Nitr osococcus oceani (strain ATCC 19707 / BCRC 17464 / NCIM B 11848 / C-107) OX=323261 GN=queG PE=3 SV=1
MHGAEKTGPDLHTLAADIKQWGYQLGFQQVGIADIELGEAEQHLLAWLQAGRHGEMDYMARHGLKRTRPEELVPGTLRVISARMDYWPETEDNPWHILEDDSRGYISRYALGRDYHKVLRKRLQKLAKQIEAAIGPFGYRVFSDSAPVMEKALAEKAGLGWIGKHTNLLARDVGSWFFLGEVYTDLPLPLDGATTSHCGSCRACIDICPTQAIVAPYQLDARRCISYLTIELRGAIPESLRPLIGNRIYGCDDCQLICPWNRYAQVTGEQDFRPRQGLEAPQLLDLFAWSEEDFLSRTEGSAIRRIGYVGWLRNIAVALGNAAPQPDIVQALRSRADHPSPLVREHVIWALEEQLRKRAVPVRQEKRG

SEQ ID NO: 78701 - protein, 411 aa, Nitrosococcus oceani
  misc_feature (1)..(411): tr|A0A0E2Z4W5|A0A0E2Z4W5_9GAMM Epoxyqueuosine reductase OS=Nitrosococcus oceani C-27 OX=314279 GN=queG PE=3 SV =1
MNKLEGPPVEACVKRVKTLWQLKKLEILLDDGEAVTNNETINAMHGAEKTGPDLHTLAADIKQWGYQLGFQQVGIADIELGEAEQHLLAWLQAGRHGEMDYMARHGLKRTRPEELVPGTLRVISARMDYWPETEDNPWHILEDDSRGYISRYALGRDYHKVLRKRLQKLAKQIEAAIGPFGYRVFSDSAPVMEKALAEKAGLGWIGKHTNLLARDVGSWFFLGEVYTDLPLPLDGATTSHCGSCRACIDICPTQAIVAPYQLDARRCISYLTIELRGAIPESLRPLIGNRIYGCDDCQLICPWNRYAQVTGEQDFRPRQGLEAPQLLDLFAWSEEDFLSRTEGSAIRRIGYVGWLRNIAVALGNAAPQPDIVQALRSRADHPSPLVREHVIWALEEQLRKRAVPVRQEKRG

SEQ ID NO: 78702 - protein, 373 aa, Nitrosococcus wardiae
  misc_feature (1)..(373): tr|A0A4P7BY71|A0A4P7BY71_9GAMM Epoxyqueuosine reductase OS=Nitrosococcus wardiae OX=1814290 GN=queG PE=3 SV=1
MGIIDIMYGRENRALDLNALAADIKQWGHKLGFQHLGITDIALGEAEKHLLDWLQAGRHGEMAYMARHGLKRTRPAELVPGTVRVISARMDYWPEADNNPWHILEDDSLGYISRYALGRDYHKVLRKRLQQLAKQIEAAIGPFGYRVFSDSAPVMEKALAEKAGLGWVGKHTNLLARDAGSWFFLGEIYTDLPLPPDSATTSHCGTCQACIDICPTQAIVAPYQLDARRCISYLTIELRGSIPEPLRPLIGNRIYGCDDCQLVCPWNRYAQVTREKDFSPRHKLAAPQLLDLFAWSEEEFLSRTEGSAIRRVGYLGWLRNIAVALGNAAPHPHIIRALQARADHPSALVREHVAWALKEQVRKSSAATPGGED

SEQ ID NO: 78703 - protein, 368 aa, Nitrosococcus watsoni
  misc_feature (1)..(368): tr|D8KAV4|D8KAV4_NITWC Epoxyqueuosine reductase OS=Nitr osococcus watsoni (strain C-113) OX=105559 GN=queG PE=3 SV=1
MHGVEKTGPDLHTLAADIKQWGCQLGFQQVGIADIELGEAEQHLLAWLQTGRHGEMDYMARHGLKRTRPEELVPGTLRVISARMDYWPETEDNPWHILKDDSRGYISRYALGRDYHKVLRKRLQQLAKQIEAAIGPFGYRVFSDSAPVMEKALAAKAGLGWIGKHTNLLARDVGSWFFLGEIYTDLPLPLDGATTSHCGSCRACIDICPTQAIVAPYQLDARRCISYLTIELRGAIPESLRPLIGNRIYGCDDCQLICPWNRYAQVTGEQDFHPRHGLEAPQLLDLFAWSEEEFLSRTEGSAIRRIGYVGWLRNIAVALGNAAPRPEIVHALRSRADHPSPLVREHVMWALEEQRRKRAVPIRQEERD

SEQ ID NO: 78704 - protein, 364 aa, Nitrosomonadaceae bacterium
  misc_feature (1)..(364): tr|A0A2E6UQE2|A0A2E6UQE2_9PROT Epoxyqueuosine reductase OS=Nitrosomonadaceae bacterium OX=2026767 GN=queG PE=3 SV=1
MQKNISNYLLLDLASVTNNIRIWSKELGFQEIGISDAKSEKSHIESGLLRWLDIGYHGTMDYMVKHGIKRVHPDKLIPGTLRVISVRMNYSPPKTRNSWQVIKDREKAFISRYALGRDYHKVLRGRLQKLADKIAEQIGCFNYRVFSDSAPVMEVEWAQKSGLGWRGKHTLLLSREAGSMFFLGEIYTDLPLPVDKPIKNYCGTCTKCIDICPTQAIIEPYRLDARRCISYLTIELKGSIPEPLRPLIGNRVYGCDDCQLACPWNKYAAATGEQDFAVRNGLDNSSLVELFNWSREEFDTKLAGSPIRRIGHEQWLRNLAVGLGNASYSKKISNALKARYNDNSPLVREHVRWALQQHGVVGHL

SEQ ID NO: 78705 - protein, 371 aa, Nitrosomonadaceae bacterium
  misc_feature (1)..(371): tr|A0A4V0X965|A0A4V0X965_9PROT Epoxyqueuosine reductase OS=Nitrosomonadaceae bacterium OX=2026767 GN=queG PE=3 SV=1
MQENASKSPSQDFVALAVAIKAWARELGFQDIRIADATADMSQVEANLHEWLSQGHHGEMDYMAKHGIRRTRPAELVPNTLRVISIRMNNTPPTAKNSWEVLRSGVGAFISRYALGRDYHKVLRARLQKLADKITVEVGPFNYRVFTDSAPVMEVEWAQRSGLGWRGKHTLLLTRESGSMFFLGEVYTDLPLPVDGASENHCGSCSKCISICPTQAIIAPYRLDARRCISYLTIEHKGRIPIELRPLIGNRVYGCDDCQLICPWNKFAAITDEGDFAVRNGLDDVSLVELFGWSKERFDTLLAGSPIRRIGHEQWLRNLAVGLGNAPSSFPVINALQARRDDPSDLVREHVEWALQQHKGSPPLMKSKDGP

SEQ ID NO: 78706 - protein, 353 aa, Nitrosomonadales bacterium
  misc_feature (1)..(353): tr|A0A2E0I700|A0A2E0I700_9PROT Epoxyqueuosine reductase OS=Nitrosomonadales bacterium OX=2026761 GN=queG PE=3 SV=1
MNDKLIWKSITDKIKIWGHEFGFDEIGISDINLNHSKKSYDNWIKSGFHGEMHYLKKHQDIKFNPHNLVPKTLTVISARLNYFPKKENTLQILQDKNKAYISRYTLGRDYHKVIREKLKKLTKKLKEEIKNISFNSRVFTDSAPVLEVELAEKAGLGWRGKHTLLLNKDNGSWFFIGEIYTSLPLVIDKKKSNHCGSCTACIDVCPTKAIVAPYKLDANKCISYLTIEFKGSIPIEYRKPIGNRIYGCDDCQLVCPWNKYGKITKEKDFNVRHNLDNLSLIDSFKITETEFKKIFNGSAILRIGYDQWLRNIAVGLGNAPKSTNIIKVLRSRLKNTSKLVQEHILWAINEHQN

SEQ ID NO: 78707 - protein, 371 aa, Nitrosomonadales bacterium
  misc_feature (1)..(371): tr|A0A1E4G120|A0A1E4G120_9PROT Epoxyqueuosine reductase OS=Nitrosomonadales bacterium SCN 54-20 OX=1660164 GN= queG PE=3 SV=1
MQDLPDSTADLPQLARSIKEWGKKLGFQKVSIADAGADMREAETGLFKWLDQGCHGEMDYMARHGTRRTRPAELVPGTLRVISVRMNYTPVAKDSWEVIRDGSCAFISRYALGRDYHKVLRGRLQKLAEKIEAETGRLNYRVFSDSAPVTEVEWAQKSGLGWRGKHTLLLSRDAGSLFFLGELFTDLPLPVDNPIGNYCGSCTKCIDICPTQAIIAPYRLDARRCISYLTIEHKGSIPESLRPLIGNRVYGCDDCQLVCPWNKFAAITDEEDFSVRNGLDSASLIELFGWSKEEFEARLAGSPIRRIGHEQWLRNLAVGLGNAPFSQPVIQALRARLDDTSALIREHVRWALHQQERPPSLFIEDASIPEK

SEQ ID NO: 78708 - protein, 367 aa, Nitrosomonas aestuarii
  misc_feature (1)..(367): tr|A0A1I4CV65|A0A1I4CV65_9PROT Epoxyqueuosine reductase OS=Nitrosomonas aestuarii OX=52441 GN=queG PE=3 SV=1
MSDNSGLDVADLALNIKAWGKELGFQEIRIADAHADMSEAEAGMFKWLDEGYHGAMDYMGKHGTKRSRPDELVAGTKRVISVRMNYYPPKAKESWTVINKGDQAFISRYALGRDYHKVLRARMQKLAEKIQHAIGSFNYRVFSDSAPVMEVEWAQKSGLGWRGKHTLLLSRQAGSFFFLGEIYTDLLLPVDAPVGTKGSFCGSCTKCIDICPTQAIVAPYQVDARRCISYLTIELKESIPESLRPLIGNRIYGCDDCQLVCPWNKFSHLTDEEDFHVRHGLDDITLLELFSWNKAEFESRLAGSPIRRIGYLQWLRNIAVGLGNAPYSPEIIQALQTRLDDDSEMVREHVQWALEQQYKKENKESTE

SEQ ID NO: 78709 - protein, 360 aa, Nitrosomonas communis
  misc_feature (1)..(360): tr|A0A0F7KHH3|A0A0F7KHH3_9PROT Epoxyqueuosine reductase OS=Nitrosomonas communis OX=44574 GN=queG PE=3 SV=1
MQEETSTNSSLDVILLKESIKNWGRQLGFQDVRVADANANMSSVEAELSAWLDKGFHGDMDYMVKHGTKRTRPAELVPGTLRVISVRMNYTPPAVKEGWSILEDGNKAFISRYAVGRDYHKVLRIRLQKLADNISGKIGPFNYRVFTDSAPVMEVEWAKKSGLGWRGKHTLLLSREGGSYFFLGEMYTDLPLPVDDPVESYCGSCTRCIDICPTQAIIGPYQLDARRCISYLTIELKGSIPEALRTLIGNRVYGCDDCQLVCPWNKFAKITQEADFAVRNGLDDISLVELFQWSKEEFESKLAGSPIRRIGYEQWLRNIAVGLGNAPSSPAVIEALQARNHDPSPLVREHVRWALWQHEK

SEQ ID NO: 78710 - protein, 346 aa, Nitrosomonas communis
  misc_feature (1)..(346): tr|A0A5D3YC48|A0A5D3YC48_9PROT Epoxyqueuosine reductase OS=Nitrosomonas communis OX=44574 GN=queG PE=3 SV=1
MLKESIKNWGRQLGFQDVRVADANANMSSVEAELSAWLDKGFHGDMDYMVKHGTKRTRPAELVPGTLRVISVRMNYTPPAVKEGWSILEDGNKAFISRYAVGRDYHKVLRIRLQKLADNISGKIGPFNYRVFTDSAPVMEVEWAKKSGLGWRGKHTLLLSREGGSYFFLGEMYTDLPLPVDDPVESYCGSCTRCIDICPTQAIIGPYQLDARRCISYLTIELKGSIPEALRTLIGNRVYGCDDCQLVCPWNKFAKITQEADFAVRNGLDDISLVELFQWSKEEFESKLAGSPIRRIGYEQWLRNIAVGLGNAPSSPAVIEALQARNHDPSPLVREHVRWALWQHEK

SEQ ID NO: 78711 - protein, 359 aa, Nitrosomonas cryotolerans
  misc_feature (1)..(359): tr|A0A1N6INC0|A0A1N6INC0_9PROT Epoxyqueuosine reductase OS=Nitrosomonas cryotolerans ATCC 49181 OX=1131553 GN= queG PE=3 SV=1
MQENTPLNVSYDFISLATIIKAWGRELGFQDIRIADANTDMSPVESNLLEWLDKGYHGDMDYMAKHGVKRTRPSELVPGTQRVISVCMNYTPPLAENSWAVIKSGDQAFISRYALGRDYHKVLRARLQKLADKIAQEVTPFNYRVFSDSAPVMEVEWAQKSGLGWRGKHTLLLSREAGSMFFLGEIYTDLPLPVDEAIGSYCGTCSKCIDICPTQAIIAPYQLDARRCISYLTIELKGSIPETLRPLIGNRVYGCDDCQLVCPWNKFAKITNENDFSVRHGLDNASLVELFSWSKEEFDLRLAGSPIRRIGHKQWLRNLAVGLGNAASSPKIINALRARHDDDSPLVREHVQWALRQHK

SEQ ID NO: 78712 - protein, 358 aa, Nitrosomonas halophila
  misc_feature (1)..(358): tr|A0A1H3LQ24|A0A1H3LQ24_9PROT Epoxyqueuosine reductase OS=Nitrosomonas halophila OX=44576 GN=queG PE=3 SV=1
MNNKDTDWRWLSEQIKLWGRQLGFQEVRISDAHADVATVEAGLSDWLENQFHGEMDYMAKHGTKRTRPPELVPGTLRVISVRMNNKPVNMEESWTALQDGSRAFISRYALGRDYHKVLRARLQKLAEKITEQVGEFGYRAFSDSAPVMEVEWASRSGLGWRGKHTLLLSRDAGSFFFLGELYTDLPLTVDDPVASYCGSCTRCLDICPTQAIVAPYRLDARRCISYLTIELKGSIPEDLRALIGNRVYGCDDCQLVCPWNKFSQFTQEADFAVRHGLDNVSLIELFAWDKETFEARLAGSPIRRIGYEQWLRNLAVGLGNAPSSPAVIGALQARRRDPSPLVREHVEWALGQHRLTKE

SEQ ID NO: 78713 - protein, 375 aa, Nitrosomonas marina
  misc_feature (1)..(375): tr|A0A1I0DB28|A0A1I0DB28_9PROT Epoxyqueuosine reductase OS=Nitrosomonas marina OX=917 GN=queG PE=3 SV=1
MDTAQQKTSYNNSSDCKPDYVRLASEIKTWGRELGFQDVRIGNANTDMSEAEAGMFAWLEDENHGEMDYMAKHGTKRSRPAELVPGTQRVISVRMNYYPPNAAESWAVINQGDKAFISRYALGRDYHKVLRSRMQKLADKIQQAIGSFNYRVFSDSAPVMEVEWAQKSGLGWRGKHTLLLSRQAGSYFFLGEIYTDLLLPVDEPVGTKGSFCGSCTKCIDICPTQAIVAPFKVDARRCISYLTIELKSSIPESLRPLIGNRIYGCDDCQLVCPWNKFSHLTGESDFHVRHGLDDVTLVDLFRWNQQEFETRLAGSPIRRIGYQQWLRNIAVGLGNAPFSDTVIAALQSRLNDPSEMVREHVQWALEQQHTKKETE

SEQ ID NO: 78714 - protein, 375 aa, Nitrosomonas marina
  misc_feature (1)..(375): tr|A0A1H8HEQ6|A0A1H8HEQ6_9PROT Epoxyqueuosine reductase OS=Nitrosomonas marina OX=917 GN=queG PE=3 SV=1
MDTAQQKTSYKNSTDCKPDYVRLATEIKAWGRELGFQDVRIGNANADMSEAEAGMFAWLEDENHGEMDYMAKHGTKRSRPAELVPGTQRVISVRMNYYPPNAADSWTVINQSEKAFISRYALGRDYHKVLRSRMQKLADKIQQVAESFNYRVFSDSAPVMEVEWAQKSGLGWRGKHTLLLSRQAGSYFFLGEIYTDLLLPVDEPVGTQGSFCGSCTKCIDVCPTQAIVAPFKVDARRCISYLTIELKSSIPESLRPLIGNRIYGCDDCQLVCPWNKFSHLTGESDFHVRHGLDDVTLVELFRWNQQEFETRLAGSPIRRIGYPQWLRNIAVGLGNAPYSDAAIAVLQSRLDDPSEMVREHVQWALEQQYAKKETE

SEQ ID NO: 78715 - protein, 366 aa, Nitrosomonas mobilis
  misc_feature (1)..(366): tr|A0A1G5SG57|A0A1G5SG57_9PROT Epoxyqueuosine reductase OS=Nitrosomonas mobilis OX=51642 GN=yjeS PE=3 SV=1
MMLVMQKTAPDKQIEDWSQLTRLIRDWASELGFQALHISDASADTVATENGLNAWLEAGCHGEMDYMAKHGIKRTRPAELVPGTLRVISVRMNNKPVEMENSWHAIRNGQRAFISRYALGRDYHKVVRARLQKLAGRIRTQVGEFGYRVFSDSAPVMEVEWASRSGLGWRGKHTLLLTREAGSFFFLGEIYTDLPLLVDQPAQNYCGSCTRCIDVCPTQAIVAPYRLDARRCISYLTIELKGSIPEDMRPLIGNRVYGCDDCQLICPWNKFSKLTEEEDFAVRHGLDDVALVDLFAWSQLEFEEKLAGSPIRRIGHERWLRNLAIGLGNAPTSPEIIAALQARSNDPSPLVREHVQWALARHGSSE

SEQ ID NO: 78716 - protein, 360 aa, Nitrosomonas nitrosa
  misc_feature (1)..(360): tr|A0A3D0FB40|A0A3D0FB40_9PROT Epoxyqueuosine reductase OS=Nitrosomonas nitrosa OX=52442 GN=queG PE=3 SV=1
MHEKTSMNSSRDMVSLKQSIKSWGMQLGFQDIRIADAHADMTSAEEGMFAWLEQGFHGGMDYMAKHGTKRSRPSELVPGVLRVISVRMNYKPPAAKESWEVIHDGDKAFISRYAVGRDYHKVMRARLQKLADHITNEIGHFNYRVFSDSAPVMEVEWAKKAGLGWRGKHTLLLSREGGSYFFLGEMYTDLPLPVDEPIGDYCGSCTRCIDICPTQAIIGPYRLDARRCISYLTIELKGSIPEDLRPLIGNRVYGCDDCQLVCPWNKFAKVTQEADFAVRHGLDDVSLIELFNWSEQEFESKLAGSPIRRIGYEQWLRNLAVGLGNAPTSPAVIEVLQARSLDPSPLVREHVQWALRQHGE

SEQ ID NO: 78717 - protein, 354 aa, Nitrosomonas nitrosa
  misc_feature (1)..(354): tr|A0A1I4T1X5|A0A1I4T1X5_9PROT Epoxyqueuosine reductase OS=Nitrosomonas nitrosa OX=52442 GN=queG PE=3 SV=1
MNSSRDMVSLKQSIKSWGMQLGFQDIRIADAHADMTSAEEGMFAWLEQGFHGGMDYMAKHGTKRSRPSELVPGVLRVISVRMNYKPPAAKESWEVIHDGDKAFISRYAVGRDYHKVMRARLQKLADHITNEIGHFNYRVFSDSAPVMEVEWAKKAGLGWRGKHTLLLSREGGSYFFLGEMYTDLPLPVDEPIGDYCGSCTRCIDICPTQAIIGPYRLDARRCISYLTIELKGSIPEDLRPLIGNRVYGCDDCQLVCPWNKFAKVTQEADFAVRHGLDDVSLIELFNWSEQEFDSKLAGSPIRRIGYEQWLRNLAVGLGNAPTSPAVIEALQARSLDSSPLVREHVQWALRQHGE

SEQ ID NO: 78718 - protein, 355 aa, Nitrosomonas oligotropha
  misc_feature (1)..(355): tr|A0A1H8R743|A0A1H8R743_9PROT Epoxyqueuosine reductase OS=Nitrosomonas oligotropha OX=42354 GN=queG PE=3 SV=1
MAVAIKTWGKELGFHDVRIADAQADMSTVESGLFQWLAQGYHGDMDYMAKHGTKRTRPAELEPGTQRVVSVCMNYAPPAVKNSWDVIHDGDQAFISRYALGRDYHKVIRARLQKLADRITGEVGTFQYRVFSDSAPVMEVAWAQKSGLGWRGKHTLLLNRQAGSMFFLGEMYVDLPLPVDEETGNYCGSCSRCIDVCPTQAIIGPYQVDARRCISYLTIELKDSIPEPLRPLIGNRIYGCDDCQLVCPWNKYAKITQENDFHVRNGLDEVSLIELFGWDQATFEAKLAGSAIRRIGHTQWLRNIAVGLGNAPYSVEIVQTLQARVDDSSDMVREHVQWALQQQDQKRTAIQESST

SEQ ID NO: 78719 - protein, 370 aa, Nitrosomonas oligotropha
  misc_feature (1)..(370): tr|A0A5C7VTX1|A0A5C7VTX1_9PROT Epoxyqueuosine reductase OS=Nitrosomonas oligotropha OX=42354 GN=queG PE=3 SV=1
MQENTSTNKLPDYAALAAAIKTWGKELGFHDVRIADAQADMSTVESGLFQWLAQGYHGDMDYMAKHGTKRTRPAELEPGTQRVVSVCMNYAPPAVKNSWDVIHDGDRAFISRYALGRDYHKVIRARLQKLADRITSEVGTFRYRVFSDSAPVMEVAWAQKSGLGWRGKHTLLLNRQAGSMFFLGEMYIDLPLPVDEETGNYCGSCTRCIDICPTQAIVGPYQVDARRCISYLTIELKDSIPEPLRPLIGNRIYGCDDCQLVCPWNKFAKITNENDFHVRNGLDEVSLIELFGWDQATFEAKLAGSAIRRIGHAQWLRNIAVGLGNAPYSVEIVQALQARSDDPSDMLREHVQWALQQQGQKRTAIQESST

SEQ ID NO: 78720 - protein, 368 aa, Nitrosomonas sp.
  misc_feature (1)..(368): tr|A0A5C7VFU2|A0A5C7VFU2_9PROT Epoxyqueuosine reductase OS=Nitrosomonas sp. OX=42353 GN=queG PE=3 SV=1
MQEEISQNGTVDPASLKQSITNWAHQLGFQDIRIANAEADMSSVETGLSAWLAMGFHGDMDYMAKHGIKRTRPNELVPGTSRVISVRMNYLPSDVKESWSVIEDGHQAFISRYALGRDYHKVLRSRLQKLVEKMEVAIGKFNYRVFSDSAPVMEVEWASKSGLGWRGKHTLLLSREAGSFFFLAEIYTDIPLPVDEPSKNYCGSCTRCLEVCPTNAIVAPYKLDARRCISYLTIELKGSIPETLRPLIGNRVYGCDDCQLICPWNKFAEPTQEPDFAVRNGLDDSSLVALFAWTQDEFETKLAGSPIRRIGYQQWLRNLAVGLGNAPSSPSVIQALKDRSNDPSTLVQEHVHWALKQHETRQSICNMQ

SEQ ID NO: 78721 - protein, 365 aa, Nitrosomonas sp.
  misc_feature (1)..(365): tr|A0A2V3W9N4|A0A2V3W9N4_9PROT Epoxyqueuosine reductase OS=Nitrosomonas sp. Nm84 OX=200124 GN=queG PE=3 SV=1
MQENTSTNKLPDYIALATAIKAWSKELGFQDTCIADAGADMSAVESGLFQWLDKGYHGDMDYMAKHGTKRTRPAELEPGTQRIISVCMNYSPPATKKSWDVINMGDQAFISRYALGRDYHKVMRARLQRLADKITAAVGQFNYRVFSDSAPVMEVAWAQKAGLGWRGKHTLLLSRQAGSMFFLGEMYTDLPLPVDETTGDYCGSCSKCIDICPTQAIIAPYELDARRCISYLTIELKSSIPESLRPLIGNRIYGCDDCQLVCPWNKFARITNENDFHVRNGLDDVSLIALFSWDQETFETKLAGTPIRRIGHQQWLRNIAVGLGNAPYSGEIVTALQARLDDASALVREHVQWALQQQDKKRTEQ

SEQ ID NO: 78722 - protein, 357 aa, Nitrosomonas ureae
  misc_feature (1)..(357): tr|A0A1H5WH05|A0A1H5WH05_9PROT Epoxyqueuosine reductase OS=Nitrosomonas ureae OX=44577 GN=queG PE=3 SV=1
MAVVIKTWGKELGFHDVRIADANADIAVIESGFFSWLDKGYHGEMDYMAKHGTKRTRPAELEPGTLRIISVCINYAPPAVKNSWDVIHSGERAFVSRYALGRDYHKVLRSRLQKLADKMTAEAGAFNYRVFSDSAPVMEVAWAQKAGLGWRGKHTLLLSRQAGSMFFLGEMYVDLPLPVDEETENYCGSCSRCIDICPTQAIVAPYEVDARRCISYLTIELKDSIPESLRPLIGNRIYGCDDCQLVCPWNKFAQITNENDFHVRNGLDDVSLIELFSWDQETFEAKLAGSAIRRIGHIQWLRNIAVGLGNAPYSAEIVQALQARLNDASVLVREHVQWALQQQDMKRTEQQQRTYDE

SEQ ID NO: 78723 - protein, 373 aa, Nitrosomonas ureae
  misc_feature (1)..(373): tr|A0A285BX37|A0A285BX37_9PROT Epoxyqueuosine reductase OS=Nitrosomonas ureae OX=44577 GN=queG PE=3 SV=1
MQKNTSTNKISDYAALAVAVKTWGKELGFHDVRIADANADITVIESGFFSWLDKGYHGEMDYMAKHGTKRTRPAELEPGTLRIISVCINYAPPSVKNSWDVIHSGERAFISRYALGRDYHKVLRSRLQKLADKMTAEAGAFNYRVFSDSAPVMEVAWAQKAGLGWRGKHTLLLSRQAGSMFFLGEMYVDLPLPVDEETENYCGSCSRCIDICPTQAIVAPYEVDARRCISYLTIELKDSIPESLRPLIGNRIYGCDDCQLVCPWNKFARITNENDFHVRNGLDDVSLIELFSWDQETFEAKLAGSAIRRIGHIQWLRNIAVGLGNAPYSVEIVQALQARLNDASVLVREHVQWALQQQDMKRTEQQQRKTYDE

SEQ ID NO: 78724 - protein, 376 aa, Nitrosospira briensis
  misc_feature (1)..(376): tr|A0A1I5BVU7|A0A1I5BVU7_9PROT Epoxyqueuosine reductase OS=Nitrosospira briensis OX=35799 GN=queG PE=3 SV=1
MQEKTSKDPLPAPPAQTLDFTQLTRAIKAWAEELGFQDICIADAGSDMAKAESGLSEWLRHGFHGEMDYMAKHGTRRTRPAELVPGTLRVISARMNYMPAEARDSWQVIRDGEKAFISRYALGRDYHKVLRGRLQRLADKITAATGQFNYRVFSDSAPVMEVEWAQRSGLGWRGKHTLLLSREGGSMFFLGELFTDLPLPIDNPVGDYCGSCTKCLDICPTQAIIAPYRLDARRCISYLTIEHKGSIPETLRPLIGNRVYGCDDCQLVCPWNKFAAVTGEGDFSVRNGLDDTSLVELFSWSREEFEARLAGSPIRRIGHEQWLRNLAVGLGNAPFSAGVISALQARRDDPSSLVREHVQWALHQHDSRAARVLESP

SEQ ID NO: 78725 - protein, 377 aa, Nitrosospira lacus
  misc_feature (1)..(377): tr|A0A1W6SKZ6|A0A1W6SKZ6_9PROT Epoxyqueuosine reductase OS=Nitrosospira lacus OX=1288494 GN=queG PE=3 SV=1
MMRIMQEKISKDPSGIPCNLPDAGVDLPRLADAIKAWGKELGFQEICIADANAEMAKAESGLFEWLGKGYHGEMDYMAKHGTRRTRPSELVPGTLRVISVRMNYTPPAAKNSWQVMHDGDKAFISRYALGRDYHKVLRGRLQKLADKIAAEVGHFNYRVFSDSAPVMEVEWAQKSGLGWRGKHTLLLSREAGSMFFLGELYTDLPVPVDSPTGNYCGSCTKCIDICPTQAIVAPYRLDARRCISYLTIEHKGSIPEALRPLIGNRVYGCDDCQLICPWNKFAAVTGEDDFAVRNGLDDVSLVELFGWTKEEFDIRLAGSPIRRIGHEQWLRNLAVGLGNAPSSAAVTAALRTRCDDESSLVREHVRWALQRHDMECI

SEQ ID NO: 78726 - protein, 122 aa, Nitrosospira multiformis
  misc_feature (1)..(122): tr|A0A328ZHP3|A0A328ZHP3_9PROT Uncharacterized protein OS=Nitrosospira multiformis OX=1231 GN=C8R16_10297 PE=4 SV=1
MLRPSIGNRVYGCDDCRLICPWNKFAATTGEEDFAVRNGLDDTSLLELFGWTKEEFDTRLAGSSIRRIRHEQWLRNLAVGLGNAPFSVSVMSALQGRRDDVRPWYANTCAGHYICMKRVFSP

SEQ ID NO: 78727 - protein, 385 aa, Nitrosospira multiformis
  misc_feature (1)..(385): tr|Q2Y602|Q2Y602_NITMU Epoxyqueuosine reductase OS=Nitr osospira multiformis (strain ATCC 25196 / NCIMB 11849 / C 71) OX=323848 GN=queG PE=3 SV=1
MRKDDPSTELSPEPLKDLSDSTVDLPQLARSIKEWGEKLGFQKVSIVDAGADMRRAETGLFEWLDQGCHGEMDYMARHGTRRTRPAELVPGTLRVISVRMNYMPIARDSWQVIQDGTRAFISRYALGRDYHKVLRGRLQKLAEKIEAETGCLNYRVFSDSAPVMEVEWAQKSGLGWRGKHTLLLSRDAGSLFFLGELFTDLPLPVDQPAANYCGSCTRCIDICPTRAIIAPYRLDARRCISYLTIEHKGSIPEPLRPLIGNRVYGCDDCQLVCPWNKFAVITNEDDFSVRNGLDSASLIELFGWSSEEFEARLAGSPIRRIGHEQWLRNLAVGLGNAPFSQSVVQALRARLDDASPLIREHVRWALHQQERPLSFFIEDAAIPKK

SEQ ID NO: 78728 - protein, 382 aa, Nitrosospira sp.
  misc_feature (1)..(382): tr|A0A1G5DRG3|A0A1G5DRG3_9PROT Epoxyqueuosine reductase OS=Nitrosospira sp. Nl5 OX=200120 GN=queG PE=3 SV=1
MTFGRTGMIRIMQDKISKDPPNVPNDLPDSAVDLIWLAGMIKAWGKELGFQDICIADAGAEMRQAELGLLEWLSKGYHGEMDYMAKHGTRRTRPAELVPGTLRVISVRMNYMPPAARNSWQVIRDGDKAFVSRYALGRDYHKVLRGRLQKLADKISAEVNHFNYRVFTDSAPVMEVEWAQKSGLGWRGKHTLLLSREAGSMFFLGELYTDLPVPVDDPVGNYCGSCTKCIDICPTQAIVAPYRLDARRCISYLTIEHKGSIPETLRPLIGNRVYGCDDCQLICPWNKYAAISGENDFSVRNGLDNASLVELFSWTREEFDARLAGSPIRRIGYEQWLRNLAVGLGNAPSSTAVTAALQARRDDDSSLVREHVQWALQRHDAR

SEQ ID NO: 78729 - protein, 382 aa, Nitrosospira sp.
  misc_feature (1)..(382): tr|A0A495EN56|A0A495EN56_9PROT Epoxyqueuosine reductase OS=Nitrosospira sp. Nsp44 OX=1945879 GN=queG PE=3 SV=1
MMDAGRVGMMRIMREMPTKNSTGENVPDSLCDLTQLTQAVKAWGKELGFQEIRIADAAADMSQSESGLKRWLAEGYHGEMDYMGKHGTRRTRPAELVPGTLRVISARMNYMPEAKESWEVIADGDKAFISRYALGRDYHKVLRGRLQKLAERIAAEVELFNYRVFSDSAPVMEVEWAQKSGSGWRGKHTLLLTRDAGSMFFIGEIYTDLPLVVDEPIGNYCGSCTKCIDICPTQAIIGPYRLDARRCISYLTIEHKGSIPETLRPLIGNRVYGCDDCQLICPWNKFAAYTGEADFAVRNGLDDVSLVQLFGWSREEFDTRLAGSPIRRIGYEQWLRNLAVGLGNAPSSPAVVAALQARRDDSSPIVREHVRWALQAHENRGD

SEQ ID NO: 78730 - protein, 370 aa, Nitrosovibrio sp.
  misc_feature (1)..(370): tr|A0A497X919|A0A497X919_9PROT Epoxyqueuosine reductase OS=Nitrosovibrio sp. Nv12 OX=2135773 GN=queG PE=3 SV=1
MQEKTSKDPLQDPPDRVLDFIQLAGTIKAWGKELGFQDICIADAGAQMTQAESGLLEWLSNGYHGEMDYMAKHGTRRSRPAELVPGTLRVISARMNYMPSSARDSWEVIQDGEKAFISRYALGRDYHKVVRARLQKLADKIVAETGHSNYRVFSDSAPVMEVEWAQKSGLGWRGKHTLLLTRESGSMFFLGEIYTDLPLPIDDPVGNHCGSCTKCIDICPTQAIIAPYRLDATRCISYLTIEFKGSIPEALRPLIGNRVYGCDDCQLICPWNKYASITAENDFSVRNGLDDTSLVELFGWNREEFDTRLAGSPIRRIGYEQWLRNLAVGLGNAPSSPAVIAALQERRDDVSPLVREHVRWALKQHERRSS

SEQ ID NO: 78731 - protein, 370 aa, Nitrosovibrio sp.
  misc_feature (1)..(370): tr|A0A286C0R1|A0A286C0R1_9PROT Epoxyqueuosine reductase OS=Nitrosovibrio sp. Nv4 OX=1945880 GN=queG PE=3 SV=1
MQEKTSKDPLQNPPDRALDFIQLAGTIKAWGKELGFQDICIADAGAEMMQAESGLLEWLSNGYHGEMDYMAKHGTRRSRPAELVPGTLRVISARMNYMPSSARDSWQVIQDGEKAFISRYALGRDYHKVVRGRLQKLADKIVAETGHSNYRVFSDSAPVMEVEWAQKSGLGWRGKHTLLLTRESGSMFFLGEMYTDLPLPVDDLVGNYCGSCTKCIDICPTQAIIAPYRLDATRCISYLTIEFKGSIPETLRPLIGNRVYGCDDCQLICPWNKYASITAENDFSVRNGLDDASLVELFGWNREEFDTRLAGSPIRRIGYEQWLRNLAVGLGNAPSSQAVIAALQERREDVSPLVREHVQWALEQHERRSS

SEQ ID NO: 78732 - protein, 369 aa, Nitrosovibrio tenuis
  misc_feature (1)..(369): tr|A0A1H7FVN0|A0A1H7FVN0_9PROT Epoxyqueuosine reductase OS=Nitrosovibrio tenuis OX=1233 GN=queG PE=3 SV=1
MQKKISENPLKNARDSAPDFARLAGAIKAWGRELGFQEIRIADANADMSQSEYGLEQWLNKGYQGEMDYMAKHGTRRTRPAELIPGTLRIISVCMNYMPVAKDSWQVIGNGDKAFVSRYALGRDYHKVLRTRLQKLADRIAAEVEHSNYRVFTDSAPVMEVEWAQKSGVGWRGKHTLLISREAGSMFFLGEIYTDTPVTVDSPIGNYCGSCTRCIDICPTHAIVAPYRLDARRCISYLTIEHKGSIPEALRPLIGNRVYGCDDCQLICPWNKFAVKTVEADFAVRNGLDDISLVELFSWNKEEFDTRLAGSPIRRIGHEQWLRNLAVGLGNAPTSPAVVDALQGRRDDVSSLVREHVRWALQNHNKRRV

SEQ ID NO: 78733 - protein, 383 aa, Nitrospina gracilis
  misc_feature (1)..(383): tr|M1YXY4|M1YXY4_NITG3 Epoxyqueuosine reductase OS=Nitr ospina gracilis (strain 3/211) OX=1266370 GN=queG PE=3 SV=1
MHTATLPEKMNALRDRARELGFDALGVAPPDVGDDGKRFLEWLDRGHDGEMAYLKRGEAKRLDPALILPGVKSILCLRTNYHTRAKSLDFLNQPQTGDISNYAWNVDYHDLIKPRLHKLEHFLWELFPDCTSKAYVDTGPVLEKALAEKAGLGWVGKHSNLLTEGLGSYYFLSEILIDVALPLSEPATDHCGTCTNCIDICPTRAIVAPYVLDARRCISYLTIELKGVIPLEFRKAIGNRIYGCDDCQIVCPWNSYAVTTGEPAFQERDGTRLLIDLMRLDENGFRERFRKSPVKRIKRRGLLRNVAVALGNSGDPQAVPVLMEVLSDPEPLIRAHAVWALGELLGEEAWQAVQGALSEEADPAVQTEIERLKPVDNLGRNGL

SEQ ID NO: 78734 - protein, 379 aa, Nitrospina sp.
  misc_feature (1)..(379): tr|A0A3C8CD71|A0A3C8CD71_9BACT Epoxyqueuosine reductase OS=Nitrospina sp. OX=2024844 GN=queG PE=3 SV=1
MNLLEKNEKLADLKAFAESLGFDGFGVARPELGPAGERFGKWLDAGYDGEMAYLRRGEEKRKNPDLVLEGVKSILCFRTNYYAMEKDMSYVEHREIADISIYALNKDYHDIITPRLRQMEKRIQEKFAGCRTRIYVDTGPLLEKPLAQQAGLGWIGKHTNLLTEGLGSWYFLSEILTDVVLPQSQPADDHCGTCRSCIDICPTKAIIAPYVLDSNRCISYLTIELKGVIPIEYRKAIGNRIYGCDDCQIVCPWNSYAVKTDDPDFQEKQDTLKLIDLIQITGEMFRQRFKGSPIKRIKRRGLLRNVAIALGNSGNPQAIPPLIKVLDDEEPLIRAHAVWALGELSGLEVLPVMREKLNNEKEDIVLEELERVVARFATL

SEQ ID NO: 78735 - protein, 376 aa, Nitrospina sp.
  misc_feature (1)..(376): tr|A0A523MSI3|A0A523MSI3_9BACT Epoxyqueuosine reductase OS=Nitrospina sp. OX=2024844 GN=queG PE=3 SV=1
MAESKDTREKLEKIRRRALKLGFDRLGVAPPELGAAGRRFEQWLADRYDGEMYYMKRGGSKRLDPARVLPGVKSVICLMTNYFTTPRTLDFLKEPDTGDLSNYAWHLDYHDLIQPRLRQLEDCLAEEFPGCRTKGYVDTGPILEKPLAQRAGLGWIGKHTNLLTEGLGSYYFLSEILVDVDLPLSEAAVDHCGTCTECIDICPTGAIVAPYVLDSRKCISYLTIELKGPIPHEFRKAIGNRIYGCDDCQIVCPWNSYAVATEEPAFQEREAVKGLIALMQLDEEGFRTRFRKSPVKRIKRRGLLRNVAVALGNSGRPEAVPVLTEALADPEPLIRSHAVWALAELLGPEALAVVESGLQGETDPVVLSEIERIKTV

SEQ ID NO: 78736 - protein, 93 aa, Nitrospinae bacterium
  misc_feature (1)..(93): tr|A0A3M1QY32|A0A3M1QY32_9BACT Uncharacterized protein (Fragment) OS=Nitrospinae bacterium OX=2026769 GN=D6736 _19875 PE=4 SV=1
PFLRYDPEWVAPKLVDLMALDDAGFRARFRGTPVTRAKRRGLLRNVAVALGNWGSPEALPVLERALHDPEPLVREHAAWAIARIRSQVRSCPV

SEQ ID NO: 78737 - protein, 377 aa, Nitrospinae bacterium
  misc_feature (1)..(377): tr|A0A2H0CQS6|A0A2H0CQS6_9BACT tRNA epoxyqueuosine(34) reductase QueG OS=Nitrospinae bacterium CG22_combo_CG10 -13_8_21_14_all_47_10 OX=1974050 GN=queG PE=4 SV=1
MNSVENKKKLADLKSFAESLGFDGFGVARPQLGAAGEKLGEWLDAGYDGEMAYIRRGEEKRKNPDLVLEGVQSILCFRTNYYTMEKDMSYVEHRDIADISIYALNKDYHDTITPRLRKMEEKFQKEFQGCRTRIYVDTGPILEKPLAQQAGLGWIGKHTNLLTQGAGSWYFLSEILTDVAFPHSQPADDHCGTCKSCIDICPTTAIIAPYVLDSKRCISYLTIELKGVIPVEFRKAIGNRIYGCDDCQIVCPWNSYAVKTAEPDFQRKQDAFNLIDLIQISGETFSKMFKGSPIKRIKRRGLLRNVAVALGNSGNRQAIPVLVKALDDEEPLIRAHVVWALGELSGPEMLPTIRQKLRDEKEEIVLNEVEGVTVRLS

SEQ ID NO: 78738 - protein, 345 aa, Nitrospira bacterium
  misc_feature (1)..(345): tr|A0A0S8CPJ2|A0A0S8CPJ2_9BACT Epoxyqueuosine reductase OS=Nitrospira bacterium SG8_3 OX=1704023 GN=queG PE=3 SV=1
MPPRSTLATQIKEEARRLGFDAIGIARLPTNLPTVSSPFAQDSILSEDSPITWRLWGRLKKWLELRFHGAMEWMAKDPKRRSDPAEVLPGCQSIVVVGTNYYTNHIPDETKKAGRIARYAWGKDYHNLMKERLTQLENFLHAKIPEVETRSYVDTGPIMEKPWAQEAGIGWIGKHTNVVSTDFGSWLLLGEILTTVTLDVYEPAMDLCGTCSLCIQACPTGAIVEPYLLDAERCISYLTIEFRGGVDDLPAELRKKIGNRIFGCDDCLDICPFNVNAKPTAEPGFQPSPWTLHPQLPTLANLTKEEFQSMTKGSPLRRPKYDGFMRNVQIGLANQAPSNSPTVIR

SEQ ID NO: 78739 - protein, 343 aa, Nitrospira defluvii
  misc_feature (1)..(343): tr|D8PCC1|D8PCC1_9BACT Epoxyqueuosine reductase OS=Nitr ospira defluvii OX=330214 GN=yjeS PE=3 SV=1
MSASLTVAIKQAARELGFDAVGISRLPTQANPATHRNHQDPEAGLLDRLQKWLRRGYHATMAWMVRDPERRADPTRVLPGCRSIISVGMNYYTDYRADERQGNGRIARYAWGRDYHKILGDRLAQLTERIGTLAAGSLNRAYVDTGPVMEKAWAQQAGLGWIGKHSNLVSTDFGSWLLLGEILTTLELEPDEAGSDLCGSCTLCIQACPTGAITEPYVVDAGRCISYLTIELRGTEPPIAEELRRKLGNRIFGCDDCLDICPYNVQARPTTEPGFQPSPLTAAPSLLALTKMDEQTFATTFTHSPIRRAKYAGLQRNLSWALSNETAPADRHSPAAPPSDDPR

SEQ ID NO: 78740 - protein, 326 aa, Nitrospira japonica
  misc_feature (1)..(326): tr|A0A1W1I5S2|A0A1W1I5S2_9BACT Epoxyqueuosine reductase OS=Nitrospira japonica OX=1325564 GN=queG PE=3 SV=1
MSLSAVIRQEAIALGFDAVGISSVAQSHSTTLLDRLEEWLARRYHGTMAWLARDPSRRADPTVVLPNCRSIVSVGLNYDTGHRATEGPGFGRIARYAWGRDYHRTLGDRLTLLENRIKALAPTAATRTYVDTGPVMEKAWAQQAGLGWIGKHSNLVSAQYGSWLLLGEVLTTLELTPDEPATDLCGNCRLCIQACPTGAIVEPYVVDARRCISYLTIEFRGAADMIEHEIRQQMGNHIFGCDDCLDVCPYNLQAEEKAVTAFSPAPLSLAPRLSELAELTDETFTERFRDSPIRRTKRDGLLRNVTIAQHNETRHTKNSPLLSPAE

SEQ ID NO: 78741 - protein, 327 aa, Nitrospira lenta
  misc_feature (1)..(327): tr|A0A330L226|A0A330L226_9BACT Epoxyqueuosine reductase OS=Nitrospira lenta OX=1436998 GN=queG PE=3 SV=1
MFAPAVTAMPLSRAIKQEALALGFDAVGITRVDTPASPQPTLATRLNQWLQRGYHATMAWIERTPEKRADPRIVLPGCHAIICVGMNYLTDERADERPGHGRIARYAWGQDYHDVLGKKLKQLEERIAALAPQAITRSYVDTGPIMEKAWAEQAGLGWIGKHSNLVSSDHGSWLLLGEILTTLELEPDEPATDLCGSCTLCIQACPTQAITEPYVVDANRCLSYLTIEHRGEAATIPNDLQRQFGNHIFGCDDCLDVCPFNLQAGFTREPAFYPSPLTQAPSLEHLAHMDDATFKSSFQRSPIRRAKLVGLQRNVAIARSNQPLHAP

SEQ ID NO: 78742 - protein, 331 aa, Nitrospira moscoviensis
  misc_feature (1)..(331): tr|A0A0K2G919|A0A0K2G919_NITMO Epoxyqueuosine reductase OS=Nitrospira moscoviensis OX=42253 GN=queG PE=3 SV=1
MALSRAIKEEARALGFDAVGIARSTVPDTHAQTLLARLTQWLERGYHGTMAWMARTPERRADPAQALPGCRSIISVGMNYLTDQRADERPGHGRIARYAWGKDYHTVLGDRLRQLERRIRELSPGAVTRSYVDTGPVMEKAWAEQAGLGWIGKHSNLVSSQFGSWLLLGEILTTLELEPDEPATDLCGSCTLCIQACPTQAIVEPYIVDATRCISYLTIELRGEHAAIPDDTRRRMGNKIFGCDDCLDVCPFNLRAEPTGEPAFQPTALTLTPRLDDLAGMNEAAFATLFQHSPIKRSKHAGLQRNIDIARRNQPSPVGASAPFPSKDREE

SEQ ID NO: 78743 - protein, 366 aa, Nitrospira sp.
  misc_feature (1)..(366): tr|A0A3C1MAK0|A0A3C1MAK0_9BACT Epoxyqueuosine reductase OS=Nitrospira sp. OX=70125 GN=queG PE=3 SV=1
MYSLRFRPLHRAIHGAIRVREAVMSASLTVAIKQAARELGFDAVGISLLPTQTNPAVNLNREASAGDLLDRLQEWLRRGYHATMAWMVRDPERRADPTRVLPGCRSIISVGMNYYTDYRADERQGNGRIARYAWGLDYHKILGDKLAQLAERIGALAPASLNRAYVDTGPVMEKVWAQQAGLGWIGKHSNLVSTDFGSWLLLGEILTTLELEPDEAGTDLCGSCTLCIQACPTGAITEPYVVDAGRCISYLTIELRGTEPPIAEDLRRELGNRIFGCDDCLDICPYNVQARPTTEPGFQPSPLTGAPSLLALTKMDEQTFATTFKHSPIRRAKYAGLQRNLSWALSNEPAPTDRHSTTPPPSADPR

SEQ ID NO: 78744 - protein, 379 aa, Nitrospira sp.
  misc_feature (1)..(379): tr|A0A256WXU3|A0A256WXU3_9BACT Epoxyqueuosine reductase OS=Nitrospira sp. UW-LDO-01 OX=2004993 GN=queG PE=3 SV =1
MPIDPLFSSLQCSVRLLNSTVNSPKLMSLTAAIKQQARTLGFDAIGIVRLANNDAPSTLTPQPLEPCSDNATKIVPQLYHRLTEWLRRGYHGTMTWMERAPDKRTDPRVVLPGCQSIIAVGINYLTDHRANEQPGHGRIARYAWGKDYHKVFKTRLKQLEEFIKILAPATHTRSYSDTGPLMEKAWAEQAGLGWIGKHSNLVSADHGSWLLLGEILTTVELEPDAPATDLCDSCTLCIQACPTNAIVQPYVIDATRCISYLTIELRGDESVIPQELHAGMGNKIFGCDDCLDVCPFNLRAEPTCETTFQPSPVTLAPSLDKLSRLDEQTFTTLFQQSPIRRAKIHGFQRNIAIAQKNAKRFEPPSRVSLSTTTAKPESH

SEQ ID NO: 78745 - protein, 318 aa, Nitrospiraceae bacterium
  misc_feature (1)..(318): tr|A0A354F613|A0A354F613_9BACT Epoxyqueuosine reductase OS=Nitrospiraceae bacterium OX=2026770 GN=queG PE=3 SV =1
MLMDTRSLTQEIKTFGLKLGFSHVGIASPDHSVWADRFRNWIKQGFHGEMGYMERSSERRIDPFAVFPEVKSVIVVSMNYYPGEKQRECLDNPGAGYIANYALNEDYHPVVETRLRELLQHIYEVTGGKVQGKIYADAGPILEKAYAVMAGIGWMGKNSLIINPETGSWIVLGVLLLDIELDFDKPIPDRCGECTRCMDACPTRAIVEPYMLDARRCISYILGELKGPIPVEIRPLIGNRVFGCDDCQWVCPWNEHVPVSNEAAFKPGNDLMSPGLMDLIQIVRDDDFKSRFKNSPIIRIKMERFLRNVSVALGNSTL

SEQ ID NO: 78746 - protein, 319 aa, Nitrospiraceae bacterium
  misc_feature (1)..(319): tr|A0A2E8GCR0|A0A2E8GCR0_9BACT Epoxyqueuosine reductase OS=Nitrospiraceae bacterium OX=2026770 GN=queG PE=3 SV =1
MVPDVNHDLSTRIKDKAYELGFNQVGISRADADGRAEDKLSVWLSRGFHGEMTWMERTADKRRNIKNVFPDIRSVVSVAVNYYTDHAPQETGGKGRISRYAWGDDYHYIITDWVRQLATWIDAEAEKEGIPCESRTYVDTGPILEKAWAQRAGIGWVGKHSNLVSAEYGSWLLLGEVLLTVDLEPDMPAPDQCGACRLCIEICPTDAIPEPYVLDATKCIAYLTIEHRGPIPAPYHFDMGNRIFGCDDCLDICPYNEHAVPTFERAFEPRTYALSPDLKELAEQTPAEFQITFKKSPLKRAKYEGLQRNVAIARKNDSQ

SEQ ID NO: 78747 - protein, 389 aa, Nitrospirae bacterium
  misc_feature (1)..(389): tr|A0A3M1R8Y0|A0A3M1R8Y0_9BACT tRNA epoxyqueuosine(34) reductase QueG OS=Nitrospirae bacterium OX=2026887 GN=q ueG PE=4 SV=1
MGRRPPLRLPRRRAAPPPGGARGAVAHGAAAREGERRGPGRGAGEGGGGPHPERLRGPPRRPRPHRPLRAAPGAGAPVARDPAEVVQALRAEARTLGIARLGVAAAVPRHRDHLERWLRLGRHGTMGYMAREPAVRADPRRLLPGARAVLCCAVHHDPAPERPAGPERVAIARYARGPDYHRVVHRLLRRLAATLDRLAPGHRHRVCVDTAPLLERAHAAAAGIGWIGKSTCLVHPRAGSYFLLGELLTTCPLPPDPPMADHCGTCTRCLDACPTGALVAPYELDARRCISYWTIEHRGPLPPEARLAGWAFGCDLCQEACPFNRFAPPGHPVLAPRPELVAPRLAELAAATAASFKGRFKGTPVVRAGKRQMLRNLAACAAEGGRNRG

SEQ ID NO: 78748 - protein, 352 aa, Nitrospirae bacterium
  misc_feature (1)..(352): tr|A0A1G1IEY4|A0A1G1IEY4_9BACT Epoxyqueuosine reductase OS=Nitrospirae bacterium RIFCSPLOWO2_02_FULL_62_14 OX= 1801717 GN=queG PE=3 SV=1
MSLSTTIKEEARALGFDAVGISRVEDDGARCEVQGSRLTEHPESQTSNFEPRTSLPWLLRTRLSEWLRRGYHGTMGWIAREPARRADPQAVLNGCLSVISVGMNYYADRRPDERPGNGRIARYAWGEDYHGVLQARLEQLENRIKSLAPEAATRSYVDTGPVMEKGWAQQAGFGWIGKHSNLVSTRYGSWLVLGEVLTTLDLEPDEPAADLCGSCTLCIKACPTGAITEPYVVDARRCISYLTIELHKPGDEIPADLAPKLGNRIFGCDDCLDVCPYNVNATPSAEPAFQPTATSLAPDLEQLAGMDDRTFASTFRKSPIRRAKHAGFMRNVRLALHHLPVPFTDPSVATKT

SEQ ID NO: 78749 - protein, 368 aa, Nocardia africana
  misc_feature (1)..(368): tr|A0A378WRD2|A0A378WRD2_9NOCA Epoxyqueuosine reductase OS=Nocardia africana OX=134964 GN=queG PE=4 SV=1
MSSTDREPAEAGRYAEHPTVKHLAAQGRKAPDPVLTAARLREICLAAGADDVGFVSVDDPRVAEEREHARGILPSARTFVAFCIRMNRDNLRSPMRSLANAEFNHADDETNVVSRRITRALEEAGYRAVYPAPGYPMEVEQFPGRVWVLAHKVVAEAAGLGVMGIHRNVIHPKFGNFILLGTVVTDAVVDEPSAALDFTPCLECKLCVSACPVGAITHDGGFDFQACYTHNYREFMGGFTDWAETVADSADRDDYRERVTRGESFSMWQSLSFKPNYKAGYCMAVCPAGEDVIGAFLDDRKTHLDEVVRPLQNKAETVYVLPGSAAEEHVTRRFPNKTPKPVGNGFGDEVNDLLDQIGPRPRRGTPPR

SEQ ID NO: 78750 - protein, 368 aa, Nocardia cerradoensis
  misc_feature (1)..(368): tr|A0A231H5A2|A0A231H5A2_9NOCA Epoxyqueuosine reductase OS=Nocardia cerradoensis OX=85688 GN=queG PE=4 SV=1
MSSTDREPTEAGRYAEHPTVKNLAAQPRRAPDPVLTAARLREICLAAGADDVGFVSVDDPKVAEEREHARGILPSARTFVAFCIRMNRDNLRSPMRSLANAEFNHADDETNGVSRRITRALEEAGYRAVYPAPGYPMEVEQFPGRIWVLAHKVVAEAAGLGVMGIHRNVIHPKFGNFILLGTVVTDAVVDEPSTALDFTPCLECKLCVSACPVGAITNDGGFDFQACYTHNYREFMGGFTDWAENVADSADRDDYRERVTRGESFSMWQSLSFKPNYKAGYCMAVCPAGEDVIGAFIDDRKTHLDEVVRPLQNKSETVYVLPGSAAEEHVTRRFPNKTPKPVGNGFGDDVNDLLDQIGPRPRRRDTPA

SEQ ID NO: 78751 - protein, 448 aa, Nocardia mexicana
  misc_feature (1)..(448): tr|A0A370GZY8|A0A370GZY8_9NOCA Epoxyqueuosine reductase QueG OS=Nocardia mexicana OX=279262 GN=DFR68_107177 PE =4 SV=1
MARRKKLDEHPTVLRVRERSGRPVRPSTPLDAEWLRDLALRSGADDVGFVEIERPELADERAEIDAALPGARALISFVCRLNRDSIRSPARSVANLEFHHGNDDTNDVARRIVTALERQGVRALNPSVGFPMEMDRFPDRMWVVSHKPVAVAAGLGRMGIHRNVIHPQFGNFVLLGTVVIDTEIGEYSRPIDFDPCLECKLCVSACPTGAISPDGHFDFSACYTHNYREFLGGFGDWVEQVADSRSAGDYRSKVADNETASMWQSLSFGANYKAAYCMSVCPAGEDVIGRYLDNSKEHLNDVVRPLQNKAETVYVVRGSDAEQHVAQRFPNKQAKLVARGLRPASIDGFVTGLPLLFQRGQARGMTATYHFTFTGAEQRRITVAIHDGDLDVTDGHQGEPDMRITADSRTWLRFLAKRSVLPRAILLGRLRIHGSPKLLLAFARCFPT

SEQ ID NO: 78752 - protein, 370 aa, Nocardia seriolae
  misc_feature (1)..(370): tr|A0A0B8N4G8|A0A0B8N4G8_9NOCA (4Fe-4S)-binding protein OS=Nocardia seriolae OX=37332 GN=queG PE=4 SV=1
MNGDELRWNRLHVPVERGTREHPHPSVAAARARVGGESDSEPAPLDADWLRERCLAAGIDDVGFVELSTPGLEGERDYVLEALPGTRSLIGFCLRTSRDNLQSRSVSAANRDVATTQELAHEAARHLCLELQRHGVRALYPAGGFPAEIHRYPNRSWVVSHKLVAVAAGLGQMGLHRNVIHPRFGTFIVLGTILLDRPISRYSRPTATNPCIDCGLCVTTCPVGAIHADGAFDFDACFTHNNHHELSNFAGWVEEVVDSKDAADYRRRVTPGETLSVWQSLSFQPQFRAGYCVAVCPAGEDVLGRYLADPDTHARDIVQPLLRKPEYVYVAPDSPAAAHVRDRFPHKTIRHSRRVEVPEPDIDPRPEPHA

SEQ ID NO: 78753 - protein, 349 aa, Nocardioides sp.
  misc_feature (1)..(349): tr|H0C134|H0C134_9BURK Epoxyqueuosine reductase OS=Noca rdioides sp. SLBN-35 OX=512030 GN=queG PE=3 SV=1
MQEWARELGFSQIGVAGVDLSAAEPGLEAWLAQGFHGDMHYMASHGLKRARPAELVPGTVSVITARMDYLPRDTAVHAPEGWQVVELSRLVRPQEGIVSVYARGRDYHKVLRARLQKLSDRIAEAIGPFGHRVFTDSAPVLEAELAARSGQGWRGKHTLVLNREAGSMFFLGEIYVDMALPRSAPVTAHCGSCSACIDVCPTQAIIAPHRIDARRCISYLTIEHAGPIPVELRPLMGNRIYGCDDCQLICPWNKFAQVSRLPDFDERKGLGGQQLVHLFAWDEPTFLRMTEGGPIRRIGHERWLRNVAVALGNALRATGDAAVRAALQSRADDPSELVREHVAWALDLG

SEQ ID NO: 78754 - protein, 348 aa, Nocardioides sp.
  misc_feature (1)..(348): tr|A0A542RX02|A0A542RX02_9BURK Epoxyqueuosine reductase OS=Nocardioides sp. SLBN-35 OX=512030 GN=queG PE=3 SV= 1
MREWARELGFSQIGVAGVDLSAAEPGLSHWLEQGFHGEMHYMAAHGLRRARPAELVPGTVSVITARMDYLPRDTALDAPEGWQAMELSRLTRPQEGIVSVYARGRDYHKVLRARLQKLSDRIAEAVGPFGHRVFTDSAPVLEAELAARSGQGWRGKHTLVLSREAGSMFFLGEIYVDMALPESAPVTPHCGSCSACIDVCPTQAIIAPHRLDARRCISYLTIEHAGPIPLELRPLIGNRIYGCDDCQLICPWNKFAQVSRLPDFDERQGLSGQQLVHLFAWDEPTFLRMTEGGPIRRIGHERWLRNVAVALGNALRATGDEALRTALKARADDPSALVREHVAWALEC

SEQ ID NO: 78755 - protein, 317 aa, Nodularia sp.
  misc_feature (1)..(317): tr|A0A218Q0V4|A0A218Q0V4_9CYAN Epoxyqueuosine reductase OS=Nodularia sp. NIES-3585 OX=1973477 GN=queG PE=3 SV= 1
MDQHSVTSSSVVKEKAKELGFHKVGITAVDGVDNTDAQRLQAWISLGYHADMEWMNSPKRQDMSLIMPEARSLISVALNYYTPDQRPEGEEYAKISRYGWGRDYHKVMHKKLKALMLWLESLGAGIQAKYYADTGPVQDKVWAQRAGIGWIAKNGNLITREYGSWVFLGEMITNLELESDRPHTEHCGSCTRCLDACPTGAITQPFVVDANRCIAYHTIENRSETLPETISSNLQGWVAGCDICQDVCPWNQRFAQTTDVADFQPYSGNIAPHLIELANISTHEWDQRFPASALRRIKPEMLRRNARANLDASKLNE

SEQ ID NO: 78756 - protein, 324 aa, Nodularia spumigena
  misc_feature (1)..(324): tr|A0ZK38|A0ZK38_NODSP Epoxyqueuosine reductase OS=Nodu laria spumigena CCY9414 OX=313624 GN=queG PE=3 SV=1
MDKHSVISSNVVKEKAKELGFHKVGITAVDGVDNTDAQRLQAWISLGYHADMEWMNSPKRQDISLIMPEARSLVCVALNYYTPDERPEGEEYAKISRYGWGRDYHKVMHKKLKALMLWLESLDAGIQARYYADTGPVQDKVWAQRAGIGWIAKNGNLITREYGSWVFLGEIVTNLELESDRPHTEHCGSCTRCLDTCPTGAITQPFVVDANRCIAYHTIENRSETLPETISSNLQGWVAGCDICQDVCPWNQRFAQTTDVADFQPYPANIAPGLIELANISTEEWNKRFPASALRRIKPEMLRRNARANLDASQLKNDPESNYF

SEQ ID NO: 78757 - protein, 324 aa, Nodularia spumigena
  misc_feature (1)..(324): tr|A0A161XPI5|A0A161XPI5_NODSP Epoxyqueuosine reductase OS=Nodularia spumigena CENA596 OX=1819295 GN=queG PE=3 SV=1
MDKHSVTSSSIVKEKAKELGFHKVGIAAVDGVDNTDAQRLQAWISLGYHADMQWMNSPKRQDISLIMPEARSLVCVALNYYTPDERPEGEEYAKISRYGWGRDYHKVMHKKLKALMLWLESLDAGIQARYYADTGPVQDKVWAQRAGIGWIAKNGNLITREYGSWVFLGEIVTNLELESDRPHTEHCGSCTRCLDTCPTGAITQPFVVDANRCIAYHTIENRSETLPETISSNLQGWVAGCDICQDVCPWNQRFAQTTDVADFQPYPANIAPGLIELANISTEEWNKRFPASALRRIKPEMLRRNARANLDASQLKNDPESNYF

SEQ ID NO: 78758 - protein, 375 aa, Nosocomiicoccus massiliensis
  misc_feature (1)..(375): tr|A0A2J6NG53|A0A2J6NG53_9STAP tRNA epoxyqueuosine(34) reductase QueG OS=Nosocomiicoccus massiliensis OX=12324 30 GN=queG PE=4 SV=1
MDYQKLKDEIIEYAHTIGIDEIGFTTAEPFHEFRDKLISYYENNYESGFEKGTIEERVNPKLSLPSARSIIAIAVGYPNRLPKDAPKSRKGERRGIFARSSWGFDYHHLLRTRLEKLEAFIKERVDGVETMSMVDTGVLSDREVALRSGLGFVGKNGFIINPKLGTWTYLGEMLISIPFPPDKPLVGTCGDCTICIDRCPTGALVGNGQLDSKKCISFLTQTKTFVPDEYRKSIGNRIYGCDTCQQVCPLNVGINTQQDDIILEPEILKPELTSLLKVSNREFKETYGHLAGVWRGKNPLQRNAIIALAHFKEESAIPTLKDVAENDVRPVIKGTAYWAIGQILGDRALDYIHERYSKETDEAVKEEMLKGIQEG

SEQ ID NO: 78759 - protein, 323 aa, Nostoc azollae
  misc_feature (1)..(323): tr|D7E0M1|D7E0M1_NOSA0 Epoxyqueuosine reductase OS=Nost oc azollae (strain 0708) OX=551115 GN=queG PE=3 SV=1
MNQCALNSSLVKEKAKEFGFHKVGIAAIEGIEKKDAQRLQAWTQLGYHAQMEWMKNPQRQDIRLVMPDVRSLVCVALNYYTPDQRPEGEEYAKISRYGWGRDYHKIMHKKLKQLATWLESLSEGIKARYYADTGPVQDKVWAERAGIGWIAKNGNVITREYGSWVFLGEVLTNIQLENDRQATQHCGTCTKCIQACPTGAITQPFVVDAKKCIAYHTIENRADTLPESLTPHLHGWVAGCDICQDVCPWNQRFAQVTDVTDFQPYNGNLAPKLVELAQISEEEWDKRFPASALRRIKPEMLRRNACANLDASRLKNDPESNNI

SEQ ID NO: 78760 - protein, 524 aa, Nostoc calcicola
  misc_feature (1)..(524): tr|A0A1U7IDU6|A0A1U7IDU6_9NOSO Epoxyqueuosine reductase OS=Nostoc calcicola FACHB-389 OX=1357508 GN=queG PE=3 SV=1
MNQCSVTSSLVKEKASELGFHKIGIAAVDRVDVTEAQRLKVWLALGYQADMEWMGNPKRQDIRLVMPEVRSLVCVALNYYTPHQRPEGKEYGKISRYGWGRDYHKVMHKKLKQLATWLKSLDESVQANYYADTGPVQDKVWAQQAGIGWIAKNGNVITREYGSWVFLGEVLTNLELESDRPHTEHCGSCTRCLQACPTGAITQPFVVDANRCIAYHTIENRAEELPQTLTPHLQGWVAGCDICQDVCPWNQRFAKTTDIAEFQPYPGNLAPQLLELAQISDREWDKRFPASALRRIKPEMLRRNARASLDASRPEMTQKVIIFDFDGTIADTVDALVSIANRLAVDFGYIQITPDQLALLKNLTSREIIKHSGVSLFKIPFLVKKVKGELKSKIPELKPIPGIKEALIELQAQGYKLGIITSNSKDNVTQFLQINDLNHLFDFIYSGITIFGKTTIINNVLRQKQLKPQDVIYVGDETRDIEASKKANIQVIAVTWGFNSPEVLAKQNPDYLIHKPSELLEVMK

SEQ ID NO: 78761 - protein, 324 aa, Nostoc carneum
  misc_feature (1)..(324): tr|A0A1Z4HYK5|A0A1Z4HYK5_9NOSO Epoxyqueuosine reductase OS=Nostoc carneum NIES-2107 OX=1973483 GN=queG PE=3 SV =1
MNNSGITTSDVVKKKAQELGFHQVGIAAVDGVDETAAQRLQAWLALGYNAEMAWMANPKRQDIRLVMPEARSLICVALNYYTPHQRPEGKEYAKISRYGWGRDYHKVMHKKLKALNNWVQSLSENVQVRYYADTGPVQDKLWAQKSGIGWIAKNGNVITREYGSWVFLGEMITNLELECDRPATEHCGTCTRCLEACPTGAITQPYVVDANRCIAYHTIENRAEQLPPNVKPHLQGWVAGCDICQDVCPWNQRFAKNTDVTEFNPYPGNLAPKLIELAEISEEEWEQQFTASALRRIKPEMLRRNARANLDASRQQNDADSDYF

SEQ ID NO: 78762 - protein, 324 aa, Nostoc commune
  misc_feature (1)..(324): tr|A0A2R5FUU2|A0A2R5FUU2_NOSCO Epoxyqueuosine reductase OS=Nostoc commune NIES-4072 OX=2005467 GN=queG PE=3 SV =1
MNQYSVTSSNVVKEKASELGFHKVGIAAVDRVDTTEAQRLQAWIELGYHADMEWMANPKRQDIRLVMPEARSLVCVALNYYTPHQRPEGEEYAKISRYGWGRDYHKVMHKKLKQLAVWLESLGEGVLARYYADTGPVQDKVLAQLAGIGWIAKNGNVITREYGSWVFLGEVLTNLELESDRPHTEHCGSCTRCLQACPTGAITQPFVVDANRCIAYHTIENRAKELPETVIPNLQGWVAGCDICQDVCPWNQRFANTTDIEEFQPNPGNIAPKLLELAQISDQEWDKRFPASALRRIKPEMLRRNALANLDASRRNNDPESNYF

SEQ ID NO: 78763 - protein, 324 aa, Nostoc cycadae
  misc_feature (1)..(324): tr|A0A2H6LN97|A0A2H6LN97_9NOSO Epoxyqueuosine reductase OS=Nostoc cycadae WK-1 OX=1861711 GN=queG PE=3 SV=1
MNQSSVTSSRTVKEQALDLGFHKVGIAAVDEVDNTEVQRLQAWIALGYHADMEWMDNPKRQDIRLVMPEARSLVCVALNYYTPHQRPQGEEYAKISRYGWGRDYHKVMHKKLKQLTTWLESLGEGVTARYYADTGPVQDKVWAQKAGIGWIAKNGNVITREYGSWVFLGEVVTNLELECDRPHTQHCGSCTRCLTACPTGAITQPFVVDANRCIAYHTIENRGEKLPEAIAPHLQGWVAGCDICQDVCPWNQRFAKTTDVADFQPYPGNIAPKLIELAKISDEEWDRQFPASALRRIKPEMLRRNARANLDASQQNNDSKSNCF

SEQ ID NO: 78764 - protein, 514 aa, Nostoc linckia
  misc_feature (1)..(514): tr|A0A1Z4L8L3|A0A1Z4L8L3_NOSLI Epoxyqueuosine reductase OS=Nostoc linckia NIES-25 OX=1091006 GN=queG PE=3 SV=1
MKEKASELGFHQIGIAAVDRVDVTEAQRLKAWLALGYHADMEWMSNPKRQDIRLVMPEVRSLVCVALNYYTPYERPQGEEYAKISRYGWGRDYHKVMHKKLKQLATWLESLDESVRAIYYADTGPVQDKVWAQKAGIGWIAKNGNVITREYGSWVFLGEVLTNLELESDRPHTEHCGSCTRCLQACPTGAITQPFVVDANRCIAYHTIENRAEELPQTLTPHLQGWVAGCDICQDVCPWNQRFAKTTDITEFAPYPQNLAPQLLELAQISDGEWNKRFPASALRRIKPEMLRRNAQANLDASRRKMTQKVIIFDFDGTIADTVDALVSIANRLAVDFGYIQITPDQLALLKNLTSREIIKHTGVSLFKIPFLVKKVKGELKNKIRELKPIPGIKEALIELQTQGYKLGIITSNSKENVTEFLKINDLDYLFDFIYSGITIFGKTTIINNVLKQKQLKPEDVIYVGDETRDIEASKKANIQVIAVTWGFNSPEVLAKQNPDYLIHRPSELLEVMK

SEQ ID NO: 78765 - protein, 307 aa, Nostoc linckia
  misc_feature (1)..(307): tr|A0A2C6UP09|A0A2C6UP09_NOSLI Epoxyqueuosine reductase OS=Nostoc linckia z16 OX=1628751 GN=queG PE=3 SV=1
MNSRTAYSDFIKSEAKRLGFLSCGISKAGFLEEEAPRLERWLTENRHGQMQYMENHFDKRLNPTLLVEGAKSVISLLLNYFPSQTQVDNTYKISKYAYGQDYHFVIKEKLRELLHSINENIGEVGGRAFVDSAPVLDKAWAARSGLGWIGKNSNLLSKQVGSFFFIAELIVDIELDYDTPVTDHCGTCTACIDACPTQAIIAPYVVDGSKCISYFTIELKENLPADMKGRFDGWAFGCDTCQDVCPWNRFSKTHREPLFEPHPELLSLSGQDWEELTEDTFRKVFKNSAVKRTKFEGLRRNINFLKE

SEQ ID NO: 78766 - protein, 324 aa, Nostoc minutum
  misc_feature (1)..(324): tr|A0A367RU60|A0A367RU60_9NOSO Epoxyqueuosine reductase OS=Nostoc minutum NIES-26 OX=1844469 GN=queG PE=3 SV=1
MNQCSVTSSSVVKNKAQELGFHKVGIAAVEKRDNTAAQRLQAWIALGYHADMEWMNNPKRQDISLVMPEARSLICVALNYYTPHQRPKSEEYAKISRYGWGRDYHKVMHKKLKALTSWLESLDPGILARYYADTGPVQDKVWAQRAGIGWIAKNGNVITREYGSWVFLGEILTNLELESDRPHTEHCGSCTRCLEACPTGAITQPFVVDANRCIAYHTIENRAEKLPETVTPHLQGWVAGCDICQDVCPWNQRFAQTTDVEDFQPYPGNLAPELIELAEISNEEWDRRFPASALRRIKPEMLRRNARANLDASKRKNDSESNYF

SEQ ID NO: 78767 - protein, 323 aa, Nostoc piscinale
  misc_feature (1)..(323): tr|A0A0M5MHE0|A0A0M5MHE0_9NOSO Epoxyqueuosine reductase OS=Nostoc piscinale CENA21 OX=224013 GN=queG PE=3 SV=1
MNQDSVTNQAIKEKAVELGFHKVGIAAVEGVDHTEVQRLQAWIALGYHADMKWMDNPKRQDIRLVMSEARSLVCVALNYYTPHQRPEGEEYAKISRYGWGRDYHKIMHKKLKQLNSWLESLGEGIKARYYADTGPVQDKVWAQTAGIGWIAKNGNVITREYGSWVFLGEIVTNLELEYDRPHTQHCGSCTRCLTACPTGAITQPFVVDANRCIAYHTIENRGEKLPEAIASHLQGWVAGCDICQDVCPWNQRFAQTTDVADFQPYPGNIAPKLIELAKISDEEWDQQFPASALRRIKPEMLRRNARANLDASRQNNDSESNCF

SEQ ID NO: 78768 - protein, 527 aa, Nostoc punctiforme
  misc_feature (1)..(527): tr|B2J278|B2J278_NOSP7 Epoxyqueuosine reductase OS=Nost oc punctiforme (strain ATCC 29133 / PCC 73102) OX=63737 GN=queG PE=3 SV=1
MSQYSVTSSSVVKEKASELGFHKVGIAAVDSIDATEAQRLQAWIELGYHADMEWMANPKRQDIRLVMPEARSLVCVALNYYTPHQRPEGEEYAKISRYGWGRDYHKVMHKKLKQLSTWLESLDESVRVRYYADTGPVQDKVLAQLAGIGWIAKNGNVITREYGSWVFLGEVLTNLELESDRPHTEHCGSCTRCLQACPTSAITQPFIVDANRCIAYHTIENRDEKLPQTLTSHLQGWVAGCDICQDVCPWNQRFASTTDIPEFQPYPGNIAPKLLELAQISDQEWNKRFPASALRRIKPEMLRRNALANLDASRQIMTPKVIIFDFDGTIADTVDALVSIANRLAVDFGYRHISPEQLSLLKNLTSREIIKYSGVSLFKIPFLVKKVKGELKNKIPELKPIPGIKEALIELQNKGYKLGIITSNSKDNVTQFLTINDLNHLFDFIYSGITIFGKTTIINNVLRQNQLQPQEVIYVGDETRDIEASKKANIQVIAVAWGFNSSEVLAKQNPDYLIQQPSELLEVMNGY

SEQ ID NO: 78769 - protein, 324 aa, Nostoc punctiforme
  misc_feature (1)..(324): tr|A0A367RG89|A0A367RG89_NOSPU Epoxyqueuosine reductase OS=Nostoc punctiforme NIES-2108 OX=1356359 GN=queG PE= 3 SV=1
MNQYFVTSSSLVKEKASELGFHKVGITAVDRVNATEAQRLQAWIELGYHADMKWMANPKRQDIRLVMPEVRSLVCVALNYYTPHQRPESEEYAKISRYGWGRDYHKVMHRKLKQLSLWLKSLDASVLAIYYADTGPVPDKVLAQQAGIGWIAKNGNVITREYGSWVFLGEVLTNLELESDRPHTEHCGSCTRCLQACPTGAITQPFVVDANRCIAYHTIENRDKELPEAIAPHLQGWVAGCDICQDVCPWNQRFAQTTDIEEFQPYPGNIAPHLLELAQISDREWDKRFPASALRRIKPEMLRRNALANLDASRQKNDPESNYF

SEQ ID NO: 78770 - protein, 346 aa, Nostoc sp.
  misc_feature (1)..(346): tr|K9QZE4|K9QZE4_NOSS7 Epoxyqueuosine reductase OS=Nost oc sp. (strain ATCC 29411 / PCC 7524) OX=28072 GN=queG PE=3 SV=1
MSVLNTLCIIVKPQFWQIFVIQIQHGSIVNSSVVKEKTKELGFHKVGIAAVDGGNHTEVERLQAWIRLGYHADMEWMANPKRQDISLVMPEARSLVCVALNYYTPHQRPPGKEYAKISRYGWGRDYHKVMHKKLKALTTWLQSLDPSIQARYYADTGPIQDKVWAQRAGIGWIAKNGNVITREYGSWVFLGEVVTNLELESDRPHTEHCGSCTRCLEACPTGAITQPFVVDANRCIAYHTIENRAEKLPAEITPHMQGWVAGCDICQDVCPWNQRFAQTTDVRDFEPYPENIAPKLLELAQISYEEWERKFPASALRRIKPEMLRRNARANLDASRQCNDTESNYL

SEQ ID NO: 78771 - protein, 324 aa, Nostoc sp.
  misc_feature (1)..(324): tr|A0A252DTA0|A0A252DTA0_9NOSO Epoxyqueuosine reductase OS=Nostoc sp. T09 OX=1932621 GN=queG PE=3 SV=1
MSKYAVISSDAIKEKAKELGFHKAGIAAVDGVDETAKQRLQAWIALGYNADMEWMANPKRQDIRLVMPEVRSLVSVALNYYTPHQRPEGEEYAKISRYGWGRDYHKVMHKKLKALSTWLQSLGEGVQARYYADTGPVQDKVWAQKAGIGWIAKNGNVITREYGSWVFLGEIFTNLELECDRPSTEHCGTCTRCLEACPTNAIINPYVVDANRCIAYHTIENRAEKLPQTVKSNLQGWVAGCDICQDVCPWNLRFAQGTDVAEFNPYPGNLAPKLIELAKITDEEWEQQFPASALRRIKPEMLRRNARANLDASRQQNDAESNYF

SEQ ID NO: 78772 - protein, 318 aa, Nostocales cyanobacterium
  misc_feature (1)..(318): tr|A0A1Y0RUA3|A0A1Y0RUA3_9CYAN Epoxyqueuosine reductase OS=Nostocales cyanobacterium HT-58-2 OX=1940762 GN=que G PE=3 SV=1
MNQSPGTNSTEVKEKALELGFHKVGIATIDGEDTTEAQRMRAWLALGYQADMEWMENPKRQDIRKIMPEVQTIISVALNYYTPHQRPDTEEYAKISRYAWGRDYHKVMHKKLKALTTWLQGLHEGIQARYYADTGPVQDKVWAQRAGLGWIAKNGNVITREYGSWVFLGEVLTNLELESDRPHTEHCGSCTRCLEACPTGAITQPFVVDANRCIAYHTIENRDETLPQTVTANLQGWVAGCDICQEVCPWNQRFAKETDVAEFEPYPGNLAPKLVELAQISDQEWDRRFPASALRRIKPQMLRRNAHANLNAFHRAKE

SEQ ID NO: 78773 - protein, 397 aa, Notoacmeibacter marinus
  misc_feature (1)..(397): tr|A0A231V190|A0A231V190_9RHIZ Epoxyqueuosine reductase OS=Notoacmeibacter marinus OX=1876515 GN=queG PE=3 SV= 1
MRTPISSGTERAGRLGAFLRREADALGFDGVAITAPDAIPQAAERLARFVAEGHHGTMGWMAETAERRAHPSALWSDVRSVVMLSLNYGPDHDPLPLLEQRDRANISVYARHRDYHDLIKGRLKTLASKLLARARQINEDDNSEVKVFVDTAPLMEKPLAEAAGLGWQGKHTNLVSRSHGSWLFLGAILTTLDLPRDEPESDHCGSCRACLDICPTDAFPAPYRLDARRCISYLTIEHDGVIPLSFREKMGNRIYGCDDCLAVCPWNKFASETKEAKLAARHDLTAPPLTDFLTMDDVSFRAFFPGSPIKRIGRDRFVRNVLIATGNSKDPALVPKVTKLLDDPSSQVRAMAVWALSRLDRQALSCHQHRAATEENDEVRAEWRTALVDGEKGAGAA

SEQ ID NO: 78774 - protein, 390 aa, Notoacmeibacter sp.
  misc_feature (1)..(390): tr|A0A3L7J8Y4|A0A3L7J8Y4_9RHIZ Epoxyqueuosine reductase OS=Notoacmeibacter sp. M2BS9Y-3-1 OX=2448481 GN=queG P E=3 SV=1
MRIPTSDQSARAERLRAFLHKEARALGFDGVAITRPDAIPQAAERLSHFVAEGRHGTMGWIAETAERRGSPTGLWPEVRSVIMLAVNYGPEENPLPLLQRKEKANVSVYARHRDYHDLIKGRLKTLASKLLARVRQMDAEDRNEVKVFVDTAPLMEKPLAEAAGLGWQGKHTNLVSREHGSWLFLGSILTTLDLPADQAEIDHCGSCRACLDICPTNAFPAPYQLDARRCISYLTIEHDGLIPLEFRPAMGNRVYGCDDCLAICPWNKFASETKEAKLAARHDLKAPPLADFLEMDDAAFRAFFSGSPVKRIGRDRFVRNVLVAAGNSGKTELVPLVEALLDDPAPQVRGMAVWALSRLDHATLACHQGDASTDEDGAVRHEWRQALSNG

SEQ ID NO: 78775 - protein, 383 aa, Novibacillus thermophilus
  misc_feature (1)..(383): tr|A0A1U9K7B6|A0A1U9K7B6_9BACL Epoxyqueuosine reductase OS=Novibacillus thermophilus OX=1471761 GN=queG PE=3 S V=1
MNASALKAELFAYAREIGIDKIGVCSAEPFDELRVRLTEHRKKGYDSGFEEKDIEKRVDPSLTVPGAQSIIAIAVAYPSKMPYNPAQAPGAYRGVMARVSWGQDYHHVLKERLQALKDFLLERIPHAKAEIMVDTGVLSDRAVAERAGLGWIGKNTALITPEFGSWVYLGEMVTDVFLPRDEPMSDGCGECTRCLDACPTAALVQPRQLNARRCLAYLTLTRGSLEEKDREKIGARLYGCDTCQTVCPYNQRVNATHQEEFRPDPETSKPLLKPLLCMTKSEFREKYGASSASWRGKKPIQRNAIIALAHFKDTTAVPELAKLLYEDPRPVIRETAAWALHKIGGEEAERVLITAESKETDPTVKRQLQQYLEGSNKNCTGRS

SEQ ID NO: 78776 - protein, 373 aa, Noviherbaspirillum autotrophicum
  misc_feature (1)..(373): tr|A0A0C2BJ93|A0A0C2BJ93_9BURK Epoxyqueuosine reductase OS=Noviherbaspirillum autotrophicum OX=709839 GN=queG PE=3 SV=1
MTISDDNLATLVLAIKAWGRELGFAQIGVADVDLTRAEPGLQAWLDAGYHGDMHYMATHGMKRARPADLVPGTVRVITARMNYLPRDMGDGWCEREVRKAEDAQAAVVSVYARGRDYHKVLRARLQQLAQRIEHEAGVFGYRVFTDSAPVMEVELAEKSGIGWRGKHTLLLNRDAGSMYFLGEILTDLPLPVDAPATRHCGQCRACIDICPTQAILGPCKLDARRCISYLTIELRGSIPVELRPLIGNRIYGCDECQLVCPWNKFAQRASLPDFDVRNGLDGATLVELFAWEEDDFNSRLEGSPIRRIGHECWLRNLAVGLGNTLRQAPDAAHIVAALQARAGHPSELVREHVAWALAQGSSSQAQPERQRQD

SEQ ID NO: 78777 - protein, 361 aa, Noviherbaspirillum denitrificans
  misc_feature (1)..(361): tr|A0A254TD91|A0A254TD91_9BURK Epoxyqueuosine reductase OS=Noviherbaspirillum denitrificans OX=1968433 GN=queG PE=3 SV=1
MTAPDNNLSTLAFAIKAWGRELGFADIGIAGIDLGHTEAGLQAWLDAGFHGEMDYMAAHGMKRARPAELVPGTVRVITARMNYLPRDSADDWREDEVRRASDSRQAVISIYARGRDYHKVLRARLQQLADRIRAEVGDFGYRVFTDSAPVMEVALAEQSGTGWRGKHTLMLHREAGSMFFLGELFTDLPLPVDPPGTSHCGQCRACIDICPTQAILGPYKLDARRCISYLTIELKGSIPVELRSLIGNRVYGCDDCQLVCPWNKFAQRSTLPDFDPRNGLEHATMVELFGWEEDEFNRRLEGSPIRRIGHERWLRNLAVGMGNAARQYRGDPGIVAALEARSGHPSPMVREHVDWALGCHR

SEQ ID NO: 78778 - protein, 369 aa, Noviherbaspirillum humi
  misc_feature (1)..(369): tr|A0A239KBV7|A0A239KBV7_9BURK Epoxyqueuosine reductase OS=Noviherbaspirillum humi OX=1688639 GN=queG PE=3 SV= 1
MDMIATDIDLNALAAAIKAWGRELGFADIGIADTDLSASEAGLQAWLDAGHHGEMDYMAAHGMKRARPAELVPGTMRVITARMNYLPRATDQQRWREQEAQRGADPSAAVISVYARGRDYHKVLRARLQQLAERIRTEIGEFGFRAFTDSAPVMEVGLAEKSGMGWRGKHTLLLSREAGSMFFLGEIYTDLPLPVDAPVTSHCGQCSACIAACPTGAIVAPYQLDARRCISYLTIELKGSIPAELRPLIGNRVYGCDDCQLACPWNKFAQVASLPDFDVRNGLDAAGMIALFAWDEEDFNRRLEGSPIRRIGHERWLRNLAVGLGNALARQPAPEIVAALRTREQHPSELVREHVAWALAQAGSSPHQA

SEQ ID NO: 78779 - protein, 360 aa, Noviherbaspirillum sp.
  misc_feature (1)..(360): tr|A0A3A3G2F8|A0A3A3G2F8_9BURK Epoxyqueuosine reductase OS=Noviherbaspirillum sp. K1S02-23 OX=2320865 GN=queG PE=3 SV=1
MTSQPDIAALAQAIPAWGRELGLAEVRIAGIDLTQEEAGLQAWLDAGMHGEMDYMASHGMKRARPAELVPGTLRVITARLDYLSQAGAQDWRVAERQRQADAGAAVVSVYARGRDYHKVLRSRLQRLAERIAQTAGPFGYRVFTDSAPVLEVALAGQAGLGWRGKHTLLLNRQAGSMFFLGEIYTDLPLPVDVPVDAHCGTCHACIDACPTQAIVGPYRLDARRCISYLTIELKGSIPEELRPLIGNRVYGCDDCQLACPWNKFAQRAVLPDFEVRNGLDGAGLVELFAWSEEEFNRRLEGSPIRRIGHERWLRNIAVALGNAATAGKAQPDMVAALQSRADHPSELVREHVAWALAQHQ

SEQ ID NO: 78780 - protein, 362 aa, Noviherbaspirillum sp.
  misc_feature (1)..(362): tr|A0A5B8N2W5|A0A5B8N2W5_9BURK Epoxyqueuosine reductase OS=Noviherbaspirillum sp. UKPF54 OX=2601898 GN=queG PE =3 SV=1
MTISDDNLATLALAIKAWGRELGFAQIGVADVDLARAEPGLQAWLDAGCHGDMHYMATHGMKRARPADLVPGTVRVITARMNYLPRDMGDGWCEREQRKADDAQAAVISVYARGRDYHKVLRARLQQLAQRIEREAGVFGYRVFTDSAPVMEVELAEKSGIGWRGKHTLLLNRDAGSMYFLGEILTDLPLPVDEPTTRHCGQCRACIDICPTQAILGPYQLDARRCISYLTIELRGPIPVELRPLIGNRVYGCDECQLVCPWNKFAQRASLPDFDVRNGLDGATLVELFAWEEDDFNRRLEGSPIRRIGYECWLRNLAVGLGNALRQEPDAQHIIAALKARSGHPSELVREHVAWALEQAGK

SEQ ID NO: 78781 - protein, 354 aa, Novimethylophilus kurashikiensis
  misc_feature (1)..(354): tr|A0A2R5FDL5|A0A2R5FDL5_9PROT Epoxyqueuosine reductase OS=Novimethylophilus kurashikiensis OX=1825523 GN=queG PE=3 SV=1
MQSDSFDFSQLASDIKAWGHALGFQAIGICDTDLSQAEPEFTAWLEQGFHGEMDYMARHGLKRLRPAELVPGTRRVITARMDYLPEQVESSETVMQDASRAFISRYALGRDYHKVLRSRLQQLCDRIAECVGEFGYRVFTDSAPVAEVHLAEKSGIGWRGKHTLLLSRDAGSWFFLGEIFTDLPLPADEATTSHCGSCSACITACPTGAIVAPYQVDARRCISYLTIELQGSIPEQLRPLMGNRIYGCDDCQLCCPWNKFAQLSVEPDFQARHGLDAASLRELFAWDQSAFETMTAGSAIRRIGHERWLRNIAVALGNAETAPENIAALESRADHPSPLVQEHVSWALARLRSK

SEQ ID NO: 78782 - protein, 349 aa, Novosphingobium aromaticivorans
  misc_feature (1)..(349): tr|Q2GBV8|Q2GBV8_NOVAD Epoxyqueuosine reductase OS=Novo sphingobium aromaticivorans (strain ATCC 700278 / DSM 1 2444 / CIP 105152 / NBRC 16084 / F199) OX=279238 GN=que G PE=3 SV=1
MVKTAVTSLEDRLKAEATRLGFAVCGIAPAADDPLRAERLEQWLGEGRHGSMEWMETRLHHRRGPQSLWPEARSVIALGMSYAPADDPRRLADAGDRGRISVYAQGADYHDVIKRNLKALARWLVAEEPGAGVKVFVDTAPVMEKPLGQMAGLGWQGKHTNLVSRSHGSWLFLGAIYTTLGLDLDAPHADRCGSCTACQTACPTEAFPAPYRLDARRCISYLTIEHKGPVPEEFRKALGNRIYGCDDCLAACPWNSFATTAQANRAFLPRAELAAPRLAELLALDDATFRQVFSGSPIKRIGRDRMVRNCLYAAGNSGDRALLPVVHNLLADPDPAVADAARWALVELG

SEQ ID NO: 78783 - protein, 363 aa, Novosphingobium barchaimii
  misc_feature (1)..(363): tr|A0A147EK66|A0A147EK66_9SPHN Epoxyqueuosine reductase OS=Novosphingobium barchaimii OX=1420591 GN=queG PE=3 SV=1
MVKSDLTAPDPARFIAALQEEARSVGFVAFGIAPAGFDPIHGDRLSAWLAQGMHGSMEWMADRAHQRRAPQALWPEARSVIALGMSYAPAGDPLKLADHTDRARISAYAQGADYHDALKKALKALARWMVAQAPRHGMGDPGVKVFTDTAPVMEKPLAQAAGLGWQGKHTNLVSRDHGSWLFLGEIYTTLDLPPDAPGQDRCGSCSACQDACPTQAFPAPYRLDARRCISYLTIEHKGPVPQDLREKLGNRIYGCDDCLAVCPWNKFAREARSFRAYLPRAELTAPELRDLLTLDDAGFRALFSGSPIKRIGRNRFVRNCLYAAGNSGRQDLLAQVQPLCDDADAVVADAARWAVRRITSTAT

SEQ ID NO: 78784 - protein, 373 aa, Novosphingobium barchaimii
  misc_feature (1)..(373): tr|A0A0J7XUF7|A0A0J7XUF7_9SPHN Epoxyqueuosine reductase OS=Novosphingobium barchaimii LL02 OX=1114963 GN=queG PE=3 SV=1
MTSPGSNISAHDGADLVKAKLNAFAKDAEAQARALGFCAFGIASAATDDARAARLDAWLAAGMHGTMGWMEERAHHRRSPQGMWPEARSVIALGMSYAPAADPLRLEGEPQIGRISTYAQGADYHDVVKKALKHLSRWIVAEGQARKIAPEVGVKVFTDTAPVMEKPLAASAGLGWQGKHTNVVSREHGSWLFLGEIYTTLEFEPAKPGRDSCGSCSACQDACPTNAFPAPYRLDARRCVSYLTIEHKGPVPEDLREGLGNRIYGCDDCLAVCPWNKFAQVSHTIKAYLPRAELTAPELADLLTLDDAGFRTLFSGSPIKRIGRNRFVRNCLYAAGNSGRAALLAPVEALLGDDDPVVAEAAQWARARLGAPA

SEQ ID NO: 78785 - protein, 355 aa, Novosphingobium fuchskuhlense
  misc_feature (1)..(355): tr|A0A117UWH9|A0A117UWH9_9SPHN Epoxyqueuosine reductase OS=Novosphingobium fuchskuhlense OX=1117702 GN=queG PE =3 SV=1
MVNGAETTLEDRIRAEAHRLGFAACGIAPAADDALRAARLEQWLAEGNHGSMEWMETRLEHRRGPQSLWPEAKSVIALGMSYAPAADPMVLAEAKDRARISVYAQGADYHDVVKRALKALARWIVADVPGAEVKVFVDTAPVMEKPLGEAAGIGWQGKHTNLVSRGHGSWLFLGAIYTTLALEPDAPHADRCGSCTACQRACPTDAFPAPYRLDARRCISYLTIEHKGPIPDAFRAAMGNRIYGCDDCLAVCPWNRFASTAATNKAFLPRAELAAPRLAELLVLDDAAFRALFAGSPIKRIGRDRFVRNCLYAAGNSGDPGLLAPVQRLLADPDPAVADAASWALDRLAEAMPVP

SEQ ID NO: 78786 - protein, 353 aa, Novosphingobium ginsenosidimutans
  misc_feature (1)..(353): tr|A0A5B8S3H2|A0A5B8S3H2_9SPHN Epoxyqueuosine reductase OS=Novosphingobium ginsenosidimutans OX=1176536 GN=que G PE=3 SV=1
MVNAAEIAALKADLAREARRLGFAACGVTAAAEDPLRAARLEEWLDQGRHGDMDWMEARAHHRRSPQGLWPEAQRVIALGMSYAPSADPLLERAGRARISVYAQGADYHDTVKKALKALARWLVAEAANRGLGEIGVKVFVDTAPVMEKPLGEAAGLGWQGKHTNLVSREHGSWLFLGAIYTTLALPVDDAGQDRCGSCSACQTACPTDAFPAPYQLDARRCISYLTIEHKGPVPEEFRPALGNRIYGCDDCLAVCPWNKFASTAHTMRAFLPRAELAAPRLADLLALDDAAFRKLFSGSPIKRIGRDRFVRNCLYAAGNSGDPALTPQVQALAGDPDPVVAEAAAWALAQLT

SEQ ID NO: 78787 - protein, 346 aa, Novosphingobium guangzhouense
  misc_feature (1)..(346): tr|A0A2K2FZB7|A0A2K2FZB7_9SPHN Epoxyqueuosine reductase OS=Novosphingobium guangzhouense OX=1850347 GN=queG PE =3 SV=1
MEGEARALGFCAFGVASAAPDEDRAARLDAWLAAGMHGSMGWMEERAHHRRSPQGLWPEARSVIALGMSYAPAADPLRLADEGGIGRISTYAQGADYHDTVKKALKNLARWMVSEGEKRGLGPLDVKVFTDTAPVMEKPLAAAAGLGWQGKHTNVVSREHGSWLFLGEIYTTLELPVSAPARDRCGSCRACQDACPTDAFPAPYRLDARRCVSYLTIEHKGPVPEDMREGLGNRIYGCDDCLAVCPWNKFAETAHTMKAFLPRAELTAPELADLLTLDDAGFRKLFSGSPIKRIGRDRFVRNCLYAAGNSGRRALLDQVERLKEDADPAIADAARWAAVRLGSSPD

SEQ ID NO: 78788 - protein, 352 aa, Novosphingobium kunmingense
  misc_feature (1)..(352): tr|A0A2N0H5I2|A0A2N0H5I2_9SPHN Epoxyqueuosine reductase OS=Novosphingobium kunmingense OX=1211806 GN=queG PE=3 SV=1
MQTQSLKHDLAQEARRLGFVACGVTAGTEDPSRAARLEQWLGEGMHGAMEWMETRAHHRRSPEGLWPKARSVIALGMSYAPAHDPLALEAEPSRARISVYAQGRDYHDTVKKALKALARWLVDEAKARGLGTVGVKVFVDTAPVMEKPLGQAAGLGWQGKHSNLVSRQHGSWLFLGAIYTTLELSPDGAEDDRCGSCTACQAACPTDAFPRPYVVDARRCISYLTIELKEAVPVEFRKALGNRIYGCDDCLAVCPWNKFADTAHRMQAFLPRAELVAPRLADLLALDDAGFRALFSGSPIKRIGRARFVRNCLYAAGNSGDAALRAPVAALTADPDPVVADAARWALAELSV

SEQ ID NO: 78789 - protein, 371 aa, Novosphingobium lindaniclasticum
  misc_feature (1)..(371): tr|T0IES1|T0IES1_9SPHN Epoxyqueuosine reductase OS=Novo sphingobium lindaniclasticum LE124 OX=1096930 GN=queG P E=3 SV=1
MVNDALNALARDLEAQARELGFCAFGVAAAEEDADRAARLDAWLADGMHGSMDWMADRAHHRRSPQGLWPEARRVIALGMSYAPAGDPLSLAEVPEVGRISVYAQGADYHDWVKKALKNLARWLVSEADKRRLGPAGVKVFTDTAPVMEKPLAAAAGLGWQGKHTNMVSREHGSWLFLGEIYTTLELPLSAEGRDRCGSCRACQDACPTQAFPSPYRLDARRCVSYLTIEHKGPIPEEFRVGLGNRIYGCDDCLAVCPWNKFAETAHRLKAFLPRAELTAPRLAELLTLDDAGFRKLFSGSPIKRIGRDRFVRNCLYAAGNSGNAALMAQVAPLQADPDPAVAEAARWAAQRLKASPPTGGEDPPKLTEAP

SEQ ID NO: 78790 - protein, 345 aa, Novosphingobium malaysiense
  misc_feature (1)..(345): tr|A0A0B1ZNH4|A0A0B1ZNH4_9SPHN Epoxyqueuosine reductase OS=Novosphingobium malaysiense OX=1348853 GN=LK12_0546 0 PE=4 SV=1
MEAEARMLGFCAFGIAPASDDPDRAARLDSWLQEGMHGTMGWMEERAHHRRSPQGLWPEAKSVIALGMSYAPADDPLHLADKSEVGRISIYAQGADYHDTVKKALKHLARWIVAETEKRGLGEAGVKVFTDTAPVMEKPLAATAGLGWQGKHTNMVSRDHGSWLFLGEIYTTLDLPVSNMGRDRCGSCRACQDVCPTDAFPAPYRLDARRCVSYLTIEHKGPVPEDLREGLGNRIYGCDDCLAVCPWNKFAETAHTMKAFLPRAELAAPDLADLLTLDDAGFRKLFSGSPIKRIGRNRFVRNCLYAAGNSKRPGLLAQVEPLLEDPDPVVAEAAHWARDRLTAVP

SEQ ID NO: 78791 - protein, 366 aa, Novosphingobium mathurense
  misc_feature (1)..(366): tr|A0A1U6IP96|A0A1U6IP96_9SPHN Epoxyqueuosine reductase OS=Novosphingobium mathurense OX=428990 GN=queG PE=3 S V=1
MVNSALVDVAPDTFIEDLLAQARSLGFCAFGVASASEDPVRAQRLETWLDEGMHGSMAWMKERAHHRRSPQELWPQARSVIALGMSYAPAADPLAHADRPEIARISVYAQGADYHDTVKKALKHLARWIVSEGEKRGLGGEDGSVGVKVFTDTAPVMEKPLGAAAGLGWQGKHTNMVSREHGSWLFLGEIYTTLDLAPSSPGRDRCGSCSACQDACPTQAFPAPYRLDARRCISYLTIEHKGEIPLEFREALGNRIYGCDDCLAVCPWNKFAQVAHVHRTFLPRGELTAPPLADLLTLDDAGFRKLFSGSPIKRIGRDRFVRNCLYAAGNSQRPDLLEQVGPLLDDPDPAVADAAQWAADKLQGVV

SEQ ID NO: 78792 - protein, 354 aa, Novosphingobium nitrogenifigens
  misc_feature (1)..(354): tr|F1Z4F3|F1Z4F3_9SPHN Epoxyqueuosine reductase OS=Novo sphingobium nitrogenifigens DSM 19370 OX=983920 GN=queG PE=3 SV=1
MVNNAAELVRKIRTEAENCGFVACGIAPAREDPLRASRLEQWLGEGCHGSMEWMETRLEHRRSPQGLWPQAQSVIALGMSYAPAADPRTLGAHADHGRISTYALGADYHDVVKRALKALARWLVAEVPGAEVKVFVDTAPVMEKPLGAAAGIGWQGKHTNLVSRRHGSWLFLGAIYTSLPLPADTPHADRCGSCSACQDACPTKAFPAPYRLDARRCVSYLTIEHKGPVPEDLRAGLGNRIYGCDDCLAACPWNSFAQAGAANRAFLPRAELTAPRLADLLRLDDAGFRALFSGSPIKRIGRDRFVRNCLYAAGNSRDPALFDEVRRLLDDPDPAIADAADWALDRLTAALPVP

SEQ ID NO: 78793 - protein, 371 aa, Novosphingobium pentaromativorans
  misc_feature (1)..(371): tr|A0A2W5NJA6|A0A2W5NJA6_9SPHN Epoxyqueuosine reductase OS=Novosphingobium pentaromativorans OX=205844 GN=queG PE=3 SV=1
MVNDALNALTRDLEVQARELGFCAFGVASAEEDPARAARLDSWLAAGMHGSMEWMADRAHHRRSPQGLWPEARRVIALGMSYAPSADPLALADVPEVGRISVYAQGADYHDWVKKALKNLARWLVSEADRRGLGPAGVKVFTDTAPVMEKPLAAAAGLGWQGKHTNMVSRDHGSWLFLGEIYTTLELPLSTEGRDRCGSCRACQDACPTQAFPAPYRLDARRCVSYLTIEHKGPIPEEFREGLGNRIYGCDDCLAVCPWNKFAETAHRLKAFLPRAELTAPRLAELLALDDAGFRKLFSGSPIKRIGRDRFVRNCLYAAGNSGNAAFMTQVSALRDDPDPAVAEAAQWAARRLQASPPRGGEDPVASTAIP

SEQ ID NO: 78794 - protein, 361 aa, Novosphingobium pentaromativorans
  misc_feature (1)..(361): tr|G6EC09|G6EC09_9SPHN Epoxyqueuosine reductase OS=Novo sphingobium pentaromativorans US6-1 OX=1088721 GN=queG PE=3 SV=1
MVDVAPDTFIEDLQAQARSLGFCALGIASASEDPVRAQRLETWLDDGMHGSMAWMKERAHHRRSPQGLWPEARSVIALGMSYAPAADPLAHADRPEIARISVYAQGADYHDTVKKALKHLARWIVLEGEKRGLGGADGSVGVKVFTDTAPVMEKPLGAAAGLGWQGKHTNMVSREHGSWLFLGEIYTTLDLAPSTPGRDRCGSCSACQDACPTQAFPAPYRLDARRCISYLTIEHKGEIPLEFREALGNRIYGCDDCLAVCPWNKFAQVAHVHRTFLPRGELAAPPLADLLTLDDAGFRKLFSGSPIKRIGRNRFVRNCLYAAGNSKRPDLLEQVGPLLNDPDPAVAGAAQWAASKLQSVP

SEQ ID NO: 78795 - protein, 382 aa, Novosphingobium resinovorum
  misc_feature (1)..(382): tr|A0A031K0W5|A0A031K0W5_9SPHN Epoxyqueuosine reductase OS=Novosphingobium resinovorum OX=158500 GN=queG PE=3 SV=1
MKPPGSSTCAPDGAVPVKTALSNFAEAVEGEARALGFCAFGVASAATDEDRAARLDAWLAAGMHGSMGWMEERAHHRRSPQGLWPEARSVIALGMSYAPATDPLRLAEEGGIGRISTYAQGADYHDTVKKALKNLARWMVSEGDKRGLGPVGVKVFTDTAPVMEKPLAAAAGLGWQGKHTNVVSREHGSWLFLGEIYTTLDLPLSAPARDRCGSCRACQDACPTDAFPAPYRLDARRCVSYLTIEHKGPVPEDMREGLGNRIYGCDDCLAVCPWNKFAETAHTMKAFLPRAELTAPELADLLTLDDAGFRKLFSGSPIKRIGRDRFVRNCLYAAGNSGRKVLLAQVEPLLADADDAVADAARWAREKLRSSLSRSDGEVAAT

SEQ ID NO: 78796 - protein, 346 aa, Novosphingobium resinovorum
  misc_feature (1)..(346): tr|A0A1D8A5Y8|A0A1D8A5Y8_9SPHN Epoxyqueuosine reductase OS=Novosphingobium resinovorum OX=158500 GN=queG PE=3 SV=1
MEGEARALGFCAFGVASAATDEDRAARLDAWLAAGMHGSMGWMEERAHHRRSPQGLWPEARSVIALGMSYAPAADPLRLADEGGIGRISAYAQGADYHDTVKKALKNLARWMVSEGDKRGLGPVGVKVFTDTAPVMEKPLAAAAGLGWQGKHTNVVSREHGSWLFLGEIYTTLDLPLSAPARDRCGSCRACQDACPTDAFPAPYRLDARRCVSYLTIEHKGPVPEDMREGLGNRIYGCDDCLAVCPWNKFAETAHTMKAFLPRAELTAPELADLLTLDDAGFRKLFSGSPIKRIGRDRFVRNCLYAAGNSGRKVLLAQVEPLLADADDAVADAARWARGKLTSSRT

SEQ ID NO: 78797 - protein, 355 aa, Novosphingobium sediminis
  misc_feature (1)..(355): tr|A0A512AII3|A0A512AII3_9SPHN Epoxyqueuosine reductase OS=Novosphingobium sediminis OX=707214 GN=queG PE=3 SV =1
MVNSAETTLASRIKAEAARLGFAACGIAPATDDPVRAERLEQWLAEGSHGSMEWMETRFEHRRGPQSLWPAARSVIALGMSYAPAADPLALAEARDRARISVYAQGADYHDVVKRALKALARWLVAEVPGAEVKVFVDTAPVMEKPLGEVAGIGWQGKHTNLVNRQHGSWLFLGAIYTTLDLPPDAPHADHCGSCTACQRACPTDAFPAPYRLDARRCISYLTIEHKGPIPAEFRAALGNRIYGCDDCLAVCPWNSFASTAATNKAFLPRAELTAPRLAELLALDDAAFRALFAGSPIKRIGRDRFVRNCLYAAGNSSHAALMAPVQRLLGDPDPAVADAASWALDRLAEAMPVP

SEQ ID NO: 78798 - protein, 105 aa, Novosphingobium sp.
  misc_feature (1)..(105): tr|A0A5C7U6K8|A0A5C7U6K8_9SPHN DUF1730 domain-containin g protein (Fragment) OS=Novosphingobium sp. OX=1874826 GN=E6Q63_06670 PE=4 SV=1
MTLEGKLAAEATRLGFAACGVAPADDDPLRAARLEQWLGEGCHGSMEWMETRLHHRRGPQSLWPDAKSVIALGMSYAPAADPRALEAHPERGRISVYAQGCDYHD

SEQ ID NO: 78799 - protein, 343 aa, Novosphingobium sp.
  misc_feature (1)..(343): tr|A0A3B7DUL7|A0A3B7DUL7_9SPHN Epoxyqueuosine reductase OS=Novosphingobium sp. THN1 OX=1016987 GN=queG PE=3 SV =1
MTLEGKLAAEATRLGFAACGIAPADDDPLRAARLEQWLGEGCHGAMEWMETRLHHRRGPQSLWPDAKSVIALGMSYAPAADPRALEAHPERGRISVYAQGGDYHDVVKRNLKALARWLMAEVPGAEVKVFVDTAPVMEKPLGQMAGIGWQGKHTNLVSRTHGSWLFLGAIYTTLELTPDVPHADRCGSCTACQTACPTNAFPKPYQLDARRCISYLTIEHKGPVAEEFRAALGNRIYGCDDCLAACPWNSFARAAQANRAFLPRGELTAPKLAELLALDDATFRQVFSGSPIKRIGRDRMVRNCLYAAGNSGDRALLPVVQGLCGDPDPAVADAARWAVERLA

SEQ ID NO: 78800 - protein, 369 aa, Novosphingobium subterraneum
  misc_feature (1)..(369): tr|A0A0B9AEF4|A0A0B9AEF4_9SPHN Epoxyqueuosine reductase OS=Novosphingobium subterraneum OX=48936 GN=queG PE=3 SV=1
MVNSSPTLEGREATPGGRGATPGSERLTLEGKLAAEATRLGFAACGIAPAHDDPLRAARLEQWLGEGCHGSMEWMETRLHHRRGPQSLWPDARSVIALGMSYAPAADPRALEAHPERGRISVYAQGGDYHEVVKRNLKALARWLVAEVPGAEVKVFVDTAPVMEKPLAQAAGIGWQGKHTNLVSRTHGSWLFLGAIYTTLDLTPDAPHADRCGSCTACQTACPTNAFPKPYQLDARRCISYLTIEHKGPVAEEFREALGNRIYGCDDCLAACPWNSFARAAQANRAFLPRAELTAPKLKELLALDDATFRQVFSGSPIKRIGRDRMVRNCLYAAGNSGERALLPAVTALADDPDPAVADAARWAVARLA

SEQ ID NO: 78801 - protein, 332 aa, Novosphingobium taihuense
  misc_feature (1)..(332): tr|A0A562JSA9|A0A562JSA9_9SPHN Epoxyqueuosine reductase OS=Novosphingobium taihuense OX=260085 GN=queG PE=3 SV =1
MRLGFAACGIAPAEDDPLRAARLEQWLGEGHHATMEWMETRLHHRRGPQSLWPEAKSVIALGMSYAPASDPRALEARPDRGRISVYAQGGDYHDVVKRNLKALARWLVAEVPEAQVKVFVDTAPVMEKPLGQLAGIGWQGKHTNLVSRTHGSWLFLGAIYTTLELAADAPHADRCGSCTACQTACPTDAFPQPYQLDARRCISYLTIEHKGPVPQEFRAALGNRIYGCDDCLAACPWNSFAQAAQANRAFLPRAELAAPKLAELLALDDATFRQVFSGSPIKRIGRDRMVRNCLYAAGNSGDRTLLPSVTALAKDPDPAVADAARWAMDRLA

SEQ ID NO: 78802 - protein, 358 aa, Novosphingobium tardaugens
  misc_feature (1)..(358): tr|U2ZTQ4|U2ZTQ4_9SPHN Epoxyqueuosine reductase OS=Novo sphingobium tardaugens NBRC 16725 OX=1219035 GN=queG PE =3 SV=1
MVNNTATNALKDRFIAEARRQGFVAIGFAPAVDDALRGQRLDAWLADGAHGDMGWMADRADVRRGPAAMWPEARSVIALGMSYAPAIDPMALDGVPDRARISTYAQGADYHDVMKKALKRLARWLVAEAAQDGLGEIRLKLFVDTAPVMEKPLAAQAGLGWQGKHTNLVSRTHGSWLFLGAIYCTIDFPADAPHDDRCGSCDACQQACPTAAFPAPYQLDARRCISYLTIELKGPIPREFRKAMGNRIYGCDDCLAACPWNKFAQVGARNRAFLPRAELTAPRLAELLTLDDAGFRALFSGSPIKRIGRDRFVRNCLIAAGNSGDQALLAPVAALVADPDPVVAEAAAWALAELTAVP

SEQ ID NO: 78803 - protein, 381 aa, Obesumbacterium proteus
  misc_feature (1)..(381): tr|A0A4Q9DBU1|A0A4Q9DBU1_9GAMM Epoxyqueuosine reductase OS=Obesumbacterium proteus OX=82983 GN=queG PE=3 SV=1
MTHPLDLNQLAQHIKQWGQSLGFQQVGICDTDLSVEEPRLQAWLDKQYHGEMEWMARHGMMRARPHELHPGTLRVISVRMNYLPANASFAKTLKNPQLGYVSRYALGRDYHKLLRNRLKRLGDMIQEYCVGIDVNSRPFVDSAPILERPLAAKAGIGWVGKHSLILNKEAGSWFFLGELLLDLPLPVDKPQDEQCGRCVACITTCPTGAIIEPYVVDARRCISYLTIELESAIPEEFRPLMGNRIYGCDDCQMICPWNRFSQLTEEGDFSPRQKLHTPELIELFQWDEKTFLKITEGSAIRRIGHLRWLRNISVALGNAPYDAQIIPLLQSRMGLSEVLDEHIEWAVKQQQEKRSENVIEIQTSQQKRLIRAIEKGLPRDA

SEQ ID NO: 78804 - protein, 381 aa, Obesumbacterium proteus
  misc_feature (1)..(381): tr|A0A1B7KHL3|A0A1B7KHL3_9GAMM Epoxyqueuosine reductase OS=Obesumbacterium proteus ATCC 12841 OX=1354268 GN=qu eG PE=3 SV=1
MTHPLDLNQLAQHIKQWGQSLGFQQVGICDTDLSVEEPRLQAWLDKQYHGEMEWMARHGMMRARPHELHPGTLRVISVRMNYLPANASFAKTLKNPQLGYVSRYALGRDYHKLLRNRLKRLGDMIQEYCVDIDVNSRPFVDSAPILERPLAAKAGIGWVGKHSLILNKEAGSWFFLGELLLDLPLPVDKPQDEQCGRCVACITTCPTGAIVEPYVVDARRCISYLTIELESAIPEEFRPLMGNRIYGCDDCQMICPWNRFSQLTEEGDFSPRQKLHTPELIELFQWDEKTFLKITEGSAIRRIGHLRWLRNISVALGNAPYDAQIIPLLQSRMGLSEVLDEHIEWAVKQQQEKRSENVIEIQTSQQKRLIRAIEKGLPRDA

SEQ ID NO: 78805 - protein, 354 aa, Oblitimonas alkaliphila
  misc_feature (1)..(354): tr|A0A0K1XDE9|A0A0K1XDE9_9GAMM Epoxyqueuosine reductase OS=Oblitimonas alkaliphila OX=1697053 GN=queG PE=3 SV= 1
MSLSPEQLTALALQIKHWALDLGFQQVGITDTDLSHTEEQYQQWIDAGYAGEMEYMWSHGTKRLRPAELVPGTLRVISVRMDYLPADTQLTEQLRNPEAAYISRYALGRDYHKVLRKRLQQLASKISEAIGPFGYRAFVDSAPVMERQLAEKAGLGWTGKNTLILNRQAGSFFFLGELLVDLPLPIDAPNEKNHCGKCSSCLDQCPTNAFVAPGVLDARRCISYLTIELKGSIPEELRPLLGNRVYGCDDCQLVCPWNRFAKVSTEPDFTPRHQLATADLVTLFLWDEATFLRKTEGSPIRRIGFERWLRNLAVSLGNAPSTIPVLEALKQRLNYPSELVQEHVNWALQQHKQR

SEQ ID NO: 78806 - protein, 382 aa, Oceanibacterium hippocampi
  misc_feature (1)..(382): tr|A0A1Y5RV66|A0A1Y5RV66_9PROT Epoxyqueuosine reductase OS=Oceanibacterium hippocampi OX=745714 GN=queG PE=3 S V=1
MSGAEATTDGVTPSDRSEAIRVEARRLGFDAVGVTDADAIPDARARLDAYIALGRHGGMDWLARDPDRRGSPRGLWPDARSVVAVALNYGPAGDPMALLDHPDRGIVSVYARNRDYHDILKRRLKELARWMVGRFGGELKVFVDTAPVMEKPLAAAAGLGWQGKHSNLLSREHGSWLFLGTLYTSLELAPDQPSDGHCGSCRACLDICPTKAFPAPFQVDARRCISYLTIEHKGHIEVEFRAAMGNRIYGCDDCLAVCPWNKFARSTKEPGFLPRAELTAPRLRDLAELDDASFRALFAGSPIKRTGRDRFVRNVLIALGNSGDIDAVPLLERLTGDASPLVRAMAVWALSRLLPADAFAARRDDLMVRETDPEVRREWRDG

SEQ ID NO: 78807 - protein, 371 aa, Oceanibaculum indicum
  misc_feature (1)..(371): tr|A0A420WQN1|A0A420WQN1_9PROT Epoxyqueuosine reductase OS=Oceanibaculum indicum OX=526216 GN=queG PE=3 SV=1
MTEDLKSRIREQALALGFDAVGFAPAQLSNQVRQWLADFLAEGRHGDMGWMVEKADRRGDPQVLWPEARSIVVLGMNYGPGRDPLAILGHPERAGISVYAQGRDYHDHVKNRLKALARWMAEEIDSGVKVFVDTAPVMEKPLGQQAGLGWQGKHTNLVSRGFGSWLFLGEVYSTLDLAPDTSETDHCGSCTSCLTACPTDAFPAPYQLDARRCISYLTIEHKGVIAREFREPMGNRIYGCDDCLAVCPWNKYAKPTGHEAFLPRAELMAPRLADLAQLDDAGFRQLFSGSPVKRIGRDRFVRNVLIAIGNSGSQALVPITESLLSDSSPLVRGMAVWALSRLLDADRFAGLRDRHLPDETDEDVREEWLEC

SEQ ID NO: 78808 - protein, 371 aa, Oceanibaculum indicum
  misc_feature (1)..(371): tr|K2KG56|K2KG56_9PROT Epoxyqueuosine reductase OS=Ocea nibaculum indicum P24 OX=1207063 GN=queG PE=3 SV=1
MTEDLKSRIREQALALGFDAVGFAPAQLSNQVRQWLADFLAEGRHGDMGWMVEKADRRGDPQVLWPEARSIVVLGMNYGPGRDPLAILDHPTRAGISVYAQGRDYHDHVKNRLKALARWMAEEIDSGVKVFVDTAPVMEKPLGQQAGLGWQGKHTNLVSRGFGSWLFLGEVYSTLDLAPDTSEIDHCGSCTSCLSACPTDAFPAPYQLDARRCISYLTIEHKGVIAREFREPMGNRIYGCDDCLAVCPWNKYAKPTGHDAFLPRAELMAPRLADLAQLDDAGFRQLFSGSPVKRIGRDRFVRNVLIAIGNSGSQTLVPITESLLSDSSPLVRGMAVWALSRLLDADRFAALRDRHLPTETDEDVRAEWLEG

SEQ ID NO: 78809 - protein, 377 aa, Oceanicaulis sp.
  misc_feature (1)..(377): tr|A0A3D5ZX60|A0A3D5ZX60_9RHOB Epoxyqueuosine reductase OS=Oceanicaulis sp. OX=1924941 GN=queG PE=3 SV=1
MSTASLSETVRAMAREAGFDGVRITRADAPWEAGDRLRAFVEAGHHGGMGWMEDTLERRVHPTAMWPEARSAVVVGLNYGPDHDPLEDLKNTGRAVISVYARNRDYHDLLKKRLKQMARAFHGETGKGVKVFVDTAPLMEKPLAALSGLGWQGKHTNLVSRDWGSWLFLGVMLTEAELEPDAPETDHCGSCRACLDICPTDAFPAPYRLDARRCISYLTIEHKGPVPREFRAAMGNRIYGCDDCLAVCPWNKFAARTAETAFHARAELEAPLLAELSRLDDAGFRTFFTASPIKRIGRDRFVRNVLIALGNDSGAAALDAVLARLDDESALVRGAAVWALSRLDAARFEAERETRLPAETDGDAAAEWKRSDAGAGG

SEQ ID NO: 78810 - protein, 372 aa, Oceanicaulis sp.
  misc_feature (1)..(372): tr|A0A2T4ZPH6|A0A2T4ZPH6_9RHOB Epoxyqueuosine reductase OS=Oceanicaulis sp. PT13A OX=2135616 GN=queG PE=3 SV=1
MSAPEEQAERVKALALEAGFSVVRVTRADDPWEAGARLREFVEAGRHGEMAWMEDTLERRSHPTAMWPDAKSAVVVGLDYGPERDPLDILERPVEAAISVYAQNKDYHDILKKRLKRFAGAFHRETGAEVKVFVDTAPLMEKPLAHKSGLGWQGKHTNLVSRSHGSWLFLGVMLTAAELTPDAPETDHCGSCRACLDICPTNAFPAPYQIDARRCISYLTIEHKDPIPVEFRAAMGNRIYGCDDCLAVCPWNKFAQASSEAAFHPREALTAPKLAELVQLDDPGFRAFFKGSPIKRIGRDRFVRNVLIALGNSGEPALAERAADLLDDPSELVRGAAIWALGRLDAKRFAAEKAQRRAMEPDPDVAAEWAQA

SEQ ID NO: 78811 - protein, 389 aa, Oceanicella actignis
  misc_feature (1)..(389): tr|A0A1M7T8T1|A0A1M7T8T1_9RHOB Epoxyqueuosine reductase OS=Oceanicella actignis OX=1189325 GN=queG PE=3 SV=1
MTAAQPAPAADARALAEALRAQARAEGFAAMGVCRPDAVPEAAERLRAFLAAGRHGEMAWMAERAAWRGSAAALWPEARSVVMLAEPYQPDPAPWAPLTRPELGVVSCYARGKDYHDLVKKRLKRLGRWLIERAGGQIKVFVDTAPVMEKPLAAAAGLGWQGKHTNLVSRELGSWFFLGAIFTTLELPADAPAPQSCGSCRRCLDVCPTAAFPAPFQLDARRCISYLTIELKGPIPRPMRPLLGNRIYGCDDCLAVCPWNKFAGAAAEIGYLHRPELTRPRLAELAALDDGAFREVFSGSPVKRIGRGRFVRNVLVAIGNSGDRALADSARALLGDADPLVRGAAVWALGRLVGARALAELGPPPDERDPQVLDEWRAACAPACGLGQG

SEQ ID NO: 78812 - protein, 389 aa, Oceanicella actignis
  misc_feature (1)..(389): tr|A0A5D3WAF9|A0A5D3WAF9_9RHOB Epoxyqueuosine reductase OS=Oceanicella actignis OX=1189325 GN=queG PE=3 SV=1
MTAAQPAPAADARALAEALRAQARAEGFAAMGVCRPDAVPEAAERLRAFLAAGRHGEMAWMAERAAWRGSAAALWPEARSVVMLAEPYQPDPAPWAPLTRPELGVVSCYARGKDYHDLVKKRLKRLGRWLIERAGGQIKVFVDTAPVMEKPLAAAAGLGWQGKHTNLVSRELGSWFFLGAIFTTLELPADAPAPQSCGSCRRCLDVCPTAAFPAPFQLDARRCISYLTIELKGPIPRPMRPLLGNRIYGCDDCLAVCPWNKFAGAAAEIGYLHRPELTRPRLAELAALDDGTFREVFSGSPVKRIGRGRFVRNVLVAIGNSGDRALADSARALLGDADPLVRGAAVWALGRLVGARALAELGPPPDERDPQVLDEWRAACAPACGLGQG

SEQ ID NO: 78813 - protein, 361 aa, Oceanicoccus sagamiensis
  misc_feature (1)..(361): tr|A0A1X9NHH2|A0A1X9NHH2_9GAMM Epoxyqueuosine reductase OS=Oceanicoccus sagamiensis OX=716816 GN=queG PE=3 SV= 1
MTNHKDNSPEAISNIDLLSLMEDIRAWGRELGFQQIGISDINLDQPRQHLQSWLEKNFHGDMDYMASHGEKRSRPEQLLPGTLRVLSARMDYLPDTDSMEEVLADANKAYISRYALGRDYHKLMRKRLATLAQKISAVAGQHNHRAFVDSAPVLERALAEKAGLGWIGKNTMLINPKAGSWFFLGEIYTDLPLPLDPPQETMHCGSCTACLDDCPTGAIVAPNQVDARRCISYLTIELRESIPEELRPLMGNRIYGCDDCQLVCPWNKFSEHTQETDFQPRNNLQAAELVELFQWTEEEFLRRTEGSAIRRIGYECWLRNIAVALGNASSSDTVVAALKEKSQHSSALVREHSQWALAQHN

SEQ ID NO: 78814 - protein, 345 aa, Oceanicola granulosus
  misc_feature (1)..(345): tr|Q2CKC6|Q2CKC6_OCEGH Epoxyqueuosine reductase OS=Ocea nicola granulosus (strain ATCC BAA-861 / DSM 15982 / KC TC 12143 / HTCC2516) OX=314256 GN=queG PE=3 SV=1
MQDLKDRLEAQALAEGFSAMGVCRPDAAPETAGRLATFLAEGRHGQMAWMAERTHWRGDAAALWPEARSVVMLAEAYSPEHDPLEVLQRRDRAAISVYAQGRDYHDIVKKRLKRVGRWLLEQAPGEQIKVFVDTAPVMEKPLAAAAGLGWQGKHTNLLGRDLGNWVFLGAIFTTLELPPDPPGRDRCGSCRACLDICPTDAFPAPYQLDARRCISYLTIEHAGPVDEALRPLLGNRIYGCDDCLAVCPWNKFAATARETRYAGAGAGPPRLAELAALDDAAFRARFSGSPIKRIGRERFVRNVLYAIGNSGDRALLGAAEALLDDADETVRDAAGWAVGRLRNPA

SEQ ID NO: 78815 - protein, 349 aa, Oceanicola litoreus
  misc_feature (1)..(349): tr|A0A1N6HGH0|A0A1N6HGH0_9RHOB Epoxyqueuosine reductase OS=Oceanicola litoreus OX=1217970 GN=queG PE=3 SV=1
MFAARKWGRRVKDAVVARALEEGFSLCRVARAGPLPGVPEGLRAFLAEGRHGEMDWMEKRLEWREDPSALWPEARSVIVLGESYGPEYDPLAGLEARERGLISAYARGRDYHDIVKKRLKRLGRWLIEEFGGEIKVFVDTAPVAEKPLAQAAGLGWQGKHTNLVSREMGSWFFIGSIFTTLDIEPDPAESDHCGGCRRCLDVCPTEAFPAPYQLDARRCISYLTIEHAGPVPEDLRSKLGNRIYGCDDCLAVCPWNKFAVAAADMRYRGGTETDLPALEELAGLDDAAFRARFSGSPIKRIGRARFVRNVLYAIGNSGAGRLRAVAQELCEDEDPVVADAARWAMARLG

SEQ ID NO: 78816 - protein, 350 aa, Oceanicola sp.
  misc_feature (1)..(350): tr|A0A254RGP1|A0A254RGP1_9RHOB Epoxyqueuosine reductase OS=Oceanicola sp. 22II-s10i OX=1317116 GN=queG PE=3 SV =1
MEHALKDRLRAQAEAEGFSDMGVCRPDAVPQVQARLARFLAEGRHGQMGWMERRAEWRGDPAALWPKARSVIMLAESYTPEEDPLAGLQARDRGVISVYARGADYHDLVKKRLKRLARWLIAEAGAQGPDEAPVEVKVFVDTAPVPEKALAEAAGLGWQGKHTNLLGRGFGNWVFLGAIFTTLDLPVDEAGRERCGSCRRCLDACPTDAFPAPFQLDARRCISYLTIEHHGPVDEALRPGIGNRIYGCDDCLAVCPWNKFAVEAREMRYAARPGTVLPPLAELAVLDDAGFRARFAGSPIKRIGRDRFVRNVLYAIGNSGDLALRAVAESLTGDPDPAVADAARWAVARL

SEQ ID NO: 78817 - protein, 339 aa, Oceanicola sp.
  misc_feature (1)..(339): tr|A0A5B8BMK1|A0A5B8BMK1_9RHOB tRNA epoxyqueuosine(34) reductase QueG OS=Oceanicola sp. D3 OX=2587163 GN=queG PE=4 SV=1
MKDAIVARALEEGFSLCRVMRAGPLEGVPENLRQFLAEGRHGQMEWMERRVEWREDPSVLWPEAKSVIVLGESYGPEFDPLAALGEREKGLISAYARGRDYHDIVKKRLKRLGRWLIETYGGEIKVFVDTAPVAEKPLAQAAGLGWQGKHTNLVSRDMGSWFFIGSVFTTLELEADPAEEDHCGGCRRCLDVCPTGAFPAPYQLDARRCISYLTIEHAGPVDEALRGLMGNRIYGCDDCLAVCPWNKFAVEAADMRYRGGIETDLPDLAELAGLDDAAFRARFSGSPIKRIGRGRFVRNVLYAIGNSGVARLRPVAQGLCEDSDPVVADAARWAVAQLG

SEQ ID NO: 78818 - protein, 308 aa, Oceanihabitans sediminis
  misc_feature (1)..(308): tr|A0A368P6X9|A0A368P6X9_9FLAO Epoxyqueuosine reductase OS=Oceanihabitans sediminis OX=1812012 GN=queG PE=3 SV =1
MPNNKAKYTEIIKAEAKRLGFLSCGISKAAFLEAEAPRLEAWLNKSMNGEMHYMENHFDKRLDPTKLVEGSKSVISLLLNYYPEEKQQDNTYKLSKYAYGTDYHFIIKDKLKTLLHHIQEEIGEVDGRAFVDSAPVLDKAWAAKSGLGWIGKHSNLLTQQVGSFYFIAELIIDLELEYDSRVTDHCGTCTACIDACPTQAIVEPYVVDGSKCISYLTIELKDNLPTQFQGKMDDWMFGCDVCQDVCPWNRFSKAHAEPLFNPHPELLDMTKKDWEEITEETFRKVFKKSAVKRTKYSGLVRNIQFLKK

SEQ ID NO: 78819 - protein, 375 aa, Oceanimonas baumannii
  misc_feature (1)..(375): tr|A0A235CGH0|A0A235CGH0_9GAMM Epoxyqueuosine reductase OS=Oceanimonas baumannii OX=129578 GN=queG PE=3 SV=1
MTTPDFDALAHDIKLWAAELGFDQAGITDTDLSDQEPLLAEWLAKGYHGEMEYMARHGMMRARPHELLPGTLRVISVRMSYLPEQAAIAHVLSNPDKGYISRYALGRDYHKVLRNRLKKLADKIQERAAELVARPFVDSAPVLERPLAVNAGLGWTGKHSLIINRKQGSFFFLGELLVNLPLPVDSPVEEGCGNCVACLTICPTQAIVEPYVVDARRCISYLTIELDGPIPEALRPLMGNRIYGCDDCQLICPWNRFANASKEPDFSPREQLHAPQLLALFDWSEAHFLKVTEGSPIRRIGYRRWLRNIAVALGNAPASPMVIQALEQKRDEVDEMVQEHIDWALTQQTEKLASQNRKTARLIRAVDKGMPAHAR

SEQ ID NO: 78820 - protein, 375 aa, Oceanimonas doudoroffii
  misc_feature (1)..(375): tr|A0A233RBF1|A0A233RBF1_9GAMM Epoxyqueuosine reductase OS=Oceanimonas doudoroffii OX=84158 GN=queG PE=3 SV=1
MTTPDFAALAHDIKLWAAELGFDQAGITGTDLSEHESQLADWLAKGYHGEMDYMARHGMMRARPHELLPGTLRVISVRMNYMPEHAAIAHVLSDPDKGYISRYALGRDYHKVLRNRLKKLADKIAERAEKLVARPFVDSAPVLERPLAVNAGLGWTGKHSLVLNKEQGSFFFLGELLVNLPLPVDQPVAEGCGNCVACLTICPTQAIVEPYVVDARRCISYLTIELDGPIPEEFRPLMGNRIYGCDDCQLICPWNRFANASQEPDFAPRERLHAPQLLELFDWSETHFLSMTEGSPIRRIGHRRWLRNIAVALGNAPASPMVVFALEQKRDQVDDMVREHIDWALARQADKLARQDRKTARLIRAVDKGMPTHAR

SEQ ID NO: 78821 - protein, 376 aa, Oceanimonas sp.
  misc_feature (1)..(376): tr|H2G0J0|H2G0J0_OCESG Epoxyqueuosine reductase OS=Ocea nimonas sp. (strain GK1) OX=511062 GN=queG PE=3 SV=1
MTTPDFDALAHDIKLWAAELGFDQAGITGTDLSKHEPQLAAWLAKGYHGEMDYMARHGMMRARPQELLPGTLRVISVRMNYLPEHAAIAHVLSDPEKGYVSRYALGRDYHKVLRNRLKKLADRIAERAEGLVARPFVDSAPLLERPLATNAGLGWTGKHSLVINREQGSFFFLGELLVNLPLPVDVPETEDGCGHCVACLTICPTQAIVEPYVVDARRCISYLTIELDGPIPEEFRPLMGNRIYGCDDCQLICPWNRFANASQEPDFAPREPLHAPQLLALFDWSEDYFLKMTEGSPIRRIGHRRWLRNIAVALGNAPASPMVVFALEQKRDLVDDMVREHIDWALAQQQQKLARQDRKTARLIRAVDKGMPTHAR

SEQ ID NO: 78822 - protein, 348 aa, Oceaniovalibus guishaninsula
  misc_feature (1)..(348): tr|K2I6H8|K2I6H8_9RHOB Epoxyqueuosine reductase OS=Ocea niovalibus guishaninsula JLT2003 OX=1231392 GN=queG PE= 3 SV=1
MSADLKARLKNEALAAGFVRMGVCRPGAIPQAAGRLAAFLKAGRHGTMGWMTERQGWRGDPAALWPEARSVAMLAESYTPAHDPLDDLALADRGTVSVYAQGRDYHDVVKKRLKRVARWLVAAAPEAGVKVFVDTAPVMEKPLAQAAGLGWQGKHTNLLGRDIGNWVFLGAIFTTLDLPPDPPESEHCGTCRKCLDICPTDAFPAPFQLDARRCVSYLTIEHAGPVDEALRPGLGNRIYGCDDCLAICPWNKFAVAARDMRLTPRDGVRAQPLAELATLDDAGFRARFSTSAVKRIGRDRFVRNVCYAIGNSGLPALDPAVAELTQDADPAVADAARWARMRLARQGG

SEQ ID NO: 78823 - protein, 367 aa, Oceaniovalibus sp.
  misc_feature (1)..(367): tr|A0A5D0SDB3|A0A5D0SDB3_9RHOB Epoxyqueuosine reductase OS=Oceaniovalibus sp. ACAM 378 OX=2599923 GN=queG PE=3 SV=1
MSSALKSALIEEALADGFVSAGICRPDAIPAARARLDAYVGAGRHGQMGWMAERMGWRGDPAALWPEARSVVMLAESYAPEHDPLAVLEERDRAAISVYAHGRDYHDIVKKRLKRVGRWLLETAEKRGYRNRETGAWVALEIDPEQPQIKVFVDTAPVMEKPLAQAAGLGWQGKHTNLLSRDFGNWVFLGAIFTTLDLPADLPEQEHCGSCTACLDICPTRAFPAPFQLDARRCISYLTIEHKGPVDPELRPALGNRIYGCDDCLAVCPWNKFAVAASDMRYLGDGVAPALADLATLDDTGFRARFSGSPVKRIGRDRFVRNVCYAIGNSGDPALSVVLEPLLMDSDAAVADAARWAKMQLMGNRGE

SEQ ID NO: 78824 - protein, 377 aa, Oceanisphaera arctica
  misc_feature (1)..(377): tr|A0A2P5TJP2|A0A2P5TJP2_9GAMM Epoxyqueuosine reductase OS=Oceanisphaera arctica OX=641510 GN=queG PE=3 SV=1
MTAPDFETLAHDIKLWAAELGFDQVGITDTDLTEHEPLLADWLDKGHHGEMDYMARHGMMRARPHELLPGTLRVISVRMNYLPEQAAIARVLSNPDQGYISRYALGRDYHKVLRQRLKKLADKIELRASDLVARPFVDSAPVLERPLAAKAGLGWTGKHSLLLNRQQGSFFFLGELLVNLPLPTDQPVEEGCGKCVACITACPTGAIVAPYVVDARRCISYLTIELDGPIPEDLRPLMGNRIYGCDDCQLICPWNRFADASQEPDFAARDNLHAPELLALFDWSEAHFLKQTEGSPIRRIGHRRWLRNIAIALGNAPASPAIIDALEQKREREEVDEMVQEHIDWALARQREGLAQVDRKTERLIRAVDKGMPKHAR

SEQ ID NO: 78825 - protein, 381 aa, Oceanisphaera avium
  misc_feature (1)..(381): tr|A0A1Y0CY57|A0A1Y0CY57_9GAMM Epoxyqueuosine reductase OS=Oceanisphaera avium OX=1903694 GN=queG PE=3 SV=1
MTDFETLAHNIKLWAAELGFSQVGISDTNLSEHEPALADWLAKGHHGEMEYMARHGMMRARPQELLPGTLRVISVRLNYMPEHAAIAHVLSQPDLGYISRYALGRDYHKLMRQRLKKLADRIEQAAHELVARPFVDSAPVLERPLAAKAGLGWVGKHSLLINQQQGSFFFLGELLVNLPLPIDAPVAEGCGQCVACITACPTGAIVAPYVVDARRCISYLTIEQDGPIPLALRPLMGNRIYGCDDCQLICPWNKFTNASQEADFAARDNLHAPELLALFAWSEEYFLTQTQGSPIRRIGHRRWLRNIAVALGNAPVSPSIILALEEKLSQPALDAMVREHVEWALAQQQGALNPPQRKTQRLIRAVDKGMSAHARLSQPKP

SEQ ID NO: 78826 - protein, 384 aa, Oceanisphaera profunda
  misc_feature (1)..(384): tr|A0A1Y0D6B2|A0A1Y0D6B2_9GAMM Epoxyqueuosine reductase OS=Oceanisphaera profunda OX=1416627 GN=queG PE=3 SV=1
MSDFETLAHDIKLWAAELGFSQVGITDTDLTEHEPKLADWLAKGYHGDMEYMARHGMMRARPHELLPGTVRVISVRMNYLPEQAAIAHVLSDPTLGYISRYALGRDYHKLMRQRLKKLSDRIEQAASELVARPFVDSAPVLERPLAAKAGLGWVGKHSLLINRQQGSFFFIGELLINLPLPLSQQVDQPVEEGCGKCVACITACPTGAIVEPYVVDARRCISYLTIEQDGPIPLELRPLMGNRIYGCDDCQLICPWNKFTKASQEPDFAARDNLHAPELLALFDWSEDYFLKQTEGSPIRRIGHRRWLRNIAVALGNAPVSPTIILALEQKRLQDDLDEMVLEHIDWALAQQMAGLAKVGRKTERLIRAVDKGMPNHARFTELK

SEQ ID NO: 78827 - protein, 375 aa, Oceanisphaera psychrotolerans
  misc_feature (1)..(375): tr|A0A1J4QIJ2|A0A1J4QIJ2_9GAMM Epoxyqueuosine reductase OS=Oceanisphaera psychrotolerans OX=1414654 GN=queG PE =3 SV=1
MTAPDFETLAHDIKLWAAELGFDQVGITDTDLAEQEPLLADWLDQGYHGEMDYMARHGMMRARPHELLPGTLRVISVRMNYLPEQAAIARVLSNAEQGYISRYALGRDYHKVLRQRLKKLADKIEQRASDLVARPFVDSAPVLERPLAAKAGLGWTGKHSLLLNRQQGSFFFLGELLVNLPLPIDQPVEEGCGKCVACITACPTGAIVAPYVVDARRCISYLTIELDGPIPEELRPLMGNRIYGCDDCQLICPWNRFANASQEPDFAARDNLHAPELLALFDWSEAHFLKQTEGSPIRRIGHRRWLRNIAVALGNAPASPAIIAALEQKREEADEMVQEHIDWALARQRAGLAQVDRKTERLIRAVDKGMPKHAR

SEQ ID NO: 78828 - protein, 301 aa, Oceanispirochaeta sp.
  misc_feature (1)..(301): tr|A0A5C1QNM6|A0A5C1QNM6_9SPIO 4Fe-4S ferredoxin-type d omain-containing protein OS=Oceanispirochaeta sp. K2 OX =2518645 GN=EXM22_15265 PE=4 SV=1
MVPPGDLKEKVLKDAGFPLNSTIIIAFFPFADTPPDERTSIAPFALKNHYKDLVIRMREALKSAGEPFSNLKRKEIRFFSNSRLPEKQMAKESGLGFIGKNTLLINKTFGSRGLLAGMILPLALNPSDEADSGKLKPGINSCGNCRLCEKSCPGGALEDYRLDREKCLQHWTSSDGPIPDRLKKEWGVRIYGCTICQDVCPWNRNLPRGNSITRGLIDPVPSLDFFLSHTEEEIKEFFRGSAMGMSWFKGRHMIRNALISTVSTEDSPPLDHIEAHGLSEDDGIKDAALWALKRLKRDQER

SEQ ID NO: 78829 - protein, 327 aa, Oceanispirochaeta sp.
  misc_feature (1)..(327): tr|A0A370B049|A0A370B049_9SPIO Epoxyqueuosine reductase OS=Oceanispirochaeta sp. M1 OX=2283433 GN=DV872_07330 PE=4 SV=1
MEEGQRLNCKPIIGSLNALGFHETAFLSSDNLPEKFFQNSEMPEYSTLIIGFFPFENTGKTGLIAPFALKNHYKDMVRRMKQALKEAGDPFSELNKRQVRFFSNSRFPEKEMAITGGLGFRGRNTLVINTEFGSRGLLGGMILPYRLEEQKQDGQINKINSEISCGTCRLCEEACPGAALKDYRLDRSKCLQHWTSEDGAVPDSLKEVWGERIYGCMICQDCCPWNKKDRKGNSIDLGMITPEPPLKFYLTKCKEDIKSEFKGTALGMSWIKAEHLIRNAIISSACSENKNLNEYISKFQDADDDGIKDAARWALKKSDHTGSQAGQ

SEQ ID NO: 78830 - protein, 363 aa, Oceanithermus desulfurans
  misc_feature (1)..(363): tr|A0A511RJ30|A0A511RJ30_9DEIN Epoxyqueuosine reductase OS=Oceanithermus desulfurans NBRC 100063 OX=1227550 GN =ODE01S_10820 PE=4 SV=1
MNPLEELAHAARRRGFDVHFAPARLPEAYGRAYLDWLAAGRHAGMAYLARDPHARIDPARRFPWFRGALVLSLSYAYPEPPRPAGGVRLGRVARYAWVRDYHLRIDPRLRDLEDLCGRLGGRCRGYVDHGPVLEQAYAAAAGGGWIGRNGLWLTQQGGSYRHLAVLLTSWPAPPAAPHPNRCGRCAACVQACPTGAIVADGVVDARRCVSYWTIEHRGLVPLELWDGIGDRLFGCDDCQTVCPWNRRPRAADPLPDPELAWPDLEGFFRLSNRAFARRYAGSAFLRSGRAALARNALIVLANRDPEALARLLPAALADPSERVRATAAAAAARTGRGAEAAGARGSLGEAARGYVNRALELFG

SEQ ID NO: 78831 - protein, 363 aa, Oceanithermus profundus
  misc_feature (1)..(363): tr|E4U884|E4U884_OCEP5 4Fe-4S ferredoxin-type domain-co ntaining protein OS=Oceanithermus profundus (strain DSM 14977 / NBRC 100410 / VKM B-2274 / 506) OX=670487 GN=O cepr_0842 PE=4 SV=1
MNPLEELAHAARRRGFDVHPAPARLPEAWGRAYLDWLEAGRHAGMDYLARDPHARIDPARRFPWFRGALVLGLSYAYPEPPRPAGGLRLGRVARYAWVRDYHLRIEPHLCALEDLCARLGGQCRGYVDYGPVLERAYAAASGGGWIGRNGLWLTQSGGSYQHLAVLLTSWPVEPAQPHPNRCGRCAACVAGCPTGAIVADGVVDARRCVSYWTIEHRGLVPLERWAGIGDWLFGCDDCQTVCPWNRRPRAADPLPDPELAWPDLNAFFSLSSRAFARRYAGSAFVRSGRASLARNALIVLANRDPEALAGLLPAALDDPSERVRATAAAAAARTGRADQAARALGSLGEAARSYVARALELFG

SEQ ID NO: 78832 - protein, 381 aa, Oceanobacillus arenosus
  misc_feature (1)..(381): tr|A0A3D8PSJ7|A0A3D8PSJ7_9BACI Epoxyqueuosine reductase OS=Oceanobacillus arenosus OX=1229153 GN=queG PE=3 SV= 1
MRTAELKQEIIDYAKEIGIDKIGFTTADVFGELRERLRRQQELNFQSGFEKGSVEERTEPVRLLPEAQSIISIAIAYPSRMKDAPRSTKEERRGIFARASWGIDYHVVMKDRLEKLAAFIMEKIPDAKNKVMVDTGELSDRAVAERAGIGFSGKNTSIITPEFGSFVYLGELITNIPFIPDDPIEDSCGECTKCMDACPTGALVQGGQLNAQRCIAFLTQTKDFLPDEFRTKIGNRVYGCDTCQQVCPRNKGIDFHTTPEFEPVHDIAKPKLKPMLKMSNRQFNETFGHISGSWRGKKPLQRNALIALGHYKDRTAVEEMITVMRDDPRPVIRGTAAWSLGKIGTDEAFEAINKAMETEQDEQVLFEMRKGLEFQERQVAN

SEQ ID NO: 78833 - protein, 381 aa, Oceanobacillus bengalensis
  misc_feature (1)..(381): tr|A0A494Z8A3|A0A494Z8A3_9BACI Epoxyqueuosine reductase OS=Oceanobacillus bengalensis OX=1435466 GN=queG PE=3 SV=1
MRTEKLKQEIKDYAKEIGIDKIGFAAADVFTELKERLRRQQELEYQSGFEKGSIEERTEPQRLLPEAQSIISIALAYPTRMKNAPKSTKEERRGLFARASWGMDYHDVLRNRLEKLNAFILERVPNAVNKVMVDTGELSDRAVAERAGIGFSGKNTSIITPEYGSFVYLGEMITNIPFIPDEPIEDGCGDCRKCLDACPTGALIEGGQLNAQRCIAFLTQTKDYLPDEFRTKIGNRVYGCDTCQQVCPKNKGIDFHIHPEFEPDPDISKPKLIPMLRISNREFKEKFDYISGSWRGKKPLQRNALIALGHYKDKTAVEEMIEVMKKDPRPVIRGTAAWSLGKIGTNQAFEAIKEAMKFEKDEQVLVEMEKGLEFNKEASIL

SEQ ID NO: 78834 - protein, 381 aa, Oceanobacillus caeni
  misc_feature (1)..(381): tr|A0A0N1N1B8|A0A0N1N1B8_9BACI Uncharacterized protein OS=Oceanobacillus caeni OX=405946 GN=AFL42_00590 PE=4 S V=1
MRTEELQQEIREYAMKIGIDKIGFATADVFTELKERLRRQQELNYQSGFEKGTIEERTEPVRLLPEAQSIISIALAYPSRMKNAPKSTKEERRGLFARASWGIDYHEVLRDRLNKLADFIHEKVPEAITKIMVDTGELSDRAVAERAGIGFSGKNTSIITPEFGSFVYLGEMITNIPFIPDNPVEDSCGDCRKCLDACPTGALVGEGGQLNANRCIAFLTQTKDYLEDEFRIKLGNRLYGCDTCQQVCPKNKGVDFHTHPEFEPDPEVSKPKLIPMLRISNREFKEKFGFISGSWRGKKPLQRNALIALAHYKDKTAVTEIIEVMKNDPRPVIRGTAAWSLGKIGTEEAFLAIKEAIKVEKDDRVKYEMEKGLEFAETAFK

SEQ ID NO: 78835 - protein, 381 aa, Oceanobacillus chungangensis
  misc_feature (1)..(381): tr|A0A3D8PWC4|A0A3D8PWC4_9BACI Epoxyqueuosine reductase OS=Oceanobacillus chungangensis OX=1229152 GN=queG PE= 3 SV=1
MRTAELKQEIIDYSKKIGIDKIGFTTADVFGELKERLRRQQELNYQSGFEKGSVEERTEPVRLLPEAQSIISIAIAYPSRMKDAPKSTKEERRGIFARASWGIDYHVVLKDRLEKLAAFIMEKVPDAKNKVMVDTGELSDRAVAERAGIGFSGKNTSIITPEFGSFVYLGELITNIPFIPDDPIEDSCGDCTKCMDACPTGALIQGGQLNAQRCIAFLTQTKDFLPDEFRTKIGNRVYGCDTCQQVCPRNKGIDFHIHPEFEPEHDIAKPKLKPMLKMSNRHFKETFGHISGSWRGKKPLQRNALIALGHYKDKTAVEEMINVMRDDPRPVIRGTAAWSLGKIGTEEAYEAIQAAMENEQDEQVLFEMRKGLDFQERQTVN

SEQ ID NO: 78836 - protein, 381 aa, Oceanobacillus halophilus
  misc_feature (1)..(381): tr|A0A494ZS23|A0A494ZS23_9BACI Epoxyqueuosine reductase OS=Oceanobacillus halophilus OX=930130 GN=queG PE=3 SV =1
MRTEELQQEIREYAKEIGIDKIGFAAADVFSELKERLRRQQELEYQSGFEKGSIEERTEPQRLLPEAQSIISIAIAYPSRMKNAPKSRKGERRGLFARASWGLDYHDVLRERLEKLSAFIQEKVPDAVNKVMVDTGELSDRAVAERAGIGFSGKNTSIITPEFGSFVYLGEMITNIPFVPDSPVEDSCGDCRKCMDACPTGAIVEGGQLNAQNCIAFLTQTKGFLEDEYRFKLGNRVYGCDTCQQVCPKNKGIDFHIHPEFEPDPEVSKPKLIPMLRISNREFKEKFGPLSGSWRGKKPIQRNALIALGHYKDETAVPEMIEVMKNDPRPVIRGTAAWSLGKIGTEEAFAAIREAMELEKDDQVLFEMEKGLEFETLTITN

SEQ ID NO: 78837 - protein, 382 aa, Oceanobacillus iheyensis
  misc_feature (1)..(382): tr|A0A2P1WI37|A0A2P1WI37_9BACI Epoxyqueuosine reductase OS=Oceanobacillus iheyensis OX=182710 GN=queG PE=3 SV= 1
MDTAQLKKDIIAYSKKIGIDKIGFASADVFGELKERLRRQQELSYQSGFEKGTVEERTEPERLLPEAKSIISIALAYPSRMKGAPKSTKEERRGLFARASWGTDYHVVMRDRLEKLAAFIKEQVPDVANRLMVDTGELSDRAVAERAGIGFSGKNTSTITPEFGSYVYLGEMITNIPFVPDDPVDDSCGECTKCIDACPTGAIVQGGQLNAQRCIAFLTQTKDFLPDEFRTKIGNRVYGCDTCQVVCPKNQKIDFHIHPEFEPEHDVSKPVLKPMLRISNREFKETFGHISGSWRGKKPIQRNALIALGHYKDKTAVEDIIKVMCTDPRPVIRGTAAWSLGKIGTEEAYMAIKEAMESEQDEQVQVEMEKGMAFQEVYQAKT

SEQ ID NO: 78838 - protein, 378 aa, Oceanobacillus iheyensis
  misc_feature (1)..(378): tr|Q8CUM2|Q8CUM2_OCEIH Epoxyqueuosine reductase OS=Ocea nobacillus iheyensis (strain DSM 14371 / CIP 107618 / J CM 11309 / KCTC 3954 / HTE831) OX=221109 GN=queG PE=3 S V=1
MQVAQLKEDIQSYAKEIGIDKIGFTTADVFTELKERLRRQQELQYQSGFEKGSIEERTEPKRLLPEAKSIISIAVAYPQKMHDAPRSTKEERRGIFARASWGIDYHVALRERLNKLSEYIQTKYPDAVNKIMVDTGELSDRAVAERSGIGFSGKNTSIITPEFGSFVYLGEMITNIPFIPDSPVEESCGDCTICMDACPTGALVQGGQLNAQRCIAFLTQTKDFLPDEFRSKIGNRIYGCDTCQQVCPYNRGIDSHFHQELEPEPESAKPKLKPMLHLSNKEFKEKFGYMSGSWRGKKPLQRNALIAIGHYKDKSAIEDLIKVMNNDPRPVIRGTAAWSLGKIGSPKAYEAIISAMEKETDSQVLFEMEKGLSFQKQS

SEQ ID NO: 78839 - protein, 381 aa, Oceanobacillus limi
  misc_feature (1)..(381): tr|A0A1H9YFZ3|A0A1H9YFZ3_9BACI Epoxyqueuosine reductase OS=Oceanobacillus limi OX=930131 GN=queG PE=3 SV=1
MHTDQLKQEIIQYSKEIGIDKIGFTTADVFSELKERLKRQQELAYQSGFEKGSIEERTEPKRLLPEAQSIISIAIAYPSRMKDAPKSTKEERRGIFARASWGTDYHHVLRNRLEKLEAFIQEKVNDANTKVMVDTGELSDRAVAERAGIGFSGKNTSIITPEFGSFVYLGEMITNIPFTPDSPVEDSCGDCRKCMDACPTGALVQGGQLNTQRCIAFLTQTKDYLPDEFRTKLGNRVYGCDTCQVVCPKNKKVDFHIHPEFEPEHDIAKPKLKPMLRISNREFKETFGHISGSWRGKKPIQRNAIIGLGHYKDTTAVEELIAVMNNDPRPVIRGTAAWSLGKIGTNEAYEAIREAMNTETDEQVLFEMEKGLAFQKEVTTK

SEQ ID NO: 78840 - protein, 379 aa, Oceanobacillus oncorhynchi
  misc_feature (1)..(379): tr|A0A0A1MK51|A0A0A1MK51_9BACI Epoxyqueuosine reductase OS=Oceanobacillus oncorhynchi OX=545501 GN=queG PE=3 S V=1
MVKVEELKKDIQAYAKTIGIDKIGFATADIFTEMKERLRRQQELKYQSGFEKGSIEERTEPRRLLPEAKSIISIAVAYPSRMETTPRGTKGDRRGIFARASWGIDYHVALRERLDKLGEYIKDKVPDAVIKSMVDTGELSDRAVAERAGIGFSGKNTSIITKEYGSFVYLGEMLTNIPFIPDSPVEDGCGDCTICLDACPTGAIVQGGQLNAQRCIAFLTQTKDFLPEEFRNKIGNRLYGCDTCQQVCPWNRDKDSHFHQELEPEPELVKPRLKPMLHLSNREFKEKFGHMSGFWRGKKPIQRNVILALGHYKEASAETDLIAVMENDPRPVIRGTAAWSLGKIGTDAAREALSKALEKENHEQVQFEMENALSAMTVK

SEQ ID NO: 78841 - protein, 382 aa, Oceanobacillus picturae
  misc_feature (1)..(382): tr|W9AIP1|W9AIP1_9BACI Epoxyqueuosine reductase OS=Ocea nobacillus picturae OX=171693 GN=queG PE=3 SV=1
MDTAQLKKDIIAYSKKIGIDKIGFASADVFGELKERLRRQQELSYQSGFEKGTVEERTEPERLLPEAKSIISIALAYPSRMKDAPKSTKEERRGLFARASWGTDYHVVMRDRLEKLAAFIKEQVPDVANRLMVDTGELSDRAVAERAGIGFSGKNTSIITPEFGSYVYLGEMITNIPFVPDDPVDDSCGECTKCIDACPTGAIVQGGQLNAQRCIAFLTQTKDFLPDEFRTKIGNRVYGCDTCQVVCPKNQKIDFHIHPEFEPEHGVSKPVLKPMLRISNREFKETFGHISGSWRGKKPIQRNALIALGHYKDKTAVDDIIKVMRTDPRPVIRGTAAWSLGKIGTEEAYMAIKEAMETEQDEQVQVEMEKGMAFQEVYQAKT

SEQ ID NO: 78842 - protein, 382 aa, Oceanobacillus picturae
  misc_feature (1)..(382): tr|A0A0U9HA94|A0A0U9HA94_9BACI Epoxyqueuosine reductase OS=Oceanobacillus picturae OX=171693 GN=queG PE=3 SV=1
MDTAQLKKDIIAYSKKIGIDKIGFASADVFGELKERLRRQQELSYQSGFEKGTVEERTEPERLLPEAKSIISIALAYPSRMKDAPKSTKEERRGLFARASWGTDYHVVMRDRLEKLAAFIKEQVPDVANRLMVDTGELSDRAVAERAGIGFSGKNTSIITPEFGSYVYLGEMITNIPFVPDDPVDDSCGECTKCIDACPTGAIVQGGQLNAQRCIAFLTQTKDFLPDEFRTKIGNRVYGCDTCQVVCPKNQKIDFHIHPEFEPEHDVSKPVLKPMLRISNREFKETFGHISGSWRGKKPIQRNALIALGHYKDKTAVDDIIKVMRTDPRPVIRGTAAWSLGKIGTEEAYMAIKEAMETEQDEQVQVEMEKGMAFQEVYQAKT

SEQ ID NO: 78843 - protein, 378 aa, Oceanobacillus profundus
  misc_feature (1)..(378): tr|A0A417YLN9|A0A417YLN9_9BACI Epoxyqueuosine reductase OS=Oceanobacillus profundus OX=372463 GN=queG PE=3 SV= 1
MRTEQLKQEIIDYAKEIGIDKIGFASADVFGELRERLRRQQESNFQSGFEKGSLEERTEPQRLLPEAQSIISIAIAYPSRMKDAPRSTKEERRGLFARASWGIDYHVVLRDRLEKLAAFIQEKVPEVSNKVMVDTGELSDRAVAERAGIGFSGKNTSIITPEFGSFVYLGEMITNIPFVPDDPIEDSCGDCTKCMDACPTGALVEGGRLNAQRCIAFLTQTKDFLPDEFRTKLGNRLYGCDTCQQVCPRNKGIDSHIHPEFEPEHDLAKPKLEPMLRISNRSFKEKFGHMSGSWRGKKPLQRNALIALGHYKDKTAIPEMISVMKEDPRPVIRGTAAWALGKIGTVEAFRAIEAAMENEKDDQVLFEMEKGLEFKYKS

SEQ ID NO: 78844 - protein, 378 aa, Oceanobacillus sojae
  misc_feature (1)..(378): tr|A0A511ZE55|A0A511ZE55_9BACI Epoxyqueuosine reductase OS=Oceanobacillus sojae OX=582851 GN=queG PE=3 SV=1
MRVDELKKDIQAYAKTIGIDKIGFTTADIFTEMKERLKRQQELKYQSGFEKGSIEERTEPKRLLPEAQSIISIAVAYPSRLEKTPRGTKGDRRGIFARASWGIDYHIALRKRLDKLGEYIKARVPDAIIKSMVDTGELSDRAVAERAGVGFSGKNTSIITKEHGSFVYLGEMLTNIPFIPDEKIEDGCGDCTICLDACPTGAIVQGGQLNAQRCIAFLTQTKDFLPEEFRTKIGNRLYGCDTCQQVCPWNRDKDSHFHKELEPDPELVKPKLKPMLHLSNREFKEKFGHMSGSWRGKKPIQRNVILALGHYKEASAENDLIALMKNDPRPVIRGTAAWSLGKIGTDAAKEALSKALEKEDNEQVQYEMQNALSAMNIK

SEQ ID NO: 78845 - protein, 383 aa, Oceanobacillus sp.
  misc_feature (1)..(383): tr|A0A345PF74|A0A345PF74_9BACI Epoxyqueuosine reductase OS=Oceanobacillus sp. 160 OX=2052660 GN=queG PE=3 SV=1
MRTAELKQELIDYSKKIGIDKIGFTTADVFGELRERLRRQQELNYQSGFEKGSIEERTEPVRLLPEAQSIISIAIAYPSRMKDAPRSTKEERRGIFARASWGIDYHVVMKERLEKLAAFIMEKIPDAKNKVMVDTGELSDRAVAERAGIGFSGKNTSIITPEFGSFVYLGELITNIPFIPDDPIEDSCGECTKCMDACPTGALIQGGQLNAQRCIAFLTQTKDFLPDEFRTKIGNRVYGCDTCQQVCPRNKGIDFHTTPEFEPEHDIAKPRLRPMLKMSNREFKETFGHISGSWRGKKPLQRNALIGLGHYKDKTAVKEMITVMQDDPRPVIRGTAAWSLGKIGTDEAFEAIQAALETEQDEQVLFEMRKGLDFKEGQEMMKK

SEQ ID NO: 78846 - protein, 380 aa, Oceanobacillus sp.
  misc_feature (1)..(380): tr|A0A498D675|A0A498D675_9BACI Epoxyqueuosine reductase OS=Oceanobacillus sp. YLB-02 OX=2448030 GN=queG PE=3 S V=1
MRTERLKEEIKQYAKEIGIDKIGFATADVFGELRERLRRQQELGYQSGFEKGTLEERTEPQRLLPEAQAIISIALAYPTRMKNAPKSTKEERRGLFARASWGVDYHHVLRDRLEKLTAFIEERVPNAVNKIMVDTGELSDRAVAERAGIGFSGKNTSIITKEFGSFVYLGEMMTNIPFIPDDPVEDSCGDCRKCLDACPTGALIEGGQLNAQRCIAFLTQTKDFLPDEFRTKIGNRVYGCDTCQQVCPRNKGVDFHLHPEFEPEHDIAKPKLKPMLRISNREFKEKFGHISGSWRGKKPLQRNALLALGHYKDTTAIAEMIDVMNNDPRPVIRGTAAWSLGKIGTNEAFRAIEAAMTAEKDERVLYEMKKGLAFGNETGA

SEQ ID NO: 78847 - protein, 371 aa, Oceanobacter sp.
  misc_feature (1)..(371): tr|A0A2G2JI65|A0A2G2JI65_9GAMM Epoxyqueuosine reductase OS=Oceanobacter sp. OX=2030817 GN=queG PE=3 SV=1
MPTPITTPKPALKPTPEQLQQLRLKISEWALEAGFQQAGISNVDTGQHAEYLQHWLDAGYHGEMEYMASHVTPRGNMRALPDELLPGTLSVISLRMDYLAPDIELVGHLKDPGNAYISRYALGRDYHKLIRKRLTQLGKRIQDAIGEFGFRAFVDSAPVLERALAEQAGLGWIGKNTMLINRKAGSYFFLGEILTDLPLAPTAQEQTDQQQKNHCGRCQACLDICPTQAFVGPNVLDARRCISYLTIELNGPIPEDLRPGIGNRIFGCDDCQIGCPWNRFSKATKEDDFTPRHQLDKATLLELFAWDEKTFLSKTEGMPIRRTGYENWMRNIAVALGNAPKSIEITEALNARRGTISELVDEHIDWALGRR

SEQ ID NO: 78848 - protein, 359 aa, Oceanococcus atlanticus
  misc_feature (1)..(359): tr|A0A1Y1SGS5|A0A1Y1SGS5_9GAMM Epoxyqueuosine reductase OS=Oceanococcus atlanticus OX=1317117 GN=queG PE=3 SV= 1
MSTSSTPDPAHILHALSQWAGELGFSGLAVSRADLEKDEQLMQRWLDEGLHGEMDYLARNAEMRRNPAALVPETLSVISVRMPYWPQAAPAREILRSPHKAYISRYALGRDYHKTVRGRLRQLARRLQQQIGPFGFRAFADSAPVLEKALARDASLGWIGKNTLLIDKDQGSYFFLGELFTDLALPASQAAAVDNGCGACQACIRACPTGAILPQGQLDARRCISYLTIELKGAIPENMREAIGNRIFGCDDCQLVCPWNRHAQTAVDPDFAVRHGLDDVDLIALFGWTEETFLRNTEGMPLRRAGYISWLRNLAVALGNGPPTREAIDALNTRREHPSDIVREHVSWALERLTQPGAH

SEQ ID NO: 78849 - protein, 359 aa, Oceanococcus sp.
  misc_feature (1)..(359): tr|A0A520SLA2|A0A520SLA2_9GAMM Epoxyqueuosine reductase OS=Oceanococcus sp. OX=1958892 GN=queG PE=3 SV=1
MSTSSTPDPAHILHALSQWAGELGFSGLAVSRADLEKDEQLMQRWLDEGLHGEMDYLARNAEMRRNPAALVPETLSVISVRMPYWPQAAPAREILRSPHKAYISRYALGRDYHKTVRGRLRQLARRLQQQIGPFGFRAFADSAPVLEKALARDASLGWIGKNTLLIDKDQGSYFFLGELFTDLALPASQAAAVDNGCGACQACIRACPTGAILPQGQLDARRCISYLTIELKGAIPENMREAIGNRIFGCDDCQLVCPWNRHAQTAVDRDFAVRHGLDDVDLIALFGWTEETFLRNTEGMPLRRAGYISWLRNLAVALGNGPPTREAIDALSTRREHPSDIVREHVNWALERLTQPGAH

SEQ ID NO: 78850 - protein, 396 aa, Oceanospirillaceae bacterium
  misc_feature (1)..(396): tr|A0A350JD47|A0A350JD47_9GAMM Epoxyqueuosine reductase OS=Oceanospirillaceae bacterium OX=1899355 GN=queG PE= 3 SV=1
MPTLNAPLSAAPPSPTSPPALTEQELADIALRIKQLAEEFGFADCGITDTDNEAAGQRLEQWLDLGYHANMDYMSKHGSKRYRAHELVPGTQRIICLRMDYLDPTLTTLSTLEDAEQAYIARYALGRDYHKLVRKRLAQLSKAIEALVGPFGHRVFVDSAPVLEKPLAQKAGLGWQGKHTLLINRKQGSWFFLGEIFIDLPLPIDPPYDKDHCSRCSSCMTVCPTSAFPEPYVLDANRCIAYLTIEHKGSIDEELRPLMGNRVFGCDDCQLACPWNRAPAVSHEDDFKPRHGLDQAKLAELFMWTQEQFLSRTEGSPIRRAGFEGWQRNLAIGLGNGPATENIIKALNDQQPLASPMVKEHIDWALKQLQQRQKQLIQLTPVPLRTHLIKKLKHLT

SEQ ID NO: 78851 - protein, 359 aa, Oceanospirillaceae bacterium
  misc_feature (1)..(359): tr|A0A2D9ZZX6|A0A2D9ZZX6_9GAMM Epoxyqueuosine reductase OS=Oceanospirillaceae bacterium OX=1899355 GN=queG PE= 3 SV=1
MPEHALTRETLLQLRENIRNWALEAGFQQAGISGTDTGNHEDYLRRWLAAGYHGEMDYMARHDDDAGHMRAHPELLQPGTLSVISLRMDYLAPGTELLGQLSDPGKAYISRYALGRDYHKLIRKRLTELGKRIEAAIGPMGFRAFVDSAPLLERALAQQAGLGWIGKNTMLLNRHAGSYFFLGEILTDLPLPAETTQQSNHCGRCTACLDICPTQAFAGPYVLDARRCISYLTIELNGPIPEDLRKGMGNRIFGCDDCQIGCPWNRFSKTTTETDFTPRHQLDKATLLELFRWDEAEFLHKTEGMPIRRTGYENWVRNIAVALGNGPSSVEVTDALEQRLGSVSALVDEHIRWALAQQS

SEQ ID NO: 78852 - protein, 362 aa, Oceanospirillales bacterium
  misc_feature (1)..(362): tr|A0A3D1Y2B7|A0A3D1Y2B7_9GAMM Epoxyqueuosine reductase OS=Oceanospirillales bacterium OX=1914300 GN=queG PE=3 SV=1
MTSSRTVLTPEQLQKLRDDITQWSLEAGFQQCGFSSVDTGEHGDRLQQWLDAGYHGEMSYMADHVTERGPMRALPDELLPGTLSVISLRMDYLAPGVEVAKHLQDKNNAYISRYALGRDYHKLIRKRLTQLGKRIQSEIGDLGFRAFVDSAPILERALAEQAGIGWIGKNTMVLNRKAGSYFFLGEILTDLPLDPNNTPLKNHCGRCTSCLDICPTQAFVAPYVLDARKCISYLTIELDGPIPEELRSGIGNRIFGCDDCQIGCPWNRFSKSSEEPDFTPRHQLDKATLLELFQWDEATFLKKTEGMPIRRTGYENWMRNISVALGNAPQSIEVQEALKNQKGKISGLVDEHINWALQQQGH

SEQ ID NO: 78853 - protein, 381 aa, Oceanospirillales bacterium
  misc_feature (1)..(381): tr|A0A1Z9VVR2|A0A1Z9VVR2_9GAMM Epoxyqueuosine reductase OS=Oceanospirillales bacterium TMED91 OX=1986769 GN=qu eG PE=3 SV=1
  misc_feature (87)..(89): Xaa can be any naturally occurring amino acid
  misc_feature (91)..(92): Xaa can be any naturally occurring amino acid
  misc_feature (96)..(96): Xaa can be any naturally occurring amino acid
  misc_feature (192)..(192): Xaa can be any naturally occurring amino acid
MDASWHQSDQVLDRLREKALELGFTAIGVTDPDVSQHVSFLEHWLESGFHGSMEWFERHLDLRKDPTQLVPGTQRVISVRLDYLPEXXXCXXILNXPDMAYISRYALGRDYHKLMRKRLKHLGDWFSDEIAPHGFRVFSDSAPLLEKHLAEKAGLGWIGKHTLLLSRSAGSWFFLGELLTDFPLPVSDEHEXARCGSCTACLDICPTNAFPAPYQLDATKCISYLTIEHKGPIPEALRAPMGNRVFGCDDCQLVCPWNRYAAIGDPAFHPRHALDRQPLCELFGWTEAEFLMKTEGSPLRRAGYVKFLENLAIGLGNSHSDTERVIQTLGSKLGQHGPTLDEHILWAIAALQRRASENALGNASARQSNHAHQQAPDAGQI

SEQ ID NO: 78854 - protein, 358 aa, Oceanospirillum linum
  misc_feature (1)..(358): tr|A0A1T1H9Y3|A0A1T1H9Y3_OCELI Epoxyqueuosine reductase OS=Oceanospirillum linum OX=966 GN=queG PE=3 SV=1
MPTNSALPSPVRQQLREQIKVWGRELGFQQIGFADPDLGEHEQHLQDWLDAGYHGEMDYMASHGTKRSRPEELVEGTRTVITARMDYLPADVETTRLLSQGEKAYISRYALGRDYHKLIRKRLTQLAKKIEAEIGAYGYRAFVDSAPVLERALAMRSGLGWVGKNTMVIHPKAGSFFFLGEVMVELDLPKDPAYPKDHCGSCNACQVACPTQAIVGDKIVDGRRCISYLTIELKGSIPEALRPGIGNRIFGCDDCQLVCPWNRFTKPTQESDFTPRHSLDSADLVDLFLWDESTFLSKTEGTPIRRAGYERWLRNIAVALGNAPTTPAVIAALKHRENAPSEMVCEHVTWALRQHTVE

SEQ ID NO: 78855 - protein, 366 aa, Oceanospirillum multiglobuliferum
  misc_feature (1)..(366): tr|A0A1T4RIJ1|A0A1T4RIJ1_9GAMM Epoxyqueuosine reductase OS=Oceanospirillum multiglobuliferum OX=64969 GN=queG PE=3 SV=1
MSAEIFTSQSHPLKALTTEQDRFALREQIRVWGRELGFQQIGFAQPELAEHEQYLQAWIDNDYHGEMSYMAGHGHKRSRPNELVEGTQTVITARMDYLPADIETTTLLSQKDKAYISRYALGRDYHKLIRKRLTQLAKQIEQEIKPLGYRAFVDSAPLLERALATRSGLGWIGKNTMLIHPKAGSFFFLGEILIDLALPVDQPYPKDHCGSCRQCHLVCPTQAFVGDKLLDARRCISYLTIELKGAIPEPLRKGIGNRIFGCDDCQLACPWNRFSQHTQETDFSPRHNLDRVDLVELFAWDEETFLSKTEGTPIRRAGYERWLRNIAVALGNAPTSNEVLSALNTRLDHESPLVQEHVLWALHQHQ

SEQ ID NO: 78856 - protein, 362 aa, Oceanospirillum sp.
  misc_feature (1)..(362): tr|A0A2D5GC30|A0A2D5GC30_9GAMM Epoxyqueuosine reductase OS=Oceanospirillum sp. OX=2021254 GN=queG PE=3 SV=1
MSTPIPVSLTSQQQQQLMDNIRQWGRELGFQQIGFARPQLDEHEAHLQEWLDKGDHGEMEYMASHGNKRSRPDELVEGTKTVITARMDYLPADVETTKLLTQGEKAYISRYALGRDYHKLIRKRLTQLAKQIEQAIGPFGYRAFVDSAPILERALATRSGLGWIGKNSMVIHPKAGSFFFLGEIMIDLGLPEDAAYPKDHCGSCNACHVACPTEAFVGDKILDGRRCISYLTIELKGPIPEDLRKGVGNRIFGCDDCQLVCPWNRFTKTTLEKDFTPRHNLDHVDLVTLFAWSEEQFLKATEGTPIRRAGYERWLRNIAVGLGNAPSTPKVITALESRQQEESALVREHVEWALAQHQSNHV

SEQ ID NO: 78857 - protein, 393 aa, Ochrobactrum anthropi
  misc_feature (1)..(393): tr|A0A3R8XTK4|A0A3R8XTK4_OCHAN Epoxyqueuosine reductase OS=Ochrobactrum anthropi OX=529 GN=queG PE=3 SV=1
MATSTSNSKTEKLKRFLIEEAKAVGFDAVAFTTPDAIPQAPERLRQYIADGHHADMEWMEETEARRSDPSVLWPEVRSIMMLAMNYGPDANPLAILEQQDRAAISVYAQNRDYHDIIKGKLKHVASRFAARAGQDVKVFVDTAPVMEKPLAEAAGLGWQGKHTNLVSRELGSWLFLGSIFTTAEIPPDVPERDHCGSCRACLDACPTKAFPSPYRIDARRCISYLTIENKGPIPHEFRKAMGNRIYGCDDCLSVCPWNKFAQATSEMKLKARDDLKAPRLADLLTLDGPAFRTLFSGSPVKRIGRDRFLRNVLIATGNSGDKTLLPDVERLLEDEAPVVRGAAIWALKQLANPDHVAEMQKRLASSEEDATVQAEWTTASTRKSEAILGKHDA

SEQ ID NO: 78858 - protein, 393 aa, Ochrobactrum anthropi
  misc_feature (1)..(393): tr|A6WYK0|A6WYK0_OCHA4 Epoxyqueuosine reductase OS=Ochr obactrum anthropi (strain ATCC 49188 / DSM 6882 / JCM 2 1032 / NBRC 15819 / NCTC 12168) OX=439375 GN=queG PE=3 SV=1
MATSTSNSKTEKLKRFLIEEAKAVGFDAVAFTTPDAIPQAPERLRQYIADGHHADMEWMEETEARRSDPSVLWPEVRSIMMLAMNYGPDANPLAILEQQDRAAISVYAQNRDYHDIIKGKLKHVASRFAARAGQDVKVFVDTAPVMEKPLAEAAGLGWQGKHTNLVSRELGSWLFLGSIFTTAEIPPDAPERDHCGSCRACLDACPTKAFPSPYRIDARRCISYLTIENKGPIPHEFREAMGNRIYGCDDCLSVCPWNKFAQATSEMKLKARDDLKAPRLADLLTLDDPAFRTLFSGSPVKRIGRDRFLRNVLIATGNSGDKTLLPDVERLLEDEAPVVRGAAIWALKQLANPDHVAEMQKRLASSEEDATVQAEWTTASTRKSEAILGKHDA

SEQ ID NO: 78859 - protein, 393 aa, Ochrobactrum cytisi
  misc_feature (1)..(393): tr|A0A1J6I462|A0A1J6I462_9RHIZ Epoxyqueuosine reductase OS=Ochrobactrum cytisi OX=407152 GN=queG PE=3 SV=1
MATSTSNSKTEKLKRFLIEEAKAVGFDAVAFTTPDAIPQAPERLRQYIADGHHADMEWMEETEARRSDPSVLWPEVRSIMMLAMNYGPDANPLAILEQQDRAAISVYAQNRDYHDIIKGKLKHVASRFAARAGQDVKVFVDTAPVMEKPLAEAAGLGWQGKHTNLVSRELGSWLFLGSIFTTAEIPPDTPDRDHCGSCRACLDACPTNAFPSPYRIDARRCISYLTIENKGPIPHEFRKAMGNRIYGCDDCLSVCPWNKFAQATSEMKLKARDDLKAPRLADLLTLDDPAFRTLFSGSPVKRIGRDRFLRNVLIATGNSGDKTLLPDVERLLEDEAPVVRGAAIWALKQLANPDRVAEMQKRLASSEEDATVQAEWTTASTRKSEAILGKHDA

SEQ ID NO: 78860 - protein, 387 aa, Ochrobactrum gallinifaecis
  misc_feature (1)..(387): tr|A0A502BQ20|A0A502BQ20_9RHIZ Epoxyqueuosine reductase OS=Ochrobactrum gallinifaecis OX=215590 GN=queG PE=3 S V=1
MATSTSDKKQALEKALKLKRFLIEEAKAIGFDAVAFTGPDCIPQAPLRLRQYIADGHHADMLWMEETEERRANPSVLWPEVRSIMVLAMNYGPDNNPLEILEHKDRAAISVYAQNRDYHDIIKGKLKHIASRFAARAGQDVKVFVDTAPVMEKPLAQAAGLGWQGKHTNLVSRELGSWLFLGSIFTTADIPPDEADRDHCGSCRACLDACPTKAFPSPYRIDARRCISYLTIENKGPIPLEFRKAMGNRIYGCDDCLSVCPWNKFAQATSEMKLKARDDLKAPRLADFLALDDATFRTLFSGSPVKRIGRDRFLRNVLIAAGNSEDQTLVPLVESLLEDPAPVVRGAAVWALKQLASTDYFKTSHKRLASREEDATVRAEWIIDIGE

SEQ ID NO: 78861 - protein, 390 aa, Ochrobactrum grignonense
  misc_feature (1)..(390): tr|A0A256FGK2|A0A256FGK2_9RHIZ Epoxyqueuosine reductase OS=Ochrobactrum grignonense OX=94627 GN=queG PE=3 SV=1
MATSTSETKQVSGQVSERDLKLKRFLIEEAKAVGFDAVAFTTPDTIPQAPQRLRQYIADGHHADMLWMEETEDRRANPSVLWPEVRSIMILAMNYGPDSNPLGILEHKNRAAISVYAQNRDYHDIIKGKLKHVASRFAARAGQDVKVFVDTAPVMEKPLAEAAGVGWQGKHTNLVSRELGSWLFLGSIFTTAEIPPDEPDRDHCGSCRVCLDACPTKAFPSPYRIDARRCISYLTIENKGPIPHEFRKAMGNRIYGCDDCLSVCPWNKFAQATSEMKLKARDDLKAPRLADFLVLDDPAFRTLFSGSPVKRIGRDRFLRNVLIAAGNSQDPSLLPQIENLLEDPAPVVRGAAVWAFKQLATMERFKISKKRLASSEEDDTVRAEWILEDV

SEQ ID NO: 78862 - protein, 381 aa, Ochrobactrum haematophilum; identical to SEQ ID NO: 75253
  misc_feature (1)..(381): tr|A0A2P9HQ11|A0A2P9HQ11_9RHIZ Epoxyqueuosine reductase OS=Ochrobactrum haematophilum OX=419474 GN=queG PE=3 S V=1

SEQ ID NO: 78863 - protein, 381 aa, Ochrobactrum haematophilum
  misc_feature (1)..(381): tr|A0A397L2L6|A0A397L2L6_9RHIZ Epoxyqueuosine reductase OS=Ochrobactrum haematophilum OX=419474 GN=queG PE=3 S V=1
MATSISETRPEKLKRFLIEEAKAVGFDAVAFTTPDAIPQAPERLRQYIADGYHADMLWMEETEERRASPGVLWPEVRSIMMLAMNYGPDTDPLAILDRQDRAAISVYAQNRDYHDIIKGKLKHVASRFAARAGQDVKVFVDTAPVMEKPLAEAAGLGWQGKHTNLVSRELGSWLFLGSIFTTAEIPPDQPERDHCGSCRACLDACPTRAFPSPYRIDARRCISYLTIENKGPIPLEFRKVMGNRIYGCDDCLSVCPWNKFARATSEMKLKARDDLKAPRLCDLLALDDPAFRTLFSGSPVKRIGRDRFIRNVLIAAGNSGDTSLLPQIETLLGDAAPVVRGAAVWALKQLAEPHRIDALQKRLASTEEDATVQAEWRLETV

SEQ ID NO: 78864 - protein, 382 aa, Ochrobactrum intermedium
  misc_feature (1)..(382): tr|U4V9Q6|U4V9Q6_9RHIZ Epoxyqueuosine reductase OS=Ochr obactrum intermedium 229E OX=1337887 GN=queG PE=3 SV=1
MATSISDSRQQKLKCFLIEEAKAAGFDAVAFTTPDAIPQAPERLRQYIADGHHADMDWMEETEARRADPSVLWPEVRSIMMLAMNYGPDANPLAILEKQDRAAISVYAQNRDYHDIIKGKLKHIASRFAARAGQDVKVFVDTAPVMEKPLAQAAGLGWQGKHTNLVSRELGSWLFLGSIFTTAEIPPDEPERDHCGSCRACLDACPTKAFPAPYRIDARRCISYLTIENKGPIPQEFRKAMGNRIYGCDDCLSVCPWNKFAQATSEMKLKAREDLKEPRLNDLLALDDPAFRTLFSGSPVKRIGRDRFIRNVLIATGNSGDATLLPDVERLLEDEAPVVRGAAIWALKQLASPPDHAASVQKRLASLEEDATVQAEWDMEEV

SEQ ID NO: 78865 - protein, 381 aa, Ochrobactrum intermedium
  misc_feature (1)..(381): tr|M5JM59|M5JM59_9RHIZ Epoxyqueuosine reductase OS=Ochr obactrum intermedium M86 OX=1234597 GN=queG PE=3 SV=1
MATSISDSRQQKLKCFLIEEAKAAGFDAVAFTTPDAIPQAPERLRQYIADGHHADMDWMEETEARRADPSVLWPEVRSIMMLAMNYGPDANPLAILEKQDRAAISVYAQNRDYHDIIKGKLKHIASRFAARAGQDVKVFVDTAPVMEKPLAQAAGLGWQGKHTNLVSRELGSWLFLGSIFTTAEIPPDEPERDHCGSCRACLDACPTKAFPAPYRIDARRCISYLTIENKGPIPQEFRKAMGNRIYGCDDCLSVCPWNKFAQATSEMKLKAREDLKEPRLNDLLALDDPAFRTLFSGSPVKRIGRDRFIRNVLIATGNSGDATLLPDVERLLEDEAPVVRGAAIWALKQLASPDHAASVQKRLASLEEDATVQAEWDMEEV

SEQ ID NO: 78866 - protein, 393 aa, Ochrobactrum lupini
  misc_feature (1)..(393): tr|A0A256GVR9|A0A256GVR9_9RHIZ Epoxyqueuosine reductase OS=Ochrobactrum lupini OX=255457 GN=queG PE=3 SV=1
MATSTSNSKTEKLKRFLIEEAKAVGFDAVAFTTPDAIPQAPERLRQYIADGHHADMEWMEETEARRSDPSVLWPEVRSIMMLAMNYGPDANPLAILEQQDRAAISVYAQNRDYHDIIKGKLKHVASRFAARAGQDVKVFVDTAPVMEKPLAEAAGLGWQGKHTNLVSRELGSWLFLGSIFTTAEIPPDAPDRDHCGSCRACLDACPTKAFPSPYRIDARRCISYLTIENKGPIPHEFRKVMGNRIYGCDDCLSVCPWNKFAQATSEMKLKARDDLKAPRLADLLTLDDPAFRTLFSGSPVKRIGRDRFLRNVLIATGNSGDKTLLPDVERLLEDEAPVVRGAAIWALKQLANPDRVAEMQKRLASSEEDATVQAEWTTASTRKSEAILGKHDA

SEQ ID NO: 78867 - protein, 393 aa, Ochrobactrum oryzae
  misc_feature (1)..(393): tr|A0A2S7IZR2|A0A2S7IZR2_9RHIZ Epoxyqueuosine reductase OS=Ochrobactrum oryzae OX=335286 GN=queG PE=3 SV=1
MATSTSSLKTDKLKRFLIEEAKAVGFDAVAFTTPDAIPQAPERLRQYIADGHHADMEWMEETEARRSDPSVLWPEVRSIMMLAMNYGPDVNPLAILDEKDRAAISVYAQNRDYHDIIKGKLKHVASRFAARAGQDVKVFVDTAPVMEKPLAAAAGLGWQGKHTNLVSRELGSWLFLGSIFTTAEIPPDEPERDHCGSCRACLDACPTKAFPSPYRIDARRCISYLTIENKGPIPHEFRKLMGNRIYGCDDCLSVCPWNKFAQATNEMKLKARDDLKEPRLSDLLALDDPAFRTLFSGSPVKRIGRDRFIRNVLIAAGNSDDTALLPDIEHLLEDEAPVVRGAAIWALKQLADPDRVAEMQKRLASSEEDVTVRAEWNTASARKSESIFGKHDA

SEQ ID NO: 78868 - protein, 381 aa, Ochrobactrum pecoris
  misc_feature (1)..(381): tr|A0A5C5CHH8|A0A5C5CHH8_9RHIZ Epoxyqueuosine reductase OS=Ochrobactrum pecoris OX=867683 GN=queG PE=3 SV=1
MATSTSSSKTEKLKRFLIEEAKAVGFDAVAFTTPDAIPQAPERLRQYIADGHHADMEWMEETEARRADPSVLWPEVRSIMMLAMNYGPDVNPLAILDEKDRAAISVYAQNRDYHDIIKGKLKHVASRFAARAGQDVKVFVDTAPVMEKPLAEAAGLGWQGKHTNLVSRELGSWLFLGSIFTTAEIPPDEPDRDHCGSCRACLDACPTKAFPSPYRIDARRCISYLTIENKGPIPHEFRRAMGNRIYGCDDCLSVCPWNKFAQATSEMKLMARDDLKAPRLADLLKLDDAAFRTLFSGSPVKRIGRDRFIRNVLIATGNSGDEALLPDVERLLEDEAPVVRGAAIWALKQLAEPNRVAQMQKRLASIEEDATVQAEWNTEAV

SEQ ID NO: 78869 - protein, 388 aa, Ochrobactrum pseudogrignonense
  misc_feature (1)..(388): tr|A0A256GQ78|A0A256GQ78_9RHIZ Epoxyqueuosine reductase OS=Ochrobactrum pseudogrignonense OX=419475 GN=queG PE =3 SV=1
MATSTSDTSQASDKALKLKRFLIEEAKAVGFDAVAFTGPDAIPQAPQRLRQYIADGHHADMLWMEETEERRANPSVLWPEVRSIMVLAMNYGPDSNPLSILEHKDRAAISVYAQNRDYHDIIKGKLKHIASRFAARAGQDVKVFVDTAPVMEKPLAQAAGLGWQGKHTNLVSRELGSWLFLGSIFTTAEIPPDEPDRDHCGSCRACLDACPTKAFPSPYRIDAGRCISYLTIENKGPIPHEFRKAMGNRIYGCDDCLSVCPWNKFAQATSEMKLKARDDLKAPKLADFLALDDPAFRTLFSGSPVKRIGRDRFLRNVLIATGNSEDQTLVPQVESLLEDPAPVVRGAAVWALKQLVSTDRFKISQKRLASREEDATVRAEWSLEHQSD

SEQ ID NO: 78870 - protein, 388 aa, Ochrobactrum pseudogrignonense
  misc_feature (1)..(388): tr|A0A1A9FN00|A0A1A9FN00_9RHIZ Epoxyqueuosine reductase OS=Ochrobactrum pseudogrignonense OX=419475 GN=queG PE =3 SV=1
MATSTSDTSQASDKALKLKRFLIEEAKAVGFDAVAFTGPDSIPQAPQRLRQYIADGHHADMLWMEETEERRANPSVLWPEVRSIMVLAMNYGPDSNPLSILEHKDRAAISVYAQNRDYHDIIKGKLKHIASRFAARAGQDVKVFVDTAPVMEKPLAQAAGLGWQGKHTNLVSRGLGSWLFLGSIFTTAEIPPDEPDRDHCGSCRACLDACPTKAFPSPYRIDAGRCISYLTIENKGPIPHEFRKAMGNRIYGCDDCLSVCPWNKFAQATSEMKLKARDDLKAPKLADFLALDDPAFRTLFSGSPVKRIGRDRFLRNVLIATGNSEDQTLVPQVESLLEDPAPVVRGAAVWALKQLVSTDRFKISQKRLASREEDATVRAEWSLEHQSD

SEQ ID NO: 78871 - protein, 390 aa, Ochrobactrum quorumnocens
  misc_feature (1)..(390): tr|A0A248UIJ1|A0A248UIJ1_9RHIZ Epoxyqueuosine reductase OS=Ochrobactrum quorumnocens OX=271865 GN=queG PE=3 SV =1
MATSTSETKQVSGQVSEKDLKLKRFLIEEAKAVGFDAVAFTTPDTIPQAPQRLRQYIADGHHADMLWMEETEDRRANPSVLWPEVRSIMILAMNYGPDSNPLSILEHKDRAAISVYAQNRDYHDIIKGKLKHVASRFAARAGQDVKVFVDTAPVMEKPLAEAAGIGWQGKHTNLVSREHGSWLFLGSIFTTAEIPPDKPDRDHCGSCRACLDACPTNAFPSPYRIDARRCISYLTIENKGPIPPEFRKSMGNRIYGCDDCLSVCPWNKFAQATSEMKLKARDDLKAPRLADFLVLDDPAFRTLFSGSPVKRIGRDRFLRNVLIAAGNSQDPSLLAQVENLLGDTSPVVRGAAVWAFKQLATTERFTILQKRLASSEEDDTVREEWILEDS

SEQ ID NO: 78872 - protein, 390 aa, Ochrobactrum rhizosphaerae
  misc_feature (1)..(390): tr|A0A256FAP8|A0A256FAP8_9RHIZ Epoxyqueuosine reductase OS=Ochrobactrum rhizosphaerae OX=571254 GN=queG PE=3 S V=1
MATSTSETKQVSGPASEKDLKLKRFLIEEAKAVGFDAVAFTTPDTIPQAPQRLRQYIADGHHADMLWMEETEDRRANPSVLWPEVRSIMILAMNYGPDSDPLTILEHKDRAAISVYAQNRDYHDIIKGKLKHVASRFAARAGQDVKVFVDTAPVMEKPLAEAAGIGWQGKHTNLVSREHGSWLFLGSIFTTAEIPPDKPERDHCGSCRACLDACPTNAFPSPYRIDARRCISYLTIENKGPIPHEFRKSMGNRIYGCDDCLSVCPWNKFAQATSEMKLKARDDLKAPRLADFLVLDDPGFRTLFSGSPVKRIGRDRFIRNVLIATGNSQDQSLLTQVENLLEDPAPVVRGAAVWAFKQLAPMERFTILQKRLASDEEDDTVRAEWILEDS

SEQ ID NO: 78873 - protein, 230 aa, Ochrobactrum sp.
  misc_feature (1)..(230): tr|A0A3D2CYD3|A0A3D2CYD3_9RHIZ tRNA epoxyqueuosine(34) reductase QueG (Fragment) OS=Ochrobactrum sp. OX=42190 GN=queG PE=4 SV=1
MATSISDSRPQKLKRFLIEEAKAAGFDAVAFTTPDAIPHAPERLRQYIADGHHADMDWMEETEARRADPSVLWPEVRSIMMLAMNYGPDANPLAILEKQDRAAISVYAQNRDYHDIIKGKLKHIASRFAARAGQDVKVFVDTAPVMEKPLAQAAGLGWQGKHTNLVSRELGSWLFLGSIFTTAEIPPDAPDRDHCGSCRACLDACPTKAFPAPYRIDARRCISYLTIENK

SEQ ID NO: 78874 - protein, 381 aa, Ochrobactrum sp.
  misc_feature (1)..(381): tr|A0A317L841|A0A317L841_9RHIZ Epoxyqueuosine reductase OS=Ochrobactrum sp. POC9 OX=2203419 GN=queG PE=3 SV=1
MATSTSNSKTDKLKRFLIEEAKAVGFDAVAFTTPDAIPQAPERLRQYIADGHHADMEWMEETEARRSDPSVLWPEVRSIVMLAMNYGPDANPLAILEKRDCAAISVYAQNRDYHDIIKGKLKHVASRFAARAGQDVKVFVDTAPVMEKPLAEAAGLGWQGKHTNLVSRELGSWLFLGSIFTTAEIPPDEPERDHCGSCRACLDACPTKAFPSPYRIDARRCISYLTIENKGPIPHEFRKVMGNRIYGCDDCLSVCPWNKFAQATSEMKLKAREDLKAPRLADLLILDDPAFRTLFSGSPVKRIGRDRFIRNVLIATGNSGEAALLPDVERLLEDEAPVVRGAAIWALKQLANPDRVAEMQKRLASSEEDATVQAEWNTEAI

SEQ ID NO: 78875 - protein, 388 aa, Ochrobactrum thiophenivorans
  misc_feature (1)..(388): tr|A0A256FZ21|A0A256FZ21_9RHIZ Epoxyqueuosine reductase OS=Ochrobactrum thiophenivorans OX=571255 GN=queG PE=3 SV=1
MATSISDNNKAAEKALKLKRFLIEEAKAVGFDVVAFTGPDSIPQAPQRLRQYIADGHHADMLWMEETEERRGNPSVLWPEVRSIMVLAMNYGPDSNPLEILKHKDRAAISVYAQNRDYHDIIKGKLKHVASRFAARAGQDVKVFVDTAPVMEKPLAQAAGLGWQGKHTNLVSRELGSWLFLGSIFTTAEIPPDEPDRDHCGSCRACLDACPTKAFPSPYRIDAGRCISYLTIENKGPIPHEFRKAMGNRIYGCDDCLSVCPWNKFAQATSEIKLKARDDLKAPKLADFLALDDASFRTLFSGSPVKRIGRDRFLRNVLIATGNSEDQTLVPQVESLLEDPAAVVRGAAVWAFKQLAEEEHFKILKNRLASAEEDDTVREEWVLEPISI

SEQ ID NO: 78876 - protein, 345 aa, Octadecabacter antarcticus
  misc_feature (1)..(345): tr|M9RCM0|M9RCM0_9RHOB Epoxyqueuosine reductase OS=Octa decabacter antarcticus 307 OX=391626 GN=queG PE=3 SV=1
MVADMKDKLRAKALEEGFAGFGVCRPDAVPELPERLQRFVDEGHHGQMAWMAERMAWRSDPSALWPEARSVVMLAEPYTPQHDPLAVLEQKDRAAISVYAQNRDYHDVVKKRLKRVGRWLVDEAGCEIKVFVDTAPVMEKPLAAAAGLGWQGKHTNLLSRELGNWFFLGAIFTTLDLEPDTAEVEKCGSCTACLDICPTNAFPAPFQLDARRCISYLTIEHKGPVPEDLRALMGNRIYGCDDCLAVCPWNKFAVEAREIRYAARPELVAPPLRELVALDDGAFRAMFSGSPVKRIGRNRFVRNVLYAIGNSGDPALKDAAAALIGDPAEEVADAARWAVECLDKG

SEQ ID NO: 78877 - protein, 299 aa, Octadecabacter arcticus
  misc_feature (1)..(299): tr|M9RPL8|M9RPL8_9RHOB Putative iron-sulfur cluster-bin ding protein OS=Octadecabacter arcticus 238 OX=391616 G N=OA238_c46910 PE=4 SV=1
MAWMAERMAWRSDPTALWPEARSVVMLAEPYTPEHDPLAVLEQRDRAAISVYAQNRDYHDLVKKRLKRVGRWLVDEAGCEIKVFVDTAPVMEKPLAAAAGLGWQGKHTNLLSRELGNWFFLGSIFTTLDLEPDKAEAEKCGSCTACLDICPTNAFPAPFQLDARRCISYLTIEHKGPVPEDLRALMGNRIYGCDDCLAVCPWNKFAVEAREIRYAARPELVAPPLRDLVALDDGAFRAMFSGSPVKRIGRNRFVRNVLYAIGNSGDAALTDAAAALTGDPAAEVADAAVWAVAQLGGKE

SEQ ID NO: 78878 - protein, 204 aa, Octadecabacter ascidiaceicola
  misc_feature (1)..(204): tr|A0A238K9V9|A0A238K9V9_9RHOB Epoxyqueuosine reductase OS=Octadecabacter ascidiaceicola OX=1655543 GN=queG_1 PE=4 SV=1
MTLDEVNAAASALHLTALGGFHEDGKTTILLGPLEPGFWPFVTDHPDFKGDDPLDNWSSAVISTLADNLNAQAVFPFGGPPFHPFIAWALRSGEVWTSPVGLLVHKDAGLLVSYRGALVFDCEIPLPAPATSPCDSCTDKPCLTACPVSALSPSGYDVVSCKAHMDVDETCRVACRVRMSCPVSQSYHRDPAQTAFHMEAFHPS

SEQ ID NO: 78879 - protein, 346 aa, Octadecabacter ascidiaceicola
  misc_feature (1)..(346): tr|A0A238KFA7|A0A238KFA7_9RHOB Epoxyqueuosine reductase OS=Octadecabacter ascidiaceicola OX=1655543 GN=queG_2 PE=3 SV=1
MVEALKDQLRAKALEEGFVGFGVCRPDAVPLLPDKLQTFVDEGRHGQMGWMAERMTWRSDPTALWPEAKSVVMLAEPYTPEHDPLAVLEQKDRGAISVYAQNRDYHDIVKKRLKRVGRWLVDQAACEIKVFVDTAPVMEKPLAAAAGLGWQGKHTNLLSRELGNWFFLGAIFTTVELEPDEAGVENCGSCTACLDVCPTKAFPAPFQLDARRCISYLTIEHRGPVPEDLRALMGNHIYGCDDCLAVCPWNKFAADAQEIKYAARAELVAPSLRELAGLDDGAFRVLFSGSPIKRIGRDRFVRNVLYAIGNSSDGALRDVAISLLEDPADEVSDAARWAAARLAETS

SEQ ID NO: 78880 - protein, 174 aa, Octadecabacter sp.
  misc_feature (1)..(174): tr|A0A3D3ZVK2|A0A3D3ZVK2_9RHOB tRNA epoxyqueuosine(34) reductase QueG (Fragment) OS=Octadecabacter sp. OX=1920 174 GN=queG PE=4 SV=1
TTLELEPDVAGIENCGSCTACLDVCPTKAFPAPFQLDARRCISYLTIEHKGPIPEDLRALMGNHIYGCDDCLAVCPWNKFAQDAREIKYAARAELVAPSLRDLAGLDDGAFRALFSGSPIKRIGRDRFVRNVLYAIGNSGDLALRDVATGLQEDTADEVADAARWAAIRLVEKT

SEQ ID NO: 78881 - protein, 345 aa, Octadecabacter sp.
  misc_feature (1)..(345): tr|A0A5B9EW73|A0A5B9EW73_9RHOB Epoxyqueuosine reductase OS=Octadecabacter sp. SW4 OX=2602067 GN=queG PE=3 SV=1
MTADLKERLRAQALSEGFAQMGVCRPDAVPDLPDRLAAFLADGRHGQMSWMAERAGWRADPGALWPAVRSVIMLAEPYTPTHDPLAVLDQPDRAAISVYAQNRDYHDVVKKRLKRLARWLIDQADGAEIKVFVDTAPVMEKPLGAAAGLGWQGKHTNLLGRDLGNWFFLGAIFTTVTLEPDEAGVESCGSCTACLDICPTDAFPAPFQLDARRCISYLTIEHHGPVDEDLRALMGNRIYGCDDCLAVCPWNKFAQEAREAKYHARPELVAPDLAKLATLDDAVFRALFSGSPIKRIGRNRFLRNVLYAIGNSGEARLMDSARLHVDDPAAEVADAARWAIARLTP

SEQ ID NO: 78882 - protein, 204 aa, Octadecabacter temperatus
  misc_feature (1)..(204): tr|A0A0K0Y1S7|A0A0K0Y1S7_9RHOB Epoxyqueuosine reductase OS=Octadecabacter temperatus OX=1458307 GN=queG_1 PE=4 SV=1
MTLDEVNAAAKALHLTALSGFHEDGKTTILLGPLEPGFWSFVTDRPDFKGDDPLDNWSCATISSLADDLNAKAVFPFGGPPYHPFIAWALRSGEVWTSPVGLLVHKDAGLLVSYRGALVFDEVIDLPNPATSPCNSCTDKPCLTACPVSALGPDGYDVERCKAHMDVDETCRAACRVRMSCPVSQTYRRDPAQTTFHMEAFHPS

SEQ ID NO: 78883 - protein, 346 aa, Octadecabacter temperatus
  misc_feature (1)..(346): tr|A0A0K0Y9Q7|A0A0K0Y9Q7_9RHOB Epoxyqueuosine reductase OS=Octadecabacter temperatus OX=1458307 GN=queG_2 PE=3 SV=1
MTEALKDRLKIKALEEGFVGFGVCRPDAVPQLPERLKHFVDEGRHGQMAWMAERMTWRSDPSALWPEAKSVVMLAEPYTPEHDPMAVLEQKDRGAISVYAQNRDYHDIVKKRLKRVGRWLVDQAECEIKVFVDTAPVMEKPLAAAAGLGWQGKHTNLLSRELGNWFFLGAIFTTLELETDEAGVENCGSCTACLDVCPTKAFPAPFQLDARRCISYLTIEHKGPVPEDLRALMGNHIYGCDDCLAVCPWNKFAAEAREIKYAARPELVAPSLRELAGLDDGAFRTLFSGSPVKRIGRDRFVRNVLYAIGNSGDVALRDVVVGLMKDPADEVADAARWADARLEDSI

SEQ ID NO: 78884 - protein, 302 aa, Odoribacter laneus
  misc_feature (1)..(302): tr|R5VPF3|R5VPF3_9BACT Putative iron-sulfur cluster-bin ding protein OS=Odoribacter laneus CAG:561 OX=1263089 G N=BN709_01719 PE=4 SV=1
MIFDPRGTLKLEDFCRKAATLGFDGIGVAPYEKLGQEIRHLQLWLQKGCQAGMSYMERNVDKREDPRLLVENAHSLIVTLTNYFHPFRQAEGIPVIARYAYGKDYHKIVKEKLEQLKGQIAGRCFVDSAPVLEHEWARRAGLGWVGKNTLLINREKGSFCFIGIIITPEKFDRYHIPFDKNYCGNCNRCIEACPTGALVPYQLDARKCISYHTIENKGEYPEFVKQKAGERIFGCDICQEVCPWNSRAKMHQVAAFLPSPERLNLQKEDWKKMDEFTFARLFKDTPLERTGLARILRNLSGA

SEQ ID NO: 78885 - protein, 302 aa, Odoribacter laneus
  misc_feature (1)..(302): tr|H1DJL3|H1DJL3_9BACT Putative iron-sulfur cluster-bin ding protein OS=Odoribacter laneus YIT 12061 OX=742817 GN=HMPREF9449_02449 PE=4 SV=1
MISDPRGTLKLEDFCRKAATLGFDVIGVAPYEKLGQEIRHLQLWLQKGCQAGMSYMERNVDKREDPRLLVENAHSLIVTLTNYFHPFRQAEGIPVIARYAYGKDYHKIVKEKLEQLKGQIAGRCFVDSAPVLEHEWARRAGLGWVGKNTLLINREKGSFCFIGIIITPEKFDRYHIPFDKNYCGNCNRCIEACPTGALAPYQLDARKCISYHTIENKGEYPEFVKQKAGERIFGCDICQEVCPWNSRAKMHQVAAFLPSPERLNLQKEDWKKMDEFTFARLFKDTPLERTGLARILRNLSDA

SEQ ID NO: 78886 - protein, 299 aa, Odoribacter sp.
  misc_feature (1)..(299): tr|A0A416VQ59|A0A416VQ59_9BACT tRNA epoxyqueuosine(34) reductase QueG OS=Odoribacter sp. AF15-53 OX=2292236 GN =queG PE=4 SV=1
MKLEVLKNKAWECGFDACGVVPVEILTRERERLERWLGRGFHAGMNYMANNIEKRENPALLVEGARSVIVTLTNYYTSERQHPDAPIAARYAYGKDYHRVVKDRLFKLYSSLQEKDGRKITGRIFVDSAPVFEHEWARRAGLGWIGRNSLLIHPKLGSFCFIGVIISDFEPDSYSSSESRNFCGTCNRCVKACPTGALSPYEVNANLCISYNTIERKDEIPPLIKEKMGNRFFGCDACQDACPWNRGAVLHHVEEFASNPWVMTMSREDWLDMDEDTFKERFADTPFTRPGLERIKRNI

SEQ ID NO: 78887 - protein, 297 aa, Odoribacter sp.
  misc_feature (1)..(297): tr|A0A373U2D9|A0A373U2D9_9BACT tRNA epoxyqueuosine(34) reductase QueG OS=Odoribacter sp. AF21-41 OX=2293111 GN =queG PE=4 SV=1
MEALLEKAKECGFDACGIVPVDVLFRERERLERWIGQGFHAGMNYMANNIEKRENPALLVEGARSVIVTLTNYYTPKLQSEGIPVVARYAYGKDYHRVVKDRLFKLHTCLEEVTGRKITGRAFVDSAPVFEHEWARRAGLGWIGRNSLLIHPRLGSYCFIGVIISDFEPSRYSLPEERNFCGQCNRCVEACPTGALSSHEVNANLCISYNTIERKDDIPSEIKKKMGDRFFGCDACQEVCPWNRKAVLHHVEEFSPNEWLMRMSREEWLALDEETFQVRFKESPLQRPGLERIKHNL

SEQ ID NO: 78888 - protein, 339 aa, Oharaeibacter diazotrophicus
  misc_feature (1)..(339): tr|A0A4R6R6A4|A0A4R6R6A4_9RHIZ Epoxyqueuosine reductase OS=Oharaeibacter diazotrophicus OX=1920512 GN=queG PE= 3 SV=1
MRARAAALGFAAVGVTTPDAIAAAGPRLAAFVAAGRHGTMSWLAERTDERADPGVLWPEVRSVVMLAANYGPEGDPLAGLADRAVGNVSVYARGRDYHDVLKGRLKEVAQLLEARSGARVKVFVDTAPVMEKPLAAAAGIGWQGRHTNLVSRDFGSWLFLGAIFTTAVLPVDAPAEDRCGSCRACLDACPTDAFPAPYQLDARRCISYLTIEHDGPIPEEFRAAIGNRVYGCDDCLAVCPWNKFAAAAAEIKLAARPELVAPRLADLAGLDDAGFRALFSASPVKRIGRARFLRNVLVAIGNSGDPALAAAAAPHRDDPDPVIADAARWALARLSDATA

SEQ ID NO: 78889 - protein, 308 aa, Ohtaekwangia koreensis
  misc_feature (1)..(308): tr|A0A1T5LLA3|A0A1T5LLA3_9BACT Epoxyqueuosine reductase OS=Ohtaekwangia koreensis OX=688867 GN=queG PE=3 SV=1
MQPAQYTHLVKHIAAELGFSFCGISKAEFLHEEAPRLEAWLKRSYQGKMSYLENHFDKRLDPTLLVPGAKSVVSLIYNYFPKEDLAKEGQLKIAKYAYGEDYHFVVKDKLKLFMERLQQQVGEVNGRAFVDSAPVMERTWAKKSGLGWIGKNSLLLNRQMGSFFFLAELIIDLELEYDGPVKDYCGTCTACIDACPTDAIAEPYVVDGSKCISYFTIELKEEIPNDVKGKFENWIFGCDICQDVCPWNSFSKPHHEPRFMPDGDLEKMSLKDWKEITDEVFQKIFRHSPVKRTKLEGLKRNIQFIREE

SEQ ID NO: 78890 - protein, 307 aa, Okeania hirsuta
  misc_feature (1)..(307): tr|A0A3N6PPT7|A0A3N6PPT7_9CYAN Epoxyqueuosine reductase OS=Okeania hirsuta OX=1458930 GN=queG PE=3 SV=1
MKSALSISQIKQKALEVGFHKVGIASVNELGSDTERLQAWLNKGYQADLRWMANPKRQNLKLVMPEVESIICVALNYYTLHQHSENSEIGKISRYGWGRDYHKVMHQKLKALSNWLQEQEKEILTRYYADTGPVPEKPLAQQAGLGWIAKNGNLITREYGSWVFLGEVLTNLELTSDRPHAQHCGSCTRCLEACPTNAIVEPFVVDANFCIAYHTIENRNPELPEYIKSNLKGWVAGCDICQDVCPWNERFAQKTNIDDFQPYPGNVTPKLTELAEISQQDWDKQFPASALRRIKPEMLRRNACANL

SEQ ID NO: 78891 - protein, 367 aa, Oleiagrimonas soli
  misc_feature (1)..(367): tr|A0A099CVC8|A0A099CVC8_9GAMM Epoxyqueuosine reductase OS=Oleiagrimonas soli OX=1543381 GN=queG PE=3 SV=1
MPRMPDLPAHLDPHALVADIRDWAKALGFSALGVAGTSLREDEAHLEDWLAQGLHGEMAYMQRHGRKRSRPDELEPGTRRVICVRMDYMPPGVRGAWSVIEDDQRGYVARYALGRDYHKLMRLRLQKLADRIADAVGPFGYRAFVDSAPVLEKALARDAGLGWIGKHTLLLSRDASSWFLLGELFTDLPLPLDEPASAHCGSCRRCIDICPTQAIVAPYRLDARRCISYLTIELKGAIPEPLRAPMGNRIFGCDDCQLVCPWNKFAQQATEPDFAPRHGLDGAKLTELFAWDEETFLQRTQGMAIRRTGYEGWLRNIAVALGNAAPSPAVVDALQARADHPSALVREHVAWALREQQGKRSKAEAAD

SEQ ID NO: 78892 - protein, 364 aa, Oleiagrimonas sp.
  misc_feature (1)..(364): tr|A0A328SYQ5|A0A328SYQ5_9GAMM Epoxyqueuosine reductase OS=Oleiagrimonas sp. MCCC 1A03011 OX=1926883 GN=queG P E=3 SV=1
MSALPDHIDPHALITDIRGWAKELGFSALGVTGTSLREDESHLEDWLDQGMHGEMAYMRRHGRKRSRPEELEPGTQRVICVRMDYMPPGVRGAWSVIEDPALGYVARYALGRDYHKLMRNRLQKLADRIAGVVGPFGYRAFVDSAPVLEKALARNAGLGWIGKHTLLLSRDASSWFLLGELFTDLPLPLDEPASAHCGSCRRCIDICPTQAIVAPYRLDARRCISYLTIELRGSIPEPLRAPMGNRIFGCDDCQLVCPWNKFAQQATEPDFAPRHGLDGAKLTELFAWDEDTFLLRTQGMAIRRTGYEGWLRNIAVALGNAAPSPAVVDALKARADHPSALVREHVAWALREQDKKAGCAGTAG

SEQ ID NO: 78893 - protein, 362 aa, Oleibacter marinus
  misc_feature (1)..(362): tr|A0A1N7NP62|A0A1N7NP62_9GAMM Epoxyqueuosine reductase OS=Oleibacter marinus OX=484498 GN=queG PE=3 SV=1
MTSSRTVLTPEQLQKLRDDITQWSLEAGFQQCGFSSVDTGEHGDRLQQWLDAGYHGEMSYMADHVTERGPMRALPDELLPGTLSVISLRMDYLAPGVEVAKHLQDKNNAYISRYALGRDYHKLIRKRLTQLGKRIQSEIGDLGFRAFVDSAPILERALAEQAGIGWIGKNTMVLNRKAGSYFFLGEILTDLPLDPNDTPLKNHCGRCTSCLDICPTQAFVAPYVLDARKCISYLTIELDGPIPEELRSGIGNRIFGCDDCQIGCPWNRFSKSSEEPDFTPRHQLDKATLLELFQWDEATFLKKTEGMPIRRTGYENWMRNISVALGNAPQSIEVQEALKNQKGKISGLVDEHINWALQQQGH

SEQ ID NO: 78894 - protein, 291 aa, Oleibacter sp.
  misc_feature (1)..(291): tr|A0A2D8ADK9|A0A2D8ADK9_9GAMM tRNA epoxyqueuosine(34) reductase QueG (Fragment) OS=Oleibacter sp. OX=2024845 GN=queG PE=4 SV=1
RSRPQELLPGTLRVISLRMDYLAPDVSITEQLQDKNQAYISRYALGRDYHKLVRKRLTQLGKLIQQAAGEMGFRAFVDSAPVLERALAQRAGLGWQGKNTMLINRKAGSYFFLGEILTDLPLPTDAAYEQEHCGRCTACLDICPTQAFVGPYTLDARRCISYLTIELDGPIPQDLRTGIGNRIFGCDDCQIGCPWNRFSHESSEPDFSPRANLDKASLLELFAWDEATFLKNTEGMPIRRTGYENWLRNIAVALGNAPASIEVEQALLAKRPQVGALVQEHIDWALTQQKL

SEQ ID NO: 78895 - protein, 370 aa, Oleiphilus messinensis
  misc_feature (1)..(370): tr|A0A1H5Z7G6|A0A1H5Z7G6_9GAMM Epoxyqueuosine reductase OS=Oleiphilus messinensis OX=141451 GN=queG PE=3 SV=1
MSDPISQSDLKLLPTNSALPSPVRQQLREQIKVWGRELGFQQIGFADPDLGEHEQHLQDWLDAGYHGEMDYMASHGTKRSRPEELVEGTRTVITARMDYLPADVETTRLLSQGEKAYISRYALGRDYHKLIRKRLTQLAKKIEAEIGAYGYRAFVDSAPVLERALAMRSGLGWVGKNTMVIHPKAGSFFFLGEVMVELDLPKDPAYPKDHCGSCNACQVACPTQAIVGDKIVDGRRCISYLTIELKGSIPEALRPGIGNRIFGCDDCQLVCPWNRFTKPTQESDFTPRHSLDSADLVDLFLWDESTFLSKTEGTPIRRAGYERWLRNIAVALGNAPTTPAVIAALKHRENAPSEMVCEHVTWALRQHTVE

SEQ ID NO: 78896 - protein, 349 aa, Oleiphilus messinensis
  misc_feature (1)..(349): tr|A0A1Y0I655|A0A1Y0I655_9GAMM Epoxyqueuosine reductase OS=Oleiphilus messinensis OX=141451 GN=queG PE=3 SV=1
MNFAQLALDIKQWASELGFAQAGITDTDLANTGDRLKQWLAAGYHGEMDYMASHGSKRYNPEELIPGTTRVISVRMDYYPEQRDEGKQQLDTPEKAYISRYTLGRDYHKTIRNRLKQLAQRIQEHVADTQYRVFVDSAPVMERAIAEKAGLGWIGKNTMLISKHAGSYFFLAEIFTNIPLPIDAPDNRNHCGSCQACLSACPTNAFVGPYILDARRCISYLTIELKGSIPTEFRKAMGNRVFGCDDCQISCPWTKFTDNTQEQDFLPRHNLNTADLIELFLWTESEFLDRTAGSAIRRTGYIGWLRNLAVALGNAPSSEAVINALKARQTHPSEVVQEHTNWALEQHTA

SEQ ID NO: 78897 - protein, 355 aa, Oleispira antarctica
  misc_feature (1)..(355): tr|R4YS44|R4YS44_OLEAN Epoxyqueuosine reductase OS=Olei spira antarctica RB-8 OX=698738 GN=queG PE=3 SV=1
MTQTALSQSDLQDLADKIKVWGRELGFQQIGITHIELGEHETRLKEWLAKGYHGSMEYMAAHDNMRSRPADLLPGTLRVISARMDYLPADARIKEQLQDKSLAYISRYALGRDYHKVIRKRLTQLGKMIEEEVGHGYRAFVDSAPVLERALASNAGLGWLGKNTMLINKKAGSYFFLSELLTDLPLPIDQPDDKNHCGSCTSCIDICPTQAFVGEQVLDARRCISYLTIELKGPIPTDLRKGMGNRIFGCDDCQLCCPWNRFSKTTQETDFTPRHPLDNATLLELFAWDESTFLKHTEGNPIRRTGYQNWLRNIAVALGNAPASIEITEALKQRLPEASDLVKEHIEWALAQHAT

SEQ ID NO: 78898 - protein, 186 aa, Oleispira sp.
  misc_feature (1)..(186): tr|A0A2E3BET2|A0A2E3BET2_9GAMM tRNA epoxyqueuosine(34) reductase QueG (Fragment) OS=Oleispira sp. OX=2024846 G N=queG PE=4 SV=1
KAGSYFFLSELLTDLPLPIDEPDDKNHCGRCTACIDICPTQAFVGDQVLDARRCISYLTIELKGPIPTDLRKGMGNRIFGCDDCQLCCPWNRFSQTTQETDFTPRHPLDNATLLDLFAWDEQTFLKHTEGNPIRRTGYENWLRNIAVALGNAPTSIEIIEALKQRLPDASDLVKEHIVWALEQHSN

SEQ ID NO: 78899 - protein, 273 aa, Oleispira sp.
  misc_feature (1)..(273): tr|A0A2E3BFC1|A0A2E3BFC1_9GAMM tRNA epoxyqueuosine(34) reductase QueG (Fragment) OS=Oleispira sp. OX=2024846 G N=queG PE=4 SV=1
MTQAALTKSELQDLADKVKVWGRELGFQQIGITHIDLGDHEIRLKEWLEKGYHGSMEYMAAHDNMRSRPAELLPGTLRVISARMDYLPADARIKEQLHDKSLAYVSRYALGRDYHKVIRKRLTQLGKMIEEEVGHHGYRAFVDSAPVLERALASNAGLGWLGKNTMLINKKAGSYFFLSELLTDLPLPIDEPDDKNHCGRCTACIDICPTQAFVGDQVLDARRCISYLTIELKGPIPTDLRKGMGNRIFGCDDCQLCCPWNRFSQTTQETDFT

SEQ ID NO: 78900 - protein, 374 aa, Oleomonas sp.
  misc_feature (1)..(374): tr|A0A418WT51|A0A418WT51_9PROT Epoxyqueuosine reductase OS=Oleomonas sp. K1W22B-8 OX=2320859 GN=queG PE=3 SV=1
MTPKSPRDALEAEARRLGFDRIGVTTPDALARTGRDGDLHRWLAEGHQGEMAWLAETAARRADPRVLWAQTRAIVMVAQNYGPESDSLALLEARDRGLIAAYARMKDYHDVMKGRLKMLAQWTASRLHCDVKVFVDTAPVMEKPLAQAAGLGWQGKHTNLVSREFGSWLFLGALFTTAPLPADRSEEDHCGTCRRCLDICPTNAFPAPYRLDARRCLAYLSIEYGGVIPPEFRVAMGNRIYGCDDCLAVCPWNKWAQASHDTKLAERLDLTAPALADLATLDDAAFRTRFAGTPIKRIGRDRFLRNVAIAIGNSGNVSLLPAVERLLDDESPLVRGMAVWAYRRLSPDPLAAADQRLSAELDGEVREEWHRPID

SEQ ID NO: 78901 - protein, 311 aa, Olivibacter sp.
  misc_feature (1)..(311): tr|A0A5C0ZKA2|A0A5C0ZKA2_9SPHI Epoxyqueuosine reductase OS=Olivibacter sp. LS-1 OX=2592345 GN=queG PE=3 SV=1
MLIAAEKYSKLIKDEAKRLGFAFCGIAKADFLEEEAPRLEKWLKEEMHGEMYYMENHFDKRLDPRLLVEGAKSIISLGFNYFTSDIQIDKDSPKISRYAYGVDYHTVIKNKLKSLLHFMQDEIGEVGGRAFVDSAPVLDRAWAKRSGLGWIGKNSNLINRKKGSFFFLCELIVDIELDYDLAPTKDYCGTCTRCIDACPTEAIVAPQIVDGSKCISYLTIELKNEIPDQFVGKMDNWMFGCDVCQDVCPWNRFAEPHTEESFKPHPDLLEMTKKDWEEITEETFQRVFKKSAVKRAKFSGLTRNIRFLGKS

SEQ ID NO: 78902 - protein, 308 aa, Olleya aquimaris
  misc_feature (1)..(308): tr|A0A327RXA4|A0A327RXA4_9FLAO Epoxyqueuosine reductase OS=Olleya aquimaris OX=639310 GN=queG PE=3 SV=1
MNNKAKYTQQIKAEAKRLGFLSCGISKAGFLEVEAPRLEKWLNNNMHGEMQYMENHFDKRLDPTKLVEDSKSVISLLLNYYPSQEQTDNSYKISKYAYGNDYHHVIKSKLKELTHFIQDEIGEVSGRAFVDSAPVLDKAWAAKSGLGWIGKHSNLLTQQVGSFYFIAELIIDLELEYDHATTDHCGTCTACIDACPTQAITEPYIVDGSKCISYFTIELKENIPTEFKGKMDDWMFGCDVCQDVCPWNKFSKPHNEPLFNPHPELLEMTKKDWEEITEDVFKKVFQKSAVKRTKFSGLQRNISFLKPN

SEQ ID NO: 78903 - protein, 307 aa, Olleya namhaensis
  misc_feature (1)..(307): tr|A0A1I3IM36|A0A1I3IM36_9FLAO Epoxyqueuosine reductase OS=Olleya namhaensis OX=1144750 GN=queG PE=3 SV=1
MINNRSKYTQLIKSEAKRLGFLSCGISKAEFLEVEAPRLEKWLNNNMHGQMSYMQNHFDKRLDPTLLVDDSKSVISLLLNYYPEQKQSDQSYKLSKYAYGKDYHEVIKSKLKELTHYIQTEIGAVSGRAFVDSAPVLDKAWAAKSGLGWIGKHSNLLTQKVGSFYFIAELIIDLDLEYDTIVSDHCGTCTACIDACPTQAITEPYVVDGSKCISYFTIELKDQLPNTMKGQFDDWMFGCDVCQDVCPWNKFSKPHSEPLFNPHPELLDMTKKDWDEITEDVFQKVFQKSAVKRTKFSGLQRNIDFLK

SEQ ID NO: 78904 - protein, 309 aa, Olleya sp.
  misc_feature (1)..(309): tr|A0A2K8WUC5|A0A2K8WUC5_9FLAO Epoxyqueuosine reductase OS=Olleya sp. Bg11-27 OX=2058135 GN=queG PE=3 SV=1
MIENKAKYTKQIKAEAQRLGFLSCGISKAEFLEVEAPRLENWLNNNMHGQMSYMQNHFDKRLDPTKLVEDSKSVISLLLNYYPSDLQKHSDAPKLSKYAYGKDYHEVIKTKLQALANFIQEEIGAVSGRAFVDSAPVLDKAWAAKSGLGWIGKHSNLITQKTGSFYFIAELIIDLDLDYDYATTDHCGTCTACIDACPTAAIVEPYVVNGSKCISYFTIELKDQLPNTMKGKFDDWMFGCDICQDVCPWNKFSKPHKEPLFNPHPELLDMSKKDWEEITEDVFKKVFQKSAVKRTKFNGLKRNIEFLKP

SEQ ID NO: 78905 - protein, 308 aa, Olleya sp.
  misc_feature (1)..(308): tr|A0A559RBZ6|A0A559RBZ6_9FLAO Epoxyqueuosine reductase OS=Olleya sp. Hel_I_94 OX=1250001 GN=queG PE=3 SV=1
MLDNKSKYTTQIKAEAKRLGFLSCGISKAGFLEKEAPRLENWLNKNMHGQMGYMQNHFDKRLDPTKLVDDSKSVISLLLNYYPSQVQEDKKAPKLSKYAYGQDYHFVIKEKLKELTHFIHQEIGDVSGRAFVDSAPVLDKAWAAKSGLGWIGKNSNLLTQQVGSFYFIAELIIDLDLEYDSIVSDHCGTCTACIDACPTQAITEPYVVDGSKCISYFTIELKEQLPTAMKGKFDDWMFGCDVCQDVCPWNKFSKPHNEPLFNPHPDMLAMTKQDWEDITEEVFKKVFQKSAVKRTKFEGLKRNIEFVK

SEQ ID NO: 78906 - protein, 358 aa, Unknown
  misc_feature (1)..(358): tr|A0A520S2N7|A0A520S2N7_9GAMM Epoxyqueuosine reductase OS=OM182 bacterium OX=2510334 GN=queG PE=3 SV=1
MEKYSELASLIKTWGNQLGFQQVGITDTDLEEHEKHLSSWLLNGYAADMEYMSKHGEKRTKPEMLLPGTIRIISARMDYLNRNAQTKKTLRSKSKAYVAQYAMGRDYHKVIRARLNQLSLRINDYIEAQGTQDFTARAFSDSAPVLEKGIAEKAGLGWIGKNTLILNENAGSWFFLGEIYTNIPLPIDKDAAVNRCGTCTACIDVCPTKAIVAPYQLDSRKCISYHTIENRGVIPVSIREKMGNRIFGCDDCQTVCPWNRYARPTEELDFKPRNNFDAALLLSLFKWTKSEFLKNTEGSAIRRTGYDGWLRNIGIALGNADYDDRIVEALKSKLQGASNMVKEHLNWAINRQVEKSSI

SEQ ID NO: 78907 - protein, 352 aa, Unknown
  misc_feature (1)..(352): tr|A0A2A5WEY2|A0A2A5WEY2_9GAMM Epoxyqueuosine reductase OS=OM182 bacterium MED-G28 OX=1986256 GN=queG PE=3 SV= 1
MSEIDFSKLAADIKDWARDLGFQETAITDIDLEEYQSLLKSWIENDYHGAMDYMARNQDKRCNPGQLVPGTIRVVCVRMDYSLEKENSFSPLSKRNTAYISRYARGRDYHKLIRKRLQQLAHKIQITVGEFGYRAFVDSAPVLERALAEKAGLGWIGKNTMLLNKEAGSWFFLGELFTDLPLPVDNAVTHHCGSCRACLDICPTKAFVGPNILDAKRCISYLTIELRDAIPEEFRKAMGNRVFGCDDCQLVCPWNKFTNETAEDDFKPRHDFDDVALTILFMWSEEEFLTNTSGSAIRRIGYECWQRNLAIGLGNAESSDEVMNALQSGINNSSEMVREHVRWALDQHQKAQ

SEQ ID NO: 78908 - protein, 295 aa, Omnitrophica bacterium
  misc_feature (1)..(295): tr|A0A136M2D3|A0A136M2D3_9BACT Epoxyqueuosine reductase OS=Omnitrophica bacterium OLB16 OX=1617433 GN=queG PE= 4 SV=1
MPSNARDLILSWFKEHGFDRAGCARVSSVNASTKAAYLSWLDRGYQASMGYMTRNVDKRLDPCLLLPGAKSVLVGLSNYCTPGRPPSNQPGKVAMYAGQRDYHKTLKKGLKKIADRIRAEFPEADTWIGVDTAPLLERYWAQQAGLGWIGKNTLLINRSLGSWTFIGCLLTTLEIEPDPPYGDYCGSCTRCLSACPTGAFVEPHVLDSRKCISYWTIEHRGEFEQNTFPGTHGWIFGCDDCQTVCPWNRFTNPTGQPDFQPIPWTRPPRPFRVAPVDTRRMGAGGDRHRAQENRL

SEQ ID NO: 78909 - protein, 401 aa, Omnitrophica bacterium
  misc_feature (1)..(401): tr|A0A1G1KTL1|A0A1G1KTL1_9BACT tRNA epoxyqueuosine(34) reductase QueG OS=Omnitrophica bacterium RIFCSPLOWO2_12 _FULL_44_17 OX=1801832 GN=A3G33_01960 PE=4 SV=1
MSITSRQIKSLALDTGFDACGITNINISPHPNPLPKGEGKFPASPAGGQAGGEGMLVAEESYLKEWIRQGKHGGMHYLEEYPERQKKFFKEFPDAKNVIVLGVNYWTGGATVGATPRPPAGEAGVRPSSDKKRGQVLMPLYQNLSPFFDDSSTGQTHGSAPTNMVPSGRVARYAWGKDYHKIISEKLNKLIGKIKNVVAANRHACSLQTKNIHLETCVDTKPLLERSLAVEAGLGFIGRQSQLISPEFGPWLFLAEIVTNLQLEPDRPIEGNCGRCRKCIDQCPTGAIGENKSMDARKCIAYLTIEHKNEIPEELKPKIGDRIFGCDRCLEVCPYTSKQKETRWKEFKATSGAGSRLDLNELLAIKTNREYKEKFSDSAISRATRRQLLRNASIVIENFRK

SEQ ID NO: 78910 - protein, 296 aa, Unknown
  misc_feature (1)..(296): tr|A0A1G1LKK8|A0A1G1LKK8_9BACT tRNA epoxyqueuosine(34) reductase QueG OS=Omnitrophica WOR_2 bacterium GWA2_47_ 8 OX=1801840 GN=A2Z88_00340 PE=4 SV=1
MEDKFKTSIKTFAIERLKFDDCRFTGSRVDETIPLYEKWLKEGNHGEMTYLENHLKFKQNPELLLKSARSAIVVIKNYKNTKTRNLEGDLKVARYAAGEDYHLVMTEKLKELTAFIKNLDKTIECYSGVDSRPLPERALALKAGIGFLGKNSMVIKPGLGSYFFIGIILTTTSLEEDRPLSWNCGQCRLCLDACPTNALGEGFAFNATKCISYMTIEKKTPLTGEELKQTNGWIFGCDICQEVCPYNHDNITLTDWPQFLPSNGIGFDFKTDSIPKNTALYRSRKRLLANVNNLKR

SEQ ID NO: 78911 - protein, 336 aa, Unknown
  misc_feature (1)..(336): tr|A0A1G1PFF6|A0A1G1PFF6_9BACT tRNA epoxyqueuosine(34) reductase QueG OS=Omnitrophica WOR_2 bacterium RIFCSPHI GHO2_02_FULL_68_15 OX=1801861 GN=A3C53_04290 PE=4 SV=1
MVLLAEPTTVAQRAAAVKQAARELGFTAAGITTADAFDAPRARLARWISQGRHGEMAYLEQFAERHARFRTAFPDARSVIVVAAGRDYHKVLRARLKALARVVQGLAEGPVAVRWCVDTAPLHERSLAEAAGLGFIGKNTCLILPRGGSWVVLGVLATDLELAEDAPATHTCGACTRCLEACPTGALTAPYEMDARRCIAYLTLEHRGPLPEPLRPAVGTWLAGCDICQEVCPYNAKPAPASWPALTPAAGAGETLPLADLLACRDPQAFETRFAGTALMRPKYQGLVRNAALAAGNARAHELLPSLRARTQDPDPVIRDAAAWAVTRITAETPGD

SEQ ID NO: 78912 - protein, 405 aa, Opitutaceae bacterium
  misc_feature (1)..(405): tr|A0A2D8RPC7|A0A2D8RPC7_9BACT tRNA epoxyqueuosine(34) reductase QueG OS=Opitutaceae bacterium OX=2006848 GN=q ueG PE=4 SV=1
MTLRGEGKEALRKVLKEIGFDEVRFAELDPPIANRLSEWVEKGYHADMDWLARSVEKRIDPNRVMESAHSIIMLGTNYWPSDPAAGAQSRWAKYSLYRDYHDTIIRGLKKAGSILEAHLGLTESDYRYYVDTGPVMERGWAAASGMGWQGKNGMLISKRHGNWLFLSAILLKARIEKDPPLRKGSADQSNSPELGAHCGKCTRCINVCPTEAIVEPGIVDSRRCISYQTIENKGVIPRWIRPGIGRRIYGCDICLDVCPWNRFAKSGRHLLLESRYGITDLTLLDVLTMKIDSFREIFRKSPIKRLKLRGLLRNGCVVAGNLNSDSEWRQNLSPDWRTPVRDALLDLVAHEEAAVPPHAIWALYRLFGSSIREDVKPLIEESGNELAIDEFSWWERQSREEPECP

SEQ ID NO: 78913 - protein, 396 aa, Opitutaceae bacterium
  misc_feature (1)..(396): tr|A0A178IFA9|A0A178IFA9_9BACT Epoxyqueuosine reductase OS=Opitutaceae bacterium TSB47 OX=1184151 GN=AW736_190 75 PE=4 SV=1
MSRSEELRRRLRGLGFDAVRFARIGPEAARPMSERFSQWLGAGYHADMHWMERGAEKRAHPGLVLADARSMILLGVNYGRAASGKGAPVWARYALYSDYHDTVKEGLVAAGRTLEELFGVAGADYRYYVDTGPVLERGWAERAGLGFVGKNAMLISREFGNWLFLAVILTRLELEPDEPLLEKFQIPNPKSQKNSKFQIPNHEMPAPPGFRFCGKCERCMTACPTAAITAPGVLDARRCVSYQTIENRGMIPRELRAGIGARIYGCDVCAEVCPWNRFAQDARSTLLEARGGVAALSLREVLELTPERFAEVFRKMPIKRVKLPGLLRNACVVAGNAGAADCLDVLARLAAHASPVVRAHAVWAVRRIAGPGKAPGLLEAVRMAERDEDVLAEYEG

SEQ ID NO: 78914 - protein, 344 aa, Opitutae bacterium
  misc_feature (1)..(344): tr|A0A357I2I9|A0A357I2I9_9BACT tRNA epoxyqueuosine(34) reductase QueG OS=Opitutae bacterium OX=2026771 GN=queG PE=4 SV=1
MFPSNHTILAHLKRESEALGFHSLGVTTVPLELRRKYYTQWIADGKHGSMAWMARNNDRRMHPERLIPEREAKSIISLALNYYQPNPKRGYRVAKYALGDDYHNFMLRRLKRLCRILREEYGGEQRPYVDTGPLLEKPIAASAGLGWQGKSTILIEPKRGTWNFLANIVTTLELPAGVPQKDRCGTCTRCLDACPTRAITAPYQLDASKCISYLTIEHDGAIPLAYRKAIGDRMYGCDECLDVCPWNKWAVPTVEPKFATRELPSLSEMLLWDEVTFSERMQGSPLRRLKVHRFKRNICVVLGNVGTEQDLAALKLVAADADAMVAEHAEWAIAQIMYRVDCLR

SEQ ID NO: 78915 - protein, 365 aa, Opitutae bacterium
  misc_feature (1)..(365): tr|A0A2A2RE42|A0A2A2RE42_9BACT tRNA epoxyqueuosine(34) reductase QueG OS=Opitutae bacterium Tous-C8FEB OX=1982 323 GN=B9S27_04930 PE=4 SV=1
MRRRLLALGFDEARFATIPGPLPDPLPAWLAAGHHAEMHWMERTAAKRLDPSLVLPGARSVVMLGVNYWAEPLRKSPAGAPRWARYALHEDYHDTLRPALAAAARLLEELFGATPSDTRYYVDTGPVLERSWAVRAGVGFTGKNAMLISRQHGNWLFLAALLTRVPLPADPPAAPAGDRPAVGTWCGKCTRCLDQCPTAAFTAPGVLDARRCVSYQTIENKGVIPRDLRPGIGDRVYGCDTCLEVCPWNRFAQAGRAVLLSARHDLAGLTLPALLDLTPETFAATFRKTAVKRLKLTGLLRNACVVAGNSGDRSLLPQLLRLARTHTSPLVRAHAVWAVRQLDATALPPTAPADETDPAVLAEYA

SEQ ID NO: 78916 - protein, 340 aa, Opitutales bacterium
  misc_feature (1)..(340): tr|A0A424KE99|A0A424KE99_9BACT tRNA epoxyqueuosine(34) reductase QueG OS=Opitutales bacterium TMED207 OX=19867 95 GN=queG PE=4 SV=1
  misc_feature (100)..(100): Xaa can be any naturally occurring amino acid
  misc_feature (117)..(117): Xaa can be any naturally occurring amino acid
MNAAILKSLKKESEALGFHNFGVAKVPMELRRDYYNQWIKEGKHGTMAWMENNNERRLNPESLMPEAKSILVFAMNYYQKDPERNFRVAKYALGKDYHSXIYKRLKKICRFLKENYXSDQKPYVDTGPVLEKPIAEAAGLGWQGKSTILVEKKRGTWSFLGSIVTTLDLPASKGGKDYCGNCTRCIDCCPTQAITSPYKLDASKCISYLTIEHKGSIPHEYREAVGDRVFGCDECLDVCPWNKWAKITNETQFAVRSLPDLKTILAWGEEDFKSNLVASPIKRVKLNGLKRNVALVLGNIGSKDDLPALESLANSNDIVLQEQAEWSIKAIKSRECTSFS

SEQ ID NO: 78917 - protein, 405 aa, Opitutus sp.
  misc_feature (1)..(405): tr|A0A2T6D6B4|A0A2T6D6B4_9BACT tRNA epoxyqueuosine(34) reductase QueG OS=Opitutus sp. ER46 OX=2161864 GN=queG PE=4 SV=1
MPDLVSAASRQARLRARLHELGFDAVRFAQLEAGPAPPVPGGLAEWLAAGMHADMHWMERSLDKRLDPGLVLSGARSMILLGVSYWHGQLATPTGGADAPRWARYALHEDYHDTMKPALVAAGRAIEALYGVEATDYRYYVDTGPVIERGWAARAGLGFVGKNAMLIAPRDHGNWLILAAILTRLDFVPDEPLRKPAARADAATETASARPPVGLLCGKCTRCLDACPTRAFAAPGVVDARRCVSYQTIENKGVIPRELRAGIGQRIYGCDLCLEVCPWNRFAREGRRLLLAARHDLAALTLEDLLALTPERFAEVFRRTPIKRLKLAGLLRNACVVAGNSGDRLLLPQLLNLAVAHPLPLVRAHAVWAVRQLGGGDALVAARAKETDPLVLAEYDACRPAPGGA

SEQ ID NO: 78918 - protein, 398 aa, Opitutus sp.
  misc_feature (1)..(398): tr|A0A1H1QKL9|A0A1H1QKL9_9BACT Epoxyqueuosine reductase OS=Opitutus sp. GAS368 OX=1882749 GN=SAMN05444173_2296 PE=4 SV=1
MTAGAGLQVGGAEREALREKLRALGFDEVRFAAAGAEAGAGLRDWLAAGMHGDMAWMERTAEKRAAANLVLPGVRSVILLGVNYWSDPPSPSPGAAARQAEDRPVWARYAQHEDYHDTMKSGLEAAGRVLEEMGGITAADYRYYVDTGPVLERGWAARSGLGFRGKNAMLISKKHGNWLFLASILTRLEIAPDEPLRKKPAADGAEPAGLLCGKCTRCLDACPTDAFPAPGVVDARRCISYQTIENKGIIPPELRAGIGTHVYGCDICLEVCPWNRFAQAGRHLLLAARHDLAELTLPELLELTPARFAEVFRRTAIKRLKLTGLLRNACVVAGNAGGANLLPALVKLAAHESAVVRAHAVWAVRKIAGARAEELLRSVRQAETDATVLSEYSCSGGL

SEQ ID NO: 78919 - protein, 408 aa, Opitutus terrae
  misc_feature (1)..(408): tr|B1ZZW0|B1ZZW0_OPITP Uncharacterized protein OS=Opitu tus terrae (strain DSM 11246 / JCM 15787 / PB90-1) OX=4 52637 GN=Oter_4019 PE=4 SV=1
MTDPRQEELRRRLLALGFDEVRFASATEPVRAEPLRAWIAAGMQAEMAWMERTVEKRADPQLVLPGARSIVLLGVNYARGDIVRAGRPRWARYALHEDYHDTLKPGLVAAGRALEELYGVANTDYRYYTDTGPVLERSWAARAGIGFVGKNAMLISREHGNWLLLAAIFTRVEFTPDLPLQKTVAAGESRPEQGRTGASVGDEVGLLCGKCTRCLDACPTNAFARPGVVDARRCISYQTIENKGVIPRELRRGIGDRIYGCDVCLEVCPWNRFAQAGRAVLLVARQELADLTLAELLALTPERFAEVFRRTPIKRVKFTGLLRNACVVAGNSGDGSLLPALVRLAAHASPLVRAHAVWAVFRLAGVARAAELLRDQRAVENDPMVLAEYAAEEHDASAKASDGRAGYP

SEQ ID NO: 78920 - protein, 253 aa, Orenia marismortui
  misc_feature (1)..(253): tr|A0A4R8GSA8|A0A4R8GSA8_9FIRM Epoxyqueuosine reductase QueG OS=Orenia marismortui OX=46469 GN=C7959_1421 PE=4 SV=1
MKQKIKKLIKEYVKDYPADKEVETKWREPIIKFADANDQGFIKLKEIISPTHALPQDFLADAQSVIAYFIPFDQAVVNSNIEGRYSSKAWAKAYIESNNLISKLNKYIKQKLDSLNYKSTIIPATHNFDQESLISDWSHRHVAYLTGLGKFGLNNMLITAKGCCGRVGSIVTNLKIEPNKINDKEYCLYYSSGVCKKCVQRCVNDALKVDSFDRHKCYEILLANDKLHADLGLTDVCGKCCVNLPCSFGDPVS

SEQ ID NO: 78921 - protein, 376 aa, Orenia marismortui
  misc_feature (1)..(376): tr|A0A4R8HGE3|A0A4R8HGE3_9FIRM Epoxyqueuosine reductase OS=Orenia marismortui OX=46469 GN=C7959_101204 PE=4 SV =1
MNITEKIKSYAKSIGIDDMKITDAESFPELKEFLIELKEKEYLSTFVNDDLEKISDPKKVLAEASSVIVCAISYSVDDRYISESRNKAKEELRGSLSRFAWGQDYHHVLGNRLDELVKFIKSKKQEVEVFKFVDTGPTVDRALARRAGIGWQGKNCSIINPKYGSWIFLGGIITDLDLEYDSAIENKCGDCRRCIDACPTGALVDAYTLDSRKCLGYITLSKGYLDEEQRKKMGNRLWGCDSCQSVCPHNQRAKVGEHQEFRPQNLDAYPELVPLLTLTNKEYKEKFMITPMNWRGKRPIQRNVAIILGNLKDNRAVPYLLEALVDPKPIVRANVAWALGEIGDKAALDKLEKTLAKEKEDNVIEELKKAIVKLKN

SEQ ID NO: 78922 - protein, 384 aa, Orenia metallireducens
  misc_feature (1)..(384): tr|A0A1C0A5U9|A0A1C0A5U9_9FIRM tRNA epoxyqueuosine(34) reductase QueG OS=Orenia metallireducens OX=1413210 GN= U472_14330 PE=4 SV=1
MTLTTKLKDYAKSIGIDAIKITNAGSFPELKEFLIKMREKEYLSTFVHDDLEKITEPQRVLSEAKSVIVCAISYSIDDKYIAESRRKVKEELRGALSRFAWGQDYHQVLGDKLDKLIDFIKGKRKDVELFKFVDTGPSVDRALARRAGIGWQGKNCSIINPEYGSWIFLGGIITDLELEYDSPIEDKCDDCRRCINACPTGALVAPYTLDSRKCLGYITLSKGYLDEEQRKKMGNRLWGCDTCQSACPQNQDVKVGDHKEFRPQTLEAYPELIPLLTLSNKEYKDKFMITPMNWRGKRPIQRNAAIILGNLKDKRAVPYLLEALVDPKPIVRANVAWALGEIGDKGVLDRLEKELLKEKDEQVIGELERAIEKLGISCQELETS

SEQ ID NO: 78923 - protein, 386 aa, Orenia metallireducens
  misc_feature (1)..(386): tr|A0A285FX24|A0A285FX24_9FIRM Epoxyqueuosine reductase OS=Orenia metallireducens OX=1413210 GN=SAMN06265827_1 03114 PE=4 SV=1
MIITLTTEIKSYAKSIGIDDIKITNAESFPELKEFLIEMREKEYLSTLVHDDLEKISNPKEIVLEAKSVIVCAISYSVDDKYIFESRIRAKEELRGSLSRFAWGQDYHRVLGDRLDKLIEFIKTKKQRIEAFKFVDTGPTVDRALARRAGIGWQGKNCSIINPEYGSWIFLGGVITDLELEYDSPIEDKCGDCRRCIDACPTGALVDAYTLDSRKCLGYITLSKGYLDEKQRKKMGTRLWGCDTCQSVCPQNQGAKLGDHEEFSPQTLEAYPDLISLLTLSNKEYKDKFMITPMNWRGKRPIQRNAAIILGNLKDRRAVPYLLDALSDPKPIVRANVAWALGEIGDESALDRLEKALLKEKDKQVIEELEKATERLGIVGQESENS

SEQ ID NO: 78924 - protein, 385 aa, Oricola cellulosilytica
  misc_feature (1)..(385): tr|A0A4R0PG94|A0A4R0PG94_9RHIZ Epoxyqueuosine reductase OS=Oricola cellulosilytica OX=1429082 GN=queG PE=3 SV= 1
MNGTKAKEALLADLRSEGFSGASVTAPGAIPQVPARLRAFLDAGRHGTMDWMPETEARRGDPRMLWPEARSVVMAAFNYAPEPGNDPLAAVGHKDRATISVYAQNRDYHEIVKGKLKQAAGRFAARTGAQVKVFVDTAPLMEKPLAEAAGLGWQGKHTNLVSRRLGSWFFLGSIFTDLELPADAPERDHCGSCRACLDTCPTDAFPAPYQLDARRCISYLTIEHKGSIPHEFRTAMGNRIYGCDDCLAVCPWNKFAHEAREAKLRARDDLKSPSLESLLQLDDASFRTYFSGSPIKRIGRNRFLRNVLIAAGNSGDTALVAEVRRLLSDADPIVRGAAVWAYGRLAGPESLQAARDRHLQNECDEGVRAEWHGTGTGKESEVTHV

SEQ ID NO: 78925 - protein, 388 aa, Oricola sp.
  misc_feature (1)..(388): tr|A0A3M8H412|A0A3M8H412_9RHIZ Epoxyqueuosine reductase OS=Oricola sp. OX=1979950 GN=queG PE=3 SV=1
MPTALSHRLTDPKKARAFIVRDLQSLGFDAIGVAPAGRIDRAAKGLDRFLDAGRHGTMGWMADTRDRRADPTTLWPDARSIVMAAMSYGPGDAYDPLAALERTDRATISCYAHNRDYHDVIKGKLKQAAGRFAARTGADVKVFVDTAPVMEKPLAERAGLGWQGKHTNLVSRNLGSWFFLGAIFTDMALPADEAETDHCGSCRACLDICPTDAFPAPYQLDARRCISYLTIEHKGPVPHPFRKAIGNRIYGCDDCLAVCPWNKFASAAREAKLQSRDDMRTPPLDELLILDDAAFRARFAGSPVKRIGRARFVRNCLIAAGNSGQPTLISHVIALLDDAEPIVRGGAVWALAQLAPGRIAHEAAARLSGEADRDVADEWIHAGATDGD

SEQ ID NO: 78926 - protein, 380 aa, Ornatilinea apprima
  misc_feature (1)..(380): tr|A0A0P6XDX8|A0A0P6XDX8_9CHLR Uncharacterized protein OS=Ornatilinea apprima OX=1134406 GN=ADN00_08200 PE=4 S V=1
MTMDAKEMLKAEARRLGFSHLGITALDPTPHASAYLGWLEQGWHASMAYLSAPRAVEHRLNPQQVFPPARSLIVVTAAYPPPSTPNQAESQPGYGLVAAYARGVDYHTLLPPQLRRLVQWIQNEIDPRAQAAVYTDTGPILERDYASRAGLGWIGKNTCLINPQAGSYLLLAEIFLSTLLEPDEPFEKDLCGTCRRCIEACPTGCISEARLLDSRRCISYLTIENKGEIPIELRPLIGSHVFGCDICQQVCPWNQKIKTAPKTPLFQSDPALSELELAATLRLSPQEFNRRYRQTPLQRAKRRGLLRNAAVVAGNQRAEAALPVLINLLEEEFEPLVRAHAAWALGQFNNRAGRVALEKALKTESDPTILAEIRSALDSH

SEQ ID NO: 78927 - protein, 382 aa, Ornithinibacillus halophilus
  misc_feature (1)..(382): tr|A0A1M5HWC6|A0A1M5HWC6_9BACI Epoxyqueuosine reductase OS=Ornithinibacillus halophilus OX=930117 GN=queG PE=3 SV=1
MKIEDLKQEIIEYSKEIGIDKIGFASADVFSELKERLRRQQELGYQSGFEKGSIEERTEPKRLLPQAQSIISIAIAYPSRMKDAPKGTKENRRGIFCRASWGVDYHHVLKERLEKLEAFIKDKVAEASTKIMVDTGELSDRAVAERAGIGFSGKNASIITPEFGSFVYLGEMITNIPFIPDSPVEDSCGDCRKCLDACPTTALVDGGQLNAQRCIAFLTQTKDFLPEEFRSKIGNRVYGCDTCQQVCPKNKGIDFHIHPEFEPEPEVAKPKLKPMLRMSNREFKETFGHISGFWRGKKPLQRNAIIGLGHFKDKTAVEELIAVLQHDPRPVIRGTAAWSLGKIGTEEAIDAIKEAMEKEKDEQVLYEMEKGLAFQESTSTLN

SEQ ID NO: 78928 - protein, 382 aa, Ornithinibacillus sp.
  misc_feature (1)..(382): tr|A0A3C1HZH0|A0A3C1HZH0_9BACI Epoxyqueuosine reductase OS=Ornithinibacillus sp. OX=1898027 GN=queG PE=3 SV=1
MNTNQLKEEIIAYSKEIGIDKIGFTTADVFSELKERLIRQQELGYQSGFEKGTNEERTEPRRLLPEAKSIISIAVAYPSRMRKDAPKSTKEERRGFFCRASWGTDYHHVLRERLKKIESFIHERIDNAITKIMVDTGELSDKAVAERAGVGFVGKNTLLITEEFGSFVYLGEIMTNIPFVPDTPAEDGCGDCRICIDACPTGAIVQGGQLNAQRCIAFLTQTKDFLPDEFRSKIGNRVYGCDTCQLVCPKNKKIDFHLHSEFEPEDDIAKPKLKPMLTITNREFKETFGHIAGSWRGKKPIQRNAIIGLGHYRDTTAVQDLIQVMKNDPRPVIRGTAAWSLGKIGTEEAFIAIENAMELEKDKDVLYEMEKGLAFREVQHSR

SEQ ID NO: 78929 - protein, 323 aa, Oryzisolibacter propanilivorax
  misc_feature (1)..(323): tr|A0A1G9RAZ8|A0A1G9RAZ8_9BURK Epoxyqueuosine reductase OS=Oryzisolibacter propanilivorax OX=1527607 GN=SAMN05 428957_103103 PE=4 SV=1
MQWLAQGFHGEMHYMAAHGTKRARPAELVPGTVSVITARMDYLPRDTPPGWQAVEWQRLQRPGEAIVSVYARGRDYHKVLRARLQKLSERIAEAVGPFGHRVFTDSAPVLEAELASRSGQGWRGKHTLVLSREAGSMFFLGEIYVDMPLEVTEPVTAHCGSCQACIDICPTQAIIAPHRIDARRCISYLTIEHGGPIPLELRPLLGNRIYGCDDCQLVCPWNKYAQASSLPDFDPRRGLVGAQLVELFAWDEATFLRMTEGGPIRRIGHERWLRNIAVALGNALRGAREAGEVQALRAALATRAGDASALVREHVAWALAQEI

SEQ ID NO: 78930 - protein, 396 aa, Oryzomicrobium terrae
  misc_feature (1)..(396): tr|A0A5C1E7K5|A0A5C1E7K5_9RHOO Epoxyqueuosine reductase OS=Oryzomicrobium terrae OX=1735038 GN=fdx PE=3 SV=1
MDDRDAPSSPDGVGAPTAVAGGAAPDHPRTPDALAGLPGQIRGWAGELGFASAHIGRARISPAAQAKLTAWLAAGCHGEMDYMARHADLRAAPDTLVPGALSVISVRLPYWPEGEGRPVLPAEQALTSPHLAYVSRYALGRDYHKVVRNRLQKLADRIAAAVGPHGYRVFSDSAPVMEVELASKNGLGWRGKHTLLLTRQGSYHFLGEILTDLPLPIDPPPDNNEGDDPDSPAGHGGHCGDCQRCLPACPTGAITAPYQMDARRCISYLTIELHGAIPEDLRPLMGNRIYGCDDCQLACPWNRFAHPGDPDFAPRNGLDGSTLAQLFAWSAEDFEQRLAGSPIRRIGWERWLRNIAVALGNAPTSPEVIAALVSRRDHPAELVREHVTWALRRHGQ

SEQ ID NO: 78931 - protein, 315 aa, Oscillatoria acuminata
  misc_feature (1)..(315): tr|K9TIL4|K9TIL4_9CYAN Epoxyqueuosine reductase OS=Osci llatoria acuminata PCC 6304 OX=56110 GN=queG PE=3 SV=1
MNPTVTEIKAKAQELGFHQVGIAAIAPPDPAPVAALQQWLAQGYHAQMDWMTNPKRQDIRQVMPEVQSAICVALNYYTEHQHPQDPAYAKISRYGWGRDYHKILHKKLKTLTLWLQGHNPEVQARYYADTGPVSDKVLAQRAGIGWIAKNGNVISRQYGSWIFLGEVLTNLPLTPDSPHTSHCGTCTRCIQACPTGAIAQPFVVDANRCIAYHTIENRAETLPDSIQPHLSGWVAGCDICQEVCPWNQRFAQPTDVGEFQPYPENVSPTLAELADISEEEWDRRFRASALRRIKPEMWRRNARANLERIKRGGNH

SEQ ID NO: 78932 - protein, 321 aa, Oscillatoria nigroviridis
  misc_feature (1)..(321): tr|K9VJR4|K9VJR4_9CYAN Epoxyqueuosine reductase OS=Osci llatoria nigro-viridis PCC 7112 OX=179408 GN=queG PE=3 SV=1
MKKSINSDRIKQKALELGFHKVGIASTDTDFDLEKQRLQAWLDKGYQADMAWMANPKRQDIRSLMPEVQSLICVAINYYTPHQRPENSLCEGGDDAAVEYAKISRYGWGRDYHRILHKKLKVLANWLRSQGEGIEARYYADTGPIQDKMWAQRAGIGWIAKNGNVISREYGSWVFLGEILTNLELASDAAHTEHCGTCTRCIEACPTGAITEPFVVNADRCIAYHTIENRAEKLPDKIASNLQGWVAGCDICQDVCPWNQRFAKATDVAEFEPYPENIAPTLAELADISDEEWNRRFTASALRRIKPEMLRRNAKANQIND

SEQ ID NO: 78933 - protein, 317 aa, [Oscillatoria] sp.
  misc_feature (1)..(317): tr|D8G6B2|D8G6B2_9CYAN Epoxyqueuosine reductase OS=[Osc illatoria] sp. PCC 6506 OX=272129 GN=queG PE=3 SV=1
MKSPITSTQIKQKALELGFHKVGIAQADDAPYSEVERLQGWLKAGYQADMAWMANPKRQDIRLVMPEVQSLICIALNYYTPHQRPQGSEYAKISRYGWGRDYHKVMHKKLKVLTNWLRSQGEGIEARYYADTGPVQDKVWAERAGIGWIAKNGNVISREYGSWIFLGEVLTNLELMPDTPHAEHCGTCTRCIDACPTGAITQSFVVDANRCIAYHTIENRDEKLPDAITSHLQNWVAGCDICQDVCPWNQRFAKETDMVEFQPYPENIAPTLTELAEISDDEWNRRFTASALRRIKPEMWRRNARLNQERNKSELND

SEQ ID NO: 78934 - protein, 309 aa, Oscillatoriales cyanobacterium
  misc_feature (1)..(309): tr|A0A1J5G460|A0A1J5G460_9CYAN Epoxyqueuosine reductase OS=Oscillatoriales cyanobacterium CG2_30_40_61 OX=1805 291 GN=queG PE=3 SV=1
MNSPINTNLVKQKALDLGFHQVGIAAITETEENRQHLQSWLDQGYAADMAWMNSPKRQNIRQLMPEVVSVICVALNYYTPDQVPDYPEWGKISRYARGRDYHRVLHKKLKTFCEWLQQQAPGIQARYYADTGPIQDKVWAQKAGIGWIAKNSNLITTKYGSWVFLGEILTNLTLTPDPPHTQHCGTCTRCLEACPTGAITQPFVVDANRCIAYHTIENRAETLPENISKNLKGWVAGCDICQEVCPWNQRFSQETDIPEFQPYPENIAPKLTELAELSETEWDQRFRASALRRIKPQMWRRNARANLDY

SEQ ID NO: 78935 - protein, 306 aa, Oscillatoriales cyanobacterium
  misc_feature (1)..(306): tr|A0A1C0VB43|A0A1C0VB43_9CYAN Epoxyqueuosine reductase OS=Oscillatoriales cyanobacterium USR001 OX=1880991 GN =queG PE=3 SV=1
MKVAITSFQVKQKALELGFHKVGIAQAKDITHQEVQNLRYWLDAGYQADMAWMANPKRQNIHLVMPEVNSLISVALNYYTPHQRPEGSNYAKISRYGWGRDYHKVMHKKLKLLTTWLQLQDEGIKARYYADTGPIQDKVLAQSAGIGWIAKNGNVISREFGSWIFLGEILTNLALESDRPHTEHCGTCTRCIDACPTQAITQPFVVDANRCIAYHTIENRAEKLPEEIASNLQGWVAGCDICQDVCPWNQRFAKETDIPDFQPYPENIAPTLNELAEISDDEWNRRFTASALRRIKPEMLRRNARG

SEQ ID NO: 78936 - protein, 292 aa, Osedax sp.
  misc_feature (1)..(292): tr|A0A1Y5GJ77|A0A1Y5GJ77_9BACT tRNA epoxyqueuosine(34) reductase QueG OS='Osedax' symbiont bacterium Rs2_46_30 _T18 OX=1856298 GN=A9R01_16875 PE=4 SV=1
MDYQPPAKDSIKILKDKDKAYIARYTLGRDYHKTVRKRLTNLGKLIQDKCNSLGYRAFVDSAPIMERAIAEQAGLGWSGKHTLLINREAGSYFFLAELFIDLPLPTTEKKLKNHCGKCTACLDICPTKAFVGANILDARRCISYLTIESKEAIPVHLRPMLGNRIFGCDDCQLICPWNKFAKFSQEDDFKPRNNLDDISLLELFDWDETTFLKKTEGSAIRRTGFDGWQRNIAVALGNSHGGTAVELALAAKLDSCSPLVGEHIRWALQQLQHRAQTPEQDPQIVKILSAKA

SEQ ID NO: 78937 - protein, 367 aa, Osedax symbiont
  misc_feature (1)..(367): tr|S6GK62|S6GK62_9GAMM Epoxyqueuosine reductase OS=Osed ax symbiont Rs1 OX=1330036 GN=queG PE=3 SV=1
MIADQQPTPEQLNQLAGNIEQWAKELGFQQASIIIPDLTEELKLMQEWLTKGYHGDMQYLANNLDLRGDPLNIVPGSCRIISLRMNYQPPGTEAIKILRNKDKAYIARYTLGRDYHKTVRKRLVVLAKRIEQECHSLGYRAFVDSAPIMERAIAEQAGLGWSGKHTLIINRKAGSYFFLAELFIDLPLPTTANKVSNHCGKCTACLDICPTQAFVSSSVLDARRCISYLTIESKTAIPLELRPKIGNRIFGCDDCQLVCPWNKFAKFSEEDDFKPRHNLDDISLLELFDWDEPTFLKKTEGSAIRRTGFQGWQRNIAVALGNSYGGLIVEQALSQKLADSSPLVSEHIQWALENLASKKPQAAIKDE

SEQ ID NO: 78938 - protein, 370 aa, Osedax symbiont
  misc_feature (1)..(370): tr|S6GNZ9|S6GNZ9_9GAMM Epoxyqueuosine reductase OS=Osed ax symbiont Rs2 OX=1330035 GN=queG PE=3 SV=1
MNQSQLQEMADNIDLWAKQLGFQQSSILIPSLDSENALMQQWLDRGYHGQMQYLANNLDLRKDPLKLVPGSCRIISLRMDYQPPAKDSIKILKDRDKAYIARYTLGRDYHKTVRKRLTNLGKRIQEQCDNLGFRAFVDSAPIMERAIAEQAGLGWSGKHTLLINREAGSYFFLAELFIDLPLPTTEKKLKNHCGKCTACLDICPTKAFVDANILDARRCISYLTIESKDAIPLELRPMLGNRIFGCDDCQLICPWNRFAKFSPEDDFKPRHNLDDISLLELFNWDESAFLKKTEGSAIRRTGFDGWQRNIAVALGNSRGGVAVESALTIKLNNCSPLVAEHINWALLQLKNRALVPDQEANIVTILTAKA

SEQ ID NO: 78939 - protein, 349 aa, Ottowia oryzae
  misc_feature (1)..(349): tr|A0A2S0MJM6|A0A2S0MJM6_9BURK Epoxyqueuosine reductase OS=Ottowia oryzae OX=2109914 GN=queG PE=3 SV=1
MGAWARELGFSHVGVAGVDLSSAEAGLLAWLADGFHGSMDYMAAHGLKRARPAELVPGTVSVITARMDYLPRSTPPDWQALELDRLNRPTEGIVSVYARGRDYHKVLRNRLQKLQQRLADAIGPFGHRVFTDSAPVLEAELAARSGQGWRGKHTLVLNREGGSMFFLGEIYIDLALPPTEPVAPHCGRCQACIDVCPTGAIVAPHRIDARRCISYLTIEHDGSIDESLRPWLGNRIYGCDDCQLICPWNKYAQRSALPDFDPRPGLTGAELVNLMRWSEAEFLQRTEGSPIRRIGHVRWLRNVAVAIGNALAALPAEDDRRAALRDALRAHAEHPSAIVREHVDWALRR

SEQ ID NO: 78940 - protein, 349 aa, Ottowia sp.
  misc_feature (1)..(349): tr|A0A5C7V4Y7|A0A5C7V4Y7_9BURK Epoxyqueuosine reductase OS=Ottowia sp. OX=1898956 GN=queG PE=3 SV=1
MRGWARELGFSHLGVADIDLSAAEPGLLAWLHNGFHGRMDYMAAHGLRRARPAELVPGTVSVITARMDYLPRATPEDWQDVELARLGRPQEGVVSLYARGRDYHKVLRGRLQKLQDRIALAIGPFGHRVFTDSAPVLEVELASRSGQGWRGKHTLLLSREGGSMFFLGEIYVDLHLPRTAPTGAHCGQCSACIDACPTGAIVAPYRLDARRCISYLTIEHDGAIDEALRPLIGNRIYGCDDCQLVCPWNKYAGRSALPDFDPREGLGGAQLTDLLDWSEDEFLRRTEGSPIRRIGHERWLRNVAVALGNALAALPPGDARRAPLHAALRRRANHPSALVREHVRWALGR

SEQ ID NO: 78941 - protein, 351 aa, Ottowia sp.
  misc_feature (1)..(351): tr|A0A0K1NGM4|A0A0K1NGM4_9BURK Epoxyqueuosine reductase OS=Ottowia sp. oral taxon 894 OX=1658672 GN=queG PE=3 SV=1
MRAWAKELGFSQIGVAGVDLSSAEAGLSQWLAQGFHGSMDYMAAHGVKRARPAELVPGTVSVITARMDYLPRSTPQGWQRVEFERLQRPQEGVVSVYARGRDYHKVMRARLQKLQARMAAELGPFGHRVFTDSAPVLEAELAARSGQGWRGKHTLVLSRDAGSMFFLGEIYVDIALPPSEPVTHYCGTCTACMDACPTGAIIAPHRLDARRCISYLTIELHGAIPEDMRPLIGNRIYGCDDCQRVCPWNKYAHVSALPDFDEREGLTDAPLTALLAWSEEEFLRRTEGSPIRRIGHARWLRNVAVALGNALARLPADDPARAPLLAALAARREHPDEMVREHVAWAMEQKA

SEQ ID NO: 78942 - protein, 310 aa, Owenweeksia hongkongensis
  misc_feature (1)..(310): tr|G8R2B0|G8R2B0_OWEHD Epoxyqueuosine reductase OS=Owen weeksia hongkongensis (strain DSM 17368 / CIP 108786 / JCM 12287 / NRRL B-23963 / UST20020801) OX=926562 GN=qu eG PE=3 SV=1
MTSKLKYSEMIKAEAKRLGFLDCGISKATFLEEEAPRLEEWLKRGYQGEMKWMENHIDKRLDPRKLVDGAKSVVSVILNYYPEETQKHPDAPKIAKYAYGEDYHFVIKRKLKELTEFIQTEIGEVSGRAFTDSAPVMDRAWAERSGLGWTGKHSLLLSKGTGSFYLIGELILDLDLEDDTPVADHCGSCTKCIDACPTNAIVAPKLVDGSKCISYLTIELKDQISPSFKDQMEGWAFGCDICQDVCPWNRFSKPTKVEEFSPHPEMLDMNKQDWQEITEDVFRKVFKKSAVKRAKYAGLKQNIDFLKPTY

SEQ ID NO: 78943 - protein, 310 aa, Owenweeksia sp.
  misc_feature (1)..(310): tr|A0A2D8SPG4|A0A2D8SPG4_9FLAO Epoxyqueuosine reductase OS=Owenweeksia sp. OX=2024847 GN=queG PE=3 SV=1
MSHPSRYSTLIKDEASRLGFMSCGISRADFLEKEAPRLEEWLKRDYHGDMKWMENHFDKRLDPRKLVEGARSVVSVLLNYYPENRQTEPGAPRIAKYAYGEDYHFVIKRKLKELMQFIQSEIGEVGGRAFVDSAPVMDRAWAERSGLGWTGKHTLLLTKGAGSFYFIGELILDVELEPDTPVADHCGECTRCIDACPTDAIVAPQLLDSKKCISYLTIELKDEIPDAFSGKMENWAFGCDICQDVCPWNRFSKPHKTPEFEPHQALLEMTKEEWMEITEEVFQSVFKRSAVKRTKYSGFKRNLSFLKAKD

SEQ ID NO: 78944 - protein, 304 aa, Owenweeksia sp.
  misc_feature (1)..(304): tr|A0A1Z8LDL4|A0A1Z8LDL4_9FLAO tRNA epoxyqueuosine(34) reductase QueG OS=Owenweeksia sp. TMED14 OX=1986609 GN= CBB74_01965 PE=4 SV=1
  misc_feature (264)..(264): Xaa can be any naturally occurring amino acid
MNAKSFLQKEAQRLGFLSCRVSDAVFLEEDAPRLEQWLNKGYHGSMSYMENHFDKRLDPRKLVPGARSVVSLAYNYFPQKEISSTDDSMPQIAKYAYGEDYHYVIKDKLFELLDSLSSSYGDIQGRCFVDSAPVMERSWAKKSGLGWVGKNSLLLRKSEGSFFFLAELIIDLALPSDNIEIDHCGTCTKCIDACPTGAIVQPEVIDSNRCISHMTIELHGSLPSDYKDSISPWVFGCDICQDVCPWNRHSKPHQEKRFTPGPWXDWNINDWKEITEETFGRIFKRSAIKRAGFAGLKRNLNSHI

SEQ ID NO: 78945 - protein, 380 aa, Oxalobacter formigenes
  misc_feature (1)..(380): tr|C3XBA2|C3XBA2_OXAFO Putative iron-sulfur cluster-bin ding protein (Fragment) OS=Oxalobacter formigenes OXCC1 3 OX=556269 GN=OFBG_01506 PE=3 SV=1
YQQSSHSRQQVLLILMKFEGQLTDFVVKIKSWARELGFSELRIADVDPGIAEIRLQKWLACHFHGEMNYMAGHGTKRSRPDELVPGTRRVIVARMNYLSSDALDWKDTEQARMSDVLAARVSMYARGRDYHRVIRSRLQKLADRMQEEIGSFGYRVFADSAPVMEVAFASKAGLGWQGKNNLLINRNAGSLFFIGEMLVDLPLPVDEAVTSHCGQCRRCIDACPTGAIIGDKLIDARKCISYLTIEFKGVIPIEFRPLMGNRIYGCDDCQLVCPWNKFAEKTHIDDFSVRHELDSATLCDLFAWTEKEFLNNTEGSPIRRIGYECWCRNIAIALGNALRSKLDDETGKQILNMLSEKRKHASEMVTEHIDWAMNQSNESD

SEQ ID NO: 78946 - protein, 361 aa, Oxalobacter sp.
  misc_feature (1)..(361): tr|A0A3A6NR98|A0A3A6NR98_9BURK Epoxyqueuosine reductase OS=Oxalobacter sp. OX=2093374 GN=queG PE=3 SV=1
MALADLTELTRSIKAWGRDLGFADIRIADVHLPDAEAGLQAWLAAGRHGEMAYMANHGMMRARPTELVPGAQCVIVARMDYLPLGAEKNWREQEQARLRDPMAATVSVYARGRDYHRVLRSRLQQLADRITEAVGKFTYRVFTDSAPVMEVALAAKSGLGWRGKHTLLLQRDAGSMFFLGEILVDLPLPPDATEGEHCGRCRACISICPTQAITAPYQLDARRCISYLTIEHPGSIPEALRPLMGNHIYGCDDCQLICPWNRFAKTAVVPDFDVRNGLDRGSLVDLFSWDQAAFEQGLEGSPIRRIGHERWLRNIAVALGNALRELKRKGGDVSQIVTALQARADHPSALVREHVQWALVQ

SEQ ID NO: 78947 - protein, 302 aa, Oxalobacteraceae bacterium
  misc_feature (1)..(302): tr|A0A4Q3JCS2|A0A4Q3JCS2_9BURK tRNA epoxyqueuosine(34) reductase QueG (Fragment) OS=Oxalobacteraceae bacterium OX=1871070 GN=queG PE=4 SV=1
MSDSPTSSVDLPQLARAIKGWGVGLGFADVRIADVDLGHLEAGLQAWLDAGYHGEMDYMATHGMKRARPAELVPGTVRAIVVRMDYLPTERQGDWRAGERLRQADPNAAVVSVYARGRDYHKVLRNRLQALAEKIQQEIGPFGFRVFTDSAPVMELPLAEKAGLGWRGKHTLLLSRAAGSTFFIGEILIDLPLPVDPPTGKHCGGCTACIDMCPTGAILGPGKLDARRCISYLTIELKSSIPEELRPLIGNRIYGCDDCQVACPWNKFAQRAQVPDFDERNGLGEGDLVGLFAWEEAEFNRR

SEQ ID NO: 78948 - protein, 360 aa, Oxalobacteraceae bacterium
  misc_feature (1)..(360): tr|A0A4Q2J1H9|A0A4Q2J1H9_9BURK Epoxyqueuosine reductase OS=Oxalobacteraceae bacterium CAVE-383 OX=2478672 GN=q ueG PE=3 SV=1
MAALAADIKAWGRELGFADIRITDVDLSHREAGFADWLAKGYHGEMDYMAAHGMKRARPAELVPGAVSVITARMPYLPQASGDDWRERETDRLQDAEAAVVSVYARGRDYHKVIRNRLQQLASRIEGRTGAFGYRVFTDSAPVMEVALAEKAGLGWRGKHTLLLNREAGSMFFLGEILTDLPLPKDEPASAHCGQCSACIDVCPTQAIVGPYELDARRCISYLTIELKGSIPLEFRPLIGNRVYGCDDCQVCCPWNKFAQPSTLDDFDERHGLGDAALVELFAWSAEEFDKKMEGSAIRRIGHERWLRNIAVGLGNAAAAGKKGAPAIIAALRARLDDASPIVREHVRWALEQHGAASLS

SEQ ID NO: 78949 - protein, 304 aa, Oxobacter pfennigii
  misc_feature (1)..(304): tr|A0A0P8WTN9|A0A0P8WTN9_9CLOT Epoxyqueuosine reductase OS=Oxobacter pfennigii OX=36849 GN=queG_1 PE=4 SV=1
MIEDSLYSEIEAAGFKIKVFKAEHLKEISRDFKTFAEQGLIDKSFYRNNLADFNYDYISILPDAKSVMVIASPQGKSLAEFQFKGKSFDMVVPPTYIYPTIDNRVTGILNRVFAENGHDFVRVRLPFKLLAVRSGLGQYGRNNICYVSEFGSFFRLSAFVTDYEFEEDSWGEVKAIKSCSSCSLCIDNCPTGAIDKSRFVIRAHHCLTNFNESDEPIPEWVNADWHNAVVGCMRCQDVCPHNKDRINLVEDRICFSEKETEMILDGKDFESLPEEMRNKISFMGMESYLHILPRNIRLIKGLIK

SEQ ID NO: 78950 - protein, 235 aa, Oxobacter pfennigii
  misc_feature (1)..(235): tr|A0A0N8NSJ6|A0A0N8NSJ6_9CLOT Epoxyqueuosine reductase OS=Oxobacter pfennigii OX=36849 GN=queG_6 PE=4 SV=1
MASNAEILKEKIIEWGASKVAFANAGDYLPAYFKNLKYAVSIAVRLSDAIIDEIKDAPTHTYFHHYKAVNALIDNITLRASLLIQDWGYLAAAIPASQTVKTSEDLYTGIFQHKTAANLSGLGWIGKSGLLITPEYGPRVRLGTILTDMELPGTEDIHNTDCKGCNICKIACPAMAITGKNWYKGVQRSEIIDAEACSKYMNTNFKHIGRGSVCGICMNVCPHGKNINKRKMERV

SEQ ID NO: 78951 - protein, 343 aa, Pacificibacter marinus
  misc_feature (1)..(343): tr|A0A1Y5THY2|A0A1Y5THY2_9RHOB Epoxyqueuosine reductase OS=Pacificibacter marinus OX=658057 GN=queG PE=3 SV=1
MAEIDKETLRQHALAEGFSQVGFARPELPEAMERLQQFVDLERHGQMAWMADRMAWRGDPSALWPEAKSVIMLAEAYTPDDDPMAAIARTDTGAISVYARNRDYHDIVKKRLKRVGRWLIDQAGPDTQIKVFVDTAPVMEKPLGAKAGLGWQGKHTNLVGRDLGSWFFLGAIFTTHNFDPDPAEHDHCGSCTACLSACPTDAFPAPYQIDARRCISYLTIEHHGPVDAELRPLLGNRIYGCDDCLAACPWNKFAVDAADIRYHARADLVSPPLSELVALDDAAFRLRFSGSPIKRIGRNRFVRNVLYAIGNSHQPELRESILPLLSDPDGTVADAAAWALAQF

SEQ ID NO: 78952 - protein, 345 aa, Pacificibacter maritimus
  misc_feature (1)..(345): tr|A0A3N4U8T2|A0A3N4U8T2_9RHOB Epoxyqueuosine reductase OS=Pacificibacter maritimus OX=762213 GN=EDD53_2526 PE =4 SV=1
MDGLTKEAVRAQAIAEGFTMVGFTRPDIPEAMERLQKFVDLERHGQMAWMQDRMAWRGDPSALWSEANSVIMLAESYTPDDDPMAAIERTEAGAISVYARNRDYHDIVKKRLKRVGRWLIDVAGPDTQIKVFVDTAPVMEKPLGAKAGLGWQGKHTNLVGRELGSWFFLGAIFTTHTFEPDQEETDHCGSCTACLTACPTDAFPAPYQIDARKCISYLTIEHHGPVDPVMRPKLGNRIYGCDDCLAVCPWNKFAVEAADIRYRARADLVAPPLADLVVLDDRGFREKFSGSPIKRIGRDRFVRNVLYAIGNSNAPHFIDVIRPLLSDVDETVRDAANWAMTQLSK

SEQ ID NO: 78953 - protein, 353 aa, Pacificimonas flava
  misc_feature (1)..(353): tr|M2U238|M2U238_9SPHN Epoxyqueuosine reductase OS=Paci ficimonas flava OX=1234595 GN=queG PE=3 SV=1
MPLPDNKLLPALRQEAAEAGFAAFGIARWDAVPEAGARLDRWLKAGMHGDMLWMTEKADRRRAPRALWPAVNSVVALGMSYAPALDPLRHANSPEIGALSVYAHGADYHDVVKKALKRVARWMVAAATDAEVKVFVDTAPVMEKPLAAAAGLGWQGKHTNLVSTEQGSWLFLGCIYTTLALQPDAAHGDRCGSCRRCQDACPTAAFPEPYRLDARRCISYLTIEHDGPIPEEFRRAIGNRIYGCDDCLSVCPWNKFAEASRDMRFGPRAPLVRPRLTDLAQLSDSDFRTLFSGSPVKRVGRGRFVRNVCIALGNSGDPDARRVLMPLLQDESEQVRDAAGWALAELDRSGASA

SEQ ID NO: 78954 - protein, 351 aa, Pacificimonas flava
  misc_feature (1)..(351): tr|A0A219B2N9|A0A219B2N9_9SPHN Epoxyqueuosine reductase OS=Pacificimonas flava OX=1234595 GN=queG PE=3 SV=1
MGDNKLLHDLRQQAEAAGFASLGICRADATPRAGPRLDRWLAEGMHGDMAWMVEKADRRRSPQDLWPDCRSVVILGMSYAPPVDPLRHHAQRGTGAVSVYAHGADYHNIVKKALKRVARWIVAERPDAEVKVFVDTAPVMEKPLAEAAGIGWQGKHTNLVSTSEGSWLFLGAIYTTLELPPDEPHGDRCGSCRRCQEACPTAAFPEPYRLDARRCLSYLTIEHSGPIPEEFRRAMGNRIYGCDDCLAVCPWNKFAETSRDLRFHPRRGLDDPDLADLARLDDDAFRELFSGSPVKRVGRERFVRNVAIALGNSGDPAARAALAPLVEDGSEVVREAAQWALAELDRQAAAA

SEQ ID NO: 78955 - protein, 418 aa, Paenibacillaceae bacterium
  misc_feature (1)..(418): tr|A0A3E0JLL7|A0A3E0JLL7_9BACL Epoxyqueuosine reductase OS=Paenibacillaceae bacterium OX=2003592 GN=queG PE=3 SV=1
MTERPAAFYAELKAEMKAAARSLGIDKIGVASAEPFTELRRTLERHRALGRESGFEEPDLDKRTNPALLMEEPQSIIAIAVAYPSKLRDAPKSEPGARRGILSRSAWGRDYHEVLRDRLARLEAWLRERAPELRALSMTDTGALVDRAVAERAGIGWSGKNCSIITPEFGSWVYLGEMITNLPLPPDAPVTEMCGECTKCIDACPTGALVGPGELNAQACVSYLTQTKGYLSDGQMRKIGNRLYGCDTCQIVCPVNRGKDWTHHEELQPDPDTVKPLLVPLLSMSNREFKERFGASAAAWRGKKPIQRNAVIALGHFREASAVPDLIRVLTDDPRPVLRGTAAWALGRIGGSEAERALRQALDREADPETSARIKAALEALENPEPRDAAGGRADDRRHGGADSGVPIYEEGAAKPGV

SEQ ID NO: 78956 - protein, 401 aa, Paenibacillaceae bacterium
  misc_feature (1)..(401): tr|A0A1H1X3A4|A0A1H1X3A4_9BACL Epoxyqueuosine reductase OS=Paenibacillaceae bacterium GAS479 OX=1882832 GN=SAM N05444162_2894 PE=4 SV=1
MAEPIRDAAFWSWLKAEMKEAAFGLGIDDIGVASAEPFTELKGRLIRHREQGFESGFEERDLDKRTDPSLLFEQPQSIIAISVAYPSKLPDPPRSEPGARRGILSRSAWGEDYHSVLRNRLQRLEEWLQARVPELRAESMVDTGELSDRAVAERAGIGWSGKNSFIMNRKHGTFIYLAEMITNLPLQPDSPLLDNCGSCTKCIDSCPTGALVGPGQLNAARCISYVTQTKEMVSEELMRKIGNRLYGCDTCQIVCPVNKGINVTRHPEFRADPEQVKPLLVPLLQLSNREFKERFGTNAASWRGKKPIQRNAVIALGNFREAAAVPELVQVLQEDPRPVLRGTAAWALGRIGGAEAEAALAQAAEQESDSEARSWAERSLAALRAERAAEAVAEPAAAGEE

SEQ ID NO: 78957 - protein, 383 aa, Paenibacillus agaridevorans
  misc_feature (1)..(383): tr|A0A2R5F2R5|A0A2R5F2R5_9BACL Epoxyqueuosine reductase OS=Paenibacillus agaridevorans OX=171404 GN=queG PE=3 SV=1
MTDEWQALKDEMKEAAQSLGIDAIGVASSDPFVTLKQRLIRHRELGYESGFEEQDIEKRTNPSLIFDRPQSIIAIAVAYPSKLIDPPKSEPGARRGIMSRSAWGEDYHKILRDRLARLEQWLRERVPNVRVESMVDTGELSDRAVAERAGLGWSAKNCSIISPELGSWIYLGEMITNLPLPPDEPVTEGCGSCTKCIDACPTGAIVAPGQLNAQRCISYVTQTKGMVTDEFMRKIGNRLYGCDTCQIVCPVNRGKNWTNQPELQPDNELAKPLLIPLLTMGNKEFKERYGHTSSAWRGRKPIQRNAVIALGNFKEASAVPDLIRVLHDDPRPVLRGTAAWSLGRIGGEAAAKALEQASMRERDEEAIASIEAAIGAIRERERA

SEQ ID NO: 78958 - protein, 388 aa, Paenibacillus algorifonticola
  misc_feature (1)..(388): tr|A0A1I2FB87|A0A1I2FB87_9BACL Epoxyqueuosine reductase OS=Paenibacillus algorifonticola OX=684063 GN=SAMN0448 7969_111138 PE=4 SV=1
MEERAYYAALKKEMKAAARSLGIDKIGIASADPFITLKQRLISHRELGYESGFEEPDLDKRTNPALLFDKPQSIIAIAIAYPSKLQQPPKSEPGARRGILSRSAWGEDYHKVLRNRLGRLESWLSERVPGFRAESMVDTGALSDRAVAERAGLGWSAKNCSILSEDLGSWIYLGEMITNLPFEPDELVTDGCGECTKCIDACPTDALVGPGQLNSSRCISFITQTKGFVEDGYMRKIGNRLYGCDTCQTVCPVNRGKNWTHQPELQPDHELVKPLLTPLLTIGNKEFQRLYASSSSAWRGKKPIQRNAVIALGNFKDRGAVPDLIQVLRQDVRPVMRGTAAWSLGRIGGAEAEKAIRQALLQEADDDARRYMEQALLSIADGADTVPR

SEQ ID NO: 78959 - protein, 584 aa, Paenibacillus alvei
  misc_feature (1)..(584): tr|A0A383RLG0|A0A383RLG0_PAEAL Methylated-DNA--protein- cysteine methyltransferase OS=Paenibacillus alvei OX=44 250 GN=PBLR_15931 PE=3 SV=1
MLDSKKPHGQQNHEERAKPGQGASKERWRKLKQEIIEAAPALGIDQVGFTTADPFIELKARLQHSIDQGYASGFEEPDLDKRTRPELLLEDARSIIAIAVAYPSKLEESPKSKAGSYRGMFARTAWGLDYHHVLRDRLAKLEAFLRERVPEQELRVRSMVDTGELSDRAVAERAGIGFSGKNCSIISPQWGSWIYLGEMITNIPFPSDEPVTEDCGECTRCLDACPTSALVGPGQLNANLCISFQTQSKDILSHEMMTKMGNRLYGCDTCQIVCPKNKGMNWTHQPEMQPDPEKAKPLLVPMLQLSNREFKEQFGSLSAAWRGKKPIQRNAIVALGNFRDRSAVGELRTLLREDTRYDIRATAAWALGQIGGTDAKQALLSAMNREKEDAVVQAIDDALQQFDNHVEPIYVQEMESPLGMLTVASSATGLCSIEFGSVLDTSARLNAWAQRTYGRAALQRHPERLQEAIRQLEEYFRGERQSFDLTLDFQGTPFQREVWRALMDIPYGETRSYKQIAEAIGRPQAVRAVGGANNRNPIPVIAPCHRVIGADGRLVGYGGGMDKKVTLLKLEGMQANEDRMLTAP

SEQ ID NO: 78960 - protein, 584 aa, Paenibacillus alvei
  misc_feature (1)..(584): tr|S9SHV7|S9SHV7_PAEAL Methylated-DNA--protein-cysteine methyltransferase OS=Paenibacillus alvei TS-15 OX=1117 108 GN=PAALTS15_19618 PE=3 SV=1
MLDSKKPHGQQNHEERAMPDQGASKERWRKLKQDIIEAAPALGIDQVGFTTADPFIELKARLQHSIDQGYASGFEEPDLDKRTRPELLLEDARSIIAIAVAYPSKLEESPKSKAGSYRGMFARTAWGLDYHHVLRDRLAKLEAFLRERVPEQELRVRSMVDTGELSDRAVAERAGIGFSGKNCSIISPQWGSWIYLGEMITNIPFPSDEPVTEDCGECTRCLDACPTSALVGPGQLNANLCISFQTQSKDILSHEMMTKMGNRLYGCDTCQIVCPKNKGMNWTHQPEMQPDPEKAKPLLVPMLQLSNREFKEQFGSLSAAWRGKKPIQRNAIVALGNFRDRSAVGELRTLLREDTRYDIRATAAWALGQIGGTDAKQALLSALNREKEDAVVRAIDDALQQFDNHVEPIYVQEMESPLGMLTVASSATGLCSIEFGSVLDTSARLNAWAQRTYGRAALQRHPERLQEAIRQLEEYFRGERQSFDLTLDFQGTPFQREVWRALMDIPYGETRSYKQIAEAIGRPQAVRAVGGANNRNPIPVIAPCHRVIGADGRLVGYGGGMDKKVTLLKLEGMQANEDRMLTAP

SEQ ID NO: 78961 - protein, 627 aa, Paenibacillus amylolyticus
  misc_feature (1)..(627): tr|A0A100VSJ2|A0A100VSJ2_PAEAM Methylated-DNA--protein- cysteine methyltransferase OS=Paenibacillus amylolyticu s OX=1451 GN=PAHA3_5389 PE=3 SV=1
MTSVQTGAAHAASVWEKLKQEIKAAGPGLGIDDIGFASAEPFVTLKSILEQHRAKGYESGFEEPDLEKRVRPELKDGEPASLIAIAVAYPSKMVNPPKSEPGAYRGIFARSAWGQDYHQVLRTAMDKLVNFIKERVPEAMIESMVDTGALVDRAVSQRAGIGFSAKNCAIISPKFGSWIFLGELVTNIPFQPDTPVTEDCGECTKCIDACPTGALVGPGQLNSQRCISFVTQTKGFVDEEFMLKIGNRLYGCDTCQIVCPKNRGKNWDHHPEFHPDPEIVKPLLLPLLDIGNREFKERFGQSSAAWRGKKPIQRNAVIALGNFKDKSAVPKLTEVLKRDPRPELRGTAAWALSRIGGEDAMRAIGEAAANEQDGNVLSMLQKAEERLSSSETLPKQPQAGQVNEKQPEEQKNNEHNSLQALQQDLKMEAANEPGNEQSGQSVKPEAAAWKPSAVTGLHGKPVYYDEVLTPIGTLTLCATDEGLCHIDFGAFHVREAHLQQWARTWIGEYRYEKNEEKLSEAAKQLQQYFAGERKTFDLQLDRLGTPFQLQVWQVLSDISYGEASSHQQVAEIIGRPKAVRAVLDAISKNPIPIIIPCHRISGKDGTLVGYVGGLQTKEQLLALEQQS

SEQ ID NO: 78962 - protein, 626 aa, Paenibacillus amylolyticus
  misc_feature (1)..(626): tr|A0A4R5Z673|A0A4R5Z673_PAEAM tRNA epoxyqueuosine(34) reductase QueG OS=Paenibacillus amylolyticus OX=1451 GN =queG PE=4 SV=1
MTSVQTGAAQDASVWEKLKQEIKAAGPGLGIDDIGFASADPFVSLKSLLEQSRDKGYASGFEEPDIEKRVHPALKDGEPASLIAIAVAYPSKMVNPPKSEPGAYRGIFARSAWGQDYHQVLRAAMDKLVNFIRERVPEAMIESMVDTGALVDRAVSQRAGIGFSAKNCAIISPKFGSWIFLGELVTNIPFQPDTPVTEDCGECTKCIDACPTGALVGPGQLNSQRCISFVTQTKGFVDEEFMLKIGNRLYGCDTCQIVCPKNRGKNWDHHPEFHPDPEIVKPLLLPLLDIGNREFKERFGQSSAAWRGKKPIQRNAVIALGNFKDKSAVPKLTEVLKRDPRPELRGTAAWALSRIGGEDAMRAIGEAAANEQDGNVLSMLQKAEERLSSSETLPKQPQAGQVSEKQQEERNNENNALRALQQDLKMEAGIEPGSEQSAQPAKPEAAAWKPSAVTGLHGKPVYYDEILTPIGTLTLCATDEGLCHIDFGAFHVREAHLQQWARTWIGEYRYEKNEEKLSEAAKQLKQYFAGERKTFDLQLDRLGTPFQLQVWQVLSDISYGEASSHQQVAEIIGRPKAVRAVLDAISKNPIPIIIPCHRISGRDGTLVGYVGGLQTKEQLLTLEQRS

SEQ ID NO: 78963 - protein, 383 aa, Paenibacillus anaericanus
  misc_feature (1)..(383): tr|A0A433XU10|A0A433XU10_9BACL tRNA epoxyqueuosine(34) reductase QueG OS=Paenibacillus anaericanus OX=170367 G N=queG PE=4 SV=1
MWAELKREIKEAAPSLGIDDIGFASADPFLSLKAVLLDRREKGYESGFEEPDIDKRIYPELSFDGQPASLISIAVAYPSKMENPPKSAPGERRGILARSAWGRDYHLVLREAMKKLEDFIRERIPEARIENMVDTGALVDRAVADRAGIGFKGKNCLIISPKWGTWVYLGELITNIPFPPDTPVTEDCGECTKCLDACPTGALVGPGVLNAQRCISFQTQTKGFVEEEFMLKIGNRLYGCDTCQVVCPKNKGKHWNHRPELQPDPETVKPLLLPILDLSNRQFKERFGTSAAAWRGKNPIQRNAIIALGNFKDPGSVPKLIDILIKDSRPVMRGTAAWALSRIGGTEALSAIVKAIATETDEEVLKRLRNAESKLMEAETPEV

SEQ ID NO: 78964 - protein, 572 aa, Paenibacillus antarcticus
  misc_feature (1)..(572): tr|A0A168NHP2|A0A168NHP2_9BACL Epoxyqueuosine reductase OS=Paenibacillus antarcticus OX=253703 GN=PBAT_12980 P E=4 SV=1
MTLEHVRSPYAPSPSVWEQLKRDIQLAAPSLGIDDIGFATADPFVSLKSILQNHRDKGYESGFEEPDLDKRVTPALPSSQPTSLISIAVAYPSKMVNPPKSEPGAYRGILARSAWGRDYHYVLREAMQKLEDFIRERVPEAVLESMVDTGALVDRAVAERAGIGFSAKNCMIISPKWGSWIYLGDMVTNIPFPPDTPVTEDCGECTKCIDACPTGALVGPGQLDAQRCVSFLTQTKGLLEEEQMRKIGNRLYGCDTCQIVCPKNRGKSWDHNQQLLPDPEITKPLLLPILDLTNREFKEKFGESAAAWRGKKPMQRNAIIALGNFKDRSAVPRLEEVLLKDPRFEMRGTAAWALGRIGGEEALNSVNKGLAIEDDVKVKEMLMKAKEKLEPSTALEEEHSQEIIYYDEITTPIGVLTLCTSVKGICLIEMDSFTTKEAVIQQWSRNWAQDAEFIYDGDRLSEAKTQLEQYFAGERKQFDLPIDMRGTLFQLQVWTAVADIPYGETCSYGQLAEAIERPKAVKAVGGATNKNPIPIIVPCHRIIGADNSLAGYVYGHEIRSQLLSLEGSLPER

SEQ ID NO: 78965 - protein, 567 aa, Paenibacillus aquistagni
  misc_feature (1)..(567): tr|A0A1X7LD37|A0A1X7LD37_9BACL Methylated-DNA--protein- cysteine methyltransferase OS=Paenibacillus aquistagni OX=1852522 GN=SAMN06295960_3282 PE=3 SV=1
MEKQAFMNQEERFSVLKRDIQAAAASLGIDQIGFTSAEPFTLLKERLKQSVEQGYHSGFEEPDLDKRTQPKLLLEGAASIISIAVAYPSKLPYSPKSEPDSYRGMFARTAWGMDYHHVLRDRLQRLEAFIRERVHEPELKIKSMVDTGELSDRAVAERAGIGFSGKNCSIISPKLGSWIYLGEMITNIPFTPDHPITEDCGSCTKCLDACPTGAFVGPGQLNANRCISFQTQLKDMLTDEMMTKMGNRLYGCDTCQIVCPKNRGLNWTHQPELQPDPEQAKPLLVPMLSLSNREFKTSFGSSAAAWRGKKPIQRNAIIALGNFRDRSAVPELAGLLLRDERPDIRGTAAWALGRIGGELAKAKLQAAGKREEHEEVIRMIKDAVQEAANTPEPLYLIEMDSPIGKLTLSATLDGLCRIDFGTVLECSHDIQAWAEQAIGAVILQRNPERLKAAKKQLEEYFAGGRTTFDLKLDLRGGTPFQREVWQTLRDIPYGETWAYKDLAERIGNPKAVRAVGGANNKNPISIIIPCHRVIGASGQLVGYGGGLSKKVALLELERRTLSPSFSS

SEQ ID NO: 78966 - protein, 385 aa, Paenibacillus baekrokdamisoli
  misc_feature (1)..(385): tr|A0A3G9JI69|A0A3G9JI69_9BACL Epoxyqueuosine reductase OS=Paenibacillus baekrokdamisoli OX=1712516 GN=queG PE =4 SV=1
MDIQTTWDKLKTDMKAAAAELGIDKIGIASVEPFTELKQRLLRHRELGYESGFEEPDLNKRTEPALLFDNPQSIIAIAIAYPSKLQDPPKSEPGARRGILARSAWGEDYHTVLRDRLARLEAWLIERVPSCRVLSMVDTGALSDRAVAQRAGIGWSGSNCAIITPEWGSWVYLGEMITNLPLPPDKPVTESCGECTACIDACPTDALVAPGQLNSQRCISFVTQTKGVVTDELMRKIGNRLYGCDTCQVVCPENKGKNWTHQPELQPDNEKAKPLLVPLLTIGNRAFKDIYGSTSSAWRGRKPIQRNAIIALGNFKDASAIPALTGVLREDPRFELRATAAWSLGRIGGDTALAALEQALASERDAVVQEALHTALSSLNAAESR

SEQ ID NO: 78967 - protein, 614 aa, Paenibacillus barcinonensis
  misc_feature (1)..(614): tr|A0A2V4UUQ9|A0A2V4UUQ9_PAEBA Epoxyqueuosine reductase OS=Paenibacillus barcinonensis OX=198119 GN=DFQ00_1264 PE=4 SV=1
MTSVRTGAAQVASVWEALKQEIKAAGPELGIDDIGFASADPFVSLKSLLEQSRDKGYASGFEESDIEKRVHPALQGGEPASLIAIAVAYPSKMINPPKSEPGAYRGIFARSAWGQDYHQVLRTAMDKLVSFIRERVPEAMIESMVDTGALVDRAVSQRAGIGFSAKNCSIISPKFGSWIFLGELVTNIPFPPDTPVTEDCGECTKCIDACPTGALVGPGQLNAQRCISFLTQTKGFLDEEFMLKIGNRLYGCDTCQIVCPKNRGKNWDHHPEFHPDPEVVKPLLLPLLDIGNREFKERFGQSSASWRGKKPIQRNAVIALGNFKDKSAVPKLTQVLKRDPRPELRGTAAWALSRIGGEDAMRAIGEAAAIEQDGNVLSMLQKAKERLMSSTALPEQPQAGHASKLEGKSEGELERTTEINEKQSASTDKPEEAAAWKPSAVTGLHGKPVYYDELLTPIGTLTLCATDEGLCHIDFGAFHVREAHLQQWARTWIGEYRYEKNEEKLSDAAEQLRQYFAGERKTFDLQLERYGTAFQLQVWQVLSDISYGEALTHQEVAEKIGRPKAVRAVLDAISKNPIPIVIPCHRMSGKDGTLVGYAGGLQTKEQLLTLEQQT

SEQ ID NO: 78968 - protein, 396 aa, Paenibacillus barengoltzii
  misc_feature (1)..(396): tr|R9L830|R9L830_9BACL 4Fe-4S ferredoxin-type domain-co ntaining protein OS=Paenibacillus barengoltzii G22 OX=1 235795 GN=C812_03124 PE=4 SV=1
MSMAETGATRLPEGGNRWAQLKREIQEASTELGIDDIGFASADPFLSLKAILQDRRDKGYESGFEEPDLDKRVYPELSLTEPASLISIAVAYPSKMENPPKSSPGERRGILARSAWGRDYHQVLREAMAKLEAFIRERVPEARIESMVDTGALVDRAVADRAGIGFKGKNCAIISPKWGSWIYLGELITNIPFPPDTPVEEDCGECTKCIDACPTGALVGPGELNAQRCISFLTQKKGFLDEEFMVKMGNRLYGCDTCQIVCPKNKGKFWNHRPELAPDPETVKPLLLPLLDLSNREFKERFGDSAAAWRGKKPIQRNAVIALGNFKDSASVPKLIDILLHDPRPELRGTAAWALSRIGGKEAEEAIDRALDAEQEEEVRVRLQTAKQKLQASNGD

SEQ ID NO: 78969 - protein, 392 aa, Paenibacillus beijingensis
  misc_feature (1)..(392): tr|A0A0D5NHG9|A0A0D5NHG9_9BACL Epoxyqueuosine reductase OS=Paenibacillus beijingensis OX=1126833 GN=queG PE=3 SV=1
MTMREQERGAEERSFWEALKAELKEAAPGLGIDAVGVASPDPFTELKGRLMRHRELGYESGFEEADLQKRTDPALLFREPQSIIAIAVAYPSKLPDPPKSEPGARRGILSRSAWGEDYHRVLRSRLQRLEEWLRERVPWLRAESMVDTGALSDRAVAERAGIGWSGKNSFIMNEKLGSWMYLAEMITNLPLPPDAPAEEGCGTCTKCIDACPTGALVGPGQLNAQRCISYVTQTKEMVGDELMRKIGNRLYGCDTCQIVCPVNRGVNWTHHPELQPDAEKVKPLLEPLLQMSNKEYQRQYGSNASSWRGKKPIQRNAVIALGNFREAGAVPQLTEVLRSDPRPVLRGTAAWSLGRIGGEAALEALRQAKEEERDPEALAAIEKALADKKDEA

SEQ ID NO: 78970 - protein, 398 aa, Paenibacillus borealis
  misc_feature (1)..(398): tr|A0A089L5K8|A0A089L5K8_9BACL Epoxyqueuosine reductase OS=Paenibacillus borealis OX=160799 GN=PBOR_03160 PE=4 SV=1
MNSNFQSPYAPPPSKWEDLKAAIKAAAPALGIDDIGFTTAEPFLYLKNILQEHRDNGYDSGFEEPDLDKRTVPALKSGEKPLSIIAIAVAYPSKMEDPPKSEPGARRGILARASWGQDYHHVLREALAKLENFIRERVPDAVLESMVDTGALVDRAVAERAGIGFSGKNCAIISPKWGSWIYLGEMVTNIPLPPDQPVQEGCGDCTKCIDACPTGALVGPGQLNAQACISYLTQTKGFLSEDYMTKIGNRLYGCDTCQIVCPHNRGKNWNHRPQLLPDPEIVKPLLMPILDLSNREFKEKFGSSSAAWRGKKPIQRNAVIALGNFKEASAVPKLTEILLQEPRPEMRGTAAWALGRIGGSEALTAVEQALHKEEDVTVRGMLNRAQDKLLEQREADEE

SEQ ID NO: 78971 - protein, 408 aa, Paenibacillus borealis
  misc_feature (1)..(408): tr|A0A1R0YBD9|A0A1R0YBD9_9BACL tRNA epoxyqueuosine(34) reductase QueG OS=Paenibacillus borealis OX=160799 GN=B SK56_22240 PE=4 SV=1
MNIKTQSSYAPPPSIWEDLKAEIKAAAPALGIDDIGFATAEPFLYLKNILQDHRDKGYESGFEEPDLDKRTIPALPSGETPLSILAIAVAYPSKMENPPKSEPGARRGILARASWGQDYHHVLREALGKLEAFIRERVPDAVLESMVDTGVLVDRAVAERAGIGFSAKNCAIISPKWGSWIYLGEMVTNIPFPPDAPVEEGCGECTKCIDACPTGALVGPGQLNAQACISYLTQTKGFLSDEYMTKIGNRLYGCDTCQIVCPINRGKNWNHRPELLPDPEIVKPLLLPILELSNREFKEKFGSSSAAWRGKKPIQRNAIIALGNFKEAGAVPKLTEIVLRESRPEMRGTAAWALGRIGGGEALAAVEEALLAEGDNQVREMLERALDKLLKREEKESDEQAGGGQSGN

SEQ ID NO: 78972 - protein, 386 aa, Paenibacillus bovis
  misc_feature (1)..(386): tr|A0A172ZLY6|A0A172ZLY6_9BACL tRNA epoxyqueuosine(34) reductase QueG OS=Paenibacillus bovis OX=1616788 GN=AR5 43_05395 PE=4 SV=1
MIPSPTSRWEQLKLEIKAAAPSLGIDDIGFTTADPFLFLKEVLEEHRRKGYESGFEEPDLEKRINPSLTLEGARSIIAISVTYHSKMENPPKSEPGQYRGIMARSAWGRDYHYVLRDRMQRLEDFIHERVPEARIESMVDTGALSDRAVAQRAGIGFFGKNCAVISPTLGSWIFLGDMITDIPFPPDTPVTEDCGTCTKCIDACPTGALVGPGQLNSQICVSFLTQTKGMLSDEHMRKIGNRLYGCDTCQIVCPKNKGKHWNHQEDLRPDPEKAKPLLLPMLDLSNKEFKQEFGDTSAAWRGKNPIQRNAIIALGNFKDKSAVPRLTEMLLKDVRPMIRGTIAWALSRIGGPDALAAVERGLEREQEQDVIDRLIEAKRILEEESA

SEQ ID NO: 78973 - protein, 397 aa, Paenibacillus catalpae
  misc_feature (1)..(397): tr|A0A1I2D4R0|A0A1I2D4R0_9BACL Epoxyqueuosine reductase OS=Paenibacillus catalpae OX=1045775 GN=queG PE=3 SV=1
MLMDKSRLAQLKEEMREAAQSLGIDKIGIASADPFTELKNRLIRHRELGRESGFEEPDLDKRTNPALLFDQPQSIIAIAVAYPAKLPNPPKSEPGARRGILSRSAWGEDYHKVLRDRLARLEAWLKERVPEARVESMVDTGALSDRAVAERAGIGWSAKNCSILSEDLGSWIYLGEMITNIPFEPDTPVTEGCGECTKCIDACPTDALVGPGQLDSQRCISFVTQTKGFVSDELMRKIGNRLYGCDTCQTVCPVNRGKNWTHQPELQPDPEVVKPLLVPLLTIGNREFKERYGHTSSAWRGKKPIQRNAVIGLGNFKDKSAVPDLIGVLKEDSRPVLRGTAAWALGRIGGEEAMEGLRKALPDESDEEARVYLERAIASLEAGLNGAEEGAPIPRES

SEQ ID NO: 78974 - protein, 408 aa, Paenibacillus cellulosilyticus
  misc_feature (1)..(408): tr|A0A2V2YP85|A0A2V2YP85_9BACL Epoxyqueuosine reductase OS=Paenibacillus cellulosilyticus OX=375489 GN=DFQ01_1 1936 PE=4 SV=1
MEHPQQDEAQQQMDVEEAAWTGFDWHVLKAELKAAAPSLGIDDIGIASAEPFTELKERLLRHRELGRESGFEEPDIELRTNPSLLFDRPVSIIAIAVAYPSKLPDPPKSEPGARRGIFARASWGMDYHSVLRDRLARLEAWLEERVPGVRMMSMVDTGALSDRAVAERAGLGWSAKNCSIISPKLGSWIYLGETITNLPLPPDTPLEDQCGTCNKCIDACPTGALVGPGQLDSNKCISFLTQTKTMLSDTYMRKIGNRLYGCDTCQIVCPANRGKNWTHQPELQPDPEIAKPLLLPLLTIGNREFKETFGSASGSWRGKKPIQRNAIIALGNFRERSAVPAIIDVLRVDPRPELRGTAAWALGMIGGEEAAEALRIAHTTETNEEASSAIARAMTALTLASETVEDLQ

SEQ ID NO: 78975 - protein, 415 aa, Paenibacillus chitinolyticus
  misc_feature (1)..(415): tr|A0A410X3M7|A0A410X3M7_9BACL Epoxyqueuosine reductase OS=Paenibacillus chitinolyticus OX=79263 GN=queG PE=3 SV=1
MRITLADASERDLLLLKQEIIQAAPSLGIDKIGFASAEPFHELKDILLRHREKGYESGFEEPDIDKRVHPDRSFEGVKSILAIAVAYPSKLVNPPRSEAGAYRGILARAAWGDDYHLVLRERLKRLGAFLEERVEGVRFMDMVDTGALVDRAVAERAGIGWIGKNCAVITPEWGSWVYLGELLTNLPFPADTPIMDQCGECRICIDACPTGALVGPGQLNSSRCISFVTQTKGMIPDEFKEKIGNRLYGCDTCQIVCPVNKGKNWTHHEDLQPDHEVVKPLLIPLLTMGNREFKERFGRSSAAWRGRKPIQRNAVLALGNFKDRSAVPVLASLLKDDPRPELRATAAWSLGKIGGEAALEAVLRAQRSERDEAVLAELDNAARKLGGLTPSGGDAAAVEAGGPQADGAGAAPAAE

SEQ ID NO: 78976 - protein, 385 aa, Paenibacillus contaminans
  misc_feature (1)..(385): tr|A0A329LY62|A0A329LY62_9BACL Epoxyqueuosine reductase OS=Paenibacillus contaminans OX=450362 GN=queG PE=3 SV =1
MTEMSERDDKLAWQRLKEDILAAASALGIDKVGFASADPFLELKEILLRHREKGFESGFEEPDIDKRVYPELSFEEPRSIISIAIAYPSKLQDPPRSEPGAYRGIISRSSWGEDYHHVLRNRLARLEAFIRERVPSARMESMVDTGVLVDRAVAERAGIGWSGKNCSVITPEWGSWVYLGEMITNIPLPPDKPVTDSCGDCTRCIDACPTGALVGPGQLNAGLCISFITQTKGVVSDEMKEKIGNRLYGCDTCQIVCPVNKGKNWTHQPELQPDPELVKPLLIPLLTLGNKEFKERYGRSASSWRGKKPIQRNAIIALGNFKDRSALPILINIAKSDTRPEIRATAAWSLGKIGGAEAEEALREALGTEKEPIVLEALERALGSR

SEQ ID NO: 78977 - protein, 580 aa, Paenibacillus crassostreae
  misc_feature (1)..(580): tr|A0A162KMY0|A0A162KMY0_9BACL Methylated-DNA--protein- cysteine methyltransferase OS=Paenibacillus crassostrea e OX=1763538 GN=PNBC_21120 PE=3 SV=1
MKNEIISLQTSYAPSTSPWEQLKRDIQEAAPSMGIDDIGFTTADPFVSLKSLLQEQRDRGYDSGFEEPDLDKRVTPTLATSQPASLIAIAVAYPSKMVNPPKSESGANRGILARTAWGRDYHHVLREAMEKLEKFIKDRVPEAVIENMVDTGALVDRAVAERAGIGFSGKNCLIISPKWGSWIYLGEMVTNIPFPPDTQVTEDCGECTKCIDACPTGAIVAPGQLNAQRCISFLTQTKGLLNEDQMVKIGNRLYGCDTCQIVCPKNRGKNWEHNEQLLPDPELVKSLLFPILDLSNREFKEKFGVSAAAWRGKKPIQRNAIIALGNFKDRTAVPRLEEVLLHDERVEMRGTAAWALGRIGGDEALNSIMKGIAVEQDESVQDMLKKAQDKLQPAQMEVDNSHEVIYYDEITTPIGVLTLCTTEIGICLVEFGSFFIREANIQQWARIWAKEAIFIQDGTRLNEVRIQLEQYFSNERKQFDLPMDMRGTPFQLQVWTALADIPYGDTSSYKQLAESIDRPKAIRAVGGANNKNPVPIIIPCHRVIGAQGELVGYGGGLEIKRHLLSVEGSLSERNQIRNGK

SEQ ID NO: 78978 - protein, 397 aa, Paenibacillus curdlanolyticus
  misc_feature (1)..(397): tr|E0IB04|E0IB04_9BACL Iron-sulfur cluster binding prot ein OS=Paenibacillus curdlanolyticus YK9 OX=717606 GN=P aecuDRAFT_2731 PE=4 SV=1
MERMEQGDGLPELDWHALKAEMKLAAASLGIDDIGIASADPFTELKDRLIRHREQGRESGFEEPDLDKRTNPSLLFDRPKSIIAIAVAYPSKLPDPPKSEPGARRGIFARASWGIDYHTALRNRLAKLEEWLYARVPGVRMESMVDTGALSDRAVAERAGIGWSGHNCSIISPKLGSWIYLGEIITNLPLPPDTPVTENCGECTKCIDACPTGALVGPGQLDSSKCVSFLTQTKGMLSDEYMRKIGNRLYGCDTCQIVCPANRGKNWTHHPELQPEPEQAKPLLLPLLKIGNREFKEQFGTVSGAWRGKKPIQRNAIIALGNFRERAAVPALADVLGTDPRPVMRGTAAWALGRIGGDAAEEALRQAQAVETDEEATAEIARAMIALSLQSEHDVEV

SEQ ID NO: 78979 - protein, 394 aa, Paenibacillus darwinianus
  misc_feature (1)..(394): tr|A0A015KWV8|A0A015KWV8_9BACL Epoxyqueuosine reductase OS=Paenibacillus darwinianus OX=1380763 GN=BG52_13265 PE=4 SV=1
MPGEWTQVRLAELKAEMAAALPALGIDKIGVASASPFTALKQTLVRHRELGRESGFEEPDLDKRTEPALLFDDPQSIIAIAVAYPSKLADAPKSEPGARRGILSRSAWGEDYHHVLRDRLARLEAWLSERLPGFRAESMVDTGALVDRAVAERAGIGWSGKNCAVITPEFGSWVYLGEMITNVPFPPDEPVIQGCGSCTKCIDACPTGALVGPGELDAQRCVSFVTQTKGFLSDEMMRKMGNRLYGCDTCQIVCPVNKGLNWTQHVELRPDPEQAKPLLVPLLSIGNREFKEKFGSSAASWRGKKPIQRNAVIALGNFKDASAVPALADVLRDDPRPVLRGTAAWSLGRIGGAGAAAALREASGQERDPEVSAMIREALSSRPAGAADGQAPNR

SEQ ID NO: 78980 - protein, 577 aa, Paenibacillus dendritiformis
  misc_feature (1)..(577): tr|A0A4R5YXT2|A0A4R5YXT2_9BACL Multifunctional fusion p rotein OS=Paenibacillus dendritiformis OX=130049 GN=que G PE=3 SV=1
MTEQKQTVRWTPYGTDQAAGTEASREADRWQRLKQEIMDAAPSMGIDQVGFTTADPFTELKARLQHSIDQGYASGFEEPDLDKRTKPALLLDGARSIIAIAVAYPSKLEGGPKSEPGAYRGMFARTAWGLDYHHVLRDRLQRLEQFLRERVPEVQVKSMVDTGELCDRAVAERSGLGFIGKNCSIISPKWGSWIYLGEMITNLPLPPDHPLTEDCGECTRCLDACPTGAFVGPGQLNAQRCISFQTQSKEMLPHEMMVKIGNRLYGCDTCQIVCPKNRGLNWTHHAEMQPDPEQAKPLLVPLLSLSNREFKSQFGSSAAAWRGKKPIQRNAIAALGNFRDRQAVPALEGLLRNDERPDIRAAAAWALGQIGGPDAKRILKAALSREEEPKVKEAVMQAQERAEAQQEPLYVQEMESPIGPLTLAATATGLFAIEFGDALSVAEGLQRRAARSYGRVVLQRHPERLQEAKRQLEEYFAGTRREFDLTLDIQGTPFQRQVWQALTDIPYGETRSYKQIAEAIGNPGAVRAVGGANNRNPLSIIVPCHRVIGADGKLVGYGGGMDKKITLLRLEGIPCRQ

SEQ ID NO: 78981 - protein, 577 aa, Paenibacillus dendritiformis
  misc_feature (1)..(577): tr|H3SKR0|H3SKR0_9BACL Multifunctional fusion protein O S=Paenibacillus dendritiformis C454 OX=1131935 GN=queG PE=3 SV=1
MTEQKHTVRWTPYGTDQAAGAEASPEADRWQRLKQEIMDAAPSMGIDQVGFTTADPFTELKARLQHSIDQGYASGFEEPDLDKRTKPALLLDGARSIIAIAVAYPSKLEGGPKSEPGAYRGMFARTAWGLDYHHVLRDRLQRLEQFLRERVPEVQLKSMVDTGELCDRAVAERSGIGFSGKNCSIISPKWGSWIYLGEMITNLPLPPDHPLTEDCGECTRCLDACPTGAFVGPGQLNAQRCISFQTQSKEMLPHEMMVKIGNRLYGCDTCQIVCPKNRGLNWTHHAEMQPDPEQAKPLLVPLLSLSNREFKSQFGSSAAAWRGKKPIQRNAIAALGNFRERQAVPALEGLLRNDERPDIRAAAAWALGQIGGPDAKRILKAALSREEEPKVKEAVMQAQERAEAQQEPLYVQEMESPIGPLTLAATATGLFAIEFGDALSVAEGLQRRAARSYGRVVLQRHPERLQEAKRQLEEYFAGTRREFDLTLDIQGTPFQRQVWQALTDIPYGETRSYKQIAEAIGNPGAVRAVGGANNRNPLSIIVPCHRVIGADGKLVGYGGGMDKKITLLRLEGIPCGQ

SEQ ID NO: 78982 - protein, 398 aa, Paenibacillus donghaensis
  misc_feature (1)..(398): tr|A0A2Z2KI10|A0A2Z2KI10_9BACL tRNA epoxyqueuosine(34) reductase QueG OS=Paenibacillus donghaensis OX=414771 G N=queG PE=4 SV=1
MNNYNQSAYAAPPSQWTKLKAELQEAASSLGIDSIGFATAEPFLYLKSILQQHRDNGYESGFEEPDLNKRTVPALPNGEQPLSIIAIAVAYPSKLVDPPKSEPGARRGILARASWGQDYHHVLREALMKLETYIRERVPGAVLESMVDTGVLVDRAVAERAGIGFSAKNCAVISPQWGSWIYLGEMVTNLPFPPDVPVEEGCGDCTKCIDACPTGALVGPGQLNAQACISYLTQTKGFLSEEHMTKIGNRLYGCDTCQVVCPHNRGKNWDHRPQLLPDPEIVKPLLLPMLDLSNREFKEQFGSSSAAWRGKKPLQRNAVIALGNFKDKTAVPKLTEVLLKDIRPEMRGTAAWALGRIGGSDALSAVRQAIQHEEDPEVCAMLERAEQVLLGGAEAQED

SEQ ID NO: 78983 - protein, 394 aa, Paenibacillus durus
  misc_feature (1)..(394): tr|A0A089HKA8|A0A089HKA8_PAEDU Epoxyqueuosine reductase OS=Paenibacillus durus OX=44251 GN=PDUR_03220 PE=4 SV= 1
MNTPEYTSYAPPSPRWESLKKEIKEAAQALGIDDIGFATAEPFLFLKNLLQEHRDKGYDSGFEEPDLDKRTIPALREGQPKSIIAIAVAYPSKMDNPPKSEPGERRGILARSAWGRDYHFVLREALERLEAFIRQRVPDAVMESMVDTGVLVDRAVAERAGIGFSGKNCSVISPKWGSWIYLGEMVTNIPFPPDTPVTEGCGTCTKCIDACPTGALVGPGELNAQACISYLTQTKGFLDETYMAKIGNRLYGCDTCQIVCPHNRGKNWDHRQELLPDPEQAKPLLLPILDLSNREFKEKFGSSAAAWRGKKPIQRNAVIALGNFKDAAAVPKLTEVLLKDPRPELRGAAAWALGAIGGEAALAAVELALESEQDEEVTRRLRRAKARLADPKES

SEQ ID NO: 78984 - protein, 394 aa, Paenibacillus durus
  misc_feature (1)..(394): tr|A0A0F7FF95|A0A0F7FF95_PAEDU Epoxyqueuosine reductase OS=Paenibacillus durus ATCC 35681 OX=1333534 GN=VK70_2 5315 PE=4 SV=1
MNTPEYTSYAPPPPRWESLKKEIKEAAQTLGIDDIGFTTAEPFLFLKNLLQEHRDKGYDSGFEEPDLDKRTIPALREGEAKSIIAIAVAYPSKMDNPPKSEPGERRGILARSAWGRDYHLVLREALERLEAFIRQRVPDAVMESMVDTGVLVDRAVAERAGIGFSGKNCAVISPKWGSWIYLGEMITNIPFPPDTPVTEGCGTCTKCIDACPTGALVGPGELNAQACISYLTQTKGFLDETYMAKIGNRLYGCDTCQIVCPHNRGKNWNHHEELLPDPEQAKPLLLPILDLSNREFKEKFGSSAAAWRGKKPIQRNAVIALGNFKDASAVPKLSEVLLRDPRPELRGAAAWALGAIGGEAALAAVELALESEQDEEVAGRLGRAKSRLAGPIDP

SEQ ID NO: 78985 - protein, 398 aa, Paenibacillus elgii
  misc_feature (1)..(398): tr|A0A2T6FU45|A0A2T6FU45_9BACL Epoxyqueuosine reductase OS=Paenibacillus elgii OX=189691 GN=queG PE=3 SV=1
MAEELQPADWSRLKQQLQADAAQLGIDKIGFSSADPFVELKDILIRHREKGFESGFEEPDLEKRVDPALTLAEPRSIISIAVAYPSKLRNAPRSEPGAYRGILSRSAWGQDYHHVLRNRLARLEAWIRERVPGARTTSLVDTGALVDRAVAERAGIGWVGKNCCVITPEWGSWVFLGELITNVPFPPDTPITESCGDCTLCIDSCPTGALVGPGQLNAQRCVSFLTQTKGLIEDDELKRKIGNRLYGCDTCQIVCPKNKGIHAGHQPELQPDPELVKPLLLPLLSMSNREFKERFGHSAAAWRGRKPIQRNAILALGNFRDASSVPQLAELLRKDERPEIRGTAAWALGRIGGEAAREALDAAWETERDEAARREIGKARAQFTGERQGDEQDGDPIR

SEQ ID NO: 78986 - protein, 416 aa, Paenibacillus elgii
  misc_feature (1)..(416): tr|A0A165QEV4|A0A165QEV4_9BACL Epoxyqueuosine reductase OS=Paenibacillus elgii OX=189691 GN=queG PE=3 SV=1
MEKKYSTMGTEQQSERFAAEEELQPADWSRLKQQLQADAAQLGIDKIGFASADPFVELKDILIRHREKGFESGFEEPDLEKRVDPALTLTEPRSIISIAVAYPSKLRNAPRSEPGAYRGILSRSAWGQDYHHVLRNRLARLEAWIRERVPGARTASLVDTGALVDRAVAERAGIGWVGKNCSVITPEWGSWVYLGELITNVPFPPDTPVTESCGDCTLCIDACPTGALVGPGQLNAQRCVSFLTQTKGHIEDDELKRKIGNRLYGCDTCQIVCPKNKGIHAGHHPELQPDPEIVKPLLLPLLSLSNREFKERFGHSAAAWRGRKPIQRNAILALGNFRDASSVPQLVELLRKDERPEIRGTAAWALGRIGGEAAREALGAAWESERDEAARREIGKARAQFTGERQGDEQDGDPIR

SEQ ID NO: 78987 - protein, 407 aa, Paenibacillus etheri
  misc_feature (1)..(407): tr|A0A0W1AQ38|A0A0W1AQ38_9BACL Epoxyqueuosine reductase OS=Paenibacillus etheri OX=1306852 GN=UQ64_02770 PE=4 SV=1
MNDTFQSPYAPPPSKWAKLKAEIQEAATSLGIDDIGFTTAEPFLYLKNILQDHRDKGYESGFEEPDLDKRTIPALSSGDKPLSIISIAVAYPSKMENPPKSEPGARRGILARASWGRDYHHVLREALSKLEDFIHERVPEAVLESMVDTGVLVDRAVAERAGIGFSGKNCSIISPKWGSWIYLGEMVTNIPFAPDEPVEEGCGDCTKCIDACPTGALVGPGQLNAQACISFLTQTKGFLSDEYMTKIGNRLYGCDTCQIVCPKNRGKNWNHRPQMLPDPEIVKPLLMPILDLSNREFKERFGNSSAAWRGKKPMQRNAIIALGNFKEVEAVPKLTEIVLKEPRPEMRGTAAWALGRIGGEEALAAVESALEREEHDTVREMLSRALDVLLTAKQAREDSDVNEGKRS

SEQ ID NO: 78988 - protein, 392 aa, Paenibacillus faecis
  misc_feature (1)..(392): tr|A0A5D0CP47|A0A5D0CP47_9BACL tRNA epoxyqueuosine(34) reductase QueG OS=Paenibacillus faecis OX=862114 GN=que G PE=4 SV=1
MTENASAGGAGAGYARWDALKREIQEAAPSLGIDTIGFASADPFLSLKSILLDRREKGYESGFEEPDIDKRIYPELSLEQPASLIAIAVAYPSKMENPPKSEPGQRRGILARSAWGQDYHQVLRQAMAKLQAFIAERVPDARIESMVDTGALSDRAVAQRAGIGFYGKNCAIISPEFGSWIYLGELITNIPFRPDTPVTEDCGDCTKCLDACPTGALVEPGVLNAQRCISFLTQTKGFVEEEFMLKIGNRLYGCDTCQVVCPKNKGKSWNHRPELLPDPETAKPLLLPLLDISNREFKERFGNSAAAWRGKKPIQRNAVIALGNFKDSSSVPKLIDIMIHDPRPVLRGTAAWALSRIGGEEALLGIKRAAERETDPEVLERLETARAKLEES

SEQ ID NO: 78989 - protein, 393 aa, Paenibacillus ferrarius
  misc_feature (1)..(393): tr|A0A1V4HPA9|A0A1V4HPA9_9BACL tRNA epoxyqueuosine(34) reductase QueG OS=Paenibacillus ferrarius OX=1469647 GN =BC351_20465 PE=4 SV=1
MAVSTPIATGTPADFSKLQQEIVDAASSLGIDKIGFASAEPFTELKDILLRHREKGFESGFEEPDIEKRVNPGLSFDAPKSIISIAVAYPSKLPNPPRSEPGAYRGIISRSSWGSDYHDVLRDRLAKLEAFIAERVPDARLMSMVDTGVLVDRAVAERAGIGWSGKNCAVITPEWGSWVYLGDMITNIPFTPDTSIMDQCGDCTICIDACPTGALVGPGQLNSSRCISFITQTKGYIDDEYKRKIGNRIYGCDTCQIVCPKNKGMNWTHQPELQPDPEKVKPLLIPLLTMTNKEFKEQYGRIAASWRGKKPIQRNAIIALGNFRDQSAVPILSELLLADPRPEIRAACAWALGRIGGEEASSALNNAQAKEQEPVVREDIEKAITAVSQSASR

SEQ ID NO: 78990 - protein, 396 aa, Paenibacillus ginsengarvi
  misc_feature (1)..(396): tr|A0A3B0BG64|A0A3B0BG64_9BACL Epoxyqueuosine reductase OS=Paenibacillus ginsengarvi OX=400777 GN=queG PE=3 SV =1
MEKAAYDSKDYYAQLKEDIRAAAPELGIDKIGFASAEPFVELKQILIQHRERGYESGFEEPDLEKRTDPALSLERPQSLVSIAIAYPSKLKDAPKSAPGAYRGIISRSSWGEDYHKVLRKRIAALEEYIKERVPEARIESMVDTGSLSDRAVAQRAGIGWSGKNCAIITPEWGSWVYLGELITSIPFPPDRPITDQCGDCTICIDACPTGALVGPGQLNSSRCISFVTQTKGFVSEEMMRKIGNRLYGCDTCQVVCPVNKGKNWTHQPDLQPEPEKVKPLLKPLLSLSNKQFRELYGHLAASWRGRKPIQRNALIALGNFRDETAVPLLSDVMRTDERPELRAAAAWALGRIGGDEARSALEQAKRTEAHPVAAEYMETALKAIAGVDGGASDMYP

SEQ ID NO: 78991 - protein, 572 aa, Paenibacillus glacialis
  misc_feature (1)..(572): tr|A0A162PWC2|A0A162PWC2_9BACL Epoxyqueuosine reductase OS=Paenibacillus glacialis OX=494026 GN=PGLA_18605 PE= 4 SV=1
MTLEHVKSPYAPSPSVWEQLKRDIQLAAPSLGIDEIGFATADPFVSLKSILQNHRDNGYESGFEEPDLDKRVTPALPSSQPASLIAIAVAYPSKMVNPPKSEPGAYRGILARSAWGRDYHYVLREAMQKLEDFIRERVPEAVIESMVDTGALVDRAVAERAGIGFSAKNCMIISPKWGSWIYLGDMVTNIPFPPDTPVTEDCGECTKCIDACPTGALVGPGQLNAQRCVSFLTQTKGLLEEEQMLKIGNRLYGCDTCQIVCPKNRGKSWDHHKELLPDYEIAKPLLLPILDLSNREFKEKFGESAAAWRGKKPMQRNAIIALGNFKDRSAVPRLEEVLLKDPRYEMRGTAAWALGRIGGEEALNSLNKGLAVEEDKLVQEMLMKAKEKIEPSTNVEEKHSQEIIYYDELTTPIGILTLCTSSKGICLVEMDSFTTKEAIIQQWSRNWTQDAVFIHDGERLTEAKIQLEQYFAGERKQFDLPIDMRGTLFQLQVWTTLADILYGETCSHGQLAEAIERPKAVKSVGVATNKNPIPIIVPCHRIIGADSSLAGYVYGHEIRSQLLSLEGSLPER

SEQ ID NO: 78992 - protein, 617 aa, Paenibacillus glucanolyticus
  misc_feature (1)..(617): tr|A0A163K0T7|A0A163K0T7_9BACL Methylated-DNA--protein- cysteine methyltransferase OS=Paenibacillus glucanolyti cus OX=59843 GN=AWU65_13795 PE=3 SV=1
MTYTLGSHAPPPSVWEELKQELKSVAPELGIDDIGFASAEPFQSLKGILQNHRDKGYESGFEEPDLDKRVTPALPGSEPMSLIAIAITYHSKMDNPPKSEPGKYRGIMARSAWGRDYHQVLREAMSRLEAFIRERVPDARLESMVDTGALVDRAVSQRAGIGFSAKNCAIISPKLGSWIFLGEMITNIPFPPDTPVTEDCGECTKCIDACPTGALVGPGQLNAQRCISFLTQTKGFLDEEVMRKIGNRLYGCDTCQIVCPKNRGKNWTHQEAFKPDPEKAKPLLLPILDLSNREFKETFGDTSAAWRGRKPIQRNAVIALGNFKDISAVPKLSEVLLKDPRPELRGTAAWALGRIGGEEALNNLEKSMKSEGDSQVRDMLQQALNKLKPESNEKEAPTEAQAGAEALSSGNALPASPDKGDKPEQESPAIHGVEPMAIPEGGPEVLYYDEIQSPIGPLTVCATEKGLCLIEFGSFYVKEAVIQQWSRTWAGNGGYQRDEARLAPATAQLERYFSGELKEFEIPLDTRGTSFQLQVWEALKSIPYGTVCSYKDIAESIGRPKAVRAVGGANNKNPVPIIVPCHRVIGTDGALIGYAGGPEIKRTLLTLEGAMPDRKGS

SEQ ID NO: 78993 - protein, 390 aa, Paenibacillus hemerocallicola
  misc_feature (1)..(390): tr|A0A5C4TA09|A0A5C4TA09_9BACL tRNA epoxyqueuosine(34) reductase QueG OS=Paenibacillus hemerocallicola OX=1172 614 GN=queG PE=4 SV=1
MSVTTASGTREHWAGLKEEIQEALPALGIDKIGFASAEPFAELKQILLRHRERGHESGFEEPDLDKRTDPALSLDRPQSLISIAIAYPSKLSDPPKSEPGAYRGIISRSSWGEDYHRVLRRRMASLEAFITERVPDARMESMVDTGALVDRAVAERAGIGWSGKNCAIITPEWGSWVYLGELVTNIPFPPDRPITDQCGECTICIDACPTGALVGPGQLNSSLCISFATQTKGFVGDDMMRKIGNRLYGCDTCQVVCPVNKGKNWTHQPDLQPDPEKVKPLLKPLLSMSNKQFREQYGDMAASWRGKKPIQRNAIIALGNFRDKSAVPLLAEMLNDDDRPEIRGTAAWALGRIGGSEALAALEEAERKEANPDVAERIRSAAKEISASGT

SEQ ID NO: 78994 - protein, 401 aa, Paenibacillus herberti
  misc_feature (1)..(401): tr|A0A229NVS1|A0A229NVS1_9BACL tRNA epoxyqueuosine(34) reductase QueG OS=Paenibacillus herberti OX=1619309 GN= queG PE=4 SV=1
MAEPIRDAAFWSWLKAEMKEAAFGLGIDDIGVASAEPFTELKGRLIQHREQGFESGFEERDLDKRTDPSLLFEQPLSIIAISVAYPSKLPHPPRSEPGARRGILSRSAWGEDYHSVLRNRLQRLEEWLQARVPELRAESMVDTGELSDRAVAERAGIGWSGKNSFIMNRKHGTFIYLAEMITNLPLQPDSPLLDNCGSCTKCIDSCPTGALIGPGQLNAQRCISFVTQTKEMVSEELMRKIGNRLYGCDTCQIVCPVNKGINVTRHPEFQADPEQVKPLLVPLLQLSNREFKERFGTNAASWRGKKPIQRNAVIALGNFREASAVPELVQVLQEDARPVLRGTAAWALGRIGGAEAEAALAQAAEQESDSEARSWAERSLAALRAERAATAVAEPAAAGEM

SEQ ID NO: 78995 - protein, 621 aa, Paenibacillus ihbetae
  misc_feature (1)..(621): tr|A0A1B2DZD7|A0A1B2DZD7_9BACL Methylated-DNA--protein- cysteine methyltransferase OS=Paenibacillus ihbetae OX= 1870820 GN=BBD41_10580 PE=3 SV=1
MTYTLGSYAPPSSVWEELKQELKSAAPELGIDDIGFASAEPFASLRGILQNHRDKGYESGFEEPDLDKRVTPALPGTEPASLIAIAVAYPSKMENPPKSEPGKYRGIMARSAWGRDYHHVLREAMSRLEAFIRERVPDAVLESMVDTGALVDRAVAERAGIGFSAKNCAIISPKFGSWIYLGEMVTNIPFPPDQPVTEGCGECTKCIDACPTGALVGPGQLNAQRCVSFLTQTKGFLSEEVMRKIGNRLYGCDTCQIVCPKNRGKNWTHHEELQPDPEKAKPLLLPILDMSNREFKETFGDTAAAWRGRKPIQRNAVIALGNFKDISAVPKLSEVLLKDPRPELRGTAAWALGRIGGEEALNNLEKSMKTEGDAQVRDMLQQALAKLNADATSENTRIETAPPAPEAAEGPGTAGAAAGKASGGESAAVPEQPRPAIQGVEPMAVPEGGPEVLYYDELQSPIGTLTVCATEKGLCLIEFGSFYVKEAVIQQWCRTWSGNGGYERDEARLAPVTDQLKRYFAGELKEFTLPLDMRGTSFQLQVWEALKSIPYGTVCSYKDIAESIGRPKAVRAVGGANNKNPVPIVVPCHRVVGADGALIGYAGGPEIKRTLLAIEGIALGR

SEQ ID NO: 78996 - protein, 611 aa, Paenibacillus illinoisensis
  misc_feature (1)..(611): tr|A0A2W0CV87|A0A2W0CV87_9BACL Iron-sulfur cluster-bind ing protein OS=Paenibacillus illinoisensis OX=59845 GN= PIL02S_00039 PE=4 SV=1
MTSVQTGAAQAGSVWEQLKQEIKAAAPGLGIDDVGFASAEPFVSLKSLLEQHRDNGYASGFEEPDIEKRVRPALKEGEPASLIAIAVAYPSKMVNPPKSEPGAYRGILARSAWGRDYHHVLREAMDKLVQFIRERVPEAMIESMVDTGALVDRAVSQRAGIGFSAKNCSIISPKFGSWIYLGELVTNIPFQPDTPVTEDCGECTKCIDACPTGALVGPGQLNAQRCISFVTQTKGFVDEEFMLKIGNRLYGCDTCQIVCPKNRGKNWDHHPDLQPDPEIVKPLLLPLLDIGNREFKERFGQSSAAWRGKKPIQRNAVIALGNFKDKSAVPKLTEVLKRDPRPELRGTAAWALSRIGGEDAMRAIGEAAANEQDGNVLSMLQKAKERLSSSGTLPEKPQVGLMSDKQQEEQKNESTDTNSNTSGQPVKQEAAAWKPSAVTGLHGTPVFYDEVLTPIGTLTLCATEKGLCHIDFGAFHVREAHLQQWARTWIGEYRYEKNEDKLSEAAKQLQQYFAGERKSFELEMDLLGTPFQLQVWQVLSDISYGEASTHQQVAETIGRPKAVRAVLDAISKNPIPIIIPCHRISGKDGTLVGYVGGLQTKEQLLTLEQQS

SEQ ID NO: 78997 - protein, 394 aa, Paenibacillus jilunlii
  misc_feature (1)..(394): tr|A0A1G9WUF6|A0A1G9WUF6_9BACL Epoxyqueuosine reductase OS=Paenibacillus jilunlii OX=682956 GN=SAMN05216191_12 050 PE=4 SV=1
MNNNIQTFYAPPPSKWEGLKAEIKAAAPEIGIDDIGFATAEPFLYLKNILQEHRDNGYDSGFEEPDLDKRTIPALQSGGQPQSIIAIAVAYPSKMENPPKSEPGARRGILSRASWGRDYHHVLREALAKLEAFIRERVPGAELESMVDTGVLVDRAVAERAGIGFSAKNCSIISPKWGSWIYLGEMVTNIPFPPDTPVEEGCGSCTKCIDACPTGALVGPGQLNAQACISYLTQTKGLLSDEYMTKIGNRLYGCDTCQIVCPKNRGKNWNHRPELLPDPEVVKPLLLPILELSNREFKEQFGSSSAAWRGKKPIQRNAVIALGNFKEAGAVPKLTEIMLKETRPELRGSAAWALGRIGGAEALAAVKLALHKEEDAAVREMLERAQDKLLEREG

SEQ ID NO: 78998 - protein, 565 aa, Paenibacillus kribbensis
  misc_feature (1)..(565): tr|A0A222WR49|A0A222WR49_9BACL Methylated-DNA--protein- cysteine methyltransferase OS=Paenibacillus kribbensis OX=172713 GN=B4V02_21520 PE=3 SV=1
MQHELIRTAAGTASTWASLKQEIIEAAPGLGIDSIGFASADPFLSLKAILEEHRAKGYESGFEEPDIDKRIYPELYGSQPASLIAIAVAYPAKMKNPPKSDKGKYRGIMARSAWGKDYHLVLREAMEKLEAFISERVPDAIMKNMVDTGELSDRAVAERAGIGFSGKNTMMISPTLGSWIYLGELLTNIPFQPDEPVTDGCGECTKCLDACPTGALVGPGELNAQRCVSFLTQTKGFLDEEFMLKIGNRLYGCDTCQMVCPKNRGLNWDHHPELAPDPEIVKPLLLPLLDLSNREFKERFGQSAAAWRGKKPIQRNAIIGLGNFKDISAVPKLTEVLLDDPRPELRGTAAWALSRIGGEDAMTAIKQASEKEQHEQVREMIAQAHSKLEEQQQVEQGPTTIYYDEMETPVGTLTLCATDRGLCRIEFGVFHAKEALLQQWARTWIGEYVYVQQPEKLREAADQLREYFAGERREFSIAYDLRGIPFQEQVWHALQNIPYGQSVSYKDIAESIGRAKAVRAVGDAINKNPLPILIPCHRVSGANGSLVGYAGGLPVKTKLVDLEKE

SEQ ID NO: 78999 - protein, 622 aa, Paenibacillus lactis
  misc_feature (1)..(622): tr|G4HPK0|G4HPK0_9BACL Methylated-DNA--protein-cysteine methyltransferase OS=Paenibacillus lactis 154 OX=74371 9 GN=PaelaDRAFT_5911 PE=3 SV=1
MTYTLGSYAPPPSVWEELKQELKTAAPELGIDDIGFASAEPFVSLRGILQNHRDKGYESGFEEPDLDKRVTPALPGTEPASLIAIAVAYPSKMENPPKSEPGKYRGIMARSAWGRDYHHVLREAMSRLEAFIRERVPDAVLESMVDTGALVDRAVAERAGIGFSAKNCAIISPKFGSWIYLGEMVTNIPFPPDQPVTEDCGECTKCIDACPTGALVGPGQLNAQRCVSFLTQTKGFLSEEVMRKIGNRLYGCDTCQIVCPKNRGKNWTHHEELQPDPEKAKPLLLPILDMSNREFKETFGDTAAAWRGRKPIQRNAVIALGNFKDISAVPKLSEVLLKDPRPELRGTAAWALGRIGGEEALNNLEKSMKTEGDPQVRDMLQQALAKLNADAATSENTRSESAAPVPEAAEEQGSAGAAAGKASAGNAAAEPEQPRPAIQGVEPMAVPEGGPEVLYYDELQSPIGTLTVCATEKGLCLIEFGSFHVKEAVIQQWCRTWSGNGGYERDEARLAPVTDQLKRYFAGELKEFTLPLDMRGTSFQLQVWEALKSIPYGTVCSYKDIAESIGRPKAVRAVGGANNKNPVPIVVPCHRVVGADGALIGYAGGPEIKRTLLAIEGITLGR

SEQ ID NO: 79000 - protein, 389 aa, Paenibacillus larvae
  misc_feature (1)..(389): tr|A0A2L1UII5|A0A2L1UII5_9BACL Putative iron-sulfur clu ster binding protein OS=Paenibacillus larvae subsp. lar vae OX=147375 GN=ERICIII_04171 PE=4 SV=1
MTKGHTNLKRDWRELKEEIIQAAPSLGIDKIGFASADPFLELKEILLQHREKGYESGFEEPDIDKRVYPELNFEGKPRSIISIAVAYPSKISNPPRSEPGAYRGIISRSAWGEDYHRVLKVRLERLEAFIRERVPEARMESMVDTGALVDRAVAERAGIGWTGKNCAIITPEYGSWVFLGDMITNIPFPADTSIMDQCGDCTICIDACPTGALVGPGQLNASRCISFLTQTKGVIEDEFKEKIGNRLYGCDTCQMVCPHNKGKNWTYHPEMQPDPEKVKPLLQPLLTMSNREYKEQYGSSASSWRGKKLIQRNAIIGLSKFKDRSAVPLLGKLLQTDPRPEIRETAAWALGKIGGDEAGTWIREFLEKEQDETVRFALQKAADRLNQEG

SEQ ID NO: 79001 - protein, 389 aa, Paenibacillus larvae; identical to SEQ ID NO: 79000
  misc_feature (1)..(389): tr|A0A1U9YM49|A0A1U9YM49_9BACL tRNA epoxyqueuosine(34) reductase QueG OS=Paenibacillus larvae subsp. pulvifaci ens OX=1477 GN=B5S25_07770 PE=4 SV=1

SEQ ID NO: 79002 - protein, 614 aa, Paenibacillus lautus
  misc_feature (1)..(614): tr|A0A385TYQ7|A0A385TYQ7_PAELA Methylated-DNA--protein- cysteine methyltransferase OS=Paenibacillus lautus OX=1 401 GN=queG PE=3 SV=1
MTYTLGSYAPPPSVWEELKQELKAVAPELGIDDIGFASAEPFQSLKGILQSHRDKGFESGFEEPDLDKRVTPALPGTEPKSLIAIAITYHSKMENPPKSEPGKYRGIMARSAWGRDYHHVLREAMSRLEAYIKERVPDAELESMVDTGALVDRAVSQRAGIGFSAKNCAIISPKFGSWIFLGEMVTNIPFPPDTPITEDCGECTKCIDACPTGALVGPGQLNAQRCVSFLTQTKGFLDEEAMRKIGNRLYGCDTCQIVCPKNRGKSWTHQEDFKPDPEKAKPLLLPILDMSNREFKETFGDTSAAWRGRKPIQRNAVIALGNFKDISAVPKLSEVLLKDPRPELRGTAAWALGRIGGEEALNNLEKSMKSEGDSQVRDMLQQALNKLKPEQAGNEAPAQAQAAAEASSAGVPGSSNGGNPEQESSVIQGVEPMAIPEGGPEMLYYDEVQSPIGPLTVCATEKGLCLIEFGSFYVKEAVIQQWSRTWAGNGGYQRDEARLAPAITQLKQYFAGELKAFDVQLDMRGTSFQLQVWEALKSIPYGTVCSYKDVAESIGRPKAVRAVGGANNKNPVPIIVPCHRVVGTDGALIGYAGGPEIKRTLLTIEGAMPDRKGS

SEQ ID NO: 79003 - protein, 613 aa, Paenibacillus lautus
  misc_feature (1)..(613): tr|A0A328WEG1|A0A328WEG1_PAELA Methylated-DNA--protein- cysteine methyltransferase OS=Paenibacillus lautus OX=1 401 GN=queG PE=3 SV=1
MTYTLGSYAPPPSVWEELKQELKAVAPELGIDDIGFASAEPFESLKGILQNHRDKGYESGFEESDLDKRVTPALPGTKPKSLIAIAITYHSKMENPPKSEPGKYRGIMARSAWGRDYHQVLREAMSRLEEYIKERVPDAKLESMVDTGALVDRAVSQRAGIGFSAKNCAIISPKFGSWIFLGEMVTNIPFPPDTPVTEDCGECTKCIDACPTGALVGPGQLNAQRCVSFLTQTKGFLDEEAMRKIGNRLYGCDTCQIVCPKNRGKNWTHQEDFKPDPEKAKPLLLPILDMTNREFKEAFGDTSAAWRGRKPIQRNAVIALGNFKDISAVPKLSEVLLKDPRPELRGTAAWALGRIGGEEALNNLEKSMKSEGDSQVRDMLQQALNKLNKPTEKEAPAGAAADASSAGTPAAGSSNGDKPEQESPVIQGVEPMAIPEGGPEMLYYDELQSPIGPLTVCATEKGLCLIEFGSFYVKEAVIQQWSRTWAGNGGYQRDEARLAPAITQLKQYFAGELKAFDVQLDMRGTSFQLQVWEALKSIPYGTVCSYKDVAESIGRPKAVRAVGGANNKNPVPIIVPCHRVVGADGALIGYAGGPEIKRTLLTIEGAMPGRKGS

SEQ ID NO: 79004 - protein, 386 aa, Paenibacillus lentus
  misc_feature (1)..(386): tr|A0A3Q8S773|A0A3Q8S773_9BACL tRNA epoxyqueuosine(34) reductase QueG OS=Paenibacillus lentus OX=1338368 GN=qu eG PE=4 SV=1
MDWARLKQEIKDAAYSMGIDDIGFASADPFLSLKNVLLDRRAKGYESGFEEPDIDKRVYPELSLERPASLISIAVAYPSKLENPPKSEPGLRRGIFARAAWGQDYHTVLREAMARLEEFIMQRVEGARIESMVDTGALVDRAVAERAGIGYKAKNCMVISPKWGSWIYLGELITNIPFEPDTPVTEDCGECTKCIDSCPTGALVGPGELNAQRCVSFLTQTKGFLEDELMRKIGNRLYGCDTCQIVCPKNKGKSWNHRPELQPDPEMVKPLLLPILELSNREFKARFGSSAAAWRGKKPIQRNAVIALGNFKDPAAVPKLIDIMRNDPRPVLRGTAAWALSRIGGEEALQAIIGAITAEKDEEVLERLHAAQDKLSEEEVKVEAEN

SEQ ID NO: 79005 - protein, 389 aa, Paenibacillus macerans
  misc_feature (1)..(389): tr|A0A090Z8H1|A0A090Z8H1_PAEMA Epoxyqueuosine reductase OS=Paenibacillus macerans OX=44252 GN=queG PE=4 SV=1
MKREIKENAASLGIDDIGFASADPFISLKAILLDRREKGYESGFEEPDIDKRIYPELSLEQPASLVSIAVAYPSKMDNPPKSEPGQRRGILARSAWGRDYHLVLREAMAKLEDFIRQRVPEARIESMVDTGALVDRAVAERAGIGFKGKNCAIISPKWGSWIYLGEMITNIPFPPDSPVTEDCGECTKCIDACPTGALVGPGVLNAQRCISFLTQTKGFVEEEFMLKIGNRLYGCDTCQIVCPKNRGKSWNHRPELQPDPETVKPLLLPLLDISNREFKERFGDSAAAWRGKKPIQRNAVIALGNFKDTASVPKLIDILFHDPRPVLRGTAAWALARIGGEAAAEAVSRALESEQDEEVLERLQAADRKLRGGASPGESRPTVKESKPD

SEQ ID NO: 79006 - protein, 572 aa, Paenibacillus macquariensis
  misc_feature (1)..(572): tr|A0A1N7AQ81|A0A1N7AQ81_9BACL Epoxyqueuosine reductase OS=Paenibacillus macquariensis OX=948756 GN=SAMN054215 78_11362 PE=4 SV=1
MTLEHVRSPYAPSPSVWEQLKRDIKLAAPSLGIDDIGFATADPFVSLKSILQNHRDKGYESGFEEPDLDKRVTPVLPSSQPASLISIAVAYPSKMVNPPKSEPGAYRGILARSAWGRDYHYVLREAMQKLEDFIRERIPEAVLESMVDTGALVDRAVAERAGIGFSAKNCMIISPKWGSWIYLGDMVTNIPFPPDTPVTEDCGDCTKCIDACPTGALVGPGQLDAQRCVSFLTQTKGLLEEEQMRKIGNRLYGCDTCQIVCPKNRGKSWDHNKQLLPDPEITKPLLLPILDLTNREFKEKFGESAAAWRGKKPMQRNAIIALGNFKDRSAVPRLEEVLLKDPRFEMRGTAAWALGRIGGEEALNSVNKGLAVEEDVKVQEMLMKAKEKLEPSTSIEEEHSQEIIYYDEITTPIGVLTLCTSVKGICLIEMDSFTTKEAVIQQWSRNWAQDAEFIHDGERLSEAKTQLEQYFAGERKQFDLPIDMRGTLFQLQVWTTLADIPYGETCSYGQLAEAIERPKAVKAVQGATNKNPIPIIVPCHRIIGADNSLAGYVYGHEIRSQLLSFEGSLPER

SEQ ID NO: 79007 - protein, 572 aa, Paenibacillus macquariensis
  misc_feature (1)..(572): tr|A0A168G804|A0A168G804_9BACL Epoxyqueuosine reductase OS=Paenibacillus macquariensis subsp. defensor OX=4679 74 GN=PMSD_11505 PE=4 SV=1
MTLEHVQSPYAPSPSVWEQLKRDIKLAAPSLGIDDIGFATADPFVSLKSILQNHRDKGYESGFEEPDLDKRVTPALPSTQPASLISIAVAYPSKMVNPPKSEPGAYRGILARSAWGRDYHYVLREAMQKLEDFIRERVPEAVLESMVDTGALVDRAVAERAGIGFSAKNCMIISPKWGSWIYLGDMVTNIPFPPDTPVTEDCGECTKCIDACPTGALVGPGQLDAQRCVSFLTQTKGLLEEEQMRKIGNRLYGCDTCQIVCPKNRGKSWDHNKQLLPDPEIAKPLLLPILDLTNREFKEKFGESAAAWRGKKPMQRNAIIALGNFKDRFAVPRLEEVLLKDPRFEMRGTAAWALGRIGGEEALNSVNKGLAVEEDVKVQEMLMKAKEKLEPSTSIEEEHSQEIIYYDEITTPIGVLTLCTSVKGICLIEMDSFTTKEAVIQQWSRNWAQDAEFIHDGERLSDAKTQLEQYFAGERKQFDLPMDMRGTLFQLQVWTTLADIPYGETCSYGQLAEAIGRPKAVKAVQGATNKNPIPIIVPCHRIIGADNSLAGYVFGHEIRSQLLSLEGSLPER

SEQ ID NO: 79008 - protein, 382 aa, Paenibacillus montanisoli
  misc_feature (1)..(382): tr|A0A328TY19|A0A328TY19_9BACL tRNA epoxyqueuosine(34) reductase QueG OS=Paenibacillus montanisoli OX=2081970 GN=queG PE=4 SV=1
MNKIDWEQLKAEMKDAAASLGIDKIGIASAAPFTELRKRLERHRELGYESGFEEPDLAKRTEPSLLFEDPKSIIAIAVAYPSKLQDPPKSEPGARRGILSRSAWGEDYHGVLRERLRRLEAWLQERVPEGRFLGMVDTGALSDRAVAERAGIGWIGSNCSIITPEWGSWVYLGEMITNLPLPPDAPVTESCGSCTACIDACPTDALVGPGQLNSQRCISFVTQTKGIVSDELMRKIGNRLYGCDTCQIVCPENKGKNATHHPELMPDNEKVKPLLVPLLTMGNRAFKEQYGASSSAWRGRKPIQRNAVIALGNFKDASAIPDLAEVLHGDTRFELRATAAWSLGRIGGEAAAEALRAAQLREQDETVREAIMGALSSLAAST

SEQ ID NO: 79009 - protein, 410 aa, Paenibacillus mucilaginosus
  misc_feature (1)..(410): tr|F8FQ20|F8FQ20_PAEMK YhbA OS=Paenibacillus mucilagino sus (strain KNP414) OX=1036673 GN=yhbA PE=4 SV=1
MEDQHPDHDTELPAGLASLPDVPAGAWKRLKDKLRSAAPDLGIDKIGFASAEPFTELRDILERHREKGYESGFEERDIAKRVDPALTMERPRSILSIAVAYPSKLPNPPRSEPGRYRGILSRSAWGTDYHHVLRDRLQKLENWIRAEVPGARTVSMVDTGVLVDRAVAERAGIGWIGKNCSVITPEWGSWVYLGEMVTNVPFPPDVPVLQDCGDCTLCIDACPTGALVGPGQLNAQRCVSYLTQTKGIIEDDELKRKIGNRLYGCDTCQIVCPKNKGIHADHHPELQPDPEQVKPLLVPLLQMTNREFKEKFGTSSASWRGRKPIQRNAILALGNFRDREALPELLRVLRTDERPEIRATAAWAVGRIGGAAAEAALREALERETDEAARREIVKAQGLAQEQEQTAAQE

SEQ ID NO: 79010 - protein, 418 aa, Paenibacillus mucilaginosus
  misc_feature (1)..(418): tr|I0BB50|I0BB50_9BACL Epoxyqueuosine reductase OS=Paen ibacillus mucilaginosus K02 OX=997761 GN=queG PE=3 SV=1
MEDQHPDHDTELPAGLASLPDVPAGAWKRLKDKLRSAAPDLGIDKIGFASAEPFTELRDILERHREKGYESGFEERDIAKRVDPALTMERPRSIISIAVAYPSKLPNPPRSEPGRYRGILSRSAWGTDYHHVLRDRLQKLENWIRAEVPGARTVSMVDTGVLVDRAVAERAGIGWIGKNCSVITPEWGSWVYLGEMVTNVPFPPDVPVLQDCGDCTLCIDACPTGALVGPGQLNAQRCVSYLTQTKGIIEDDELKRKIGNRLYGCDTCQIVCPKNKGIHADHHPELQPDPEQVKPLLVPLLQMTNREFKEKFGTSSASWRGRKPIQRNAILALGNFRDREALPELLRVLRTDERPEIRATAAWAVGRIGGAAAEAALREALERETDEAARREIVKAQGLAQEQEQTAAQEQHTRETGA

SEQ ID NO: 79011 - protein, 387 aa, Paenibacillus nanensis
  misc_feature (1)..(387): tr|A0A3A1VSG9|A0A3A1VSG9_9BACL Epoxyqueuosine reductase OS=Paenibacillus nanensis OX=393251 GN=queG PE=3 SV=1
MTDRWDNLKREMKEAARELGIDAIGVASAEPFTTLKQRLIRHRELGRESGFEEKDLDKRTDPSLLFDKPQSIIAIAVAHPSKLPDPPKSEPGARRGIMARTSWGQDYHSVLRNRLQRLEEWLRERVPDLRAESMVDTGELSDRAVAERAGIGWSAKNCAIISPELGSWIYLGEMITNLPLPPDEPVTEGCGSCNKCIDACPTGALVGPGELDARKCVSFLTQTKEMLSDEFMRKIGNRLYGCDTCQIVCPANKGKNWTQHPELQPDPELAKPLLTPLLTIGNREFKERFGGTSGAWRGKKPIQRNAVIALGNFKDPSAVPDLIGVLENDTRPVLRGTAAWALGRIGGEQAEKALHEAKGKEEDKEALDAIEFALNMLRGGMKEEEVR

SEQ ID NO: 79012 - protein, 389 aa, Paenibacillus naphthalenovorans
  misc_feature (1)..(389): tr|A0A480BP00|A0A480BP00_9BACL Epoxyqueuosine reductase OS=Paenibacillus naphthalenovorans OX=162209 GN=queG P E=3 SV=1
MVKNEAVDWARLKEELRADAPRLGIDKIGFASADPFVELKDILLKHREKGYESGFEEPDIDKRVDPALTLKAPRSIISIAVAYPSKMKNPPRSEPGAYRGILSRSAWGTDYHHVLRNRLERLEQWIRERVPGARTVSMVDTGALVDRAVAKRAGIGWLGKNCSVITPEWGSWVYLGELITNVPFPPDTPVTESCGDCTLCIDACPTGALVGPGQLNAQRCVSYLTQTKGHIEDDELKRKIGNRLYGCDTCQIVCPKNKGMHADHHPELEPDPELVKPLLKPLLFLSNREFKERFGSSAAAWRGRKPIQRNAILALGNFRDKTAVPELIHLLRTDERPEIRGAAVWALGRIGGAEAREALEAAAGKEQDEAVRRELAKAISQYAEGQQVE

SEQ ID NO: 79013 - protein, 389 aa, Paenibacillus naphthalenovorans
  misc_feature (1)..(389): tr|A0A0U2N087|A0A0U2N087_9BACL Epoxyqueuosine reductase OS=Paenibacillus naphthalenovorans OX=162209 GN=queG P E=3 SV=1
MVKNEAVDWARLKEELRADAPRLGIDKIGFASADPFVELKDILLKHREKGYESGFEEPDIDKRVDPALTLKAPRSIISIAVAYPSKMKNPPRSEPGAYRGILSRSAWGTDYHHVLRNRLERLEQWIRERVPGARTVSMVDTGALVDRAVAKRAGIGWLGKNCSVITPEWGSWVYLGELITNVPFPPDTPVTESCGDCTLCIDACPTGALVGPGQLNAQRCVSYLTQTKGHIEDDELKRKIGNRLYGCDTCQIVCPKNKGMHADHHPELEPDPELVKPLLKPLLFLSNREFKERFGSSAAAWRGRKPIQRNAILALGNFRDKTAVPELIRLLRTDERPEIRGAAVWALGRIGGAEAREALEAAAGKEQDEAVRRELAKAISQYAEGQQVE

SEQ ID NO: 79014 - protein, 392 aa, Paenibacillus nuruki
  misc_feature (1)..(392): tr|A0A1E3KXS2|A0A1E3KXS2_9BACL Epoxyqueuosine reductase OS=Paenibacillus nuruki OX=1886670 GN=PTI45_04104 PE=4 SV=1
MTQQEVLQQTTTRWEQLKLEIKQAAPSLGIDDVGFTTADPFLYLKGVLEEHRRKGHESGFEEPDIEKRIHPSLALDGAKSIIAISVTYHSKMENPPKSEPGQYRGIMARSAWGKDYHYVLRDRMQRLEDFIREKVPEVRIESMVDTGVLSDRAVAQRAGIGFYGKNCAVISPTLGSWIFLGDMITDIPFPPDTPVTEDCGTCTKCIDACPTGALVGPGQLNSQVCVSFLTQTKGMLSDEHMRKIGNRLYGCDTCQIVCPKNKGKNWNHQEELRPDPEKAKPLLLPILDLSNREFKEQFGDTSAAWRGKKPIQRNAVIALGNFRDKSAVPKLTELLHRDPRPELRGTIAWALSRIGGEDALQAVIHALAKEVEPEVTERLLQAKAILEGEIAE

SEQ ID NO: 79015 - protein, 445 aa, Paenibacillus nuruki
  misc_feature (1)..(445): tr|A0A1E3L5W0|A0A1E3L5W0_9BACL Epoxyqueuosine reductase OS=Paenibacillus nuruki OX=1886670 GN=queG PE=4 SV=1
MADMKKHPTVLRYYESVAQSANFDNEILDYDWIRELCLEAGADDVGVISIERSELDDQREDILSVFPHAKTMISFVSRMNREPIRTPARSLANIEFHHTGDKVADTSHNIVSALEARGVRALNAAMGFPMEMDKFPGKAWVVSLKPVAVAAGLGKMGIHRNVIHPKFGNFILLGAIMLDAKVNKEDRPIDYNPCLECKLCVAACPVGAIGADGQFNFSSCATHNYREFMGGFSDFVETIVDSKNTKEFRNEVPATESASWWQSLSFGANYKAAYCLSVCPAGDDVIGPFLQDRKGFMNDILKPLQAKEETIYVIPGSDAEAHVQKRFPHKTVKRVGNGLIPNSISLLVTLMPHVFQPNQATDVNCTYHFTFTGNETRQTTFDIRNKKLQVTDGLHGKPDIQITVDSKTWLKIVAKEKNVGVALLTGKLRFKGNPKLLIKFEKCFA

SEQ ID NO: 79016 - protein, 401 aa, Paenibacillus odorifer
  misc_feature (1)..(401): tr|A0A1R0ZC04|A0A1R0ZC04_9BACL tRNA epoxyqueuosine(34) reductase QueG OS=Paenibacillus odorifer OX=189426 GN=B SK65_21530 PE=4 SV=1
MNNTFQSPYAPPPSKWAQLKAEIQEAATSLGIDDIGFTTAEPFLYLKNILQDHRDKGYESGFEEPDLDKRTIPALSSGDKPLSIISIAVAYPSKMENPPKSEPGARRGILARASWGRDYHHVLREALSKLEDFIHERVPEAVLESMVDTGVLVDRAVAERAGIGFSGKNCSIISPKWGSWIYLGEMVTNIPFAPDEPVEEGCGECTKCIDACPTGALVGPGQLNAQACISFLTQTKGFLSDEYMTKIGNRLYGCDTCQIVCPKNRGKNWNHRPQMLPDPEIVKPLLMPILDLSNREFKERFGNSSAAWRGKKPMQRNAIIALGNFKEVEAVPKLTEIVLKESRPEMRGTAAWALGRIGGEEALAAVESALEREEHDTVKEMLSRAQDVLLTAKQAREDSDV

SEQ ID NO: 79017 - protein, 401 aa, Paenibacillus odorifer
  misc_feature (1)..(401): tr|A0A1R0YAF9|A0A1R0YAF9_9BACL tRNA epoxyqueuosine(34) reductase QueG OS=Paenibacillus odorifer OX=189426 GN=B SK52_02435 PE=4 SV=1
MNDTFQSPYAPPPSKWAQLKAEIQEAATSLGIDDIGFTTAEPFLYLKNILQDHRDKGYESGFEEPDLDKRTIPALSSGDKPLSIISIAVAYPSKMENPPKSEPGARRGILARASWGRDYHHVLREALSKLEEFIHERVPEAVLESMVDTGVLVDRAVAERAGIGFSGKNCSIISPKWGSWIYLGEMVTNIPFAPDEPVEEGCGECTKCIDACPTGALVGPGQLNAQACISFLTQTKGFLSDEYMTKIGNRLYGCDTCQIVCPKNRGKNWNHRPQMLPDPEIVKPLLMPILDLSNREFKERFGNSSAAWRGKKPMQRNAIIALGNFKEAGAVPKLTEIVLKEPRPEMRGTAAWALGRIGGEEALAAVESALEHEEHDTVRQMLSRAQDVLLTAKQTREDSDV

SEQ ID NO: 79018 - protein, 387 aa, Paenibacillus oryzae
  misc_feature (1)..(387): tr|A0A1A5YJM3|A0A1A5YJM3_9BACL tRNA epoxyqueuosine(34) reductase QueG OS=Paenibacillus oryzae OX=1844972 GN=A7 K91_13440 PE=4 SV=1
MMDWSKLKQEMKAAATALGIDDIGVASADPFVTLKQRLIRHRELGRESGFEEPDLDRRTNPALLFEDPQSIIAIAIAYPSKLVDPPKSEPGERRGIMARSAWGEDYHHVLRDRLAKLESWLKERVPGTRVESMVDTGALSDRAVAERAGIGWSAKNCAIISPKLGSWIYLGEMITNLPLPPDVPVTEGCGSCTKCIDACPTGALVGPGELNAKRCISFVTQTKDMVSDEFMRKIGNRLYGCDTCQVVCPVNRGKNWTHQPELQPDNELAKPLLVPLLEMGNRQFKEAYGRTSSAWRGRKPIQRNAVIALGNFKDASAIPHLIKVLRDDPRPVLRGTAAWSLGRIGGAEAACALREALNNEQDEVALSAISEAVKSLEVPIRDCEFPL

SEQ ID NO: 79019 - protein, 393 aa, Paenibacillus oryzisoli
  misc_feature (1)..(393): tr|A0A198A8F0|A0A198A8F0_9BACL tRNA epoxyqueuosine(34) reductase QueG OS=Paenibacillus oryzisoli OX=1850517 GN =A8708_22045 PE=4 SV=1
MAVSHAETTDWRKLQQEIVEAASSLGIDKIGFTSAEPFHALKDILLRHREKGFESGFEEPDIEKRVHPELSFEAPRSIISIAVAYPSKLKNPPRSEPGAYRGMISRSSWGSDYHDVLRDRLAKLEAFIAERVPEARLMSMVDTGALVDRAVAERAGIGWSGKNCAVITPEWGSWVYLGEMITNIPFESDIGIMDQCGDCTICIDACPTGALVGPGQLNSSRCISFITQTKGYVDDEYKRKIGNRLYGCDTCQVVCPKNKGMNWTHHPELTPDPEKVKPLLIPLLTMSNKDFKEQYGRIAASWRGKKPIQRNAIIALGNFKDGTAVPVLTELLRSDPRPEIRATAAWALGRIGGEEAFAALRKAAAAEQEPQVQADIEKAIAGQNSQAVAVQEG

SEQ ID NO: 79020 - protein, 629 aa, Paenibacillus pabuli
  misc_feature (1)..(629): tr|A0A327PEG6|A0A327PEG6_9BACL Epoxyqueuosine reductase OS=Paenibacillus pabuli OX=1472 GN=DET54_11676 PE=4 SV =1
MTSVQTGAAKAAAVWEKLKQEIKAAAPEMGIDDIGFASAEPFVTLKSILEQHRAKGFESGFEEPDIEKRIRPELKDGEPASLIAIAVAYPSKMVNPPKSEPGAYRGILARSAWGQDYHQVLRAAMDKLVHFIRERVPEAMIESMVDTGALVDRAVSQRAGIGFSAKNCAIISPKFGSWIFLGELVTNIPFQPDNPVTEDCGECTKCIDACPTGALVGPGQLNAQRCISFVTQTKGFVDEEFMLKIGNRLYGCDTCQIVCPKNRGKNWDHHPEFHPDPEIVKPLLIPLLDIGNREFKERFGQSSAAWRGKKPIQRNAVIALGNFKDKTAVPKLTEVLKRDPRPELRGTAAWALSRIGGEDAMRAIGEAAANEQEGNVLSMLQKAKERLSSSKTLPDKPQADLKSNDKPEDQKEQNNQINQLDVQQPNQKTEETPEQKSGQATEPAKPEAAAWKPSAVTGLHGTPVYYDELLTPIGTLTLCATDKGLCHIDFGAFHVREAHLQQWARTWIGEYRYEKNEEKLSEAAQQLKQYFAEERKAFDLKLDLFGTPFQLQVWQVLSDISYGEASTHQQVAEIIGRPKAVRAVLDAISKNPLPIIIPCHRISGKDGTLVGYVGGLQTKEQLLTLEQQS

SEQ ID NO: 79021 - protein, 382 aa, Paenibacillus paeoniae
  misc_feature (1)..(382): tr|A0A371PG40|A0A371PG40_9BACL tRNA epoxyqueuosine(34) reductase QueG OS=Paenibacillus paeoniae OX=2292705 GN= queG PE=4 SV=1
MNYDWIKLKQEMKDAAKELGIDSIGVASAEVFTTLKARLIRHRELGRESGFEEPDLDKRTDPSLLFDDPQSIIAIAIAYPSKLMDPPKSEPGARRGIMARSAWGEDYHKVLRNRLERLEAWLRERVPETRVESMVDTGALSDRAVAERAGIGWSAKNCAIISPEFGSWIYLGEMIANLPLPPDQPITESCGTCTKCIDACPTGALVGPGQLDAKKCISFITQTKGMVEDEYMRKIGNRLYGCDTCQVVCPVNRGKNWTHQPELQPDNELAKPLLVPMLTIGNREFKDMYGFTSSAWRGKKPIQRNAVIALGNFKEKTAVPDLIGVLKHDPRPVLRGTAAWSLGRIGGEEAATALHEAMRGESDAEARDAIASAIHMLASEQE

SEQ ID NO: 79022 - protein, 416 aa, Paenibacillus pasadenensis
  misc_feature (1)..(416): tr|A0A2N5NBP7|A0A2N5NBP7_9BACL Epoxyqueuosine reductase OS=Paenibacillus pasadenensis OX=217090 GN=queG PE=3 S V=1
MDRIAADAGFWSRLKSEMKEAAYGLGIDDIGVASPEPFAALKGRLIRHRELGYESGFEPKDIERRVDPSLLFDEPLSIIAIAVGYPSKLQDPPKSEPGARRGILSRSSWGEDYHTVLRDRLARLEAWLRERVPELRAESMVDTGELSDRAVAERAGIGWSGKNSFILNRKHGTYIFLAEMITNLPLEPDSPVEDGCGSCTKCIDACPTGALVGPGQLNAQRCVSYLTQTKEMVSDELMRKIGNRLYGCDTCQIVCPVNRGVNVTRHPEFQPDPEQVKPLLEPLLEIGNREYKERFGRNASSWRGKKPIQRNAVIALGNFKEKSAVPALIRVLQQDPRPVLRGTAAWSLGRIGGPEAEAALAEAAERESDEEARSWAARSLASLREQAEAGGAAAAKPEAKAADAAGTAIEIARPPR

SEQ ID NO: 79023 - protein, 397 aa, Paenibacillus pectinilyticus
  misc_feature (1)..(397): tr|A0A1C1A673|A0A1C1A673_9BACL tRNA epoxyqueuosine(34) reductase QueG OS=Paenibacillus pectinilyticus OX=51239 9 GN=A8709_10510 PE=4 SV=1
MTVSGEFSLDGTRLDWRKLKQEIVEAAPSLGIDKIGFTSAEPFHELRDILLRHREKGFESGFEEPDIDKRVYPELSFESPRSIISIAVAYPSKLADPPRSEPGAYRGIISRSSWGSDYHDVLRDRLAKLEAFIAERVPEARLQSMVDTGVLVDRAVAERAGIGWSGKNCAVITPEWGSWVYLGEIITNIPFESDISIMDQCGDCTICIDACPTGALVGPGQLNSSRCISFITQTKGYVDDEYKRKIGNRLYGCDTCQIVCPKNKGMNWTHHPEFTPDPEKVKPLLIPLLTMSNKDFKEQYGRIAASWRGKKPIQRNAIIALGNFKDRSAVPVLVDLLRSDPRPEIRATAAWALGRIGGEEAVSALERAAAAEQEPQVQTDIDKALAAQKSTAAVQEE

SEQ ID NO: 79024 - protein, 582 aa, Paenibacillus peoriae
  misc_feature (1)..(582): tr|A0A0K2F3V9|A0A0K2F3V9_9BACL Methylated-DNA--protein- cysteine methyltransferase OS=Paenibacillus peoriae OX= 59893 GN=ABE82_03675 PE=3 SV=1
MQRGLTQAAAGTASTWASLKQEIIEAAPGLGIDSIGFASADPFLSLKAILEEHRAKGYESGFEEPDIDKRIYPELYGSQPASLIAIAVAYPSKMKDPPKSDKGKYRGILARSAWGKDYHLVLREAMEKLEAFISERVPDAILKNMVDTGELSDRAVAERAGIGFSGKNTMMISPTLGSWIYLGELLTNIPFQPDEPITDGCGECTKCLDACPTGALVGPGQLNAQRCVSFLTQTKGFLDEEFMRKIGNRLYGCDTCQMVCPKNRGLNWDHHPELTPDPEIVKPLLLPLLDLSNREFKDQFGQSAAAWRGKKPIQRNAVIGLGNFKDISAVPKLTEVLLDDPRPELRGTAAWALSRIGGENAMTAIKQASEKEQHEQVREMIAQAHSKLEEQEQAEQQKASELPKSEVTAGDSQGPTTIYYDEMETPVGTLTLCSTDRGLCRIDYGVFHAKEALLQQWARTWIGEYVYVQEPEKLREAADQLREYFAGERREFSIAYDLRGTPFQEQVWRALQNIPYGQSVSYKDIAESIGRAKAVRAVGGANNKNPLPILFPCHRVSGANGSLVGYAGGLPVKTKLLDLEKQ

SEQ ID NO: 79025 - protein, 583 aa, Paenibacillus peoriae
  misc_feature (1)..(583): tr|A0A2S6NSX1|A0A2S6NSX1_9BACL Methylated-DNA--protein- cysteine methyltransferase OS=Paenibacillus peoriae OX= 59893 GN=queG PE=3 SV=1
MQRGLTQAAAGTASTWASLKQEIIEAAPGLGIDSIGFASADPFLSLKAILEEHRAKGYESGFEEPDIDKRIYPELYGSQPASLIAIAVAYPSKMKDPPKSDKGKYRGILARSAWGKDYHLVLREAMEKLEAFISERVPDAILKNMVDTGELSDRAVAERAGIGFSGKNTMMISPTLGSWIYLGELLTNIPFQPDEPVTDGCGECTKCLDACPTGALVGPGQLNAQRCVSFLTQTKGFLDEEFMRKIGNRLYGCDTCQMVCPKNRGLNWDHHPELTPDPEIVKPLLLPLLDLSNREFKDRFGQSAAAWRGKKPIQRNAVIGLGNFKDISAVPKLTEVLLDDPRPELRGTAAWALSRIGGENAMTAIKQASEKEQHEQVREMIAQAHSKLEEQEQAEQQKASELPKSEVTAGDSQGGPTTIYYDEMETPVGTLTLCATDRGLCRIDYGVFHAKEALLQQWARTWIGEYVYVQEPEKLREAADQLREYFAGERREFSIAYDLRGTPFQEQVWRALQNIPYGQSVSYKDIAESIGRAKAVRAVGGANNKNPLPILFPCHRVSGANGSLVGYAGGLPVKTKLLDLEKQ

SEQ ID NO: 79026 - protein, 186 aa, Paenibacillus pini
  misc_feature (1)..(186): tr|W7Z5N7|W7Z5N7_9BACL Iron-sulfur cluster-binding prot ein OS=Paenibacillus pini JCM 16418 OX=1236976 GN=JCM16 418_3769 PE=4 SV=1
MTSQKKQAGYAPSPSPWEQLKQEIKEAAADFGIDDIGFASADPFVSLRSILQNHRDLGYESGFEEPDLDKRVTPALPSSEPASLIAIAVAYPSKMMNPPKNEPGQYRGILARSAWGRDYHQVLRDAMAKLEAFIRERVPEAVLESMVDTGALVDRAVSQRAGIGFSGKNCCIISPKWAHGYISARW

SEQ ID NO: 79027 - protein, 386 aa, Paenibacillus pinisoli
  misc_feature (1)..(386): tr|A0A3A6Q127|A0A3A6Q127_9BACL Epoxyqueuosine reductase OS=Paenibacillus pinisoli OX=1276110 GN=queG PE=3 SV=1
MMKYDWDKLKQEMKDAAKELGIDAVGVASAEVFTTLKARLVRHRELGRESGFEEPDLDKRTDPSLLFDDPQSIIAIAIAYPSKLIDPPKSEPGARRGIMARSAWGEDYHKVLRNRLERLEAWLRERVPEIRVESMVDTGALSDRAVAERAGLGWSAKNCAIISPEFGSWIYLGEMITNLPIQPDSPVTESCGTCTKCIDACPTGALVGPGELDAKKCISFLTQTKGMVSDEYMRKIGNRLYGCDTCQVVCPENRGKNWTHQPELQPDNELAKPLLLPLLTIGNREFKDMYGFTSSAWRGKKPIQRNAVIALGNFKEKAAVPDLIGVLKDDPRPVLRGTAAWSLGRIGGEEAAEALQAAMRTESDAEARDAIASAIQMLDSEHEQHP

SEQ ID NO: 79028 - protein, 583 aa, Paenibacillus polymyxa; identical to SEQ ID NO: 79025
  misc_feature (1)..(583): tr|A0A2N9Z640|A0A2N9Z640_PAEPO Methylated-DNA--protein- cysteine methyltransferase OS=Paenibacillus polymyxa OX =1406 GN=queG PE=3 SV=1

SEQ ID NO: 79029 - protein, 577 aa, Paenibacillus polymyxa
  misc_feature (1)..(577): tr|E3ECK5|E3ECK5_PAEPS Methylated-DNA--protein-cysteine methyltransferase OS=Paenibacillus polymyxa (strain SC 2) OX=886882 GN=yhbA PE=3 SV=1
MQRELTRTATGTASTWASLKQEIIEAAPGLGIDSIGFASADPFLSLKAILEEHRAKGYESGFEEPDIDKRIYPELYGSQPASLIAIAVAYPSKMKDPPKSDKGKYRGILARSAWGKDYHLVLREAMEKLEAFISERVPDAILKNMVDTGELSDRAVAERAGIGFSGKNTMMISPTLGSWIYLGELLTNIPFQPDEPVTDGCGECTKCLDACPTGALVGPGQLNAQRCVSFLTQTKGFLDEEFMLKIGNRLYGCDTCQIVCPKNRGLNWAHHPELTPDPEIVKPLLLPLLDLSNREFKDRFGQSAAAWRGKKPIQRNAVIGLGNFKDVSAVPKLTEVLLDDPRPELRGTAAWALSRIGGENAMTAIKQASEKEQHEQVREMIAQAHSKLEEQEQAEQQTSAELKAEDSQGPTTIYYDEMETPVGTLTLCATDRGLCRIDYGSFYAKEALLQQWARTWVGEYVYVQEPEKLREAAEQLREYFAGERREFSIAYDLRGTPFQEQVWRALQNIPYGQSVSYQDIAESIGRAKAVRAVGGANNKNPLPILFPCHRVSGANGSLVGYAGGLPVKMKLLELEKE

SEQ ID NO: 79030 - protein, 638 aa, Paenibacillus polysaccharolyticus
  misc_feature (1)..(638): tr|A0A1G5LF25|A0A1G5LF25_9BACL Epoxyqueuosine reductase OS=Paenibacillus polysaccharolyticus OX=582692 GN=SAMN 05720606_12466 PE=4 SV=1
MTNVRTGAAQAASVWEALKQEIKAAGPELGIDDIGFASADPFISLKSMLEQSRDKGYASGFEEPDIEKRVHPALPDSEPASLIAIAVAYPSKMVNPPKSEPGAYRGIFARSAWGQDYHQVLRAAMDKLVNFIRERVPEAIIESMVDTGALVDRAVSQRAGIGFSAKNCSIISPKFGSWIFLGELVTNIPFPPDTPVTEDCGECTKCIDACPTGALVGPGQLNAQRCISFLTQTKGFLDEEFMLKIGNRLYGCDTCQIVCPKNRGKNWDHHPEFHPDPEVVKPLLLPLLDIGNREFKERFGQSSAAWRGKKPIQRNAVIALGNFKDKSAVPKLTQVLKRDPRPELRGTAAWALSRIGGEDAMRAIGEAAAIEQDGNVLSMLQKAEERLLSSETLPDRPQAEQVKKQQADTVEAVQYTQAASFSQARDTEFGEETQRTANVIKSESDGEPEQSVASGRSEATAWKPSAVTGLHGKPVYYDEVLTPIGTLTLCATDEGLCHIDFGAFHVREAHLQQWARTWVGEYRYEKNEEKLSEAAGQLVQYFAGERTTFDLQLKQYGTAFQLQVWEVLSDISYGEALTHQEVAEKIGRPKAVRAVLDAISKNPIPIIIPCHRLSGKDGTLVGYVGGLQTKEQLLTLEQ

SEQ ID NO: 79031 - protein, 577 aa, Paenibacillus popilliae
  misc_feature (1)..(577): tr|M9M0F2|M9M0F2_PAEPP Multifunctional fusion protein O S=Paenibacillus popilliae ATCC 14706 OX=1212764 GN=queG PE=3 SV=1
MVEHKQKIRWTPYGTDQEAGAKAIREADRWQRLKQEIIDAAPSMGIDQVGFTTADPFTELKARLQHSIDQGYASGFEEPDLDRRTQPTLLLDRARSIIAIAVAYPSKMEGVPKSERGACRGMFARTAWGLDYHHVLRDRLQRLEQFLCERVPEVRVKSMVDTGELCDRAVAERSGIGFSGKNCSIISPKWGSWIYLGEMITNLPLPPDHPLTEDCGECTRCLDACPTGAFVGPGQLNAQRCISFQTQSKEILPHEMMVKIGNRLYGCDTCQIVCPKNRGLNWTHHAEMQPDPEQAKPLLVPLLSLSNREFKSRFGSSAAAWRGKKPIQRNAIAALGNFRDRQAVPVLEGLLCMDERPDIRAAAAWALGQIGGPDAKRILKAALSREEETKVKEAVMQAQECAEAQHEPLYVQEMESPLGPLTLAATATGLFALEFGNALSVAEGLQRRAARSYGRVVLQRHPERLQEAKRQMEAYFAGTRREFDLTLDIQGTPFQRQVWQALTDIPYGETRSYKQIAEAIGIPGAVRAVGGANNRNPLSIIVPCHRVIGADGKLVGYGGGMGKKITLLRLEGIPCGQ

SEQ ID NO: 79032 - protein, 383 aa, Paenibacillus prosopidis
  misc_feature (1)..(383): tr|A0A368W761|A0A368W761_9BACL Epoxyqueuosine reductase OS=Paenibacillus prosopidis OX=630520 GN=DFP97_101173 PE=4 SV=1
MTDRWAKLKEEMIQAAPSLGIDKIGVASADPFVSLKQVLLRHRELGRESGFEEPDIEKRTNPALLFENPQSIIAIAIAYPSKLTNPPKSEPGARRGILSRSAWGEDYHRVLRDRLARLEAWLRERVPELRAESMVDTGALSDRAVAERAGIGWSAKNCAVISPELGSWIYLGEMITNIPFAPDEPVTEGCGSCTKCIDACPTDALVGPGQLNSSRCISFVTQTKGMVSDELMRKIGNRLYGCDTCQTVCPVNRGKNWTHQPELQPDPEVVKPLLVPLLTIGNKEFQARYGHTSSAWRGKKPIQRNAVIALGNFKEASAVPDLIRVLEQDSRPVLRGTAAWALARIGGEQAKAALLSASGKERDEEVRTSISNALEQIAELPKK

SEQ ID NO: 79033 - protein, 445 aa, Paenibacillus prosopidis
  misc_feature (1)..(445): tr|A0A368VSH6|A0A368VSH6_9BACL Epoxyqueuosine reductase QueG OS=Paenibacillus prosopidis OX=630520 GN=DFP97_11 7127 PE=4 SV=1
MADMKKHPTVVRYYESSAESATLDNETLDYEWIRELCLEAGADDVGVISMERSELDDQRDDILSAFPHAKTMISFVARMNREPIRTPARSLANIEFHHTGDKVAETAHHIVSALEARGIRALNAAMGFPMEMDKFPGKTWVVSLKPVAVAAGLGHMGIHRNVIHPKFGNFILLGAVMMDARVNKEDRPIDYNPCLECKLCVSACPVGAIGADGQFNFSSCATHNYREFMGGFSDFVETVVDSKNFKEFRNEVPITETTSWWQSLSFGANYKAAYCLSVCPAGDDVIGPFLKDRKGFMNDILKPLQAKEETVYVTPGSDAEAYVMKRFPHKTVKRVGNGLRPNTIRLLVTLMPHAFQPKQATGLNCTYHFAFTGDETRQTTIDIRDNKLQIRDGFHGKPDIRITVDSKTWLKIVGKEKSVAAALLTRKLRIKGNPKLLMKFEKCFA

SEQ ID NO: 79034 - protein, 591 aa, Paenibacillus rhizosphaerae
  misc_feature (1)..(591): tr|A0A1R1EAG3|A0A1R1EAG3_9BACL Methylated-DNA--protein- cysteine methyltransferase OS=Paenibacillus rhizosphaer ae OX=297318 GN=BK138_31065 PE=3 SV=1
MTSGKPQAAYAPSASPWEQLKQDIKEAAAGFGIDDIGFASADPFVSLKSILENHRKLGYESGFEEPDLDKRVTPALPDAQPASLIAIAVAYPSKMEHKPKQVPGQYRGILARSAWGRDYHQVLRDAMGKLEAFIRERVPDAVMESMVDTGALVDRAVSERAGIGFSAKNCCIISPKWGSWIYLGEMVTNIPFPPDTPVTEDCGDCTMCIDACPTGALVGPGQLNAQRCISFLTQTKGFLEDEVMRKIGNRLYGCDTCQVICPKNKGKNWTHHDYLLPDPEKDKPLLLPILDLSNKEFKEKFGESAAAWRGRKPIQRNAVIALGNFKDTSAVPRLGRVLLEDPRPELRGAAAWSLGRIGGEEALNWLNKGLASEQDEKVIDMMSEAQEKLQPAGSGQPADAEMAADDFSPGLGGEKETVYYSEMISPIGPLTLCATEKGLCLIEFGPFNVKEAVLQKWSRTWCGGGDFVQDDERLAEAKRQLGEYFAGERKTFDVQLDMRGTPFQLQVWSSLADIPYGEIRSYADIANAIGRPKAVRAVGGANNKNPVPLIVPCHRVIGADGSLVGYGGGMEIKRHLLTLENSLPERKGWAD

SEQ ID NO: 79035 - protein, 386 aa, Paenibacillus rigui
  misc_feature (1)..(386): tr|A0A229UNL7|A0A229UNL7_9BACL tRNA epoxyqueuosine(34) reductase QueG OS=Paenibacillus rigui OX=554312 GN=queG PE=4 SV=1
MSKGIAEMNSNDWQQLKLDMQAAAESLGIDKIGVASSDPFVELKQILLRHREKGFESGFEEKDLDKRTDPGLSFAAPRSIISIAVAYPSKLTDAPRSEKGAYRGILSRSAWGLDYHQVLRNRLQRLEAWIRDQVPDARMESMVDTGALVDRAVAERAGIGWLGKNCSVITPEFGSWVYLGEMITNLPLPADRPVTESCGDCTLCIDACPTGALVGPGQLNAQRCISFVTQTKGHIEDDELKKKIGNRLYGCDTCQTVCPQNKGKHWTQHAELQPDPEQAKPLLLPLLKMTNREFKERFGTSSAAWRGRKPIQRNAILALGHFKDASAVAALSELLLHDERAEIRSAAAWSLGRIGGSEAMEGLRRAMEREQDQVVIRELEKSLCLS

SEQ ID NO: 79036 - protein, 405 aa, Paenibacillus riograndensis
  misc_feature (1)..(405): tr|A0A132TZA5|A0A132TZA5_9BACL Epoxyqueuosine reductase OS=Paenibacillus riograndensis OX=483937 GN=AMQ84_1468 5 PE=4 SV=1
MNNNIQTAYAPPPSKWEGLKAEIKAAAPEIGIDDIGFATAEPFLYLKNILQEHRDNGYDSGFEEPDLDKRTIPALQSGGQPQSIIAIAVAYPSKMENPPKSEPGARRGILARASWGRDYHHVLREALAKLEAFIRERVPGAELESMVDTGVLVDRAVAERAGIGFSGKNCSIISPEWGSWIYLGEMVTNIPFPPDTPVEEGCGSCTKCIDACPTGALVGPGQLNAQACISYLTQTKGFLSEEYMTKIGNRLYGCDTCQIVCPKNRGKNWNHRPELLPDPEVVKPLLLPILELSNREFKEQFGSSSAAWRGKKPIQRNAVIALGNFKEDGAVPKLTEIVLKETRPELRGSAAWALGRIGGAEALAAVKLALHKEEDATVREMLERAQGKLLERGEAEGQDGASGQG

SEQ ID NO: 79037 - protein, 405 aa, Paenibacillus riograndensis
  misc_feature (1)..(405): tr|A0A0E4HAL8|A0A0E4HAL8_9BACL Epoxyqueuosine reductase OS=Paenibacillus riograndensis SBR5 OX=1073571 GN=queG PE=4 SV=1
MNNNIQTAYAPPPSKWEGLKAEIKAAAPGIGIDDIGFATAEPFLYLKNILQEHRDNGYDSGFEEPDLDKRTIPALQSGGQPQSIIAIAVAYPSKMENPPKSEPGARRGILARASWGRDYHHVLREALAKLEAFIRERVPGAELESMVDTGVLVDRAVAERAGIGFSGKNCSIISPEWGSWIYLGEMVTNIPFPPDTPVEEGCGSCTKCIDACPTGALVGPGQLNAQACISYLTQTKGFLSEEYMTKIGNRLYGCDTCQIVCPKNRGKNWNHRPELLPDPEVVKPLLLPILELSNREFKEQFGSSSAAWRGKKPIQRNAVIALGNFKEAGAVPKLTEIVLKETRPELRGSAAWALGRIGGAEALAAVKLALHKEEDATVREMLERAQGKLLERGEAEGQDGASGQG

SEQ ID NO: 79038 - protein, 394 aa, Paenibacillus sabinae
  misc_feature (1)..(394): tr|X4Z6V5|X4Z6V5_9BACL Iron-sulfur cluster-binding prot ein OS=Paenibacillus sabinae T27 OX=1268072 GN=PSAB_027 75 PE=4 SV=1
MNNMKSASYSPPSSRWEELKKEMKEAAPSLGIDEIGFATAEPFLFLKDLLQEHRDKGYDSGFEEPDLDKRTIPALREGQPKSIIAIAVAYPSKMDKPPKSEPGERRGILARSAWGRDYHLVLREALERLEAFIRQRVPDAVLESMVDTGVLVDRAVAQRAGIGFSGKNCSIISLKWGSWIYLGEMVTDIPFPPDTPVTEGCGTCTKCIDACPTGALVGPGELNAQACVSYLTQTKGFLDETYMSKIGNRLYGCDTCQIVCPHNRGKNWDHHPGLLPDPEQAKPLLLPILDLSNREFKEKFGSSAAAWRGKKPIQRNAVIALGNFKDASAVPKLTEVLIGDPRPELRGAAAWSLGVIGGEAALAAVELALESERDDEVVRRLNRARGKLAGHAEA

SEQ ID NO: 79039 - protein, 561 aa, Paenibacillus selenitireducens
  misc_feature (1)..(561): tr|A0A1T2X6Q2|A0A1T2X6Q2_9BACL Methylated-DNA--protein- cysteine methyltransferase OS=Paenibacillus selenitired ucens OX=1324314 GN=BVG16_19635 PE=3 SV=1
MSEPWKPTAQAEAERWAQLKSDIIEAAPSLGIDSIGFASADPFTTLKNRLIEHRAKGYESGFEEPDLDKRVQPALLFDRPQSIIAIAVAYPSKLIDPPKSEPGAYRGILSRSAWGQDYHQALRERLARLEAFIQERVPEARMESMVDTGALSDRAVAERAGIGWSAKNCSIISPKLGSWMYLGEMITNLPFEPDTPVEEGCGDCNRCIDACPTGALVGPGQLNAQRCISFLTQTKGTLSEEFMTKIGNRLYGCDTCQIVCPPNRGKNWTQHPELQPDPETVKPLLIPLLSLSNKEFKARFGSNASSWRGKKPIQRNVIIGLGNFKDATAIPHLHTVMREDPRYELRYTAAWALSKIGGEASMDVLNDVIQRESHIEVLEAIQRARVKLGADTEPLFYREMDSPIGTLTLIRSMKGLCHIEFGTYADREEKIQQWTSRWYEHPELIPNSAALDDIVGQLKEYFGGQRTTFDIPLDMQGTPFQRKVWQALTEIPYGETWSYKQVAEQIGQPKAVRAVGGANNKNPVSIIVPCHRVIGASGAMVGYGGGLDKKQILLALEQRQD

SEQ ID NO: 79040 - protein, 614 aa, Paenibacillus silvae
  misc_feature (1)..(614): tr|A0A2W6ND94|A0A2W6ND94_9BACL tRNA epoxyqueuosine(34) reductase QueG OS=Paenibacillus silvae OX=1325358 GN=qu eG PE=4 SV=1
MTSVRTGAAQAASVWETLKQEIKAAGPELGIDDIGFASADPFVSLKSLLEQSRDKGYASGFEEPDIEKRVHPALQGGEPASLIAIAVAYPSKMINPPKSEPGAYRGIFARSAWGQDYHQVLRTAMDKLVNFIRERVPEAMIESMVDTGALVDRAVSQRAGIGFSAKNCSIISPKFGSWIFLGELVTNIPFPPDTPVTEDCGECTKCIDACPTGALVGPGQLNAQRCISFLTQTKGFLDEEFMLKIGNRLYGCDTCQIVCPKNRGKNWDHHPEFHPDPEVVKPLLLPLLDIGNREFKERFGQSSASWRGKKPIQRNAVIALGNFKDKSAVPKLTQVLKRDPRPELRGTAAWALSRIGGEDAMRAIGEAAAIEQDGNVLSMLQKAKERLMSSTALPEQPQAGNASKLESKSEGEPERTTETNGEPSASTDKSGEAAAWKPSPVTGLHGKPVYYDELLTPIGTLTLCATDEGLCHIDFGAFHVREAHLQQWARTWIGEYRYEKNEEKLSEAAKQLREYFAGERKTFDLQLERYGTAFQLQVWQVLTDISYGEALTHQEVAEKIGRPKAVRAVLDAISKNPIPIVIPCHRMSGKDGTLVGYVGGLQTKEQLLTLEQQT

SEQ ID NO: 79041 - protein, 615 aa, Paenibacillus solani
  misc_feature (1)..(615): tr|A0A0M1N4M8|A0A0M1N4M8_9BACL Methylated-DNA--protein- cysteine methyltransferase OS=Paenibacillus solani OX=1 705565 GN=AM231_23920 PE=3 SV=1
MTYTLGSYAPPPSVWEELKQELKVVAPELGIDDIGFASAEPFQSLKGILQNHRKLGYESGFEEQDLDKRVTPALPGTEPKSLIAIAITYHSKMNNPPKSEPGKYRGIMARSAWGRDYHHVLREAMDRLENYIKERVPDAKLESMVDTGALVDRAVSERAGIGFSAKNCAIISPKFGSWIFLGEMVTNIPFPPDTPVTEDCGECTKCIDACPTGALVGPGQLNAQRCVSFLTQTKGFLDEEAMRKIGNRLYGCDTCQIVCPKNRGKNWTHQEDFKPDPEKAKPLLLPILDMSNREFKEAFGDTSAAWRGRKPIQRNAVIALGNFKDISAVPKLSEVLLKDPRPELRGTAAWALGRIGGEEAMNNLEKSMKSEGDSRVRDMLQQALNKLKPETKGNEAGVEEDNAAGTSPAIDHSGSANGNQPEQQSPVIHGVEPMAVPEGGPEMLYYDELLTPIGSLTVCATEKGLCLIEFGSFYVKEAVIQQWSRTWAGNGGYTRDEERLAPVVTQLKQYFSGELEEFDLPLDLRGTSFQLQVWEALKSISYGTMCSYKDVAESIGRPKAVRAVGGANNKNPVPVVVPCHRVIGADGALIGYGGGPEIKRALLTLEGAMNDRKGS

SEQ ID NO: 79042 - protein, 394 aa, Paenibacillus sophorae
  misc_feature (1)..(394): tr|A0A1H8S8F0|A0A1H8S8F0_9BACL Epoxyqueuosine reductase OS=Paenibacillus sophorae OX=1333845 GN=SAMN04487895_1 1149 PE=4 SV=1
MNTPEYTSYAPPSPRWESLKNEIKEAAQTLGIDEIGFATAEPFLFLKNLLQEHRDKGYDSGFEEPDLDKRTIPALREGQPKSIIAIAVAYPSKMDDPPKSEPGERRGILARSAWGRDYHLVLREALERLEAFIRQRVPDAVMESMVDTGVLVDRAVAQRAGIGFSGKNCSIISPKWGSWIYLGEMVTSIPFPPDTPVTEGCGTCTKCIDACPTGALVGPGELNAQACISYLTQTKGFLDETYMAKIGNRLYGCDTCQIVCPHNRGKNWDHHQELLPDPEQAKPLLLPILDLSNREFKEKFGSSAAAWRGKKPIQRNAVIALGNFKDAAAVPKLKEVLLKDPRPELRGAAAWALSAIGGAAALAAVELALESEQDEEVAGRLHRAKSKLAGPMDP

SEQ ID NO: 79043 - protein, 629 aa, Paenibacillus sp.
  misc_feature (1)..(629): tr|A0A358GFH0|A0A358GFH0_PAESP tRNA epoxyqueuosine(34) reductase QueG OS=Paenibacillus sp. OX=58172 GN=queG PE =4 SV=1
MTSAQTGAANAAAVWEKLKQEIKAAAPEMGIDDIGFASAEPFVTLKSILEQHRAKGFESGFEEPDIEKRVRPELKDGEPASLIAIAVAYPSKMINPPKSEPGAYRGILARSAWGQDYHQVLRAAMDKLVHFIRERVPEAMIESMVDTGALVDRAVSQRAGIGFSAKNCAIISPKFGSWIFLGELVTNIPFQPDNPVTEDCGECTKCIDACPTGALVGPGQLNAQRCISFVTQTKGFVDEEFMLKIGNRLYGCDTCQIVCPKNRGKNWDHHPEFHPDPEIVKPLLIPLLDIGNREFKERFGQSSAAWRGKKPIQRNAVIALGNFKDKTAVPKLTEVLKRDPRPELRGTAAWALSRIGGEDAMRAIGEAAANEQDGNVLSMLQKAKERLSSSATLPDKPQVEQSSNNKPEDQKEQNNQLNQLNGQQPNQVTEEAPEQEKGQAKEPAKPEAAAWKPSAVTGLHGTPVYYDEVLTPIGTLTLCATEKGLCHIDFGAFHVREAHLQQWARTWIGEYRYEKNEEKLSEAAQQLKQYFAGERKAFELKLDLFGTPFQLQVWQVLSDISYGEASTHQQVAEIIGRPKAVRAVLDAISKNPIPIIIPCHRISGKDGTLVGYVGGLQTKEQLLTLEQQS

SEQ ID NO: 79044 - protein, 398 aa, Paenibacillus sp.
  misc_feature (1)..(398): tr|A0A1H0LHM8|A0A1H0LHM8_9BACL Epoxyqueuosine reductase OS=Paenibacillus sp. yr247 OX=1761880 GN=SAMN04487897_ 11947 PE=4 SV=1
MAVSIGAGTNEDFSWLKQEIVEAASSLGIDKIGFTSAEPFTELKEILLRHREKGFESGFEEPDIEKRVHPELSFDSPQSIISIAVAYPSKLHNPPRSEPGAYRGIISRSSWGSDYHDVLRDRLAKLEAFIAERVPDARLQSMVDTGALVDRAVAERAGIGWTGKNCAVITPEWGSWVYLGEIITNIPFTPDTSIMDQCGDCTICIDACPTGALVGPGQLNSSRCISFITQTKGYVDDEFKLKIGNRLYGCDTCQIVCPKNKGMNWTHQPELEPDPVKVKPLLIPLLTMTNKDFKEQYGRIAASWRGKKPIQRNAIIALGNFKDITAVPVLSELLLTDPRPEIRATAAWALGRIGGEEAAAALDKAQAGEQESAVQQDIEKAIAAVSHSARDEREKEQT

SEQ ID NO: 79045 - protein, 388 aa, Paenibacillus spiritus
  misc_feature (1)..(388): tr|A0A5J5FWL0|A0A5J5FWL0_9BACL tRNA epoxyqueuosine(34) reductase QueG OS=Paenibacillus spiritus OX=2496557 GN= queG PE=4 SV=1
MNPAAEVSASRRWEQLKAELTSAAPALGIDSIGFAAADPFLYLKERLQQHRDRGHESGFEEPDLDKRTTPALAAGTPRSILAVAVAYPSKMKNPPKSEPGARRGILARSAWGRDYHLVLREALEKLEAFIRERVPEAVMESMVDTGVLVDRAVAERAGIGFSGKNCSIISPEWGSWIYLGELVTDIPFPPDKPVEMGCGDCTKCIDACPTGALVGPGELNAQACVSYLTQTKGYLSDEYMAKIGNRLYGCDTCQIVCPYNRGKDWDHRPELQPDPEQAKPLLLPILDLSNKEFKEKFGSSAAAWRGRKPIQRNAVIALGNFKEAGAAPKLAGVLADDPRPELRAAAAWALSRIGGDEAREALEKARGREREGEVLAYISRGLERLDSR

SEQ ID NO: 79046 - protein, 396 aa, Paenibacillus stellifer
  misc_feature (1)..(396): tr|A0A089LL64|A0A089LL64_9BACL Epoxyqueuosine reductase OS=Paenibacillus stellifer OX=169760 GN=PSTEL_03370 PE =4 SV=1
MKHAAYAPPSSKWEELKREIKEAAPELGIDEIGFATAEPFLFLKNILQEHRDKGYESGFEEPDLDKRTVPALVEGQPMSIIAVAVAYPSKMDNPPKSEPGLRRGILARSAWGRDYHLVLRDALKRLEDFIRERVPDAVMESMVDTGVLVDRAVAERAGIGFSGKNCSIISPKMGSWIYLGEMVTNLPFPPDTPVTEGCGSCTKCIDACPTGALVGPGQLNAQACVSYLTQTKGFLDESYMAKIGNRLYGCDTCQMVCPHNRGKSWQQHPELLPDPEQAKPLLLPILDLSNREFKEKFGSSAAAWRGRKPIQRNAVIALGNFKDASSVPKLAEVLRHDPRPELRGSAAWALGRIGGPEALAALESALDTERDEEALAYVRRARESLAGEGKNQSDGE

SEQ ID NO: 79047 - protein, 389 aa, Paenibacillus swuensis
  misc_feature (1)..(389): tr|A0A172TEW0|A0A172TEW0_9BACL Epoxyqueuosine reductase OS=Paenibacillus swuensis OX=1178515 GN=queG PE=3 SV=1
MTTTGSVPEEAAFWHTLKEDIQKAAPGLGIDSIGFTTADPFLEMKDILRNHREQGYESGFEEPDLDKRVYPELSFAEPRSILSIAVAYPSKLANPPKSEPGARRGMISRTSWGRDYHQVLRDRLSRLEAFIRERVPGARLESMVDTGALVDRAVAARAGVGWSGKNCAIITPEWGSWVYLGEMITNLPFAPDTPITEDCGDCTLCIDACPTGALVAPGQLNASRCVSFVTQTKGWVDEEMMEKIGNRLYGCDTCQIVCPKNRKKNWTHHEDMQPDPELVKPLLVPLLTMTNKEFKDRFGGISASWRGKKPIQRNAVIALGNFKDPTSVPALTDMLMKDVRPEIRGTCAWALGKIGTAEARDSLERAVATEQDPQVTEALHKAINKLKTG

SEQ ID NO: 79048 - protein, 629 aa, Paenibacillus taichungensis
  misc_feature (1)..(629): tr|A0A2V3RZK0|A0A2V3RZK0_9BACL Epoxyqueuosine reductase OS=Paenibacillus taichungensis OX=484184 GN=DEU73_1057 2 PE=4 SV=1
MTSVQTGAAKAAAVWEKLKQEIKAAAPEMGIDDIGFASAEPFVTLKSILEQHRAKGFESGFEEPDIEKRIRPELKDGEPASLIAIAVAYPSKMVNPPKSEPGAYRGILARSAWGQDYHQVLRAAMDKLVHFIRERVPEAMIESMVDTGALVDRAVSQRAGIGFSAKNCAIISPKFGSWIFLGELVTNIPFQPDNPVTEDCGECTKCIDACPTGALVGPGQLNAQRCISFVTQTKGFVDEEFMLKIGNRLYGCDTCQIVCPKNRGKNWDHHPEFHPDPEIVKPLLIPLLDIGNREFKERFGQSSAAWRGKKPIQRNAVIALGNFKDKTAVPKLTEVLKRDPRPELRGTAAWALSRIGGEDAMRAIGEAAANEQDGNVLSMLQKAKERLSSSKTLPDKPQADLKSNDKPEDQKEQNNQINQLDVQQPNQKTEETPEQKSGQATEPAKPEAAAWKPSAVTGLHGTPVYYDELLTPIGTLTLCATDKGLCHIDFGAFHVREAHLQQWARTWIGEYRYEKNEEKLSEAAQQLKQYFAEERKAFDLKLDLFGTPFQLQVWQVLSDISYGEASTHQQVAEIIGRPKAVRAVLDAISKNPLPIITPCHRISGKDGTLVGYVGGLQTKEQLLTLEQQS

SEQ ID NO: 79049 - protein, 613 aa, Paenibacillus taichungensis
  misc_feature (1)..(613): tr|A0A329QZR4|A0A329QZR4_9BACL tRNA epoxyqueuosine(34) reductase QueG OS=Paenibacillus taichungensis OX=484184 GN=queG PE=4 SV=1
MTSVQTGAAKAAAVWEKLKQEIKAAAPEMGIDDIGFASAEPFVTLKSILEQHRAKGFESGFEEPDIEKRIRPELKDGEPASLIAIAVAYPSKMVNPPKSEPGAYRGILARSAWGQDYHQVLRAAMDKLVHFIRERVPEAMIESMVDTGALVDRAVSQRAGIGFSAKNCAIISPKFGSWIFLGELVTNIPFQPDNPVTEDCGECTKCIDACPTGALVGPGQLNAQRCISFVTQTKGFVDEEFMLKIGNRLYGCDTCQIVCPKNRGKNWDHHPEFHPDPEIVKPLLIPLLDIGNREFKERFGQSSAAWRGKKPIQRNAVIALGNFKDKSAVPKLTEVLKRDPRPELRGTAAWALSRIGGEDAMRAIGEAAANEQDGNVLSMLQKAKERLSSSQALPDKPQAEPNSNNKPEQQKELNMTSEQENGQKTEQTKPEAAAWKPSAVTGLSGTPVYYDEVLTPIGTLTLCATDKGLCHIDFGAFHVREAHLQQWARTWIGEYRYEKNEEKLSEAAQQIKQYFAGERKAFELKLDLFGTPFQLQVWQVLSDISYGEASTHQQVAEIIGRPKAVRAVLDAISKNPIPIIIPCHRISGKDGTLVGYVGGLQTKEQLLTLEQQS

SEQ ID NO: 79050 - protein, 383 aa, Paenibacillus taihuensis
  misc_feature (1)..(383): tr|A0A3D9SB69|A0A3D9SB69_9BACL Epoxyqueuosine reductase OS=Paenibacillus taihuensis OX=1156355 GN=queG PE=3 SV =1
MDSSMDWNQLKADMKAAAAELGIDKIGVASAAPFTELRERLERHRELGYESGFEEPDLAKRTEPELLFEDPQSIIAIAIAYPSKLQDPPKSEPGARRGIISRSAWGEDYHSVLRERLRRLEAWLLERVPEGRFLSMVDTGALSDRAVAERAGIGWIGSNCSIITPEWGSWVYLGEMITNLPIPPDAPVTESCGSCTACIDACPTDALIGPGQLNSQRCISYVTQTKGVVTDELMRKIGNRLYGCDTCQVVCPENKGKHATHQPELAPDNEKVKPLLVPLLAMGNREFKERYGASSSAWRGRKPIQRNAVIALGNFKDASAVPALADVLRGDPRFELRATAAWSLGRIGGAAAFDELRAARGRERDEAVIEAIDRALTGDTASI

SEQ ID NO: 79051 - protein, 577 aa, Paenibacillus terrae
  misc_feature (1)..(577): tr|A0A4U2Q5D5|A0A4U2Q5D5_9BACL Methylated-DNA--protein- cysteine methyltransferase OS=Paenibacillus terrae OX=1 59743 GN=queG PE=3 SV=1
MQRGQTPTAAGTALVWASLKQEIIEAAPGLGIDSIGFASADPFLSLKAILEEHRAKGYESGFEEPDIDKRIYPELYGSQPASLIAIAVAYPSKMKDPPKSDKGKYRGILARSAWGKDYHMVLREAMEKLEAFIGERVPDAIMKNMVDTGELSDRAVAERAGIGFSGKNTMMISPTLGSWIYLGELLTNIPFQPDEPVTDGCGECTKCLDACPTGALVGPGQLNAQRCVSFLTQTKGFLDEEFMLKIGNRLYGCDTCQIVCPKNRGLNWDHHPELTPDPEIVKPLLLPLLELSNREFKERFGQSAAAWRGKKPIQRNAVIALGNFKDISAVPKLTEVLLDDPRPELRGTAAWALGRIGGGNAMTAIKQASEKEQHEQVREMVAQAHSKLEEREQAEQQQVSEVTVQGPQGPTTIYYDEIETPIGILTLCATDRGLCRIDFGVFHAKEALLQQWARTWIGEYVYVQEPEKLREAADQLREYFAGKRRDFTVAYDLRGTPFQEQVWRALQNIPYGQSVSYKDVAESIGRAKAVRAVGGANNKNPLPILIPCHRVSGANGSLVGYAGGLPTKMKLLDLEKE

SEQ ID NO: 79052 - protein, 570 aa, Paenibacillus terrae
  misc_feature (1)..(570): tr|G7VYQ6|G7VYQ6_PAETH Methylated-DNA--protein-cysteine methyltransferase OS=Paenibacillus terrae (strain HPL- 003) OX=985665 GN=HPL003_11445 PE=3 SV=1
MQRGQTPTAAGTALTWASLKQEIIEAAPGLGIDSIGFASADPFLSLKAILEEHRAKGYESGFEEPDIDKRIYPELYGSQPASLIAIAVAYPSKMKDPPKSDKGKYRGILARSAWGRDYHLVLREAMEKLEAFIGERVPDAIMKNMVDTGELSDRAVAERAGIGFSGKNTMMISPTLGSWIYLGELLTNIPFQPDEPVTDGCGECTKCLDACPTGALVGPGQLNAQRCVSFLTQTKGFLDEEFMLKIGNRLYGCDTCQIVCPKNRGLNWDHHPELTPDPEIVKPLLLPLLDLSNREFKERFGQSAAAWRGKKPIQRNAVIALGNFKDISAVPKLTEVLLDDPRPELRGTAAWALGRIGGENAMTAIKQASEKEQHEQVREMVAQAHSKLEEREQAEQQKVSEGPTTIYYDEMETPIGILTLCATDRGLCRIDFGVFHAKEALLQQWARTWIGEYVYVQEPEKLREAADQLREYFAGKRRDFTVVYDLRGTPFQEQVWRALQNIPYGQSVSYKDIAESIGRAKAVRAVGGANNKNPLPILIPCHRVSGANGSLVGYAGGLPTKMKLLDLEKE

SEQ ID NO: 79053 - protein, 409 aa, Paenibacillus thermophilus
  misc_feature (1)..(409): tr|A0A388NJ37|A0A388NJ37_9BACL tRNA epoxyqueuosine(34) reductase QueG OS=Paenibacillus thermophilus OX=1181891 GN=PbJCM17693_49150 PE=4 SV=1
MAKTIHDGSVVSANAGAWADLKREIKENAASLGIDDIGFASADPFISLKAILLDRREKGYESGFEEPDIDKRIYPELSLEQPASLVSIAVAYPSKMDNPPKSEPGQRRGILARSAWGRDYHLVLREAMAKLEDFIRQRVPEARIESMVDTGALVDRAVAERAGIGFKGKNCAIISPKWGSWIYLGEMITNIPFPPDSPVTEDCGECTKCIDACPTGALVGPGVLNAQRCISFLTQTKGFVEEEFMLKIGNRLYGCDTCQIVCPKNRGKSWNHRPELQPDPETVKPLLLPLLDISNREFKERFGDSAAAWRGKKPIQRNAVIALGNFKDTASVPKLIDILFHDPRPVLRGTAAWALARIGGEAAAEAVSRALESEQDEEVLERLQAADRKLRGGASPGESRPTVKESKPD

SEQ ID NO: 79054 - protein, 577 aa, Paenibacillus thiaminolyticus
  misc_feature (1)..(577): tr|A0A378X9G0|A0A378X9G0_PANTH Multifunctional fusion p rotein OS=Paenibacillus thiaminolyticus OX=49283 GN=yhb A PE=3 SV=1
MAEQKQTKRWTPCGTDQAPEANAIREAERWQRLKQEIMDAAASMGIDQIGFTTADPFTELKARLQHSIDQGYASGFEEPDLDKRTQPALLLDGARSIIAIAVAYPSKMEAGPKSEAGAYRGMFARTAWGLDYHHVLRDRLQRLEQFLRERVPEVRVKSMVDTGEMCDRAVAERSGIGFSGKNCSIISPKWGSWIYLGEMITNLPLPPDHPLTEDCGECTRCLDACPTAAFAGPGQLNAQRCISFQTQSKEMLPHEMMVKIGNRLYGCDTCQIVCPKNRGLNWTHHAEMQPDPEQAKPLLVPLLSLSNREFKSRFGSSAAAWRGKKPIQRNAIAALGNFRDRQAVPALEGLLRTDERPDIRAAAAWALGQISGPDAKRILKAALSREEEPKVKEAVMQAQERAEAQHEPLYVQEMESPLGPLTLAATATGLFAIEFGDALSVAEGLQRRAARSYGRVVLQRHPERLQAAKRQLEEYFAGTRREFDLTLDIQGTPFQRQVWQALTGIPYGETRSYKQIAEAIGNPGAVRAVGGANNRNPLSIIVPCHRVIGADGQLVGYGGGMDKKVTLLRLEGVSCGQ

SEQ ID NO: 79055 - protein, 577 aa, Paenibacillus thiaminolyticus
  misc_feature (1)..(577): tr|A0A515LWM0|A0A515LWM0_PANTH Multifunctional fusion p rotein OS=Paenibacillus thiaminolyticus OX=49283 GN=que G PE=3 SV=1
MAEQKQTKRWTPYGTDQAAEADAIREEERWQRLKQEIIDAAASMGIDQIGFTTADPFTELKARLQHSIDQGYASGFEEPDLDKRTQPALLLDGARSIIAIAVAYPSKMEGGPKSEAGAYRGMFARTAWGLDYHHVLRDRLQRLEQFLRERVPEVRVKSMVDTGELCDRAVAERSGIGFSGKNCSIISPKWGSWIYLGEMITNLPLPPDHPLTEDCGECTRCLDACPTGAFAGPGQLNAQRCISFQTQSKEMLPHEMMVKIGNRLYGCDTCQIVCPKNRGLNWTHHAEMQPDPEQAKPLLVPLLSLSNREFKSRFGSSAAAWRGKKPIQRNAIAALGNFRDRQAIPALEGLLRTDERPDIRAAAAWALGQIGGPDAKRILKAAFSREEEPKVKEAVMQAQERAEAQHEPLYVQEMESPLGPLTLAATATGLFAIEFGDALSVAEGLQRRAASSYGRVVLQRHPERLQVAKRQLEEYFAGTRREFDLTLDIQGTPFQRQVWQALTGIPYGETRSYKQIAEAIGNPGAVRAVGGANNRNPLSIIVPCHRVIGADGQLVGYGGGTDKKVTLLRLEGVSCGQ

SEQ ID NO: 79056 - protein, 415 aa, Paenibacillus tianmuensis
  misc_feature (1)..(415): tr|A0A1G4RXH2|A0A1G4RXH2_9BACL Epoxyqueuosine reductase OS=Paenibacillus tianmuensis OX=624147 GN=queG PE=3 SV =1
MEKEDSRAGTEQQSERFAATAKLQPADWRQLKQQLQADAAKLGIDKIGFASADPFVELKDILIRHREKGFESGFEEPDIEKRVDPALTLTEPRSIISIAVAYPSKLRNAPRSEPGAYRGILSRSAWGQDYHHVLRNRLARLEAWIRERVPGARTASLVDTGALVDRAVAERAGIGWVGKNCCVITPEWGSWVYLGELITNVPFPPDTPVTESCGDCTLCIDSCPTGALVGPGQLNAQRCVSFLTQTKGLIEDDELKRKIGNRLYGCDTCQIVCPKNKGIHAGHHPELQPDPEVVKPLLLPLLSMSNREFKERFGHSAAAWRGRKPIQRNAILALGNFRDASSVPQLAELLRKDERPEIRGTAAWALGRIGGVAAREALDAAWETERDEAARREIGKARAQFTGERQGDEQDGDSV

SEQ ID NO: 79057 - protein, 393 aa, Paenibacillus typhae
  misc_feature (1)..(393): tr|A0A1G8SUR0|A0A1G8SUR0_9BACL Epoxyqueuosine reductase OS=Paenibacillus typhae OX=1174501 GN=SAMN05216192_115 63 PE=4 SV=1
MNIKALSAYAPPASRWEKLKAEIKEAAPQLGIDDIGFTTAEPFLYLKDILQDHRDKGYESGFEEQDLEKRTVPALKNGEPMSIIAIAVAYPSKMENPPKSEPGERRGILARASWGRDYHLVLREALAKLEGFIRERVPDAVLESMVDTGVLVDRAVAERAGIGFSGKNCAVISPDWGSWIYLGEMITNIPFPPDTPVEDGCGDCTKCIDACPTGALVGPGQLNAQACISFLTQTKGFLSEEYMTKIGNRLYGCDTCQIVCPKNRGKNWNHRPELQPDPDIVKPLLLPILDLSNREFKEKFGMSSAAWRGKKPIQRNAVIALGNFKEAAAVPKLTEIVLRETRPEMRGTAAWALGKIGGREALAAVEQALQREENITVREMLDRAHGRLLEQLQ

SEQ ID NO: 79058 - protein, 416 aa, Paenibacillus tyrfis
  misc_feature (1)..(416): tr|A0A081NTW2|A0A081NTW2_9BACL Epoxyqueuosine reductase OS=Paenibacillus tyrfis OX=1501230 GN=queG PE=3 SV=1
MEKEGIRVGTEQQSERFAGAEELQPADWRQLKEQLQAEAAKLGIDKIGFSSADPFVELKDILIRHREKGFESGFEESDIEKRVDPALTLVEPRSIISIAVAYPSKLKDAPRSEPGAYRGILSRSAWGQDYHHVLRNRLARLEAWIRERVPGARTASLVDTGALVDRAVAERAGIGWVGKNCCVITPEWGSWVFLGELITNVPFPPDTPITESCGDCTLCIDSCPTGALVGPGQLNAQRCVSFLTQTKGLIEDDELKRKIGNRLYGCDTCQIVCPKNKGIHAGHQLELQPDPEVVKPLLLPLLSMSNREFKERFGHSAAAWRGRKPIQRNAILALGNFRDASSVPQLAELLRKDERPEIRGTAAWALGRIGGETAREALDAAWETERDEAARREIGKARAQFTGERQGDEQDGDPIR

SEQ ID NO: 79059 - protein, 616 aa, Paenibacillus uliginis
  misc_feature (1)..(616): tr|A0A1X7HQ15|A0A1X7HQ15_9BACL Methylated-DNA--protein- cysteine methyltransferase OS=Paenibacillus uliginis N3 /975 OX=1313296 GN=SAMN05661091_5171 PE=3 SV=1
MTSRLGAYAPSSSVWEELKEELKRAAPSMGIDDIGFASADPFVSLKSILQKHRDKGYESGFEEPDLDKRVTPSLPGTTPASIIAIAVAYPSKMSNPPKSEPGKYRGIMARSAWGRDYHHVLREAMAKLEAFIRERVPDAVLESMVDTGALVDRAVSQRAGIGFSAKNCAIISPKYGSWIYLGEMVTSIPFPPDSPVTEDCGECTKCIDACPTGALVGPGQLNAQRCVSFLTQTKGFLDEEVMRKIGNRLYGCDTCQIVCPKNKGLNWTQHEELQPDPEKAKPLLLPILDMSNREFKETFGDTSAAWRGRKPIQRNAVIALGNFKDASAVPKLSEVLLKDPRPELRGTAAWALGRIGGEEALNNLEKGMKSEQDHKVRNMLTQALNKLQPETKAVAETEKQEGVQHSSQQSEEAGQDVQSPGTSSVNIAPKGVEPMAAPTIESDVLYYNEVHTPIGTLTVVASDLGLCLIEFGTFTVKEAVLQQWSRTWAGGVGYERNEERLADVTSQIKQYFEGTLKEFTIPLDMRGTQFQLQVWEALKEIPYGEICSYKDIADAIERPKAVRAVGGANNKNPVPIIVPCHRVIGMDGTLVGYGGGLEIKRSLLTLEGYLPDRKGL

SEQ ID NO: 79060 - protein, 617 aa, Paenibacillus vortex
  misc_feature (1)..(617): tr|A0A2R9SZX3|A0A2R9SZX3_9BACL Methylated-DNA--protein- cysteine methyltransferase OS=Paenibacillus vortex V453 OX=715225 GN=PVOR_06585 PE=3 SV=1
MTYTLGSYAPPPSVWEELKQELKSVAPELGIDDIGFASAEPFQSLKGVLQNHRDKGYESGFEEPDLDKRVTPALPGNEPMSLIAIAITYHSKMDNPPKSEPGKYRGIMARSAWGRDYHQVLREAMSRLEAFIRERVPDARLESMVDTGALVDRAVSQRAGIGFSAKNCAIISPKLGSWIFLGEMITNIPFPPDTPVTEDCGECTKCIDACPTGALVGPGQLNAQRCISFLTQTKGFLDEEVMRKIGNRLYGCDTCQIVCPKNRGKNWTHQEAFKPDPEKAKPLLLPILDLSNREFKETFGDTSAAWRGRKPIQRNAVIALGNFKDISAVPKLSEVLLKDPRPELRGTAAWALGRIGGEEALNNLEKSMKSEGDSQVRDMLQQALNKLKPESNEKEAPTEAQAGGEALSSGNALPASPDKGDKPEQESPAIHGVEPMAIPEGGPEVLYYDEIQSPIGPLTVCSTEKGLCLIEFGSFYVKEAVIQQWSRTWAGNGGYQRDEARLAPATAQLERYFSGELKEFDIGLDMRGTSFQLQVWEALKSIPYGTVCSYKDIAESIGRPKAVRAVGGANNKNPVPIIVPCHRVIGTDGALIGYAGGPEIKRTLLTLEGAMPDRKGS

SEQ ID NO: 79061 - protein, 399 aa, Paenibacillus whitsoniae
  misc_feature (1)..(399): tr|A0A430JDU3|A0A430JDU3_9BACL tRNA epoxyqueuosine(34) reductase QueG OS=Paenibacillus whitsoniae OX=2496558 G N=queG PE=4 SV=1
MAKRTRADWVALQQEIVDAAPSLGIDKIGFASAAPFTELRDLLLRHREKGHESGFEEPDIEKRVRPELTFDAPQSIIAIAVAYPAKLKDPPRSAPGAYRGMISRTSWGRDYHEVLRDRLAKLEGFIAARVPDARLMSMVDTGVLVDRAVAERAGIGWSAKNCAVITQELGSWVFLGEMITNLPFPPDAPMLDQCGDCTICIDACPTGALVGPGQLNAQRCISFITQTKGYVDDEFKRKIGNRLYGCDTCQVVCPKNKGMNWTQHPEFEPDPEKVKPLLKPLLLMSNKEFKEQFGMISAAWRGRKPIQRNAIIALGNFRDSSAVPELSEVLRSDPRPELRETAAWALGRIGGADALAALERAQAVEAVPEVLHGIAKALHALSSPAPDKAEAAQEKEERA

SEQ ID NO: 79062 - protein, 393 aa, Paenibacillus wynnii
  misc_feature (1)..(393): tr|A0A098MBP6|A0A098MBP6_9BACL Epoxyqueuosine reductase OS=Paenibacillus wynnii OX=268407 GN=PWYN_09115 PE=4 S V=1
MNPFNQSSIAPPPSKWDKLKSEIKAAAPALGIDDIGFATAEPFLYLKTILQDHRDKGYESGFEEPDLDKRTIPALESGEAKSIIAVAVAYPSKMEDPPKSEPGERRGIMARASWGQDYHHVLREALGKLEAFIRERVPDAVLESMVDTGVLVDRAVAERAGIGFSGKNCSIISPHYGSWIYLGEMITNIPFAPDTPVQEGCGDCTKCIDACPTGALVGPGQLNAQACISYLTQTKGFLSDDYMTKIGNRLYGCDTCQIVCPHNRGKNWDHRPELLPDPEIAKPLLLPILDLSNREFKEKFGSSSAAWRGKKPIQRNAIIGLGNFKEKAAIPKLREILLKEPRPEMRGTAAWSLGRIGGSEALAAVKQGLEQEEHETVLEMLHKAEDKLLNSQS

SEQ ID NO: 79063 - protein, 389 aa, Paenibacillus xerothermodurans
  misc_feature (1)..(389): tr|A0A2W1NVU7|A0A2W1NVU7_9BACL tRNA epoxyqueuosine(34) reductase QueG OS=Paenibacillus xerothermodurans OX=197 7292 GN=queG PE=4 SV=1
MSEAAADWNDIDWHQLKLDMKEAAETLGIDKIGISSADPFVDLKSILKQHREKGFESGFEEPDLEKRTEPSLSLAGPRSIISITVAYPSKMKDAPRSEKGAYRGILSRSAWGMDYHQVLRNRLQRLEAWILGRVPDARLETMVDTGALVDRAVAERAGIGWVGKNCSVITPEFGSWVYLGEMITNLPLEPDVPVTESCGDCTLCIDACPTGALVGPGQLNAQRCISFVTQTKGHIEDDELKEKIGNRLYGCDTCQIVCPKNKGKNWTHHPELQPDPEQAKPLLTSLLHMSNREFKDRFGTSSAAWRGKKPIQRNAVLALGHFRDETAVPELVDLLRHDIRPEIRGAAAWALGRIGNSQAIDAINEARAEESDEIVLKELDKAYALHEVY

SEQ ID NO: 79064 - protein, 626 aa, Paenibacillus xylanexedens
  misc_feature (1)..(626): tr|A0A1L5LK36|A0A1L5LK36_9BACL Methylated-DNA--protein- cysteine methyltransferase OS=Paenibacillus xylanexeden s OX=528191 GN=BS614_06920 PE=3 SV=1
MTSVQTGAAQDASVWEKLKQEIKAAGPGLGIDDIGFASADPFVSLKSLLEQSRDKGYASGFEEPDIEKRVHPALKDGEPASLIAIAVAYPSKMVNPPKSEPGAYRGIFARSAWGQDYHQVLRAAMDKLVNFIKERVPEAMIESMVDTGALVDRAVSQRAGIGFSAKNCAIISPKFGSWIFLGELVTNIPFQPDTPVTEDCGECTKCIDACPTGALVGPGQLNAQRCISFVTQTKGFVDEEFMLKIGNRLYGCDTCQIVCPKNRGKNWDHHPEFHPDPEIVKPLLLPLLDIGNREFKERFGQSSAAWRGKKPIQRNAVIALGNFKDKSAVPKLTEVLKRDPRPELRGTAAWALSRIGGEDAMRAIGEAAANEQDGNVLSMLQKAEERLSSSETLPKQPQAGQVSEKQSEEQNNENNALRALQQDLKMEAGIEPGSEQSAQPAKPEAAAWKPSAVTGLHGKPVYYDEVLTPIGTLTLCATDEGLCHIDFGAFHVREAHLQQWARIWIGEYRYEKNEEKLSEAAKQLKEYFAGERKTFDLQLDRLGTPFQLQVWQVLSDISYGEASSHQQVAEIIGRPKAVRAVLDAISKNPIPIIIPCHRISGKDGTLVGYVGGLQTKEQLLALEQLS

SEQ ID NO: 79065 - protein, 626 aa, Paenibacillus xylanexedens
  misc_feature (1)..(626): tr|A0A3N6DJU2|A0A3N6DJU2_9BACL Methylated-DNA--protein- cysteine methyltransferase OS=Paenibacillus xylanexeden s OX=528191 GN=EDO6_02793 PE=3 SV=1
MTSVQTGAAQDASVWEKLKQEIKAAGPGLGIDDIGFASADPFVSLKSLLEQSRDKGYASGFEEPDIEKRVHPALKDGEPASLIAIAVAYPSKMVNPPKSEPGAYRGIFARSAWGQDYHQVLRAAMDKLVNFIRERVPEAMIESMVDTGALVDRAVSQRAGIGFSAKNCAIISPKFGSWIFLGELVTNIPFQPDTPVTEDCGECTKCIDACPTGALVGPGQLNAQRCISFVTQTKGFVDEEFMLKIGNRLYGCDTCQIVCPKNRGKNWDHHPEFHPDPEIVKPLLLPLLDIGNREFKERFGQSSAAWRGKKPIQRNAVIALGNFKDKSAVPKLTEVLKRDPRPELRGTAAWALSRIGGEDAMRAIGEAAANEQDGNVLSMLQKAEERLSSSETLPKQPQAGQVSEKQPEEQNNEHNALRALQQDLKMEAGIEPGSEQSAQPAKPEAAAWKPSAVTGLHGKPVYYDEVLTPIGTLTICATDEGLCHIDFGAFHVREAHLQQWARIWIGEYRYEKNEEKLSEAAKQLKEYFAGERKTFDLQLDRLGTPFQLQVWQVLSDISYGEASSHQQVAEIIGRPKAVRAVLDAISKNPIPIIIPCHRISGKDGTLVGYVGGLQTKEQLLALEQLS

SEQ ID NO: 79066 - protein, 575 aa, Paenibacillus yonginensis
  misc_feature (1)..(575): tr|A0A1B1N7I1|A0A1B1N7I1_9BACL Methylated-DNA--protein- cysteine methyltransferase OS=Paenibacillus yonginensis OX=1462996 GN=AWM70_22010 PE=3 SV=1
MNSNQASADWGWLKEEIQSAAFELGIDAVGFTTADPFLSLKPILEEIREKGYESGFEEKDIDKRVDPKLTMAEAESIIAIAVAYPSKMINPPKSEPGKTRGILARSAWGRDYHTVLREAMDKLADFIRERVPDARIESMVDTGVLNDRAVAQRAGIGFSGKNGLIISPTWGSWIYLGEMITNLPFEPDPPVLEDCGECTKCLDACPTGALLGDGMLNAQRCVSFLTQTKGFLSDEFMRKIGNRLYGCDTCQMVCPKNRGKHWDHRPELQPEPEIAKPLLLPLLDMSNREFKDRFGQSAAAWRGKKPIQRNAVIALGNFKDRASLPKLIEVLLHDPRPELRGTAAWAISRIGGEDAIKAINEALESERDEMVLNYIQEAQTKLQEAAGDAAADLSNEPVGEQTDGEVFFYEEMDSPIGALTLVQSSKGLCLIEFGGIEATREKTLKWVAKQRDGAQLIRSSDKLKETMAQLQGYFSGERTSFDLKLDMRGTPFQMKVWQALLDVPYGRTASYKEIAEQIGQPRAVRAVGGANNRNPLPVVVPCHRIIGVKGSMTGYAGGIEIKESLLTLERQGNKA

SEQ ID NO: 79067 - protein, 297 aa, Paeniclostridium sordellii
  misc_feature (1)..(297): tr|A0A0M1UZK1|A0A0M1UZK1_PAESO Putative iron-sulfur clu ster-binding protein OS=Paeniclostridium sordellii OX=1 505 GN=JGS6382_28301 PE=4 SV=1
MNSRKLKDYCEKIGIKTVGIAGVGPYYDLEKIILERDTKGYITGMEEPSIEKRINPRVTMENANSIIVCAFPYYTSDYKDSNLSKYCYGKDYHLVVKSKLEEIANYIKREVEDFEYMVFADNGPLVDRYLAKISGIGYYGINNNIITDEFGSYVFIGYIINNFKFELDEVNIKTCKQCGVCQTACPGGAILGNFNFNPKNCLSYITQKKEELTSEEVEALRRGYKVFGCDICQEVCPHNKGIEKTTIEEFHKDIKINLDKDEIYNISNKEFKRRYNDKAFSWRGRKIIQRNMEILDK

SEQ ID NO: 79068 - protein, 297 aa, Paeniclostridium sordellii
  misc_feature (1)..(297): tr|T0EB31|T0EB31_PAESO 4Fe-4S binding domain protein OS =Paeniclostridium sordellii ATCC 9714 OX=1292036 GN=H47 7_0389 PE=4 SV=1
MNSRKLKNYCEKIGIKTVGIAGVGPYYDLEKIILERDTKGYITGMEEPSIEKRINPRVTMENANSIIVCAFPYYTSDYKDSNLSKYCYGKDYHLVAKSKLEEIANYIKSEVEDFEYMVFADNGPLVDRYLAKISGIGYYGINNNIITDEFGSYVFIGYIINNFKFELDEVNIKTCKQCGVCQTACPGGAILGNFNFNPKNCLSYITQKKEELTSEEIEALRRGYKVFGCDICQEVCPHNKCIEKTTIEEFHKDIKINLDKDEIYSISNKEFKRRYNDKAFSWRGRKIIQRNMEILDK

SEQ ID NO: 79069 - protein, 354 aa, Paenimaribius caenipelagi
  misc_feature (1)..(354): tr|A0A547Q6U9|A0A547Q6U9_9RHOB Epoxyqueuosine reductase OS=Paenimaribius caenipelagi OX=2489174 GN=queG PE=3 S V=1
MPISTSDALKAALRAEALEAGFLRMGICRPDAIPEAAGRLAAFLDAGRHGQMGWMAERTHWRSDPGALWPEARSVIMLAESYSPEHNPLDDLEHRDRGAISVYAHGRDYHDVVKKRLKRVGRWLLSQPGAESHQIKVFVDTAPVMEKPLAQAAGLGWQGKHTNLLGREIGNWVFLGAIFTTLELPPDAPEISHCGSCRACLDICPTAAFPAPYQLDARRCISYLTIEHEGPVDPELRPLMGNRIYGCDDCLAVCPWNKFAKAARDQRLMGDGTRRAPPLRALAHLDDAGFRARFAGSPIKRTGRDRFVRNVLYAIGNSGDPRLTDVAAGLTQDPDTAVSDAAQWALERLTTTRG

SEQ ID NO: 79070 - protein, 378 aa, Paenisporosarcina antarctica
  misc_feature (1)..(378): tr|A0A4P6ZV70|A0A4P6ZV70_9BACL tRNA epoxyqueuosine(34) reductase QueG OS=Paenisporosarcina antarctica OX=41736 7 GN=queG PE=4 SV=1
MNVNQFQQELILYAHSIGIDKIGFASSDPFRELKNRLKRQQDLGYQSGFEEKDLEKRTTPSLLLNEAESIIAIAIAHPSRMENAPQGKKGERRGIFARASWGIDYHTVLRDRLAKLEQFIAKYNVDAKTRSMVDTGELSDRAVAERAGIGWSAKNCAVITPEFGSYVYLGEIITNIPFTPDTPMEDECGECRLCLDVCPTGALIEGGQLNAQRCIAFLTQTKSLLPDEFRTKIGNRIYGCDTCQTVCPKNKGKFNKHQLEFQADPEIAKPLLIPLLKMSNKEFKTKFGHVSGSWRGKKPIQRNAILALAHFKEESAIPNLIDLLENDVRPVIRGTAAWAIGKIGTEEGRLALNKALQIEIDGEVLNEIHKGLAFLTVN

SEQ ID NO: 79071 - protein, 379 aa, Paenisporosarcina quisquiliarum
  misc_feature (1)..(379): tr|A0A1H8JVH3|A0A1H8JVH3_9BACL Epoxyqueuosine reductase OS=Paenisporosarcina quisquiliarum OX=365346 GN=SAMN04 487786_0376 PE=4 SV=1
MNIIQFQQNLIDYSASIGIDKIGFTSVSPFHELKNRLIRQQELGYASGFEESNIEKRVHPKMLLEESSSIISIAIAYPSKMKDAPQSVKGARRGIFARASWGIDYHTVLREKLALLELYILTHIPDAKLRSMVDTGELSDRAVAERAGIGWSAKNCSIITPEFGSYVYLGEMITSIPFAPSEQMEEQCGDCRLCLDVCPTGALIQGGQLNAQRCIAFITQTKTMVPDEFRTKIGNRIYGCDTCQTVCPINKGKANLHQESFKPDPELVKPLLLPLLKMTNRTFKETYGHMSGAWRGKNPIQRNAIIALAHFKEQEAVPTLIDLMQNDARPVIRGTAAWAIGKINSKEGLLALKKAEQHEQVEEVLKEIRKGLEYYTIEN

SEQ ID NO: 79072 - protein, 378 aa, Paenisporosarcina sp.
  misc_feature (1)..(378): tr|S2XG06|S2XG06_9BACL 4Fe-4S ferredoxin-type domain-co ntaining protein OS=Paenisporosarcina sp. HGH0030 OX=10 78085 GN=HMPREF1210_02711 PE=4 SV=1
MNVNQFQQELITYAHSIGIDKIGFASSDPFRELKNRLKRQQELGYQSGFEEPDIEKRTVPSLLLDEAESIISIAIAYPSRMENAPQGKKGERRGIFARASWGMDYHTVLRDRLSKLELFIAEHIKDAKTRSMVDTGELSDRAVAERAGIGWSAKNCSVITPEFGSYVYLGEVITNIPFAPDTPMEDECGDCRLCLDVCPTGALIEGGQLNAQRCIAFLTQTKTFLPDEFRTKIGNRIYGCDTCQTVCPKNKGKFNMHQIDFQPDPEIAKPLLLPLLKMSNKEFKTKFGHVSGSWRGKKPIQRNAILALAHFKEDSAIPDLIDLLQSDERPVIRGTAAWAIGKIGTSEGMEALQKALTVEKDPEVIEEILKGISFETIH

SEQ ID NO: 79073 - protein, 378 aa, Paenisporosarcina sp.
  misc_feature (1)..(378): tr|A0A2T6K0L6|A0A2T6K0L6_9BACL Epoxyqueuosine reductase OS=Paenisporosarcina sp. OV554 OX=2135694 GN=C8K15_143 5 PE=4 SV=1
MNVNQFQQELVSYAHSIGIDKIGFASSDPFRELKNRLKRQQELGYQSGFEEPDLEKRTTPTLLLNDAESIISIAIAYPSRMENAPQGKKGERRGIFARASWGTDYHTVLRDRLAKLEEYIASHIIDAKTRSMVDTGELSDRAVAQRAGIGWSAKNCAVITPEFGSYVYLGEIITNIPFAPDTPMEDECGDCRLCLDVCPTGAIIEGGQLNAQRCIAFLTQIKTSLPDEFRTKIGNRIYGCDTCQTVCPKNKGKFNMHQLDFQPDPEIAKPLLLPLLKMSNKEFKTKFGHVSGSWRGKKPIQRNAILALAHFKEESSIPDLIDLLVNDERPVIRGTAAWAIGKIGTKEGRAALHQAVVTETDAEVVEEIHKGLAFQTVN

SEQ ID NO: 79074 - protein, 62 aa, Pajaroellobacter abortibovis
  misc_feature (1)..(62): tr|A0A1L6MX14|A0A1L6MX14_9DELT Uncharacterized protein OS=Pajaroellobacter abortibovis OX=1882918 GN=BCY86_042 20 PE=4 SV=1
MHSRAICDTAPVLDRAWAARAGLGFIGRNGLPIGPEKGSMVLLGEVITTLSLNADTDVPIGG

SEQ ID NO: 79075 - protein, 391 aa, Palleronia abyssalis
  misc_feature (1)..(391): tr|A0A2R8BSZ8|A0A2R8BSZ8_9RHOB Epoxyqueuosine reductase OS=Palleronia abyssalis OX=1501240 GN=queG PE=3 SV=1
MTIDERAKDAYPPPGGPQGASPRVTEGATLKTALGEFAYRAGFVKMGVCRPDAVAEAGARLDTFLGEGRQGQMHWMTEKRAWRRDPRALWPEARSVVMLAESYTPGHDPLDDLALHDRGAVSVYAQGRDYHDVVKKRLKRVGRWLLEAVEKGGYRDPAGTWVALGEKVRGTPEIKVFVDTAPVMEKPLAQAAGLGWQGKHTNLLGRDLGNWVFLGAIFTTLDLSPDVAEVEHCGSCRKCLDICPTDAFPAPFQLDARRCVSYLTIEHKGPVDEALRPGLGNRIYGCDDCLAICPWNKFAVDARDMRLSPQPGRRAPKLADLAALDDSGFREMFSGSPIKRIGRDRMVRNVCYAIGNSGDASLSQVVDPLTRDPDPAVADAARWARLRLDRG

SEQ ID NO: 79076 - protein, 374 aa, Palleronia marisminoris
  misc_feature (1)..(374): tr|A0A1Y5SVL8|A0A1Y5SVL8_9RHOB Epoxyqueuosine reductase OS=Palleronia marisminoris OX=315423 GN=queG PE=3 SV=1
MKTLKDALEDYALEAGFAKMGVCRPDAVAEAGARLDTFLGEGRQGQMHWMTEKQAWRRDPRALWPEARSVVMLAESYTPGHDPLDDVGLRDRGAVSVYAQGRDYHDVVKKRLKKVGRWFMETVEKGGYRSADGKWVPLSADAVHPPAALGAESAPPPEIKVFVDTAPVMEKPLAAAAGLGWQGKHTNLLGRDLGNWVFLGAIFTTLELEPDAPEAEHCGSCRKCLDICPTNAFPAPFQLDARRCVSYLTIEHKGPVDEALRPGLGNRIYGCDDCLAVCPWNKFAVEARDMRLSPQPGRRAPALAELAQLNDAGFREMFSGSPIKRIGRDRMVRNVCYAIGNSGDASLSQVLEPLTRDPDPGVADAARWARLRLS

SEQ ID NO: 79077 - protein, 236 aa, Paludibacter jiangxiensis
  misc_feature (1)..(236): tr|A0A161LFP3|A0A161LFP3_9BACT Epoxyqueuosine reductase QueG OS=Paludibacter jiangxiensis OX=681398 GN=PJIAN_4 14 PE=4 SV=1
MVNSDLVKEMVNSDLVKEMVLAAGADLCGIASVDRFDIAPEGFRPTDLFPDTKSVVVFAKKIPESILHSKSQIPYSFIEDMALQKVLQLSFDIAVSLERENVSALPVPSEPYEYWDKETMTGKGLLSLKHAGYLAGMGVIGRNTLLCTPEYGNLIKLGALLVNVPLEADPIMENNMCSEKCNACITNCPSGALHDGGVDQKKCRTYSEGSTVKGAPITVCYNCRKVCPNRSGWETA

SEQ ID NO: 79078 - protein, 323 aa, Paludibacter jiangxiensis
  misc_feature (1)..(323): tr|A0A170YGK9|A0A170YGK9_9BACT Epoxyqueuosine reductase OS=Paludibacter jiangxiensis OX=681398 GN=PJIAN_1376 P E=4 SV=1
MITGAKRYDPRVAAALIKEKALQLGFSACGIAQVHPLTDDSEYLQKWLAAGHNGKMGYLANHADLRSDPSVLVPGAKSVIVVLLNYATSFSQQSESLKIARYAHGDDYHFVVKQFLGELLRFIAEEIAPVEGRAFCDSAPVFERRWAHEAGLGWIGLNHCLIHPEFGSFCFIGELVVDLELEYDHPIEGDCGFCGRCVTSCPTQAIQPQGFLKAEKCISYLTVELKDEIPQEYQQKLGGYVAGCDRCQEVCPWNRKASGYTAPLWKVDKSLLMMSDQDWLALEQPEFKRKFSKSSLTRLGYKKLMKNCQIVFEAAGTDGEAHT

SEQ ID NO: 79079 - protein, 313 aa, Paludibacter propionicigenes
  misc_feature (1)..(313): tr|E4T8D9|E4T8D9_PALPW Uncharacterized protein OS=Palud ibacter propionicigenes (strain DSM 17365 / JCM 13257 / WB4) OX=694427 GN=Palpr_2854 PE=4 SV=1
MSFIKQTALSIGFDACGIAKAERLDEDAMFLRSWLDEGKNGDMHYLERNFEKRVDPRELVPGCKSIVVVLMNYFPQEKQNPQAPKIAKYAYSETDYHLIIKSKLKLFEQKIIDFYGVDCISTGNQHIFVDSAPVLERRWAERAGLGWIGKHTQLIHPGLGSYVFIGLIMLNIELEYDTPIKNRCGSCTRCMDTCPTQALKNSTIDANRCISYLTIESKNEIPEVFHDKLSSCSYGCDICADICPWNKKWAKPNEHVELSPNKKMLQWDYETWLNLSEANFNETFRNSAMKRAGFQKLKQSVKIVAAIENKKQQ

SEQ ID NO: 79080 - protein, 68 aa, Paludibacter sp.
  misc_feature (1)..(68): tr|A0A2G6QTH8|A0A2G6QTH8_9BACT tRNA epoxyqueuosine(34) reductase QueG (Fragment) OS=Paludibacter sp. OX=189810 5 GN=CR965_01810 PE=4 SV=1
MSQELTQFIKTTALEIGFDACGIAKATRLDEDAERLKKWIKEGNHGEMSYMERNFEKRVDPRVLVEGC

SEQ ID NO: 79081 - protein, 301 aa, Paludibacter sp.
  misc_feature (1)..(301): tr|A0A1M3MC64|A0A1M3MC64_9BACT tRNA epoxyqueuosine(34) reductase QueG OS=Paludibacter sp. 47-17 OX=1895899 GN= BGP01_04785 PE=4 SV=1
MKEFIQKAAFSVGFDACGFAKAEELTDDAAFLRSWLDAGMNGDMQYLERNFEKRTDPRRMVPGCKTVIVLLLNFFPEQVQNLHSHKIAKYAYPETDYHYVIREKLQKLEQKIADEFGNDCFASEFQHSFIDSAPVLERRWAQKAGLGWIGKHTQLIAPGFGSYVFIATLMLNRELNAYDEPIRDRCGTCTKCIAACPTQALQPGILDARKCISYLTIETKSEVPEELKEKLSGYMVGCDICADVCPWNKKWSVSHLHDELKPSEAILTWNDDDWERADGEQLRRTFRKSAIMRALKNQRKV

SEQ ID NO: 79082 - protein, 348 aa, Paludibacterium purpuratum
  misc_feature (1)..(348): tr|A0A4R7AX24|A0A4R7AX24_9NEIS Epoxyqueuosine reductase OS=Paludibacterium purpuratum OX=1144873 GN=queG PE=3 SV=1
MARQIKAWSREFGFADAHITRPSLPAEAERRLADWLAAGFHGEMDYMQRHGAMRVRPDELVPGTLSIVSVRMNYWPAHAADAATQLQDGQQAYLSRYALGRDYHKVLRGRLQKLADRIQAAVGPIGHRAFTDSAPVAEVALAAQAGLGWRGKHTLLLTREQGSLFFLGELFTTLPLPADPPQQEHCGRCRSCLDACPTGAIVAPYQVDARRCISYLTIELAGAIPVALRPLIGNRVYGCDDCQLACPWNRFAAAGAEADFDVRHGLDRASLVELFAWSEADFGARMAGSPIYRIGYQRWLRNLAVGLGNAPSSDEVRAALLARADDPSALVREHVAWALARHGVPSRE

SEQ ID NO: 79083 - protein, 379 aa, Paludifilum halophilum
  misc_feature (1)..(379): tr|A0A235BA93|A0A235BA93_9BACL tRNA epoxyqueuosine(34) reductase QueG OS=Paludifilum halophilum OX=1642702 GN= queG PE=4 SV=1
MTPERVKEELIREAKRLGIDKIGFASADPFLELKERLIRHREAGYESGFEEPDIDKRTHPEKCLPEAKTIIAIALAYPTKIPDPPASEPGAYRGVFCRASWGEDYHRVLKRKLEGLKERLLELVPGATAEEMVDTGALSDRAVAERAGIGWSGKNTSIITEEFGSWVYLGEMITDVDLPPDTPVTEGCGDCTACLDACPTGALVSPGRLNSQACLAYLTQTKGFLPVEYRDRLGPYLYGFETCQAVCPYNRKVNFTHHNEFLPDPEQVKPLLKPLLSMSNREFRERFGKMAGSWRGKKPIQRNAIIALGRYRDRTAVPDLIRLLKTDPRPVIRGTAAWALGRIGGDEAGEALRNALAEETDDQVLWELKNALKEEKTGS

SEQ ID NO: 79084 - protein, 387 aa, Paludisphaera borealis
  misc_feature (1)..(387): tr|A0A1U7CJL8|A0A1U7CJL8_9BACT Epoxyqueuosine reductase OS=Paludisphaera borealis OX=1387353 GN=queG_1 PE=3 SV =1
MSEADLTRRLKAKAVELGFDRVGVAGARTPPDYDRFREWLDAGRAAGMQYMERHAEARAHPDSVLEGVRAVVMVSLVYGEPTDADAPSRRLSGKIARYARGLDYHQVLRARLAALLDWLKLERPEVEGRAVVDTAPLLERDYGRLAGLGWIGKNTLLIDRRLGSFTFLGALLVDLDLEPDPPHVSSHCGTCTRCLDACPTGAFDGPYQLDAGRCISYWTIEHRGAIPDDQADRLDGWVFGCDVCQDVCPWNRKAPAGRVHELDARDEWVDADLVEWLNRSKGDWKRALRGSALERARRVGLVRNAALVLGSARDEGAAPALIDRLADRAEDPVIRAAAAWALGRIGSPIAREALERFQGDDDALVREAVARAVEGFGGVRSSSAACS

SEQ ID NO: 79085 - protein, 443 aa, Paludisphaera borealis
  misc_feature (1)..(443): tr|A0A1U7CWD9|A0A1U7CWD9_9BACT Epoxyqueuosine reductase OS=Paludisphaera borealis OX=1387353 GN=queG_2 PE=4 SV =1
MPKLEDHPSVVRFRQSETRTEPGRIDIEKLRRICLDAGADDVGFVAIDRQELDDQRAEILGLYPWTKGLISIVCRMNREPVRSPARSVANLEFHNTGHEVDAVASGIVTALEVEGIRAVNPAMGFPMEVGRFPDKIWVVSHKPVAVAAGLGQMGIHRNVIHPKFGNFILLGTVLVEAEIPEQSRPIDYNPCLSCKLCVAACPVGAIGPDGHFDFTACLTHNYREFLGGFTDWVEQVADSKDALDYRRRVEDSETVSVWQSLSFGPNYKAAYCMAACPAGDDIIGPFLTDRKGFLKEVVTPLQEKVEPVYVVPGSDAEAYVSKRFPHKRPRRVGGGRRLRSIRSFLSALPHAFQRHASEGLEATYHFTFTGEEAAEATVVIRDKTIRVEPGHVGTPNLRIAADSMTWLGFLAKERNLAWALVRRKIRLKGSPRFLVAFGRCFPS

SEQ ID NO: 79086 - protein, 367 aa, Panacagrimonas perspica
  misc_feature (1)..(367): tr|A0A4S3K0K4|A0A4S3K0K4_9GAMM Epoxyqueuosine reductase OS=Panacagrimonas perspica OX=381431 GN=queG PE=3 SV=1
MTSLSADALRTLAVSIREWARELGFSDAGISRPELGDDLEHLRNWIASGHHGSMTYMARDPEMRASPQALRAGTLSVISVRLPYWPKAHDADEVLQNGELAYLSRYALGRDYHRVMRARLLKLARRIEREIGPLGHRVFADSAPILEKAVARNAGLGWIGKHTLLIQRAQDSVRSADGAPGGGSWFFLGELFVDVPLEADVREPVADGCGRCSACIRACPTGAIVAPYKVDARRCISYLTIEHHGPIPEEFRVPMGNRIFGCDDCQLACPWNRESGATAESDFTPRHGLDAARLLELWNWDEAEWLQRTEGMPLRRLDHARWLRNLAIALGNAPRSAEVVESLRKHVDHPDAAVRDHVEWALRRQAP

SEQ ID NO: 79087 - protein, 318 aa, Panacibacter ginsenosidivorans
  misc_feature (1)..(318): tr|A0A5B8VB13|A0A5B8VB13_9BACT Dehalogenase domain-cont aining protein OS=Panacibacter ginsenosidivorans OX=181 3871 GN=FRZ67_13880 PE=4 SV=1
MKGSETSAPAFSWDDWYQSVGGRTISIAEVDNILYQIKEYQYPKFKGEVNPQQTFFQNAAAASEAIKQKAFALGADEVGVAEIEPSDIYKGREIKEKYAIVVGQKMLWRNFQQVPSHNSAVECLRIYFSLGEVVIQLADYIRSLGYACTVEHPIGDSDVLHIPLALKAGFGELGRHGSIIHPKMGPLFRLGSVITDMPLAIDHPIDAGIAAFCDNCKACRIYCPANAIPDERSVEAGKDHLGNYRYKVDTGKCFPYFAKHNYCSACLPVCVYHHKEWAKDFDGYKTKLFPVVDMQEAPQPTDPDVPKHWYPKIKRDAV

SEQ ID NO: 79088 - protein, 309 aa, Panacibacter ginsenosidivorans
  misc_feature (1)..(309): tr|A0A5B8VC86|A0A5B8VC86_9BACT Epoxyqueuosine reductase OS=Panacibacter ginsenosidivorans OX=1813871 GN=queG P E=3 SV=1
MRLNNTVIIKDTARHLGFDFCGIAKAVKLEDDARRLESWLNKGMQGSMQYMEKYFDMRIDPSLLVPGAKSVITLLLNYFPQQQQNNAAPLIAKYAYGMDYHEVIKNKLNHLLHVLNTEIGTINGRGFVDSAPVLERSWAQRSGLGWIGKNGNLITRQSGSFFFIATLIVDIELEYDDAFAKDYCGTCSKCVDTCPTEAINDNKVIDGSRCISYFTIELKDMLIPDEMKDKFQDWMFGCDICQDVCPWNRFSKPTTEIEFTPIPEILNLSSKDWEQMSEETFKQVFKHSPLKRAKYKGIQRNLKFIKNDM

SEQ ID NO: 79089 - protein, 342 aa, Panacibacter sp.
  misc_feature (1)..(342): tr|A0A4U3L9H2|A0A4U3L9H2_9BACT Epoxyqueuosine reductase OS=Panacibacter sp. 17mud1-8 OX=2575867 GN=queG PE=3 S V=1
MLNKAHGTTISRDLRLITVTLQKNFNITRLQLNSRIVYSNFIKKTAQELNFSLCGIAKAEELTEDARRLEQWLSQGRHGNMQYMERYFDMRINPSLLVPGAQSVITLLCNYFPAEKQQPHAPRISKYAYGKDYHEVIKAKLNEFLYRIQEEIGAVHGRGFIDSAPVLERAWATKSGLGWIGKNGNFITKQQGSFFFIATLIVDLALQPDDPFARDYCGSCSRCIDACPTGAILPNKEVQGNKCISYYTIELKDMLLPAEMRDKFQDWMFGCDVCQDVCPWNRFSKPHNEVAFTPIPEILNLSTREWQALSEESFRQIFKHSPLKRSKYKGIQRNVKFIAGEE

SEQ ID NO: 79090 - protein, 427 aa, Pandoraea apista
  misc_feature (1)..(427): tr|A0A5E5P382|A0A5E5P382_9BURK Epoxyqueuosine reductase OS=Pandoraea apista OX=93218 GN=queG PE=3 SV=1
MESMKASVIFPATAAQVELSTGPNPSEVSPSRDKATLQTLDPERLNALARQIREWASELGFGRVGITDTDLSHAEAGLQQWLDDGCHGDMDYMAAHGMKRARPAELVPGTVRVISARMNYLPRDTDMASWRQREAARVAMPAEAVVSLYARGRDYHKVMRNRLQQLADRITQAIGPFGYRAFTDSAPVLEVELAQKAGLGWRGKHTLLLSRDAGSLFFLGEIFVDLPLPVDIDAGTEANTGTEPTPDAVAARGMQRGEHCGQCQRCRDVCPTGAITEAFRVDARLCISYLTIEHKGAIPEALRAKMGNRIYGCDDCQLYCPWNKFAQPSPLIDFAPRNRLDCASLVELFAWSEADFMEKLAGSPIRRIGHERWLRNLAVGLGNALRETVDADARKPLRDALLAQRDHPSALVREHVEWALAQEGVTV

SEQ ID NO: 79091 - protein, 427 aa, Pandoraea apista
  misc_feature (1)..(427): tr|A0A0G4JB04|A0A0G4JB04_9BURK Epoxyqueuosine reductase OS=Pandoraea apista OX=93218 GN=queG PE=3 SV=1
MESMKASVIFPATAAQVELSTGPNPSEVSPSRDKATLQTLDPERLNALARQIREWASELGFGRVGITDTDLSHAEAGLQQWLDDGCHGDMDYMAAHGMKRARPAELVPGTVRVISARMNYLPRDTDMASWRQREAARVAMPAEAVVSLYARGRDYHKVMRNRLQQLADRITQAIGPFGYRAFTDSAPVLEVELAQKAGLGWRGKHTLLLSRDAGSLFFLGEIFVDLPLPVDIDAGTATDTGTEPTPDAVAARGMQRGEHCGQCQRCRDVCPTGAITEAFRVDARLCISYLTIEHKGAIPEALRAKMGNRIYGCDDCQLYCPWNKFAQPSPLTDFAPRNRLDCASLVELFAWSEADFMDKLAGSPIRRIGHERWLRNLAVGLGNALRETVDAAARKPLRDALLAQRDHPSALVREHVEWALAQEGVTV

SEQ ID NO: 79092 - protein, 425 aa, Pandoraea faecigallinarum
  misc_feature (1)..(425): tr|A0A0H3WWM2|A0A0H3WWM2_9BURK Epoxyqueuosine reductase OS=Pandoraea faecigallinarum OX=656179 GN=queG PE=3 SV =2
MKASVIFPATAAQVEPSTPPQTPEVSSSRDNATPPALDSEGLAALAVQIRAWARELGFGHVGIAHTDLSHAEAGLQQWLDDGCHGDMDYMAAHGMKRARPAELVPGTVRVISARMNYLPGDVDLAHWREHEAARAARPGEAIVSIYARGRDYHKVMRNRLQQLSDRITQAIGPFGYRVFTDSAPVLEVELAQKAGLGWRGKHTLLLSREAGSLFFLGEIFVDVPLPADADQADEAEEADQAGGGAMARGEHCGQCRRCLDVCPTGAITEPFRVDARLCVSYLTIEHKGAIPEPLRAKMGNRIYGCDDCQLYCPWNKFAQPSPLADFAPRNRLDGSSLVELFAWSETEFMERLAGSPIRRIGHERWLRNLAVGLGNALRETTAQEARTSIREALLARRAHPSALVREHVEWALAQQGQAPTEGALV

SEQ ID NO: 79093 - protein, 420 aa, Pandoraea fibrosis
  misc_feature (1)..(420): tr|A0A5E4U8F0|A0A5E4U8F0_9BURK Epoxyqueuosine reductase OS=Pandoraea fibrosis OX=1891094 GN=queG PE=3 SV=1
MESMKASVIFPATAAQVELSTPPNPSEVSPSRDNATPQTLDAQRLNALAGQIREWASELGFGRIGITDTDLSHAEAGLQQWLDDGCHGDMDYMTAHGMKRARPAELVPGTVRVISARMNYLPSDTDMASWRQREAARAAMPAEAIVSVYARGRDYHKVVRNRLQQLADRITQAIGPFGYRAFTDSAPVLEVELAQKAGLGWRGKHTLLLSRDAGSLFFLGEIFVDVPLPVDVDTATDAAPGDEARGMQRGEHCGQCERCREVCPTGAITEAFRVDARLCISYLTIEHKGAIPEALRAKMGNRIYGCDDCQLYCPWNKFAQPSPLSDFAPRNRLDCASLIELFAWSEADFMDKLAGSPIRRIGHERWLRNLAVGLGNALRDTGDANARKPLRDALLARRAHPSALVREHVEWALAQEGAAV

SEQ ID NO: 79094 - protein, 395 aa, Pandoraea fibrosis
  misc_feature (1)..(395): tr|A0A0B3T3R8|A0A0B3T3R8_9BURK Epoxyqueuosine reductase OS=Pandoraea fibrosis OX=1891094 GN=queG PE=3 SV=1
MSPSRDNATPQTLDAQRLNALAGQIREWASELGFGRIGITDTDLSHAEAGLQQWLDDGCHGDMDYMAAHGMKRARPAELVPGTVRVISARMNYLPSDTDMASWRQREAARAAMPAEAIVSVYARGRDYHKVVRNRLQQLADRITQAIGPFGYRAFTDSAPVLEVELAQKAGLGWRGKHTLLLSRDAGSLFFLGEIFVDVPLPVDVDTDTDTDAAPGDEARGMQRGEHCGQCERCREVCPTGAITEAFRVDARLCISYLTIEHKGAIPEALRAKMGNRIYGCDDCQLYCPWNKFAQPSPLTDFAPRNRLDCASLIELFAWSEADFMDKLAGSPIRRIGHERWLRNLAVGLGNALRDTGDANARKPLRDALLARRAHPSALVREHVEWALAQEGAAV

SEQ ID NO: 79095 - protein, 392 aa, Pandoraea norimbergensis
  misc_feature (1)..(392): tr|A0A0U2J0S4|A0A0U2J0S4_9BURK Epoxyqueuosine reductase OS=Pandoraea norimbergensis OX=93219 GN=queG PE=3 SV=1
MPDGPEVSPSRDNTAIVSLSAAQLSTLAGQIRTWAHELGFGEVGITDTDLSHAEPGLQQWLDDGCHGDMDYMAAHGMKRARPAELVPGTVRVISARMNYLPQDTDMTTWRAHEAARQHMPGEAVVSIYARGRDYHKVMRNRLQQLADRVSQAIGPFGYRVFTDSAPVLEVELAQKAGLGWRGKHTLLLSRDAGSLFFLGEIFVDVPLPVDEGASRGEHCGQCQRCRDVCPTGAITEAYRVDARLCVSYLTIEHKGAIPEPLRAKMGNRIYGCDDCQLFCPWNKFAQPSPLPDFDPRNGLDRASLVELFAWTEDEFLARLQGSPIRRIGHERWLRNLAVGLGNALREVSAPGEIANESARKPLRDALAARMDHPSALVREHVQWALAQEGATL

SEQ ID NO: 79096 - protein, 407 aa, Pandoraea oxalativorans
  misc_feature (1)..(407): tr|A0A0E3U9M6|A0A0E3U9M6_9BURK Epoxyqueuosine reductase OS=Pandoraea oxalativorans OX=573737 GN=queG PE=3 SV=1
MSPSRDIATPSAAASTLDQQGLASLAMQIRVWARELGFAHVGITDIDLSHAEAGLQQWLDDGCHGDMDYMAAHGMKRARPAELVPGTVRVISARMNYLPSDTDLAQWRKREMARADMPGEAVVSIYARGRDYHKVVRNRLQQLADRITQAIGPFGYRAFTDSAPVLEVELAQKAGLGWRGKHTLLLSRDAGSLFFLGEIFVDVPLPVDGDDSDDRHDGHEDGSGHDGVHPNTGMDRGEHCGQCRRCLDVCPTGAITEAFRVDARLCVSYLTIEHKGAIPEPLRARMGNRIYGCDDCQLYCPWNKFAQPSPLPDFAPRNKLDSASLVELFAWTETEFMDRLAGSPIRRIGHERWLRNLAVGLGNALRETPDADARLPMRDALLARRDHPSALVREHVEWALAQEGVPV

SEQ ID NO: 79097 - protein, 426 aa, Pandoraea pnomenusa
  misc_feature (1)..(426): tr|A0A5E4ZWF5|A0A5E4ZWF5_9BURK Epoxyqueuosine reductase OS=Pandoraea pnomenusa OX=93220 GN=queG PE=3 SV=1
MESMKASVIFPATAAQVEPSTPPNASEVSSSRDNATSLALDAGRLSALVAQIREWGRELGFDKVGITDTDLSHAEPGLQQWLDDGCHGDMDYMATHGMKRARPAELVPGTVRVISVRMNYLPSDTDTATWREREAARAAVPGEAVVSLYARGRDYHKVVRNRLQQLADRISAAIGPFGYRAFTDSAPVLEVELAQKAGLGWRGKHTLLLSRDAGSLFFLGEILVDLPLPVDVDAAIAPRDAHGSRGDAGARALQRGEHCGQCRRCRDVCPTGAITEDFRVDARLCVSYLTIEHKGAIPEPLRAKLGNRIYGCDDCQLYCPWNKFAQPASVPDFAVRNGLDRASLVELFAWSETEFTQKLAGSPIRRIGHERWLRNLAVGLGNALRETADAGARTSLRDALLARRDHSSALVREHIEWALAQEGVTD

SEQ ID NO: 79098 - protein, 426 aa, Pandoraea pnomenusa
  misc_feature (1)..(426): tr|A0A518R6N8|A0A518R6N8_9BURK Epoxyqueuosine reductase OS=Pandoraea pnomenusa OX=93220 GN=queG PE=3 SV=1
MESMKASVIFPATAAQVEPSTPPNASEVSSSRDNATSLALDAGRLSALVAQIREWGRELGFDRVGITDTDLSHAEPGLQQWLDDGCHGDMDYMATHGMKRARPAELVPGTVRVISVRMNYLPSDTDTTTWRAREAARAAVPGEAVVSLYARGRDYHKVVRNRLQQLADRISAAIGPFGYRAFTDSAPVLEVELAQKAGLGWRGKHTLLLSRDAGSLFFLGEILVDLPLPVDVDAAIAPRDAHGSRGDAGARALQRGEHCGQCRRCRDVCPTGAITEDFRVDARLCVSYLTIEHKGAIPEPLRAKLGNRIYGCDDCQLYCPWNKFAQPASVPDFAVRNGLDRASLVELFAWSETDFTQKLAGSPIRRIGHERWLRNLAVGLGNALRETADAGARTSLRHALLARRDHSSALVREHIEWALAQEGVTD

SEQ ID NO: 79099 - protein, 418 aa, Pandoraea pulmonicola
  misc_feature (1)..(418): tr|A0A378Z9C8|A0A378Z9C8_9BURK Epoxyqueuosine reductase OS=Pandoraea pulmonicola OX=93221 GN=queG PE=3 SV=1
MEEMKAPVIFPATAAQVEPSTLPNTSEVSPSRDKASLAALDAEGLSALALRIREWAHELGFGQIGITDTDLSHAEAGLQRWLDDGCHGEMDYMAAHGMKRARPAELVPGTVRVISARMNYLPSDTDMAGWRRHEAERAKHPGEAIVSIYARGRDYHKVMRNRLQQLSERIAQAIGPFGYRVFTDSAPVLEVELAQKAGLGWRGKHTLLLSRDAGSLFFLGEIFVDVPLPVDMGELDERGDAHGAMQRGEYCGQCQKCRDVCPTGAITEAFRVDARLCISYLTIEHKGAIPESLRAKMGNRIYGCDDCQLFCPWNKFAQPSPLADFAPRNGLERASLVELFAWTEAEFMERLAGSPIRRIGHERWLRNLAVGLGNALRDTPDAAARIPLRNALLARRDHPSALVREHVEWALAQEGVPA

SEQ ID NO: 79100 - protein, 487 aa, Pandoraea sp.
  misc_feature (1)..(487): tr|A0A522JIC5|A0A522JIC5_9BURK Epoxyqueuosine reductase OS=Pandoraea sp. OX=1883445 GN=queG PE=3 SV=1
MIDLQSTFGKGDVVWFTQCVSRAAHPTGMPEGAQQCAHQRRFAGTEVARQMHVQTFGRTRRDGLRQARGKRPGGVLVGQIELFCRGGGGGHCVQSSQMNGSQTLTSAHASDPHEPGPPDGPEGLARLSARIKQWGRELGFGAIGVSDVDLRAAEAGLLSWLAQGCQGDMDYMANHGLKRARPAELVPGTVRVISARMDYLPAPEAAAAARDWRHVELARQEEPAAAVVSIYARGRDYHKIMRQRLQQLADRVATEIGPFGYRVFTDSAPVLEVELAQKAGLGWRGKHTLLLSRSAGSMFFLGEIYVDLPLPIDRADEDGAHCGHCERCRQACPTGAIVAPYRVDARRCISYLTIEHKGAIPLELRPLLGNRVYGCDDCQLVCPWNKFAQRSPMPDFAVRNGLDDVMLATLFAWSEAEFLERMAGSAIRRIGHERWLRNIAVALGNGLRATGQDALRQALRARANDPSALVREHVAWALAQDPVAMPP

SEQ ID NO: 79101 - protein, 415 aa, Pandoraea sp.
  misc_feature (1)..(415): tr|A0A411JHW6|A0A411JHW6_9BURK Epoxyqueuosine reductase OS=Pandoraea sp. XY-2 OX=2518599 GN=queG PE=3 SV=1
MFPATAAQVESAAPPNASEVSSSRDNATSPALDAGDLAVLAGQIRAWASELGFGRVGITDIDLSHAEAGLQQWLDDGCHGDMDYMAAHGMKRARPAELVPGTVRVISARMNYLPNDTDMASWRERETARAAMPAEAVVSIYARGRDYHKVMRHRLQQLAERITQAIGPFGYRAFTDSAPVLEVELAQKAGLGWRGKHTLLLSRDAGSLFFLGEIFVDVPLPVDADALSTPSEVQGKATGHRLQPGEHCGQCQRCRDVCPTGAITEAFRVDARLCVSYLTIEHKGAIPENLRAKMGNRIYGCDDCQLYCPWNKFAQPSPLADFAPRNRLDSASLVELFAWSETEFMDKLAGSPIRRIGHERWLRNLAVGLGNALRDSADAAARAPLRDALLARRDHPSALVREHVEWALAQEGAAA

SEQ ID NO: 79102 - protein, 425 aa, Pandoraea sputorum
  misc_feature (1)..(425): tr|A0A239SRG7|A0A239SRG7_9BURK Epoxyqueuosine reductase OS=Pandoraea sputorum OX=93222 GN=queG PE=3 SV=1
MESMKASVIFPATAAQVEPSAPPNAKEVSPSRDIATSSALASTLDQQGLAALAVQIRGWARELGFGHVGITDIDLSHAEAGLQQWLDDGCHGDMDYMAAHGMKRARPAELVPGTVRVISARMNYLPSDTDLTHWRKREMARTGMPGEAVVSLYARGRDYHKVLRNRLQQLADRITQAIGPFGYRAFTDSAPVLEVELAQKAGLGWRGKHTLLLSRDAGSLFFLGEIFVDVPLPVDVDESDDEDDSASPSTRMDRGEHCGQCRRCLDVCPTGAITEAFRVDARLCVSYLTIEHKGAIPEPLRARMGNRIYGCDDCQLYCPWNKFAQPSPLPDFAPRNKLDGASLVELFAWTETEFMDRLAGSPIRRIGHERWLRNLAVGLGNALRETPDADARIPMRDALLARRDHPSALVREHVEWALAQEGVPV

SEQ ID NO: 79103 - protein, 425 aa, Pandoraea sputorum
  misc_feature (1)..(425): tr|A0A5E5BCH6|A0A5E5BCH6_9BURK Epoxyqueuosine reductase OS=Pandoraea sputorum OX=93222 GN=queG PE=3 SV=1
MESMKASVIFPATAAQVEPSAPPNAKEVSPSRDIATSSALASTLDQQGLAALAVQIRGWARELGFGHVGITDIDLSHAEAGLQQWLDDGCHGDMDYMAAHGMKRARPAELVPGTVRVISARMNYLPSDTDLAHWRKREMARAGMPGEAVVSLYARGRDYHKVLRNRLQQLADRITQAIGPFGYRAFTDSAPVLEVELAQKAGLGWRGKHTLLLSRDAGSLFFLGEIFVDVPLPVDVDESDDEDDSASPNTRMDRGEHCGQCRRCLDVCPTGAITEAFRVDARLCVSYLTIEHKGAIPEPLRARMGNRIYGCDDCQLYCPWNKFAQPSPLPDFAPRNKLDGASLVELFAWTETEFMDRLAGSPIRRIGHERWLRNLAVGLGNALRETPDADARIPMRDALLARRDHPSALVREHVEWALAQEGVPV

SEQ ID NO: 79104 - protein, 397 aa, Pandoraea terrae
  misc_feature (1)..(397): tr|A0A5E4ZFJ4|A0A5E4ZFJ4_9BURK Epoxyqueuosine reductase OS=Pandoraea terrae OX=1537710 GN=queG PE=3 SV=1
MKASVIFPAPAAQVETSSTSGVADAPHASLDAAALAALATRIKTWGRELGFGRIGIADTDLEHAEAGLQAWLDAGCHGDMDYMANHGMKRARPAELVPGTLRVISARMDYLPQDTDPATWRAQEDVRQQDPNAAVVSVYARGRDYHKVLRSRLQQLADRISAEIGPFGYRVFTDSAPVLEVALAQKAGIGWRGKHTLLLSRDAGSMFFLGELFVDVPLPVDVSLDAGEFCGQCRRCQEVCPTGAIVSPYRVDARLCVSYLTIEHKGAIPEALRAKMGNRVYGCDDCQLFCPWNKFARPSPLTDFAPRNRLDAASLAELFAWTESEFLERLSGSAIRRIGHERWLRNLAVGLGNALRAAADETARAPLRAALTARADHPSALVREHVAWALAQEGVSP

SEQ ID NO: 79105 - protein, 393 aa, Pandoraea thiooxydans
  misc_feature (1)..(393): tr|A0A0G3EZB4|A0A0G3EZB4_9BURK Epoxyqueuosine reductase OS=Pandoraea thiooxydans OX=445709 GN=queG PE=3 SV=1
MNGSQTLTSAHASDSLEPALPDSPEGLARLSARIKRWGHELGFGAIGVSDVDLHAAEAGLLSWLEQGCQGDMDYMANHGLKRARPAELVPGTVRVISARMDYLPEAPATTTTAAARDWRQVELARQEEPVAAVVSVYARGRDYHKLMRQRLQQLADRIAAEIGPFGYRVFTDSAPVLEVELAQKAGLGWRGKHTLLLSRTAGSMFFLGEIYVDLPLPVDAADENGAHCGHCERCRQACPTGAIVAPYRVDARRCISYLTIEHKGSIPHELRPLMGNRVYGCDDCQLVCPWNKFAQRSPLPDFAVRHDLDDVTLAALFAWSEAEFLERMAGSAIRRIGHERWLRNIAVALGNGLRATGDDTLRQALRARADDPSALVREHVAWALAQDPMLMSR

SEQ ID NO: 79106 - protein, 395 aa, Pandoraea vervacti
  misc_feature (1)..(395): tr|A0A1J0LXJ8|A0A1J0LXJ8_9BURK Epoxyqueuosine reductase OS=Pandoraea vervacti OX=656178 GN=queG PE=3 SV=1
MSSSRDKATPSALDSGALATLAVQIRGWATELGFGHVGITDTDLSHAEAGLQQWLDDGCHGDMDYMAAHGMKRARPAELVPGTVRVISARMNYLPSDVDLSQWRAHEAARAAQPAEAVVSIYARGRDYHKVMRNRLQQLADRIAKAIGPFGYRVFTDSAPVLEVELAQKAGLGWRGKHTLLLSREAGSLFFLGEIFVDVPLPLDRDDHADHEKAAMARGEHCGQCRRCLDVCPTGAITEPFRVDARLCVSYLTIEHKGAIPEPLRAKMGNRIYGCDDCQLHCPWNKFAQASPLADFAPRNKLDDASLVELFAWSETEFMSRLEGSPIRRIGHERWLRNLAVGLGNALRDTADAQARKPMRDALLARRDHASALVREHVAWALAQEGAPEQKGSQV

SEQ ID NO: 79107 - protein, 391 aa, Pannonibacter indicus
  misc_feature (1)..(391): tr|A0A0K6HPK8|A0A0K6HPK8_9RHOB Epoxyqueuosine reductase OS=Pannonibacter indicus OX=466044 GN=queG PE=3 SV=1
MPSNPVFPAKALDRLCRQLKDKAAQLGFDDLAITRPDAIPLAPQRLAQFLADGHHGSMGWMAETADRRASPSVLWPDVRSVIMLAMNYGPAGDALENLAHPDRGNISVYARHRDYHDVIKGKLKELASFLVSRAGGGDVKVFVDTAPVMEKPLAQAAGLGWQGKHTNLVSRRLGSWFFLASIFTTLDLAAGEPERDHCGSCRACLSACPTDAFPQPYRLDARRCISYLTIEHAGPIPDEFRVAFGNRIYGCDDCLAACPWNKFAVEAREAKLQAREDLEAPSLATLLRLDDPAFRQLFSGSPVKRIGRDRFIRNCLIAAGNSADAGHVPQAVVLLNDDAAVVRGAAVWALSRLLAPEAFAALAKDRLIQETDADVRREWQAAKARAASETG

SEQ ID NO: 79108 - protein, 386 aa, Pannonibacter phragmitetus
  misc_feature (1)..(386): tr|A0A0U3N1G2|A0A0U3N1G2_9RHOB Epoxyqueuosine reductase OS=Pannonibacter phragmitetus OX=121719 GN=queG PE=3 S V=1
MLSAKALDRLCRQLRDKAAQLGFDDLAITRPDAIPQAPQRLAQFLADGHHGSMGWMEETADRRASPGVLWPDVRSVIMLAMNYGPAGDALENLAHPDRGNISVYARHRDYHDVIKGKLKELASFLVSRAGGGDVKVFVDTAPVMEKPLAQAAGLGWQGKHTNLVSRRLGSWFFLASIFTTLDLAAAEPERDHCGSCRACLSACPTDAFPQPYRLDARRCISYLTIEHAGPIPDEFRVALGNRIYGCDDCLAACPWNKFAVEAREAKLQAREDLEAPSLATLLRLDDPVFRQLFSGSPVKRIGRDRFIRNCLIAAGNSADAGHVPQAVALLDDDAAVVRGAAVWALSRLLAPEAFAALAEDRLTQETDADVRREWQAAKARAASETR

SEQ ID NO: 79109 - protein, 366 aa, Pannonibacter phragmitetus
  misc_feature (1)..(366): tr|A0A378ZQ42|A0A378ZQ42_9RHOB Epoxyqueuosine reductase OS=Pannonibacter phragmitetus OX=121719 GN=queG PE=4 S V=1
MGFDDLAITRPNAIPQAPQRLAQFLADGHHGSMGWMEETADRRASPSVLWPEVRSVIMLAMNYGPAGDALENLAHPDRGNISVYARHRDYHDVIKGKLKELASFLVSRAGGGDVKVFVDTAPVMEKPLAQAAGLGWQGKHTNLVSRRLGSWFFLASIFTTLDLAAAEPERDHCGSCWACLSACPTGAFPQPYRLDARRCISYLTIEHAGPIPQEFRVALGNRIYGCDDCLAACPWNKFAVEAREAKLQAREDLEAPSLATLLRLDDPAFRQLFSGSPVKRIGRDRFIRNCLIAAGNSADAGHVPQAVALLDDDAAVVRGAAVWALSRLLEPEAFAVLAEDRLTPEADADVRREWQAAKAKAASETR

SEQ ID NO: 79110 - protein, 379 aa, Pantoea alhagi
  misc_feature (1)..(379): tr|A0A1W6B5C6|A0A1W6B5C6_9GAMM Epoxyqueuosine reductase OS=Pantoea alhagi OX=1891675 GN=queG PE=3 SV=1
MSHPLDLQQLAQDIKQWGLSLGFQQVGICDTDLSLEEPRLQAWLDKQYHGEMEWMARHGMMRARPHELLPGTLRVISVRMNYLPAKAAFASTLKNPRLGYVSRYALGRDYHKVLRNRLKKLGDLIRERCETVNFRPFVDSAPILERPLAAKAGLGWTGKHSLILNREAGSWFFLGELLIDLPLPVDRPQEEQCGRCVACITTCPTGAIVEPYVVDARRCISYLTIELEGAIPEAFRPLIGNRIYGCDDCQLICPWNRFGQLSDEDDFSPRAALHAPPLTELFAWDEAKFLRVTEGSAIRRIGHLRWLRNIAVALGNAPWDTENIAALSSRLGENPMLDEHIHWALEQQKIKRAENAIEVQRPQQKRLVRAIEKGLPRDA

SEQ ID NO: 79111 - protein, 379 aa, Pantoea allii
  misc_feature (1)..(379): tr|A0A4S3BER1|A0A4S3BER1_9GAMM Epoxyqueuosine reductase OS=Pantoea allii OX=574096 GN=queG PE=3 SV=1
MSYPLDLHQLAQQIKQWGLDLGFQQVGITDTDLSAEEPRLQAWLDKQYHGEMEWMARHGMMRARPHELLPGTLRVISVRMNYLPAKAAFASTLKNPQLGYVSRYALGRDYHKVLRNRLKKLGEMIQQHCGELNFRPFVDSAPLLERPLAAKAGLGWTGKHSLILNREAGSWFFLGELLIDIPLPLDAPQEEQCGRCVACMTICPTSAIVEPYVVDARRCISYLTIELEDAIPEEFRPLIGNRIYGCDDCQLICPWNRYGQLSDETDFSPRAALHAPELVDLFQWDEAKFLRITEGSAIRRIGHLRWLRNIAVALGNAPWSPAVVQVLEQRLGESELLDEHILWAITQQQQKREQLVVEVQPAQQKRLVRAVEKGLPRDA

SEQ ID NO: 79112 - protein, 325 aa, Pantoea allii
  misc_feature (1)..(325): tr|A0A2V2BIF2|A0A2V2BIF2_9GAMM Epoxyqueuosine reductase OS=Pantoea allii OX=574096 GN=C7431_10345 PE=4 SV=1
MARHGMMRARPHELLPGTLRVISVRMNYLPAKAAFASTLKNPQLGYVSRYALGRDYHKVLRNRLKKLGEMIQAHCGESHFRPFVDSAPLLERPLAVKAGLGWTGKHSLILNREAGSWFFLGELLIDLPLPVDTPQEEQCGRCVACMTICPTGAIVAPYTVDARRCISYLTIELEGAIPEALRPLMGNRIYGCDDCQLICPWNRYGQLTDEEDFSPRAALHAPELTALFQWDEAKFLRITEGSPIRRIGYQRWSRNIAVALGNAPWSTEILTVLEQRRGESDLLDEHIQWAITQQQVKRKRDEIDVQPAQQKRLVRAVEKGLPRDA

SEQ ID NO: 79113 - protein, 379 aa, Pantoea ananas
  misc_feature (1)..(379): tr|A0A2S7ZTJ8|A0A2S7ZTJ8_PANAN Epoxyqueuosine reductase OS=Pantoea ananas OX=553 GN=queG PE=3 SV=1
MSYPLDLHQLAQQIKQWGLDLGFQQVGITDTDLSAEEPRLQAWLDKQYQGEMAWMARHGMMRARPHELLPGTLRVISVRMNYLPAKAAFASTLKNPQLGYVSRYALGRDYHKVLRNRLKKLGEMIQQHCGELNFRPFVDSAPLLERPLAAKAGLGWTGKHSLILNREAGSWFFLGELLIDIPLPSDAPQEEQCGRCVACMTICPTSAIVEPYVVDARRCISYLTIELEGAIPEEFRPLMGNRIYGCDDCQLICPWNRYGQLSDESDFSPRAALHAPELIDLFQWDEAKFLRITEGSAIRRIGHLRWLRNIAVALGNAPWSPEIIQILEQRLGESELLDEHILWAIAQQQQKREQIVVEVQPAQQKRLVRAVEKGLPRDA

SEQ ID NO: 79114 - protein, 325 aa, Pantoea ananas
  misc_feature (1)..(325): tr|A0A2U1D512|A0A2U1D512_PANAN Epoxyqueuosine reductase OS=Pantoea ananas OX=553 GN=C7427_109137 PE=4 SV=1
MARHGMMRARPHELLPGTLRVISVRMNYLPAKAAFASTLKNPQLGYVSRYALGRDYHKVLRNRLKKLGEMIQAHCGESQFRPFVDSAPLLERPLAEKAGLGWTGKHSLILNREAGSWFFLGELLIDLPLPIDSPQEEQCGRCVACMTICPTGAIVAPYTVDARRCISYLTIELEGAIPEALRPLMGNRIYGCDDCQLICPWNRYGQLTDEADFSPRAALHAPALNALFQWDEAKFLRITEGSPIRRIGYQRWSRNIAVALGNAPWSAEILPILEQRLGESDLLDEHIQWAIAQQQDKRKHVEIDVQPAQQKRLVRVIEKGLPRDA

SEQ ID NO: 79115 - protein, 379 aa, Pantoea ananatis
  misc_feature (1)..(379): tr|A0A0H3L7K7|A0A0H3L7K7_PANAA Epoxyqueuosine reductase OS=Pantoea ananatis (strain AJ13355) OX=932677 GN=yjeS PE=3 SV=1
MSYPLDLDQLAQHIKQWGRDLGFQQVGITDTDLSAEEPRLQAWLDKQYHGEMEWMARHGMMRARPHELLPGTLRVISVRMNYLPAKAAFASTLKNPQLGYVSRYALGRDYHKVLRNRLKKLGEMIQAHCGESQFRPFVDSAPLLERPLAEKAGLGWTGKHSLILNREAGSWFFLGELLIDLPLPIDSPQEEQCGRCVACMTICPTGAIVAPYTVDARRCISYLTIELEGAIPEALRPLMGNRIYGCDDCQLICPWNRYGQLTDEADFSPRAALHAPALTALFQWDEAKFLRITEGSPIRRIGYQRWSRNIAVALGNAPWSAEILPILEQRLGESDLLDEHIQWAIAQQQDKRKHVEIDVQPAQQKRLVRVIEKGLPRDA

SEQ ID NO: 79116 - protein, 379 aa, Pantoea ananatis; identical to SEQ ID NO: 79115
  misc_feature (1)..(379): tr|D4GC99|D4GC99_PANAM Epoxyqueuosine reductase OS=Pant oea ananatis (strain LMG 20103) OX=706191 GN=yjeS PE=3 SV=1

SEQ ID NO: 79117 - protein, 379 aa, Pantoea coffeiphila
  misc_feature (1)..(379): tr|A0A2S9IDU7|A0A2S9IDU7_9GAMM Epoxyqueuosine reductase OS=Pantoea coffeiphila OX=1465635 GN=queG PE=3 SV=1
MSHPLDFHQLALDIKQWGLSLGFQQVGICDTDLTLEEPRLQAWLDKQYHGEMDWMARHGMMRARPHELMPGTLRVISVRMNYLPAKASFASTLRNPRLGYVSRYALGRDYHKVLRNRLKKLGDMIRERCEEAQFRPFVDSAPVLERPLAAKAGLGWTGKHSLILNREAGSWFFLGELLIDLPLPVDSPVEENCGRCVACITTCPTGAIVEPYKVDARRCISYLTIELEGVIPEEFRPLIGNRIYGCDDCQLICPWNRYGQLTDEDDFSPRAVLHAPPLIDLFAWDEAKFLRVTEGSAIRRIGHLRWLRNVAVALGNAPWDESHLQALEARLGENEMLDEHIRWAIACQLAKRDENVVEVQSSQQRRLVRAIEKGLPRDA

SEQ ID NO: 79118 - protein, 379 aa, Pantoea cypripedii
  misc_feature (1)..(379): tr|A0A1X1EZK5|A0A1X1EZK5_PANCY Epoxyqueuosine reductase OS=Pantoea cypripedii OX=55209 GN=queG PE=3 SV=1
MSYPLDLHQLAQQIKQWGRELGFQQVGICDTDLSAEEPRLQAWLEKQYHGEMEWMARHGMMRARPHELLPGTLRVISVRMNYLPAKAAFASTLKNPQLGYVSRYALGRDYHKVLRNRLKKLGDKIQEHCGELNFRPFVDSAPLLERPLAAKAGLGWTGKHSLILNREAGSWFFLGELLIDLPLPVDTPQEEQCGRCVACMTICPTAAIVEPYTVDARRCISYLTIELEGAIPEEFRPLIGNRIYGCDDCQLICPWNRYGQLTDEDDFSPRAVLHAPPLTTLFMWDEAKFLRVTEGSAIRRIGHLRWLRNVAVALGNAPWSEENITVLQQRSGEHPLLDEHIDWALDQQRQKRAALAIDVQPARKLRLVRAIEKGLSRDA

SEQ ID NO: 79119 - protein, 379 aa, Pantoea deleyi
  misc_feature (1)..(379): tr|A0A506PV92|A0A506PV92_9GAMM Epoxyqueuosine reductase OS=Pantoea deleyi OX=470932 GN=queG PE=3 SV=1
MSYPLDLHQLAQQIKQWGAELGFQQVGITDTDLSAEEPRLQAWLDKQYHGEMEWMARHGMMRARPHELLPGTLRVISVRMNYLPAKAAFASTLKNPRLGYVSRYALGRDYHKVLRNRLKKLGEMIQEHCGALNFRPFVDSAPLLERPLAAKAGLGWTGKHSLILNREAGSWFFLGELLIDIPLPVDTPQPEQCGRCVACMTICPTGAIVEPYVVDARRCISYLTIELEGAIPEAFRPLMGNRIYGCDDCQLICPWNRYGQLSDESDFSPRAALHAPELIDLFQWDETKFLRITEGSAIRRIGHLRWLRNIAVALGNAPWSADIMPVLERRLGESELLDEHIQWAIAQQQQKREQLVVDVQPAQQKRLVRAVEKGLPRDA

SEQ ID NO: 79120 - protein, 379 aa, Pantoea dispersa
  misc_feature (1)..(379): tr|A0A518XG38|A0A518XG38_9GAMM Epoxyqueuosine reductase OS=Pantoea dispersa OX=59814 GN=queG PE=3 SV=1
MSYPLDLEQLALHIKQWGRDLGFQQVGICDTDLRAEEPKLQAWLEKQYHGEMDWMARHGMMRARPHELLPGTLRVISVRMNYLPAKAAFASTLKNPQLGYVSRYALGRDYHKVLRNRLKKLGEMIQAHCGELNFRPFVDSAPVLERPLAAKAGLGWTGKHSLILNREAGSWFFLGELLIDLPLPVDLPQQEQCGRCVACMTICPTGAIVEPYVVDARRCISYLTIELEGAIPEALRPLIGNRIYGCDDCQLICPWNRYGQLTDEPDFSPRAVLHAPQLIDLFQWDEAKFLRVTEGSAIRRIGHLRWLRNVAVALGNAPWSEDNVAALTLRRGEHPLLDEHIDWAIAQQLQKRAAQAIEVQPAQKQRLVRAVEKGLPRDA

SEQ ID NO: 79121 - protein, 379 aa, Pantoea dispersa
  misc_feature (1)..(379): tr|A0A437T777|A0A437T777_9GAMM Epoxyqueuosine reductase OS=Pantoea dispersa OX=59814 GN=queG PE=3 SV=1
MSYPLDLQQLAQQIKQWGRELGFQQVGICDTDLSAEEPKLQQWLEKQYHGEMDWMARHGMMRARPHELLPGTLRVISVRMNYLPAKAAFASTLKNPQLGYVSRYALGRDYHKVLRNRLKKLGEKIQAHCGELNFRPFVDSAPILERPIAVKAGLGWTGKHSLVLNREAGSWFFLGELLIDLPLPVDEPQQEQCGRCVACMTICPTGAIVEPYVVDARRCISYLTIELEGAIPEALRPLIGNRIYGCDDCQLICPWNRYGQLTDEEDFSPRAVLHAPQLVELFGWDEARFLRVTEGSAIRRIGHLRWLRNVAVALGNAPWAPENLTALEQRRGEHPLLDEHIDWAIAQQRQKRAAQAVEVQSAQQQRLVRAVEKGLPRDA

SEQ ID NO: 79122 - protein, 379 aa, Pantoea eucalypti
  misc_feature (1)..(379): tr|A0A506PBC6|A0A506PBC6_9GAMM Epoxyqueuosine reductase OS=Pantoea eucalypti OX=470933 GN=queG PE=3 SV=1
MSYPLDLHQLAQQIKQWGLDLGFQQVGITDTDLSAEEPRLQAWLDKQYQGEMAWMARHGMMRARPHELLPGTLRVISVRMNYLPAKAAFASTLKNPQLGYVSRYALGRDYHKVLRNRLKKLGEMIQQHCGELNFRPFVDSAPLLERPLAAKAGLGWTGKHSLILNREAGSWFFLGELLIDIPLPLDAPQEEQCGRCVACMTICPTSAIVEPYVVDARRCISYLTIELEGAIPEEFRPLMGNRIYGCDDCQLICPWNRYGQLSDESDFSPRAALHAPELIDLFQWDEAKFLRITEGSAIRRIGHLRWLRNISVALGNAPWSPEIIQILEQRLGESELLDEHILWAIAQQQQKREQIVVEVQPAQQKRLVRAVEKGLPRDA

SEQ ID NO: 79123 - protein, 379 aa, Pantoea latae
  misc_feature (1)..(379): tr|A0A1V9DD79|A0A1V9DD79_9GAMM Epoxyqueuosine reductase OS=Pantoea latae OX=1964541 GN=queG PE=3 SV=1
MSYPLDLHQLAQQIKQWGKDLGFQQVGITDTDLSAEEPRLQAWLDKQYHGEMEWMARHGMMRARPHELLPGTLRVISVRMNYLPAKAAFASTLKNPQLGYVSRYALGRDYHKVLRNRLKKLGEMIQEACGELNFRPFVDSAPLLERPLAAKAGLGWTGKHSLILNREAGSWFFLGELLIDLPLPIDAPQEEQCGRCVACMTICPTSAIVEPYVVDARRCISYLTIELEGAIPEALRPLMGNRIYGCDDCQLICPWNRYGQLSDEADFSPRAALHAPELMTLFQWDEKTFLRVTEGSAIRRIGHLRWLRNIAVALGNAPWTGEIVEVLAKRLGENPLLDEHIEWALRQQHAKRQALAIEVQPAQQKRLVRAVEKGLPRDA

SEQ ID NO: 79124 - protein, 379 aa, Pantoea rodasii
  misc_feature (1)..(379): tr|A0A0B1R9K1|A0A0B1R9K1_9GAMM Epoxyqueuosine reductase OS=Pantoea rodasii OX=1076549 GN=queG PE=3 SV=1
MSYPLDLHQLAQQIKLWGRELGFQQVGICDTDLSAEEPKLQEWLEKQYHGEMDWMARHGMMRARPHELLPGTLRVISVRMNYLPAKAAFATTLKNPHLGYVSRYALGRDYHKVLRNRLKKLGEMIQAHCGELNFRPFVDSAPILERPIAAKAGLGWTGKHSLILNREAGSWFFLGELLIDLPLPVDQPQEEQCGRCVACITICPTAAIVEPYVVDARRCISYLTIELEGAIPEEFRPLIGNRIYGCDDCQLICPWNRYGQLTDEDDFSPRAVLHAPPLVELFAWDEAKFLRITEGSAIRRIGHLRWLRNIAVALGNAPWADENLAVLQMRKGEHPLLDEHIDWAIAQQLQKRAAEAVDVQPAKKLRLVRAVEKGLPRDA

SEQ ID NO: 79125 - protein, 379 aa, Pantoea rodasii
  misc_feature (1)..(379): tr|A0A2M9W7D8|A0A2M9W7D8_9GAMM Epoxyqueuosine reductase OS=Pantoea rodasii OX=1076549 GN=queG PE=3 SV=1
MSYPLDLQQLAQLIKQWGRELGFQQVGICDTDLSAEEPKLQDWLEKQYHGEMDWMARHGMMRARPHELLPGTLRVISVRMNYLPAKAAFASTLRNPQLGYVSRYALGRDYHKVLRNRLKKLGEMIQAHCGELNFRPFVDSAPILERPIAAKAGLGWTGKHSLILNREAGSWFFLGELLIDLPLPVDQPQEEQCGRCVACITICPTSAIVEPYVVDARRCISYLTIELEGAIPEEFRPLIGNRIYGCDDCQLICPWNRYGQLTDEDDFSPRAVLHAPPLVDLFKWDEAKFLRVTEGSAIRRIGHLRWLRNIAVALGNAPWAEENLAALQTRSGEHTLLDEHIEWAIAQQIEKRAAQAVNVQPAKKLRLVRAVEKGLPRDA

SEQ ID NO: 79126 - protein, 379 aa, Pantoea rwandensis
  misc_feature (1)..(379): tr|A0A1X1CR47|A0A1X1CR47_9GAMM Epoxyqueuosine reductase OS=Pantoea rwandensis OX=1076550 GN=queG PE=3 SV=1
MSYPLDLQQLAQQIKQWGRELGFQQVGICDTDLSAEEPKLQAWLEKQYHGEMDWMARHGMMRARPHELLPGTLRVISVRMNYLPAKAAFASTLKNPQLGYVSRYALGRDYHKVLRNRLKKLGEMIQEHCGELNFRPFVDSAPILERPIAVKAGLGWTGKHSLILNREAGSWFFLGELLIDLPLPVDNPQEEQCGRCVACITICPTSAIVEPYVVDARRCISYLTIELEGAIPEEFRPMIGNRIYGCDDCQLICPWNRYGQLTDEEDFSPRAVLHAPALIDLFKWDEAKFLRVTEGSAIRRIGHLRWLRNVAVALGNAPYRAEIIETLKLRQGEHPMLDEHIHWAISQQRQKRSENAIEVQLAQQKRLVRVIEKGLPRDA

SEQ ID NO: 79127 - protein, 379 aa, Pantoea sesami
  misc_feature (1)..(379): tr|A0A1M5N291|A0A1M5N291_9GAMM Epoxyqueuosine reductase OS=Pantoea sesami OX=1881110 GN=queG PE=3 SV=1
MSQPLDLNELAQKIKQWGAELGFQKVGITDTDLSASEPKLQAWLDKQYHGEMEWMARHGMMRARPHELLPGTLRVISVRMNYLPANAAFARTLKNPSLGYVSRYALGRDYHKLLRNRLKKLGETIQQHCVSLNFRPFVDSAPILERPIAEKAGLGWTGKHSLILSRDAGSFFFLGELLIDLPLPVDGPVEEGCGRCVACMTICPTGAIVEPYTVDARRCISYLTIELEGAIPEEFRPLIGNRIYGCDDCQLICPWNRYSQLTDEEDFSPRKALHAPQLVELFAWTEAWFLKVTEGSAIRRIGHLRWLRNVAVALGNAPWDEANIRALESRKGEHPLLDEHIEWAIAQQIEKRNACTIEVQLPKKQRLVRVIEKGLTRDA

SEQ ID NO: 79128 - protein, 379 aa, Pantoea sp.
  misc_feature (1)..(379): tr|A0A3D0EQL3|A0A3D0EQL3_9GAMM Epoxyqueuosine reductase OS=Pantoea sp. OX=69393 GN=queG PE=3 SV=1
MSYPLDLHQLAQQIKQWGRELGFQQVGICDTDLSAEEPRLQEWLDKQYHGEMDWMARHGMMRARPHELLPGTLRVISVRMNYLPAKAAFASTLKNPQLGYVSRYALGRDYHKVLRNRLKKLGEMIQAHCGELNFRPFVDSAPILERPIAVKAGLGWTGKHSLVLNREAGSWFFLGELLIDLPLPVDQPQEEQCGRCVACITICPTAAIVEPYVVDARRCISYLTIELEGAIPEEFRPLIGNRIYGCDDCQLICPWNRYGQLTDEDDFSPRAVLHAPPLTELFKWDEAKFLRITEGSAIRRIGHLRWLRNIAVALGNAPWAEENMAVLALRSGEHPMLDEHITWAMAQQLEKRAAQAVEVQPAKKQRLVRAVEKGLPRDA

SEQ ID NO: 79129 - protein, 379 aa, Pantoea sp.; identical to SEQ ID NO: 77489
  misc_feature (1)..(379): tr|A0A3S0LX46|A0A3S0LX46_9GAMM Epoxyqueuosine reductase OS=Pantoea sp. YU22 OX=2497684 GN=queG PE=3 SV=1

SEQ ID NO: 79130 - protein, 379 aa, Pantoea stewartii
  misc_feature (1)..(379): tr|H3RHI1|H3RHI1_PANSE Epoxyqueuosine reductase OS=Pant oea stewartii subsp. stewartii DC283 OX=660596 GN=yjeS PE=3 SV=1
MSYPLDLDQLAQHIKQWGRDLGFQQVGITDTDLSAEEPRLQDWLDKQYHGEMEWMARHGMMRARPHELLPGTLRVISVRMNYLPAKAAFASTLKNPQLGYVSRYALGRDYHKVLRNRLKKLGEMIQTHCGESQFRPFVDSAPLLERPLAAKAGLGWTGKHSLILNREAGSWFFLGELLIDLPLPIDTPQEEQCGRCVACMTICPTGAIVEPYTVDARRCISYLTIELEGAIPEEFRPLMGNRIYGCDDCQLICPWNRYGQLTDEADFSPRAALHAPELTALFQWDEAKFLRITEGSPIRRIGYQRWSRNIAVALGNAPWHTEILSVLEQRRGESDLLDEHIEWAITQQLHKRKALAIDVQPAQQKRLVRVIEKGLPRDA

SEQ ID NO: 79131 - protein, 379 aa, Pantoea vagans; identical to SEQ ID NO: 79113
  misc_feature (1)..(379): tr|A0A501S5B3|A0A501S5B3_9GAMM Epoxyqueuosine reductase OS=Pantoea vagans OX=470934 GN=queG PE=3 SV=1

SEQ ID NO: 79132 - protein, 379 aa, Pantoea vagans
  misc_feature (1)..(379): tr|E1SFL1|E1SFL1_PANVC Epoxyqueuosine reductase OS=Pant oea vagans (strain C9-1) OX=712898 GN=queG PE=3 SV=1
MSYPLDLHELAQQIKQWGLDLGFQQVGITDTDLSAEEPRLQEWLDKQYHGEMAWMARHGMMRARAHELLPGTLRVISVRMNYLPAKAAFASTLKNPRLGYVSRYALGRDYHKVLRNRLKKLGEMIQQHCGELNFRPFVDSAPLLERPLAAKAGLGWTGKHSLILNREAGSWFFLGELLIDIPLPVDSPQQEQCGRCVACMTICPTSAIVEPYVVDARRCISYLTIELEGAIPEEFRPLMGNRIYGCDDCQLICPWNRYGQLSDESDFSPRAALHAPELLDLFQWDEAKFLRITEGSAIRRIGHLRWLRNIAVALGNAPWSPHIIHVLEQRLGESELLDEHIQWAVMQQQQKREQLVVEVQPAQQKRLVRAVEKGLPRDA

SEQ ID NO: 79133 - protein, 379 aa, Pantoea wallisii
  misc_feature (1)..(379): tr|A0A1X1CTT8|A0A1X1CTT8_9GAMM Epoxyqueuosine reductase OS=Pantoea wallisii OX=1076551 GN=queG PE=3 SV=1
MSYPLDLQQLAQHIKQWGRDLGFQQVGICDTDLRAEEPRLQAWLDKQYHGEMDWMARHGMMRARPHELLPGTLRVISVRMNYLPAKAAFASTLKNPQLGYVSRYALGRDYHKVLRNRLKKLGEMIQAHCGELNFRPFVDSAPILERPIAAKAGLGWTGKHSLILNREAGSWFFLGELLIDLPLPVDQPQGEQCGRCVACITICPTAAIVEPYVVDARRCISYLTIELEGAIPEAFRPLIGNRIYGCDDCQLICPWNRYGQLTDEQDFSPRAVLHAPQLVELFGWDEAKFLRVTEGSAIRRIGHLRWLRNVAVALGNAPWAEENLSALQQRSGEHPLLDEHIDWAIAQQLEKRTAQAVEVQPPKKQRLVRAVEKGLPRDA

SEQ ID NO: 79134 - protein, 346 aa, Papillibacter cinnamivorans
  misc_feature (1)..(346): tr|A0A1W2CUG9|A0A1W2CUG9_9FIRM Epoxyqueuosine reductase OS=Papillibacter cinnamivorans DSM 12816 OX=1122930 GN =SAMN02745168_0233 PE=4 SV=1
MVSTEQRIQSKAYELGYIKCGIVSIEELEEYERRLEERMEKVPEASKKFYERQKRLTNTKIREQFPWARSAVVVAAHYGRYKIPETLKGHIAKYYLFDFRVRSEKAEYERFAEMEDFLGQLGLQTASNQKFGVFSLRWAAMKAGLGVIRNNNFFYTEHGSWVNLDGWLIDQKMELRETARLPACPPGCTRCVSACPSGSLSARLTMSPCDCISYLTTFGGRDLPKDAHRGQFGPWIYGCDACQDACPMNKGKWEEKYEYSGLKELELYLSLEEILNMDEEFYKRKIQPKFFYIGADELWKWKVNVLCYMRNNYQESYKPSIAAARESENEKVREMARLVSEELHIA

SEQ ID NO: 79135 - protein, 289 aa, Papillibacter cinnamivorans
  misc_feature (1)..(289): tr|A0A1W2A7V0|A0A1W2A7V0_9FIRM Epoxyqueuosine reductase QueG (Queuosine biosynthesis) OS=Papillibacter cinnami vorans DSM 12816 OX=1122930 GN=SAMN02745168_1595 PE=4 S V=1
MPDLEGYLKIWGAAQSGAVAASRLFEQMSPRARERAEELCPGLAGVLVGAFPYYAGEREGNLSLYSRGEDYHIAVKRLLAEAGAALRREYPRSRFVPLVDASPLPEVRAAELAGIGLVGEHGLIICPPYGSYVFLGCILTDLPLETPGRKSPPCIRCGRCAEACPSGALRWRDGAAVFDSALCLSGVSQRKGALTPEEERRLKTLPTVWGCDLCQNACPYNASPAVTAIDALAGRTETAPYLADLQREALEGLPEKAFREKYRNRAFSWHGKSPLIRNLGLHKEWEHKA

SEQ ID NO: 79136 - protein, 317 aa, Parabacteroides chartae
  misc_feature (1)..(317): tr|A0A1T5A7D1|A0A1T5A7D1_9BACT Epoxyqueuosine reductase OS=Parabacteroides chartae OX=1037355 GN=queG PE=3 SV= 1
MNLEQKIKEEALRLGFAACGIAEVAPAESEAIYFDTWLANGMHAGMTFMENYRNVRLNPAGLLEGARSIISVALNYYPADLQPQDVPQLAYYAYGRDYHDVIKEKLNELVDYIRREVSINARCFTDSAPILERYWAWKAGLGWIGKNTHLIIPGKGSYFFLGEIVTDLALIPDRPMESMCGKCTRCMEACPTKAIEAPRTLNAGKCISYLTIENRKEIPEKLAPLIGNRIYGCDTCQQVCPWNRFARPTTEESFKMKDELAEMTADKWYALSREQYTRIFKGSAVKRAKYEGLLRNIANYKAINFRKEEEQNTNTYK

SEQ ID NO: 79137 - protein, 305 aa, Parabacteroides chinchillae
  misc_feature (1)..(305): tr|A0A1H5U771|A0A1H5U771_9BACT Epoxyqueuosine reductase OS=Parabacteroides chinchillae OX=871327 GN=SAMN054440 01_10536 PE=4 SV=1
MFVSSKIKELACKHGFGACGIARVEPADTEIVYLDQWIANGCHGEMKYMENYRDIRFNPSGLVEGACSVISVALNYYPGKKLSPDMPHIAYYAYGKDYHIVLKNKLRLLWESITSSLDKTHEARFFTDSAPILERYWAWRAGIGFIGKNTNLIIPGKGSYFFLGEIVTTLEVDEYDTPQKNRCGNCNRCIEFCPTGALESERHLNASRCLSYLTIEHKGEIPPEQAARLGNRLYGCDTCQQVCPWNRFATPTQEEQFCPTEAFLSLNKEQLRMLTKEEYNCIFAYSAVKRAKYEGLLRTIKYLKE

SEQ ID NO: 79138 - protein, 305 aa, Parabacteroides distasonis
  misc_feature (1)..(305): tr|A0A355XJU3|A0A355XJU3_9BACT tRNA epoxyqueuosine(34) reductase QueG OS=Parabacteroides distasonis OX=823 GN= queG PE=4 SV=1
MGISQFIKDKAMELGFSACGIAEVAKAGSEEAYFDQWIAEGYHAGMKYMENHREIRLNPDGLVEGAKSVISVALNYYPKVLRNPAEPYISYYAYGEDYHGVVKDKLRQLWKAITEHHPSNNEARVFTDSAPLLERYWAWKAGLGWIGKNTNLIIPGKGSFFFLGEIVTTLVVDTYDSPKKNHCGSCIRCLNACPTGALEGPKRLNARKCISYLTIEHRGEIPVEQAVLLGNRVYGCDTCQAVCPWNRFAMPTAVAAFHPTPSLLSLKKDDLKALSREDYNRIFAHSAVKRAKYEGLLRTIQYLKD

SEQ ID NO: 79139 - protein, 305 aa, Parabacteroides distasonis
  misc_feature (1)..(305): tr|A0A078SAG1|A0A078SAG1_9BACT Epoxyqueuosine reductase OS=Parabacteroides distasonis str. 3999B T(B) 4 OX=133 9344 GN=queG PE=4 SV=1
MGISQFIKDKAMELGFSACGIAEVAKAGSEEAYFDQWIAEGYHAGMKYMENHREIRLNPDGLVEGAKSVISVALNYYPKVLRNPAEPYISYYAYGEDYHGVVKDKLRQLWKAITEHHPSNNEARVFTDSAPLLERYWAWKAGLGWIGKNTNLIIPGKGSFFFLGEIVTTLVVDTYDSPKKNHCGSCIRCLDACPTGALEGPKRLNARKCISYLTIEHRGEIPVEQAVLLGNRIYGCDTCQAVCPWNRFAMPTAVAAFHPTPSLLSLKKDDLKALSREDYNRIFAHSAVKRAKYEGLLRTIQYLKD

SEQ ID NO: 79140 - protein, 287 aa, Parabacteroides goldsteinii
  misc_feature (1)..(287): tr|A0A0J6CSU1|A0A0J6CSU1_9BACT Epoxyqueuosine reductase (Fragment) OS=Parabacteroides goldsteinii OX=328812 GN =ACM15_02525 PE=4 SV=1
YRDIRLDPAGLVEGARSVISVALNYYPPQKQFPGSPRISYYAYGKDYHIVVKDKLRQLWEYITSLVPVLDTGPQESRPFRPENEETSSSAAPCQARGQADSTLPAARLFTDSAPILERYWAWKAGLGWIGKNTNLIIPGKGSFFFLGEIVTTLELDYDTPQKNRCGACRRCLDACPTGALERPGHLNANKCISYLTIEHKGDIPSEQASRLGDRLYGCDTCQEVCPWNRFASPTREAAFSPSPAFLSLKKEDLRCFTRDDYNRIFAGSAVKRAKYEGLIRTINNKKE

SEQ ID NO: 79141 - protein, 339 aa, Parabacteroides goldsteinii
  misc_feature (1)..(339): tr|A0A0F5JDG9|A0A0F5JDG9_9BACT Epoxyqueuosine reductase OS=Parabacteroides goldsteinii DSM 19448 = WAL 12034 O X=927665 GN=queG PE=3 SV=1
MHSLSILIKNKAKELGFDACGIAEVASADTEALFFDRWIAEGCHAGMKYMENYRDIRLDPAGLVEGARSVISVALNYYPPQKQFPGSPRISYYAYGKDYHIVVKDKLRQLWEYITSLVPVLDTGPQVSRPFRPENEETSSSAAPCQARGQADSTLPAARLFTDSAPILERYWAWKAGLGWIGKNTNLIIPGKGSFFFLGEIVTTLELDYDTPQKNRCGACRRCLDACPTGALERPGHLNANKCISYLTIEHKGDIPSEQASRLGDRLYGCDTCQEVCPWNRFASPTREAAFSPSPAFLSLKKEDLRCFTRDDYNRIFAGSAVKRAKYEGLIRTINNKKE

SEQ ID NO: 79142 - protein, 328 aa, Parabacteroides gordonii
  misc_feature (1)..(328): tr|A0A0F5JHJ9|A0A0F5JHJ9_9BACT Epoxyqueuosine reductase OS=Parabacteroides gordonii MS-1 = DSM 23371 OX=120361 0 GN=queG PE=3 SV=1
MADLSTQIKNKANQLGFDACGIAEVASADTEALFFDRWIAEGCHAGMKYMENYRDIRLNPVGLVEGARSVISVALNYYPAVKQSPDAPRISYYAYGKDYHLVVKDKLRQLWQYITDLVPVLDTGSQANRPDQSDIHTDHPSVARIFTDSAPILERYWAWKAGLGWIGKNTNLIIPGKGSFFFLGEIVTTLELDYDHPQANRCGSCRRCLDACPTGALERPGHLDAGKCLSYLTIEHKGDIPTEQAARLGNRLYGCDTCQEVCPWNRFARPTREAAFHPTPDFLSLQKESLQDFTREDYNRIFAKSAVKRAKYEGLIRTISNKKDINNK

SEQ ID NO: 79143 - protein, 332 aa, Parabacteroides johnsonii
  misc_feature (1)..(332): tr|A0A1Y3ZIG5|A0A1Y3ZIG5_9BACT Epoxyqueuosine reductase OS=Parabacteroides johnsonii OX=387661 GN=B5F96_02430 PE=4 SV=1
MLPASEIKEKAKEIGFDACGIAQVATADSEALFFDKWLKEGNHAGMAYMENHREIRLNPARLVEGAKTVISVALNYYPEQKLPPEAPHIAYYAYGKDYHLVVKEMLSELWTALFPRGAREQGGKGMDRNGQFFCDPARGAGTGQADVTAARFFTDSAPILERYWAWKAGLGWIGKNTNLIIPGKGSFFFLGEIVTTLEADHYDTPQKNRCGSCSRCLEACPTGALEGPCHLNARKCLSYLTIENRGEIPAEQAVRLGSRLYGCDTCQEVCPWNRFARPTRIEAFRPKPALLSLRKEDLKVFSREEYNRIFAKSAVKRAKYEGLIRNIHNLKD

SEQ ID NO: 79144 - protein, 339 aa, Parabacteroides johnsonii
  misc_feature (1)..(339): tr|B7B6Q6|B7B6Q6_9BACT Putative iron-sulfur cluster-bin ding protein OS=Parabacteroides johnsonii DSM 18315 OX= 537006 GN=PRABACTJOHN_00701 PE=4 SV=1
MSSKCFNMLPASEIKEKAKEIGFDACGIAQVATADSEALFFDKWLKEGNHAGMAYMENHREIRLNPARLVEGAKTVISVALNYYPEQKLPPEAPHIAYYAYGKDYHLVVKEMLSELWTALFPRSAREQGGKGMDRNGQFFCDPARGAGTGQADVTAARFFTDSAPILERYWAWKAGLGWIGKNTNLIIPGKGSFFFLGEIVTTLEADHYDTPQKNRCGSCSRCLEACPTGALEGPCHLNARKCLSYLTIENRGEIPAEQAVRLGSRLYGCDTCQEVCPWNRFARPTRIEAFRPKPALLSLRKEDLKVFSREEYNRIFAKSAVKRAKYEGLIRNIHNLKD

SEQ ID NO: 79145 - protein, 335 aa, Parabacteroides merdae
  misc_feature (1)..(335): tr|A0A3E4ZZT2|A0A3E4ZZT2_9BACT tRNA epoxyqueuosine(34) reductase QueG OS=Parabacteroides merdae OX=46503 GN=qu eG PE=4 SV=1
MLPAIEIKEKAKEIGFDACGIAQVAAADSEALFFDRWLKEGNHAGMAYMENHREIRLNPAGLVEGAKTVISVALNYYPEQKLPPEAPHIAYYAYGKDYHLVVKEMLSELWTALFPRPARDRIETDRKDMDRNGLFFCDPASSAGTEQADVTAARFFTDSAPILERYWAWKAGLGWIGKNTNLIIPGKGSFFFLGEIVTTLEADQYDTPQKNRCGSCSRCLDACPTGALEGPRHLNARKCLSYLTIENRGEIPTEQASRLGNRLYGCDTCQEVCPWNRFARPTQIEAFRPKPALLSLRKEDLKVFSREDYNRIFAKSAVKRAKYEGLIRNIHNLKD

SEQ ID NO: 79146 - protein, 335 aa, Parabacteroides merdae
  misc_feature (1)..(335): tr|K5ZMP1|K5ZMP1_9BACT Uncharacterized protein OS=Parab acteroides merdae CL03T12C32 OX=999420 GN=HMPREF1060_02 005 PE=4 SV=1
MLPAIEIKEKAKEIGFDACGIAQVAAADSEALFFDRWLKEGNHAGMAYMENHREIRLNPAGLVEGAKTVISVALNYYPEQKLPPEAPHIAYYAYGKDYHLVVKEMLSELWTALFPRPARDRIETDGKGMDRNGLFFCDPASSAGTEQADVTAARFFTDSAPILERYWAWKAGLGWIGKNTNLIIPGKGSFFFLGEIVTTLEADQYDTPQKNRCGSCSRCLDACPTGALEGPRHLNARKCLSYLTIENRGEIPTEQASRLGNRLYGCDTCQEVCPWNRFARPTQIEAFRPKPTLLSLRKEDLKVFSREDYNRIFAKSAVKRAKYEGLIRNIHNLKD

SEQ ID NO: 79147 - protein, 327 aa, Parabacteroides sp.
  misc_feature (1)..(327): tr|A0A354WUY7|A0A354WUY7_9BACT tRNA epoxyqueuosine(34) reductase QueG OS=Parabacteroides sp. OX=1869337 GN=que G PE=4 SV=1
  misc_feature (123)..(125): Xaa can be any naturally occurring amino acid
MVTAEYVKQEALKNGFAACGIAPAMAASSEAVFLDEWLKSGSHAGMSYMANHRDLRLDPQKLVEGAKSIISVALNYYPSKKRAAEELYIAYYAYGKDYHRVLKDKLYTLWQVILGAMPETKGXXXVFTDSAPILERYWAWRAGLGWIGKNTNLIIPRRGSFFFLGEIVTTLELDAYDVPLKSRCGTCTRCLDACPTKALHRPYCLDANRCLSYLTIENRGGIPEGLAKSLGNRLYGCDTCQLVCPWNRFASPTEEPAFQPSMELLRLRWDDLNEFSREDYARIFSGSAVKRAKYEGLVRTIHCLKANDEKENNAKNNDLESDSFGKK

SEQ ID NO: 79148 - protein, 348 aa, Parabacteroides sp.
  misc_feature (1)..(348): tr|A0A417L7H3|A0A417L7H3_9BACT tRNA epoxyqueuosine(34) reductase QueG OS=Parabacteroides sp. TM07-1AC OX=22923 63 GN=queG PE=4 SV=1
MNLSAQIKNKTKELGFDACGIAEVASADTEALFFDRWIAEGCHAGMKYMENYRDIRLNPAGLVEGARSVISVALNYYPAQKQSPDAPRISYYAYGKDYHLVLKDKLRQLWQYITEELLPTFPQALDSFGQQVVTGSNFSPLERGQEGGNPSAPENLEARVFTDSAPLLERYWAWKAGLGWIGKNTNLIIPGKGSFFFLGEIVTTLELDYDSPQENRCGNCRRCLDACPTGALESARHLNANKCISYLTIEHKEDIPSELASRLGNRLYGCDTCQEVCPWNRFAVPTREETFIPSPAFLSFKKEDLTDFTREDYNRIFAKSAVKRAKYEGLIRTIANKRKIINNKKDKP

SEQ ID NO: 79149 - protein, 412 aa, Paraburkholderia aromaticivorans
  misc_feature (1)..(412): tr|A0A248VHG6|A0A248VHG6_9BURK Epoxyqueuosine reductase OS=Paraburkholderia aromaticivorans OX=2026199 GN=queG PE=3 SV=1
MNRSPESPVSCTPASDDDARAERHFDETALNALALNIKAWGRELGFGAIGISDTDLSAAEAPLAAWLEAGCHGEMDYMAKHGMKRARPAELVAGTRRVITARIAYLPALTLNGKAPESALQDGAPTQDWRAAEHARLADPSAAVVSVYARGRDYHKVMRNRLQQLAEKIEAAIGAFGYRVFTDSAPVLEVELAQKAGIGWRGKHTLLLQRDAGSLFFLGEIYVDVPLPTDADTLPEVAPETPGSHCGSCTRCIGACPTGAIVAPYKVDARLCISYLTIELKGSIPLDMRPLIGNRVYGCDDCQLVCPWNKFAQAAPVADFDVRHGLDRASLVELFSWSADEFDTRMQGSAIRRIGYESWLRNLAVGMGNALRASPDSLSGTAREAIVHALRARAGDASPVVREHVEWALEAA

SEQ ID NO: 79150 - protein, 413 aa, Paraburkholderia aspalathi
  misc_feature (1)..(413): tr|A0A1I7DLT7|A0A1I7DLT7_9BURK Epoxyqueuosine reductase OS=Paraburkholderia aspalathi OX=1324617 GN=queG PE=3 SV=1
MNRSPESPVPCTPASNDDVRAERHFDEAALSALALNIKTWGRELGFGAIGISDTDLSAAEAPLAAWLEAGCHGEMDYMAKHGMKRARPAELVAGTRRVITARIAYLPAETLSGKAHESALQDVPPAPPDWRAAEHARLADPSAAVVSIYARGRDYHKVMRNRLQHLAEKIEAEIGAFGYRVFTDSAPVLEVELAQKAGIGWRGKHTLLLQRDAGSLFFLGEIYVDVPLPTDAETSPDDAPETPGSHCGSCTRCIDACPTGAIVAPYKVDARLCISYLTIELKGNIPLEMRPLIGNRVYGCDDCQLVCPWNKFAQAAPVADFDVRHGLDRATLVELFAWSADEFDTRMQGSAIRRIGYESWLRNLAVGMGNALRASSESLSVDAREAIVDALKLRVEDPSAVVREHVEWALEAA

SEQ ID NO: 79151 - protein, 434 aa, Paraburkholderia azotifigens
  misc_feature (1)..(434): tr|A0A5C6VVU9|A0A5C6VVU9_9BURK Epoxyqueuosine reductase OS=Paraburkholderia azotifigens OX=2057004 GN=queG PE= 3 SV=1
MNQGQQHPTPDPQEDPKRDPHSSPRATDDEAPVTRRFDEAQLAALASRIREWGRELGFGAVGISDIDLSHAEAGLAAWLDAGCHGEMDYMAKHGMKRARPAELVAGTRRVISVRMAYLPAHLPAHLHAHPTDSTDARKAAESVVSDVQHDWRLEERARLDDPSAAVVSIYARGRDYHKVMRNRLQQLAERIEGEIGPYGYRVFTDSAPVLEVELAQKAGTGWRGKHTLLLQRDAGSLFFLGEIFVDLPLPTDAETSPESAPEKSGAHCGSCTRCIGACPTGAIVGPYQVDARRCISYLTIELKGSIPQDLRPLIGNRVYGCDDCQLACPWNKFAQAAPVADFDVRHGLDRASLVELFGWSAADFDTRMQGSAIRRIGYECWLRNIAVGMGNALRAARDALSADARAAIVDALRKRADDPSPLVREHVEWALEAA

SEQ ID NO: 79152 - protein, 421 aa, Paraburkholderia bryophila
  misc_feature (1)..(421): tr|A0A329D103|A0A329D103_9BURK Epoxyqueuosine reductase OS=Paraburkholderia bryophila OX=420952 GN=queG PE=3 S V=1
MNRSPESPVSSTPASSHDAGAERPFDEAALNALALDIKSWGRELGFGAIGISDTDLSAAEAPLAAWLEAGCHGEMDYMAKHGMKRARPAELVAGTRRVITARIAYLPAQTLTGKAQESALQDAPLNAPLMTPLTQDWRAAETARLADPAAAVVSIYARGRDYHKVMRNRLQQLAEKIEAGIGAFGYRVFTDSAPVLEVELAQKAGIGWRGKHTLLLQRDAGSLFFLGEIYVDVPLPTDAEIAPELAPQTPGAHCGSCTRCIGACPTGAIVAPYKVDARLCISYLTIELKGSIPVEMRPLIGNRVYGCDDCQLVCPWNKFAQAAPVADFDVRHGLDRASLVELFAWSADDFDTRMQGSAIRRIGYESWLRNLAVGMGNALRAASPDSLSEEARERIVESLRLRADDPSAVVREHVEWALEAA

SEQ ID NO: 79153 - protein, 434 aa, Paraburkholderia caballeronis
  misc_feature (1)..(434): tr|A0A1H7R0B5|A0A1H7R0B5_9BURK Epoxyqueuosine reductase OS=Paraburkholderia caballeronis OX=416943 GN=queG PE= 3 SV=1
MQAPSDAHVCAAGDARPPREAPAPGVHPLDEAALAALAARIRAWGRELGFGAIGISDTDLSDAEAGLAAWLEAGNHGEMDYMAKHGMKRARPAELVAGTRRVITARMAYLPASTLAPHADGKARESLAPSVSDSGAADERVLRDDESALDWRAREQARLADPQAAVVSIYARGRDYHKVLRARLQQLATRIEAEVGAYGYRVFTDSAPVLEVELAQKAGIGWRGKHTLLLQRDAGSLFFLGEIYVDLPLPADADEPSSAAPETPGAHCGSCARCIGACPTGAITGPYRVDARRCISYLTIELAGSIPEELRPLIGNRVYGCDDCQLVCPWNKFAQAAPVADFDVRHGLDRATLAELFGWTDAQFDERMQGSAIRRIGYERWLRNVAVAIGNALRSGGGALPAAARAELVAALRAREHDASALVREHVQWALAAA

SEQ ID NO: 79154 - protein, 415 aa, Paraburkholderia caledonica
  misc_feature (1)..(415): tr|A0A2Z5MDC2|A0A2Z5MDC2_9BURK Epoxyqueuosine reductase OS=Paraburkholderia caledonica OX=134536 GN=queG PE=3 SV=1
MNRSPESPVSPAPNAPTSSDEARAERQFDEAALHALARNIKTWGRELGFGAIGISDTDLSAAEAPLAAWLEAGCHGEMDYMAKHGMKRARPAELVAGTLRVITARIAYLPAHAMSGKPGESEPQEAPPSEDWRAVEHARLADPSAAVVSIYARGRDYHKVMRNRLQHLSEKIQAEIGAFGYRVFTDSAPVLEVELAQKAGIGWRGKHTLLLQRDAGSLFFLGEIYVDVPLPTDAETSPERAPETPGSHCGSCARCIGACPTGAIVAPYKVDARLCISYLTIELKGSIPVDMRPLIGNRVYGCDDCQLVCPWNKFAQAAPVADFDVRHGLDRASLVELFGWSADEFDTRMQGSAIRRIGYESWLRNLAVGMGNALRAPRESLSADARKAIVEALERRADDSSHVVREHVQWALEAA

SEQ ID NO: 79155 - protein, 422 aa, Paraburkholderia caribensis
  misc_feature (1)..(422): tr|A0A2T3Y3M9|A0A2T3Y3M9_9BURK Epoxyqueuosine reductase OS=Paraburkholderia caribensis OX=75105 GN=queG PE=3 S V=1
MNQGQQHSMSDPHRDPLSPLETTNDEAPATRHYDEAQLAALASRIKGWGRELGFGAVGISDIDLSHAEAGLAAWLDAGCHGEMDYMAKHGMKRARPAELVAGTRRVISVRMAYLPASSGARKGDESAVADVQHDWRLDERARLDDPAAAVVSIYARGRDYHKVMRNRLQQLAERIEAEIGPYGFRVFTDSAPVLEVELAQKAGTGWRGKHTLLLQRDAGSLFFLGEIFIDVPLPTDADASPESAPGSAPETPGAHCGSCTRCIGACPTGAIVAPYQVDARRCISYLTIELKGSIPQDLRPLIGNRVYGCDDCQLVCPWNKFAQAAPVADFDVRHGLDRASLVELFGWTASDFDTRMQGSAIRRIGYECWLRNLAVGMGNALRAARDTLSADARAAIVDALRQRAGDPSPLVREHVEWALEAA

SEQ ID NO: 79156 - protein, 418 aa, Paraburkholderia caribensis
  misc_feature (1)..(418): tr|A0A0P0R4P1|A0A0P0R4P1_9BURK Epoxyqueuosine reductase OS=Paraburkholderia caribensis MBA4 OX=1323664 GN=queG PE=3 SV=1
MNQGQQHSMSDPHRDPLSPLETTNDEAPATRHYDEAQLAALASRIKGWGRELGFGAVGISDIDLSHAEAGLAAWLDAGCHGEMDYMAKHGMKRARPAELVAGTRRVISVRMAYLPASSGARKGDESAVADVQHDWRLDERARLDDPAAAVVSIYARGRDYHKVMRNRLQQLAERIEAEIGPYGFRVFTDSAPVLEVELAQKAGTGWRGKHTLLLQRDAGSLFFLGEIFVDVPLPTDADTSPESAPETPGAHCGSCTRCIGACPTGAIVAPYQVDARRCISYLTIELKGSIPQDLRPLIGNRVYGCDDCQLVCPWNKFAQAAPVADFDVRHGLDRASLVELFGWTASDFDTRMQGSAIRRIGYECWLRNLAVGMGNALRAARDTLSADARAAIVDALRQRAGDPSPLVREHVEWALEAA

SEQ ID NO: 79157 - protein, 396 aa, Paraburkholderia diazotrophica
  misc_feature (1)..(396): tr|A0A1H6XMW6|A0A1H6XMW6_9BURK Epoxyqueuosine reductase OS=Paraburkholderia diazotrophica OX=667676 GN=queG PE =3 SV=1
MRHYDEAQLAALASRIRSWARELGFGAVGISDIDLSNAEAGLAAWLDAGCHGEMDYMAKHGMKRARPAELVAGTRRVISVRMAYLPAHLHRSSDVRKDDESASADTRSVQHDWRLEERARLNDPSAAVVSIYARGRDYHKVMRNRLQQLAGRIEAEVGPYGHRVFTDSAPVLEVELAQKAGTGWRGKHTLLLQRDAGSLFFLGEIFVDLPLPTDAETAPERAPETTGAHCGSCTRCIGACPTGAIVGPYQVDARRCISYLTIELKGSIPQDLRPLIGNRVYGCDDCQLVCPWNKFAQAAPVDDFHVRHGLDRASLVELFGWSAEDFDTRMQGSAIRRIGYECWLRNLAVGMGNALRAAPQSLSADARAAIVDALRKRADDPSPLVREHVEWALEAA

SEQ ID NO: 79158 - protein, 412 aa, Paraburkholderia dipogonis
  misc_feature (1)..(412): tr|A0A4Y8N9M9|A0A4Y8N9M9_9BURK Epoxyqueuosine reductase OS=Paraburkholderia dipogonis OX=1211383 GN=queG PE=3 SV=1
MNRSPESPVSCTPASSDDARAERHFDEAALKALALNIKTWGRELGFGAVGISDTDLSAAEAPLAAWLEAGCHGEMDYMAKHGMKRARPAELVAGTRRVITARIAYLPAQTLSGKARESALQDGPLTQDWRAAEHARLADPSAAVVSIYARGRDYHKVMRNRLQHLAEKIEAEIGAFGYRVFTDSAPVLEVELAQKAGIGWRGKHTLLLQRDAGSLFFLGEIYVDVPLPTDADTMPEVAPETPGSHCGSCTRCIGACPTGAIVAPYKVDARLCISYLTIELKGSIPLELRPLIGNRVYGCDDCQLVCPWNKFAQAAPVADFDVRHGLDRASLVELFAWSADEFDTRMQGSAIRRIGYESWLRNLAVGMGNALRASPDSLSEPAREAIVQALRMRADDASAVVREHVEWALEAA

SEQ ID NO: 79159 - protein, 439 aa, Paraburkholderia eburnea
  misc_feature (1)..(439): tr|A0A2S4MMW3|A0A2S4MMW3_9BURK Epoxyqueuosine reductase OS=Paraburkholderia eburnea OX=1189126 GN=queG PE=3 SV =1
MNPLLSPSNEARTLNAATASNPSNTASNLASGAGAAAREPAAPLDEAALAALAARIRAWGRELGFGAIGISDTDLSHAEAGLAAWLEAGCHGEMDYMAKHGMKRARPAALVAGTRRVITARMAYLPAATLDGGPHANASGKTPETPETPESPSQDWRRREHARLADPHAAVVSIYARGRDYHKVMRARLQQLAERIEAEIGAFGFRVFTDSAPVLEVELAQKAGIGWRGKHTLLLQRDAGSLFFLGEIYVDIPLPTDADDPASAAPETPGAHCGSCTRCIDACPTGAITGPYRVDARRCISYLTIELKGSIPLEMREQIGNRVYGCDDCQLVCPWNKFAQAAPVADFDVRHGLDRASLVELFGWSAAQFDERMQGSAIRRIGYESWLRNIAVAMGNALRNASAHDAPERREAIVAALRERAHDESAIVREHVTWALEAA

SEQ ID NO: 79160 - protein, 383 aa, Paraburkholderia endofungorum
  misc_feature (1)..(383): tr|A0A2P5K9T2|A0A2P5K9T2_9BURK Epoxyqueuosine reductase OS=Paraburkholderia endofungorum OX=417203 GN=queG PE= 3 SV=1
MKQPPDTEICRAPLTDAELASLARRVREWARELGFSAIGICDTDLSHAEAALAAWIDAGYHGEMDYMAKHGMKRARPAELVPGTQRVISARMPYLPAETPASWRAREHARLADPNAAVVSIYARGRDYHKVMRQRLQRLAERIEAAIGPLGYRVFTDSAPVLEVELAQKAGLGWRGKHTLLLDRDAGSLFFLGEIFVDVPLPTDAQSQPSRAPQHAGAHCGACTRCIDACPTGAIVAPYRLDARKCISYLTIELRGSIPVELREAIGNRVYGCDDCQLVCPWNKFAQPSGCADFDVRNGLDGAQLTELFSWSEQDFDTRLAGSAIRRIGYERWLRNLAVGLGNALRAGGGAAGRDAVLAALRKREDDPSALVREHVRWALDHG

SEQ ID NO: 79161 - protein, 417 aa, Paraburkholderia fungorum
  misc_feature (1)..(417): tr|A0A1H1DZH5|A0A1H1DZH5_9BURK Epoxyqueuosine reductase OS=Paraburkholderia fungorum OX=134537 GN=queG PE=3 SV =1
MNRSPESPESTVTSAHSSIATNAAESARHYDDAALNALALNIKSWGRELGFGAIGISDTDLSAAEAPLAAWLEAGCHGEMDYMAKHGMKRARPAELVAGTRRVITARIAYLPAETLNGAAHESGSSGGLSAQDWRSAEHARIADPSAAVVSVYARGRDYHKVMRNRLQHLAEKIEAEIGAFGFRVFTDSAPVLEVELAQKAGIGWRGKHTLLLQRDAGSLFFLGEIYVDVPLPTDAETSPDIAPETPGSHCGSCTRCIGACPTGAIVAPYKVDARLCISYLTIELKGSIPLEMRPLIGNRVYGCDDCQLVCPWNKFAQAAPVADFDVRHGLDRASLVDLFAWTADEFDTRMQGSAIRRIGYESWLRNLAVGMGNALRASPESLNTQARDAIVQALRQRAGDASDVVREHVQWALEAA

SEQ ID NO: 79162 - protein, 413 aa, Paraburkholderia fungorum
  misc_feature (1)..(413): tr|A0A2N8QJ72|A0A2N8QJ72_9BURK Epoxyqueuosine reductase OS=Paraburkholderia fungorum OX=134537 GN=queG PE=3 SV =1
MNRSPESPVSCTPASDDDAHAERRFDETALNALALDIKTWGRELGFGAIGISDTDLSAAEAPLAAWLDAGCHGEMDYMAKHGMKRARPAELVAGTRRVITARIAYLPAQTLSGKAHESALQDSPRIPQDWRAAEHARLADPSAAVVSIYARGRDYHKVMRNRLQQLAEKIEAAIGAFGYRVFTDSAPVLEVELAQKAGIGWRGKHTLLLQRDAGSLFFLGEIYVDVPLPTDAETSPDDAPETPGAHCGSCTRCIGACPTGAIVAPYKVDARLCISYLTIELKGNIPLEMRPLIGNRVYGCDDCQLVCPWNKFAQAAPVADFDVRHGLDRATLVELFAWSAEDFDTRMQGSAIRRIGYESWLRNLAVGMGNALRAPSEHLDAEARAAIVHALELRVGDPSAVVREHVEWALEAA

SEQ ID NO: 79163 - protein, 409 aa, Paraburkholderia ginsengiterrae
  misc_feature (1)..(409): tr|A0A1A9NH00|A0A1A9NH00_9BURK Epoxyqueuosine reductase OS=Paraburkholderia ginsengiterrae OX=1462993 GN=queG PE=3 SV=1
MNRSPESPVSCTPASVDDARAERHFDEAALKALALNIKTWGRELGFGAIGISDTDLSAAEAPLAAWLEAGCHGEMDYMAKHGMKRARPAELVAGTRRVITARIAYLPAHASSGKPHESASQDWQDWRLAEHARLADPSAAVVSIYARGRDYHKVMRNRLQHLAEKIEAEIGAFGYRVFTDSAPVLEVELAQKAGIGWRGKHTLLLQRDAGSMFFLGEIYVDVPLPTDAETVPEAAPETPGSHCGSCTRCIGACPTGAIVAPYKVDARRCISYLTIELKGRIPLEMRPLIGNRVYGCDDCQLVCPWNKFAQAAPVDDFDVRHGLDRASLVELFAWSAHEFDTRMQGSAIRRIGYESWLRNLAVGMGNALRASPESLSVPAREAIVQALRSRADDPSAIVREHVEWALEAA

SEQ ID NO: 79164 - protein, 407 aa, Paraburkholderia graminis
  misc_feature (1)..(407): tr|B1G269|B1G269_PARG4 Epoxyqueuosine reductase OS=Para burkholderia graminis (strain ATCC 700544 / DSM 17151 / LMG 18924 / NCIMB 13744 / C4D1M) OX=396598 GN=queG PE= 3 SV=1
MCPVSNAPATGDEARAERQFDEAALHALAQNIKTWGRELGFGAIGISDTDLSAAEAPLAAWLEAGCHGEMDYMAKHGMKRARPAELVAGTLRVITARIAYLPADVLNGKQPESDSSKGPLNQDWRGAEHARLADPAAAVVSIYARGRDYHKVMRNRLQHLSEKIQAEIGAFGYRVFTDSAPVLEVELAQKAGIGWRGKHTLLLQRDAGSLFFLGEIYVDVPLPTDAETSPEVAPETPGSHCGSCSRCIDACPTGAIVGPYKVDARLCISYLTIELKGSIPVEMRPLIGNRVYGCDDCQLVCPWNKFAQAAPVADFDVRHGLDRASLVELFGWSADDFDTRMQGSAIRRIGYESWLRNLAVGMGNALRASRDALSAEAREAIVEALRRRADDPSALVREHVQWALEAA

SEQ ID NO: 79165 - protein, 410 aa, Paraburkholderia hospita
  misc_feature (1)..(410): tr|A0A1H6PD11|A0A1H6PD11_9BURK Epoxyqueuosine reductase OS=Paraburkholderia hospita OX=169430 GN=queG PE=3 SV= 1
MSDPHRDPHSPLETTNNEAPVTRRHDDAQLAALASRIKGWGRELGFGAVGISDIDLSHAEAGLAAWLDAGCHGEMDYMAKHGMKRARPAELVAGTRRVISVRMAYLPASSGARKGDESAVADVQHDWRLDERARLEDPTAAVVSIYARGRDYHKVMRNRLQQLAERIEAEIGPYGYRVFTDSAPVLEVELAQKAGTGWRGKHTLLLQRDAGSLFFLGEIFVDVPLPTDAETSPESAPETPGAHCGSCTRCIGACPTGAIVAPYQVDARRCISYLTIELKGSIPQDLRPLIGNRVYGCDDCQLVCPWNKFAQAAPVADFDVRHGLDRASLVELFGWSASDFDTRMQGSAIRRIGYECWLRNLAVGMGNALRAARDTLSADARAAIVDALRQRADDPSPLVREHVEWALEAA

SEQ ID NO: 79166 - protein, 418 aa, Paraburkholderia hospita
  misc_feature (1)..(418): tr|A0A244DYZ7|A0A244DYZ7_9BURK Epoxyqueuosine reductase OS=Paraburkholderia hospita OX=169430 GN=queG PE=3 SV= 1
MNQGQQHSMSDPHRDPHSPLETTNNEAPVTRRHDDAQLAALASRIKGWGRELGFGAVGISDIDLSHAEAGLAAWLDAGCHGEMDYMAKHGMKRARPAELVAGTRRVISVRMAYLPASSGARKGDESAVADVQHDWRLDERARLEDPTAAVVSIYARGRDYHKVMRNRLQQLAERIEAEIGPYGYRVFTDSAPVLEVELAQKAGTGWRGKHTLLLQRDAGSLFFLGEIFVDVPLPTDAETSPESAPETPGAHCGSCTRCIGACPTGAIVAPYQVDARRCISYLTIELKGSIPQDLRPLIGNRVYGCDDCQLVCPWNKFAQAAPVADFDVRHGLDRASLVELFGWTASDFDTRMQGSAIRRIGYECWLRNLAVGMGNALRAAPDTLTADARAAIVDALRQRADDPSPLVREHVEWALEAA

SEQ ID NO: 79167 - protein, 402 aa, Paraburkholderia insulsa
  misc_feature (1)..(402): tr|A0A2T1B1T0|A0A2T1B1T0_9BURK Epoxyqueuosine reductase OS=Paraburkholderia insulsa OX=1441714 GN=queG PE=3 SV =1
MPASDDDAHAERRFDETALNALALDIKTWGRELGFGAIGISDTDLSAAEAPLAAWLDAGCHGEMDYMAKHGMKRARPAELVAGTRRVITARIAYLPAQTLSGKAHESALQDSPRIPQDWRAAEHARLADPSAAVVSIYARGRDYHKVMRNRLQQLAEKIEAAIGAFGYRVFTDSAPVLEVELAQKAGIGWRGKHTLLLQRDAGSLFFLGEIYVDVPLPTDAETSPDDAPETPGAHCGSCTRCIGACPTGAIVAPYKVDARLCISYLTIELKGNIPLEMRPLIGNRVYGCDDCQLVCPWNKFAQAAPVADFDVRHGLDRATLVELFAWSAEDFDTRMQGSAIRRIGYESWLRNLAVGMGNALRAPSEHLDADARAAIVHALELRVGDPSAVVREHVEWALEAA

SEQ ID NO: 79168 - protein, 395 aa, Paraburkholderia megapolitana
  misc_feature (1)..(395): tr|A0A1I3II56|A0A1I3II56_9BURK Epoxyqueuosine reductase OS=Paraburkholderia megapolitana OX=420953 GN=queG PE= 3 SV=1
MRRFDEAALTALALRIKTWGRELGFGALGISDTELPDAESGLAAWLEAGYHGEMDYMAKHGMKRARPAELVAGTRRVITARIAYLPAMTLTGTHAGKVTESDSSPAPDAPDWRADEMARLADPSAAVVSIYARGRDYHKVMRQRLQQLAERIEAEIGAYGYRVFTDSAPVLEVAFAQNAGIGWRGKHTLLLQRDAGSLFFLGEIYVDLPLPTDASIDPDSAPETAGAHCGSCTRCIDACPTGAIVEPYKVDARRCISYLTIELKGSIPEDMRPLIGNRVYGCDDCQLVCPWNKFAQAAPVADFDVRHGLDRASLVELFDWSASDFDTRMQGSAIRRIGYECWLRNLAVGMGNALRADAATLAGAARSAIVDALRRRADDPSPLVREHVQWALEAA

SEQ ID NO: 79169 - protein, 409 aa, Paraburkholderia monticola
  misc_feature (1)..(409): tr|A0A149PZ24|A0A149PZ24_9BURK Epoxyqueuosine reductase OS=Paraburkholderia monticola OX=1399968 GN=queG PE=3 SV=1
MNRSPKSPDSCTPATADDAARVSCAMSRFDEAALHALALDIKTWGRELGFGAIGISDTDLSAAEAPLAAWLEAGCHGEMDYMAKHGMKRARPAELVAGTRRVITARIAYLPAQTLEGAAAQAARDWRAAEHARLADPSTAVVSIYARGRDYHKVMRQRLQQLADRIEAAIGPFGYRVFTDSAPVLEVELAQKAGIGWRGKHTLLLQRDAGSLFFLGEIYVDIPLPTDAETVPEAAPETPGSHCGSCTRCIDACPTGAIVAPYKVDARRCISYLTIELKGSIPLDLRPLIGNRVYGCDDCQLVCPWNKFAQAAPVADFDVRHGLDRASLVELFAWSADEFDTRMQGSAIRRIGYESWLRNLAVGMGNALRAAPASLDAEARAAIVRALRQRVDDPSTVVREHVEWALEAA

SEQ ID NO: 79170 - protein, 421 aa, Paraburkholderia phenazinium
  misc_feature (1)..(421): tr|A0A1N6L2I8|A0A1N6L2I8_9BURK Epoxyqueuosine reductase OS=Paraburkholderia phenazinium OX=60549 GN=queG PE=3 SV=1
MNRSPESPVSCTPASDDDAPAMRRFDEAALAALALRIKAWGRELGFGAVGISDTDLSAAEANLAAWLEEGCHGEMDYMAKHGMKRARPAELVAHTRRVISARMAYLPAHLSSHSPSRSSPTEEAGKAGESPQQEGRNWRAVEHARLGDPAAAVVSIYARGRDYHKVMRNRLQQLAEKIEAEIGAYGYRVFTDSAPVLEVELAQKAGVGWRGKHTLLLQRDAGSLFFLGEIYVDVPLPTDAETSPDDAPQTPGAHCGSCTRCIDACPTGAIVAPYKVDARLCISYLTIELKGSIPPDLRPLIGNRVYGCDDCQLVCPWNKFAQAAPVADFDVRHGLDRATLVDLFDWSADEFDTRMQGSAIRRIGYECWLRNLAVGMGNALRADPASFAGGARAAIVDALRRRVEDPSPLVREHVEWALEAA

SEQ ID NO: 79171 - protein, 420 aa, Paraburkholderia phenazinium
  misc_feature (1)..(420): tr|A0A4R7RHD1|A0A4R7RHD1_9BURK Epoxyqueuosine reductase OS=Paraburkholderia phenazinium OX=60549 GN=queG PE=3 SV=1
MNRSPESPVSCTPASDDDARAMRHLDEAALALRIKAWGRELGFGAIGISDTDLSAAEAGLAAWLEEGCHGEMDYMAKHGMKRARPAELVAHTRRVISARMAYLPGDSLSYGLLVCLTRQRGKLGESVLTEPTEARNWRADEFARINDPSAAVVSIYARGRDYHKVMRNQLQRLADKIEAEIGAYGYRVFTDSAPVLEIELAQKAGIGWRGKHTLLLQRDSGSLFFLGEIYVDVPLPTDAQTTPERAPETPGAHCGSCTRCIDACPTGAIVAPYKVDARLCISYLTIELKGSIPLELRPLIGNRVYGCDDCQLVCPWNKFAQAAPVADFDVRHGLDRATLVELFAWSADDFDTRMQGSAIRRIGYEAWLRNLAVGMGNALRADPASLSGDARAAIVDALRQRADDPSALVREHVEWALEAA

SEQ ID NO: 79172 - protein, 404 aa, Paraburkholderia phenoliruptrix
  misc_feature (1)..(404): tr|K0DSQ3|K0DSQ3_9BURK Epoxyqueuosine reductase OS=Para burkholderia phenoliruptrix BR3459a OX=1229205 GN=queG PE=3 SV=1
MSDASASGGEARAERQFDEAALRALAQNIKTWGRELGFGAIGISDTDLSAAEAPLAAWLEAGCHGEMDYMAKHGMKRARPAELVAGTLRVITARIAYLPQQSMSGKPAESERHEAPHNRDWRAAEQARLADPSAAVVSIYARGRDYHKVMRNRLQHLSEKIQAEIGAFGYRVFTDSAPVLEVELAQKAGIGWRGKHTLLLQRDAGSLFFLGEIYVDVPLPTDAETSPEVAPETPGSHCGSCSRCIGACPTGAIVGPYKVDARLCISYLTIELKGSIPVEMRPLIGNRVYGCDDCQLVCPWNKFAQAAPVADFDVRHGLDRASLLELFAWSADEFDTRMQGSAIRRIGYESWLRNLAVGMGNALRASPDALSDEAREAIVEALTRRADDPSPLVREHVQWALEAA

SEQ ID NO: 79173 - protein, 430 aa, Paraburkholderia phymatum
  misc_feature (1)..(430): tr|B2JDT7|B2JDT7_PARP8 Epoxyqueuosine reductase OS=Para burkholderia phymatum (strain DSM 17167 / CIP 108236 / LMG 21445 / STM815) OX=391038 GN=queG PE=3 SV=1
MNQGQQHPMPDPQTGAQCDPHSSPRATDEATDVTRRFDEAQLAALASRIRDWGRELGFGAVGISDIDLSHAEAGLAAWLDAGCHGEMDYMAKHGMKRARPAELVAGTRRVISVRMAYLPTHATPHAADSPAARKDAESAAADVQHDWRLEERARLNDPSAAVVSIYARGRDYHKVMRNRLQHLAERIEGEIGPYGYRVFTDSAPVLEVELAQQAGTGWRGKHTLLLQRDAGSLFFLGEIFVDLPLPTDAETSPERAPETPGAHCGSCTRCIGACPTGAIVAPYQVDARRCISYLTIELKGSIPQDLRPLIGNRVYGCDDCQLACPWNKFAQAAPVADFDVRHGLDRASLVELFGWSADEFDTRLQGSAIRRIGYECWLRNLAVGMGNALRAARESLPAEARAAIVDALRRRAGDPSPLVREHVAWALEAA

SEQ ID NO: 79174 - protein, 412 aa, Paraburkholderia phytofirmans
  misc_feature (1)..(412): tr|B2SY71|B2SY71_PARPJ Epoxyqueuosine reductase OS=Para burkholderia phytofirmans (strain DSM 17436 / LMG 22146 / PsJN) OX=398527 GN=queG PE=3 SV=1
MNRSPESPVSCTPASNDDARAERHFDEAALKALALNIKTWGRELGFGAVGISDTDLSAAEAPLAAWLEAGCHGEMDYMAKHGMKRARPAELVAGTRRVIMARIAYLPAQTLSGKARESALQDGPLTQDWRAAEHARLADPSAAVVSIYARGRDYHKVMRNRLQHLAEKIEAEIGAFGYRVFTDSAPVLEVELAQKAGIGWRGKHTLLLQRDAGSLFFLGEIYVDVPLPTDADTMPEIAPETPGSHCGSCTRCIGACPTGAIVAPYKVDARLCISYLTIELKGSIPLELRPLIGNRVYGCDDCQLVCPWNKFAQAAPVADFDVRHGLDRASLVELFAWSADEFDTRMQGSAIRRIGYESWLRNLAVGMGNALRASPDSLSEAAREAIVQALRMRMDDASAVVREHVEWALEAA

SEQ ID NO: 79175 - protein, 431 aa, Paraburkholderia piptadeniae
  misc_feature (1)..(431): tr|A0A1N7STN3|A0A1N7STN3_9BURK Epoxyqueuosine reductase OS=Paraburkholderia piptadeniae OX=1701573 GN=yjeS PE= 3 SV=1
MNQSQQHPNALSEQHRERRPDAHSPPRAANDEAPATPHYDEAQLAALASRIRSWARELGFGAVGISDIDLSNAEAGLAAWLDAGCHGEMDYMAKHGMKRARPAELVAGTRRVISVRMDYLPAHLPRSSDARKDDESAHSDVQHDWRLEERARLNDPSAAVVSIYARGRDYHKVMRNRLQQLADRIEAEVGPYGHRVFTDSAPVLEVELAQKAGTGWRGKHTLLLQRDAGSLFFLGELFVDLPLPTDAETAPERAPETPGAHCGSCARCIGACPTGAIVGPYQVDARRCISYLTIELKGSIPQDLRPLIGNRVYGCDDCQLVCPWNKFAQAAPVDDFDVRHGLDRASLVELFGWSAEDFDTRMQGSAIRRIGYECWLRNLAVGMGNALRAAPQSISAGAREAIVDALRKRADDPSPLVREHVEWALEAAWQR

SEQ ID NO: 79176 - protein, 433 aa, Paraburkholderia rhizosphaerae
  misc_feature (1)..(433): tr|A0A4V3HFI3|A0A4V3HFI3_9BURK Epoxyqueuosine reductase OS=Paraburkholderia rhizosphaerae OX=480658 GN=queG PE =3 SV=1
MDRSQQHPVSGTPDSNGGPRAHPTLPYRFDDAALAALASRIRTWGRELGFGEVGISDTDLASAEAGLAAWLDAGWHGEMDYMAKHGMKRARPAELVAGTLRVITARMAYLPASTEAGKGGESGVESAAAREPGDGVRGKLVADSPAQQDWRRDEHARLADPSAAVVSIYARGRDYHKVMRNRLQQLAERIEHEVGGYGFRVFTDSAPVLEVELAQKAGVGWRGKHTLLLQRDAGSLFFLGEIYVDLPLPTDAQRTPERAPQTAGAHCGHCTRCIDACPTGAIVGPYKVDARRCISYLTIELKGSIPQDLRPLIGNRVYGCDDCQLACPWNKFAQAAPVADFDVRHGLDRASLTDLFGWSAADFDARMQGSAIRRIGYECWLRNLAVGMGNALRADPASLAPHVREAIVDALRQRADDASPLVREHVQWALEAA

SEQ ID NO: 79177 - protein, 399 aa, Paraburkholderia rhizoxinica
  misc_feature (1)..(399): tr|E5AMA7|E5AMA7_PARRH Epoxyqueuosine reductase OS=Para burkholderia rhizoxinica (strain DSM 19002 / CIP 109453 / HKI 454) OX=882378 GN=queG PE=3 SV=1
MDEARLVHLALRTIERMKQPPDTEIHRAMLTDADLASLARRVREWARELGFSAIGICDIDLSHAEAGLAAWIDAGYHGEMDYMAKHGMKRARPAELVPGTQRVISARMPYLPAGTPASWRAREHARLADPSAAVVSIYARGRDYHKVMRQRLQRLAERIEAAIGPLGYRVFTDSAPVLEVELAQKAGLGWRGKHTLLLDRDAGSLFFLGEIFVDVPLPTDAQSQPSRAPQQAGAHCGACTRCIDACPTGAIVAPYRLDARKCISYLTIELRGSIPVELREAIGNRVYGCDDCQLVCPWNKFAQPSGCADFDVRNGLDGAQLIELFGWSEQDFDTRLAGSAIRRIGYERWLRNLAVGLGNALRAGGGAQGRDAVLAALRKREDDPSALVREHVRWALGYE

SEQ ID NO: 79178 - protein, 415 aa, Paraburkholderia rhynchosiae
  misc_feature (1)..(415): tr|A0A2N7WRE0|A0A2N7WRE0_9BURK Epoxyqueuosine reductase OS=Paraburkholderia rhynchosiae OX=487049 GN=queG PE=3 SV=1
MNRSPESPVSPVSNAPTPCDEARAERQFDEAALQALARNIKTWGRELGFGAIGISDTDLSAAEAPLAAWLEAGCHGEMDYMAKHGMKRARPAELVAGTLRVITARIAYLPAHASSGKPDESERWEGPLTQDWRAVEHARLADPSAAVVSIYARGRDYHKVMRNRLQHLSEKIQAEIGAFGYRVFTDSAPVLEVELAQKAGIGWRGKHTLLLQRDAGSLFFLGEIYVDVPLPTDAETSPEVAPETPGSHCGSCARCISACPTGAIVAPYKVDARLCISYLTIELKGSIPVDMRPLIGNRVYGCDDCQLVCPWNKFAQAAPVADFDVRHGLDRASLVDLFGWSADDFDTRMQGSAIRRIGYESWLRNLAVGMGNALRASRETLNADARKAIVEALKRRADDPSAVVREHVQWALEAA

SEQ ID NO: 79179 - protein, 415 aa, Paraburkholderia ribeironis
  misc_feature (1)..(415): tr|A0A1N7S3E0|A0A1N7S3E0_9BURK Epoxyqueuosine reductase OS=Paraburkholderia ribeironis OX=1247936 GN=yjeS PE=3 SV=1
MKRSPESPLSSAPASVDAKGAVRHFDEAALNALALNIKTWGRELGFGAIGISDTDLRAAEAPLAAWLEAGCHGEMDYMAKHGMKRARPAELVAGTRRVITARIAYLPIETLSGKAHESTAQDGPLVPHWPQWRAAEQAQLADPSAAVVSIYARGRDYHKVMRNRLQHLAEKIEAEIGPFGYRVFTDSAPVLEVELAQKAGIGWRGKHTLLLQREAGSLFFLGEIYVDVPLPTDAETSPDAAPETPGSHCGSCTRCIGACPTGAIVAPYKVDARRCISYLTIELKGSIPLDMRPLIGNRVYGCDDCQLVCPWNKFAQAAPVADFDVRHGLDRASLVELFAWSADEFDTRMQGSAIRRIGYECWLRNLAVGMGNALRAPSGSLSAEAREAIVHALKLRADDPSALVREHVEWALEAA

SEQ ID NO: 79180 - protein, 401 aa, Paraburkholderia sacchari
  misc_feature (1)..(401): tr|A0A0A6T045|A0A0A6T045_9BURK Epoxyqueuosine reductase OS=Paraburkholderia sacchari OX=159450 GN=queG PE=3 SV =1
MPVETPANSPAPLDEAALAALADRIRAWGRELGFGAIGISDTDLSHAEAGLAAWLEAGCHGEMDYMAKHGMKRARPAELVAGTRRVITARMAYLPAATLADKALSDSWRQHERARLGDPHAAVVSIYARGRDYHKVLRARLQQLAERIEAEIGAFGFRVFTDSAPVLEVELAQKAGIGWRGKHTLLLQRDAGSLFFLGEIYVDVPLPTDAENTHDARDRVSQAPEQPGAHCGSCTRCIGACPTGAIVGPYRVDARRCISYLTIELKGSIPLELRELIGNRVYGCDDCQLVCPWNKFAQAAPVADFDVRHGLDRASLVELFGWSAEQFDERMQGSAIRRIGHEAWLRNIAVAMGNALRAPRDSEEGLDRQEGRAAIVAALRAREHDASALVREHVQWALEAA

SEQ ID NO: 79181 - protein, 421 aa, Paraburkholderia sartisoli
  misc_feature (1)..(421): tr|A0A1H3YRT4|A0A1H3YRT4_9BURK Epoxyqueuosine reductase OS=Paraburkholderia sartisoli OX=83784 GN=queG PE=3 SV =1
MNRSPEPPESCTPASDDDVRAVRHFDEAALEALAQRIKTWGRELGFSAVGISDTDLTAAEAGLAAWLEAGCHGEMDYMAKHGMKRARPAELVAGTLRVITARIAYLPAETLVGKRVESHAAAASNLAESAAQAVPHDWRAQETLRLADPSAAVVSIYARGRDYHKVMRNRLQQLAEKVEAEIGAFGFRVFTDSAPVLEIELAQKAGIGWRGKHTLLLQRDAGSLFFLGEIYVDVPLPTDAQTTPERAPETPGAHCGSCTRCIEACPTGAIVEPYRVDARRCISYLTIELKGSIPQDLRPLIGNRVYGCDDCQTVCPWNKFAQAAPVADFDVRHGLDRATLVDLFAWSADDFDTRMQGSAIRRIGYESWLRNLAVGMGNALRVDRASLSIDARAAIVDALRGRAGDASAIVREHVEWALEAA

SEQ ID NO: 79182 - protein, 413 aa, Paraburkholderia sediminicola
  misc_feature (1)..(413): tr|A0A419U9Y2|A0A419U9Y2_9BURK Epoxyqueuosine reductase OS=Paraburkholderia sediminicola OX=458836 GN=queG PE= 3 SV=1
MNRSPESPVSCTPASNDDARAERHFDEAALNALALNIKTWGRELGFGAIGISDTDLSTAEAPLAAWLDAGCHGEMDYMAKHGMKRARPAELVAGTRRVITARIAYLPAQTLSGKAHESALQDTPLAPQDWRAAEHARLADPSAAVVSIYARGRDYHKVMRNRLQHLAEKIEAEIGAFGYRVFTDSAPVLEVELAQKAGIGWRGKHTLLLQRDAGSLFFLGEIYVDVPLPTDAETSPDDAPETPGSHCGSCTRCIGACPTGAIVAPYKVDARLCISYLTIELKGNIPLEMRPLIGNRVYGCDDCQLVCPWNKFAQAAPVADFDVRHGLDRATLVELFAWSADEFDTRMQGSAIRRIGYESWLRNLAVGMGNALRSSSESLSADAREAIVQALKLRADDPSAVVREHVEWALEAA

SEQ ID NO: 79183 - protein, 413 aa, Paraburkholderia sediminicola
  misc_feature (1)..(413): tr|A0A495G7Y4|A0A495G7Y4_9BURK Epoxyqueuosine reductase OS=Paraburkholderia sediminicola OX=458836 GN=queG PE= 3 SV=1
MNRSPESPVSCTPASNDDARAERHFDEAALNALALNIKTWGRELGFGAIGISDTDLSTAEAPLAAWLDAGCHGEMDYMAKHGMKRARPAELVAGTRRVITARIAYLPAQTLSGKAHESALQDTPLAPQDWRAAEHARLADPSAAVVSIYARGRDYHKVMRNRLQHLASKIEAEIGAFGYRVFTDSAPVLEVELAQKAGIGWRGKHTLLLQRDAGSLFFLGEIYVDVPLPTDAETSPDDAPETPGSHCGSCTRCIGACPTGAIVAPYKVDARLCISYLTIELKGNIPLEMRPLIGNRVYGCDDCQLVCPWNKFAQAAPVADFDVRHGLDRATLVELFAWSADEFDTRMQGSAIRRIGYESWLRNLAVGMGNALRSSSESLSADAREAIVQALKLRADDPSAVVREHVEWALEAA

SEQ ID NO: 79184 - protein, 419 aa, Paraburkholderia silvatlantica
  misc_feature (1)..(419): tr|A0A2V4TNK8|A0A2V4TNK8_9BURK Epoxyqueuosine reductase OS=Paraburkholderia silvatlantica OX=321895 GN=queG PE =3 SV=1
MPLDEAALAALAARIRTWGRELGFGAIGISDTDLSHAEAGLAAWLEAGCHGEMDYMAKHGMKRARPAELVAGTRRVITARMAYLPIDTLAPNAVGKTRESVSQGGPDRSGSAGTEAGTNGARERIHADWRLREHARLADPHAAVVSIYARGRDYHKVLRARLQQLAERIEAEIGQFGFRVFTDSAPVLEVELAQKAGVGWRGKHTLLLQRDAGSLFFLGEIYVDVPLPTDADAHERGAAGAAPETPGAHCGSCTRCIDACPTGAITGPYRVDARRCISYLTIELKGSIPLELRELIGNRVYGCDDCQLVCPWNKFAKAAPVADFDVRHGLDRASLVDLFGWSAAQFDERMQGSAIRRIGYESWSRNIAVAMGNALRAPREGADNGRAAARAAIVKALREREHDASAVVREHVLWALEAA

SEQ ID NO: 79185 - protein, 421 aa, Paraburkholderia sp.
  misc_feature (1)..(421): tr|A0A522HLD2|A0A522HLD2_9BURK Epoxyqueuosine reductase OS=Paraburkholderia sp. OX=1926495 GN=queG PE=3 SV=1
MNRSPEPPESCTPASDDDARAVRHFDEAALEALAQRIKTWGRELGFSAVGISDTDLTAAEAGLAAWLEAGCHGEMDYMAKHGMKRARPAELVAGTLRVITARIAYLPAETLEGKRVESHAAAASNLAESAAQAVPHDWRAQETLRLADPSAAVVSIYARGRDYHKVMRNRLQQLAEKVEAEIGAFGFRVFTDSAPVLEIELAQKAGIGWRGKHTLLLQRDAGSLFFLGEIYVDVPLPTDAQTTPERAPETPGAHCGSCTRCIEACPTGAIVEPYRVDARRCISYLTIELKGSIPQDLRPLIGNRVYGCDDCQTVCPWNKFAQAAPVADFDVRHGLDRATLVDLFAWSADDFDTRMQGSAIRRIGYESWLRNLAVGMGNALRADRASLSIDARAAIVDALRGRAGDASAIVREHVEWALEAA

SEQ ID NO: 79186 - protein, 440 aa, Paraburkholderia sp.
  misc_feature (1)..(440): tr|A0A4Q6X2I9|A0A4Q6X2I9_9BURK Epoxyqueuosine reductase OS=Paraburkholderia sp. UYCP14C OX=2511130 GN=queG PE= 3 SV=1
MNRSPKSPVSCTPASADDAARASGATSCFDEATLRALALDIKTWGRELGFGAIGISDTDLSAAEAPLAAWLEAGCHGEMDYMAKHGMKRARPAELVAGTRRVITVRIAYLPAQTPGGAASEQAHGQSHRSASESASQDVPQAIPQHTPHSTPHTRDWRAAEQARLADPSAAVVSIYARGRDYHKVMRQRLQHLAERIEAAIGPFGYRVFTDSAPVLEVELAQKAGIGWRGKHTLLLQRDAGSLFFLGEIYVDIPLPTDAETSPQAAPETPGSHCGSCTRCIGACPTGAIVAPYKVDARRCISYLTIELKGSIPLDLRPLIGNRVYGCDDCQLVCPWNKFAQAAPVADFDVRHGLDRASLVELFGWSAEDFDTRMQGSAIRRIGYECWLRNLAVGMGNALRAAPASLKADARAAIVRALRQRVDDPSALVREHVEWALEAA

SEQ ID NO: 79187 - protein, 436 aa, Paraburkholderia sprentiae
  misc_feature (1)..(436): tr|A0A1I9YKE0|A0A1I9YKE0_9BURK Epoxyqueuosine reductase OS=Paraburkholderia sprentiae WSM5005 OX=754502 GN=que G PE=3 SV=1
MNRSPKSPVSCTPASADDAARASGATSRLDEAALRALALDIKTWGRELGFGAIGISDTDLSAAEAPLAAWLEAGCHGEMDYMAKHGMKRARPAELVAGTRRVITARIAYLPALTLGADASERAPEGAAPGSPESLSQDVAQSASRPTPRARDWRAAEYARLADPSTAVVSIYARGRDYHKVMRQRLQQLADRIEAAIGPFGYRVFTDSAPVLEVELAQKAGIGWRGKHTLLLQRDAGSLFFLGEIYVDVPLPTDADTSPELAPETPGSHCGSCARCIGACPTGAIVAPYKVDARRCISYLTIELKGSIPLDMRPLIGNRVYGCDDCQLVCPWNKFAQAAPVADFDVRHGLDRASLVELFGWSAEDFDTRMQGSAIRRIGYESWLRNLAVGMGNALRAAPASLDADARAAIVRALRQRVDDPSGLVREHVEWALEAA

SEQ ID NO: 79188 - protein, 430 aa, Paraburkholderia susongensis
  misc_feature (1)..(430): tr|A0A1X7M4P8|A0A1X7M4P8_9BURK Epoxyqueuosine reductase OS=Paraburkholderia susongensis OX=1515439 GN=queG PE= 3 SV=1
MSASADAEPTPRDMPRFDEAALRALALDIKTWGRELGFGAIGISDTDLCAAEAPLAAWLEAGCHGEMDYMAKHGMKRARPAELVAGTRRVITARIAYLPASTLAGSAPGRAWEEASEGAYEGAYEAPESVSGSAPQDAQHTPRTRDWRAAEHARLADPSAAVVSIYARGRDYHKVMRNRLQHLAEKIEAAIGPFGYRVFTDSAPVLEVELAQKAGIGWRGKHTLLLQRDAGSLFFLGEIYVDIPLPTDAQTSPEAAPETPGSHCGSCTRCLGACPTGAIVAPYKVDARRCISYLTIELKGSIPLDMRPLIGNRVYGCDDCQLVCPWNKFAQAAPLADFDVRHGLDRASLVELFAWSADEFDTRMQGSAIRRIGYESWLRNLAVGMGNALRAAPGSLGDEARAAIVQALRQRAGDPSAVVREHVEWALEAA

SEQ ID NO: 79189 - protein, 418 aa, Paraburkholderia terrae
  misc_feature (1)..(418): tr|A0A2I8EGA5|A0A2I8EGA5_9BURK Epoxyqueuosine reductase OS=Paraburkholderia terrae OX=311230 GN=queG PE=3 SV=1
MNQGQQHSMSDPHRDPHSPLETTNDEAPVTRRHDDAQLAALASRIKDWGRELGFGAVGISDIDLSHAEAGLAAWLDAGCHGEMDYMAKHGMKRARPAELVAGTRRVISVRMAYLPASSGARKGDESAVADVQHDWRLDERARLQDPAAAVVSIYARGRDYHKVMRNRLQQLAERIEAEIGPYGYRVFTDSAPVLEVELAQKAGTGWRGKHTLLLQRDAGSLFFLGEIFVDVPLPTDAETSPESAPETPGAHCGSCTRCIGACPTGAIVAPYQVDARRCISYLTIELKGSIPQDLRPLIGNRVYGCDDCQLVCPWNKFAQAAPVADFDVRHGLDRASLVELFGWSASDFDTRMQGSAIRRIGYECWLRNLAVGMGNALRAARDTLSADARAAIVDALRQRADDPSPLVREHVEWALEAA

SEQ ID NO: 79190 - protein, 418 aa, Paraburkholderia terrae; identical to SEQ ID NO: 79166
  misc_feature (1)..(418): tr|I5D1I2|I5D1I2_9BURK Epoxyqueuosine reductase OS=Para burkholderia terrae BS001 OX=1171375 GN=queG PE=3 SV=1

SEQ ID NO: 79191 - protein, 405 aa, Paraburkholderia terricola
  misc_feature (1)..(405): tr|A0A1M6JCA7|A0A1M6JCA7_9BURK Epoxyqueuosine reductase OS=Paraburkholderia terricola OX=169427 GN=queG PE=3 S V=1
MSRTPASDDDARAERRLDEAALHALALDIKTWGRELGFAAIGISDTDLSAAEAPLAAWLEAGCHGEMDYMAKHGMKRARPAELVAGTRRVITARIAYLPARTLNGKANESALPDVPPAPRDWRAAEHARLADPSAAVVSIYARGRDYHKVMRNRLQQLAEKIEAAIGVFGYRVFTDSAPVLEVELAQKAGIGWRGKHTLLLQRDAGSLFFLGEIYVDVPLPTDAETSPDVAPETPGSHCGSCTRCIGACPTGAIVAPYKVDARRCISYLTIELKGNIPLEMRPLIGNRVYGCDDCQLVCPWNKFAQAAPVDDFDVRHGLDRASLVELFAWSAQEFDTRMQGSAIRRIGYESWLRNLAVGMGNALRASSESLSGDARKAIVEALRSRADDPSAVVREHVEWALEAA

SEQ ID NO: 79192 - protein, 458 aa, Paraburkholderia tropica
  misc_feature (1)..(458): tr|A0A1A5XN94|A0A1A5XN94_9BURK Epoxyqueuosine reductase OS=Paraburkholderia tropica OX=92647 GN=queG PE=3 SV=1
MNPSHSPLNQTLAAEAARAPDKASASRASSCAQQTQGAGASATLDAAALAALATQIRAWGRELGFGAIGISDTDLSHAEAGLAAWLEAGCHGEMDYMAKHGMKRARPVELVAGTRRVITARMAYLPAATLDPSAAAATEHATGQAAESASQGADEGRRGHAIHDDWRQREHARLADPHAAVVSIYARGRDYHKVMRARLQQLAERIEGEIGAFGFRVFTDSAPVLEVELAQKAGIGWRGKHTLLLQRDAGSLFFLGEIYVDVPLPTDADDPASAAPETPGAHCGSCTRCIDACPTGAITEPYRVDARRCISYLTIELKGSIPLDMRPLIGNRVYGCDDCQLVCPWNKFAKAAPVADFDVRHGLDRASLVELFGWSAAQFDERMQGSAIRRIGYESWSRNIAVAMGNALRAPRVDEATGTSETSEASARREAIVDALRVRAQDESAVVREHVQWALEAA

SEQ ID NO: 79193 - protein, 464 aa, Paraburkholderia tropica
  misc_feature (1)..(464): tr|A0A2V3XWU5|A0A2V3XWU5_9BURK Epoxyqueuosine reductase OS=Paraburkholderia tropica OX=92647 GN=queG PE=3 SV=1
MNPSHSPLNQTLAAEAARAPDKASASRASSCAQQTQGAGASATLDAAALAALATQIRAWGRELGFGAIGISDTDLSHAEAGLAAWLEAGYHGEMDYMAKHGMKRARPAELVAGTRRVITARMAYLPAATLDPSAAAATEHATGQAAESASQGADEGRRGHAIHDDWRQREHARLADPHAAVVSIYARGRDYHKVMRARLQQLAERIEGEIGAFGFRVFTDSAPVLEVELAQKAGIGWRGKHTLLLQRDAGSLFFLGEIYVDVPLPTDADDPASAAPETPGAHCGSCTRCIDACPTGAITGPYRVDARRCISYLTIELKGSIPLDLRPLIGNRVYGCDDCQLVCPWNKFAKAAPVADFDVRHGLDRASLVELFGWSAAQFDERMQGSAIRRIGYESWSRNIAVAMGNALRAPRVDDATGTSETSETSETSETHARREAIVDALRARAQDESAVVREHVQWALEAA

SEQ ID NO: 79194 - protein, 436 aa, Paraburkholderia tuberum
  misc_feature (1)..(436): tr|A0A1H1BHU9|A0A1H1BHU9_9BURK Epoxyqueuosine reductase OS=Paraburkholderia tuberum OX=157910 GN=queG PE=3 SV= 1
MNRSPKSPVFCTPASADDAARASGATSRFDEAALRALALDVKTWGRELGFGAIGISDTDLSAAEAPLAAWLEAGCHGEMDYMAKHGMKRARPAELVAGTRRVITARIAYLPAQTLEAEAAEGAHEEGHESAPESMPQDVTQPASRATPRARDWRAAEHARLADPSTAVVSIYARGRDYHKVMRQRLQQLADRIEAVIGPFGYRVFTDSAPVLEVELAQKAGIGWRGKHTLLLQRDAGSLFFLGEIYVDVPLPTDAETSPEAAPETPGSHCGSCARCIGACPTGAIVAPYKVDARRCISYLTIELKGSIPLDLRPLIGNRVYGCDDCQLVCPWNKFAQAAPVADFDVRHGLDRASLVELFAWSAEEFDTRMQGSAIRRIGYESWLRNLAVGMGNALRAAPGSLDLDARGAIVLALRQRADDPSAVVREHVEWALEAA

SEQ ID NO: 79195 - protein, 419 aa, Paraburkholderia unamae
  misc_feature (1)..(419): tr|A0A328XMF7|A0A328XMF7_9BURK Epoxyqueuosine reductase OS=Paraburkholderia unamae OX=219649 GN=queG PE=3 SV=1
MPASGQAAPLDEAALAALAARIRTWGRELGFGAIGISDTDLSHAEAGLAAWLEAGCHGEMDYMAKHGMKRARPAELVAGTRRVISVRMAYLPADTLAPNATGKTHESASQGGAETSAVPGTNVARETIHADWRLREHARLADPHAAVVSIYARGRDYHKVLRARLQQLADRIEAEIGGFGYRVFTDSAPVLEVELAQKAGVGWRGKHTLLLQRDAGSLFFLGEIYVDVPLPTDADDPASAAPETPGSHCGSCTRCISACPTGAITGPYRVDARRCISYLTIELKGSIPLALRELIGNRVYGCDDCQLVCPWNKFAQAAPVADFDVRHGLDRASLVDLFGWSAAQFDERMQGSAIRRIGYECWSRNLAVAMGNALRATRDDAQHVQHAPERAAIVAALRAREHDESALVREHVLWALEAA

SEQ ID NO: 79196 - protein, 418 aa, Paraburkholderia xenovorans
  misc_feature (1)..(418): tr|Q13UQ3|Q13UQ3_PARXL Epoxyqueuosine reductase OS=Para burkholderia xenovorans (strain LB400) OX=266265 GN=que G PE=3 SV=1
MNRSPESPVSCPPASDDDARAERHFNETALNALALNIKTWGRELGFGAIGISDTDLSAAEAPLAAWLEAGCHGEMDYMAKHGMKRARPAELVAGTRRVITARVAYLPAGTMSGKAHESALQDGPLALEKQARQDWRAVEHARLADPCAAVVSIYARGRDYHKVMRNRLQHLAEKIEAEIGAFGYRVFTDSAPVLEVELAQKAGIGWRGKHTLLLQRDAGSLFFLGEIYVDVPLPTDAETSPERAPETPGSHCGSCTRCIGACPTGAIVAPYKVDARLCISYLTIELKGSIPLEMRPLIGNRVYGCDDCQLVCPWNKFAQAAPVADFDVRHGLDRASLVELFSWSADDFETRMQGSAIRRIGYESWLRNLAVGMGNALRASPDSLSEAARDAIVQALRARAGDASAVVREHVEWALEAA

SEQ ID NO: 79197 - protein, 324 aa, Parachlamydia acanthamoebae
  misc_feature (1)..(324): tr|F8KXF2|F8KXF2_PARAV Putative electron transport prot ein yjeS OS=Parachlamydia acanthamoebae (strain UV7) OX =765952 GN=yjeS PE=4 SV=1
MIPEITFEEVRAEALRLGWDDVGITEAHIPEDDIEAYKTWLANNYQGDLQYMENHIRCDPQQLFPGAKTAIIFVTHYKQERVQFRNDAGVVASYARGRDYHHLHRKRLKKFILWLEQRSGQSNIAKGFSDSTPVMEKALAVQAGLGWFGKNTLLIHRRFGTFLLLSGLFTSLNIQEKSLNLRLPRCGTCRRCLDACPTQAFEAPYVLNATKCLSYHLIESKKEIPEEIQKKNPGYVFGCDICQDVCPHNVRPKPSTVPEFSPNQGMGAYLSLEDIEKIEHNPEKLFGTPLQRRGATGLRHTFETLNLQNPNENDHSEMKEDKHG

SEQ ID NO: 79198 - protein, 314 aa, Parachlamydia sp.
  misc_feature (1)..(314): tr|A0A2H9SWP9|A0A2H9SWP9_9BACT tRNA epoxyqueuosine(34) reductase QueG OS=Parachlamydia sp. OX=2052048 GN=queG PE=4 SV=1
MSPEITFEEIKAQALSLGWDDAGITDAKIPEEDIASYRSWLAENYQGDLLYMENQLRCDPQQLFPQAKTAILFVTHYKQERVQFRRDAGVVASYARGRDYHHLHRKRLKKFIQWLETRAGQVGIAKGFSDSTPVMEKALAAQAGLGWFGKNTLLIHRKFGTFILLSGLFTSLEFKDKLSSLRLPRCGSCTRCLDACPTQAFEAPYILNATKCLSYHLIESKKEIPEEVRLKNPGYVFGCDICQDVCPHNVRPKNSEIPEFSPDKGAGPYLALEDIKEIEQYPEKLFGTPLQRRGAKGLRHTMETLLLESSPESE

SEQ ID NO: 79199 - protein, 297 aa, Paraclostridium benzoelyticum
  misc_feature (1)..(297): tr|A0A0M3DLF3|A0A0M3DLF3_9FIRM Iron-sulfur cluster-bind ing protein OS=Paraclostridium benzoelyticum OX=1629550 GN=VN21_00435 PE=4 SV=1
MDKNKLKEFCKSIGINCVGIAGIGPYYDLENIIKDRTKKDFITGMEETDVEKRVNPRATMENAESIIVCAFPYFVGDVVDSNLSKYCYGMDYHIVVKEKLQQIADYIDSETEEFQYMVFVDNGPLVDRYLASISGIGYYGINNNIITDEYGSFVFIGYIINNYYFEPDKKSEKSCVKCGKCITSCPGKAILGDFEMNPKKCLSYVTQKKEDLSEDEKIALKNNKKIFGCDICQDVCPHNISISKTNIKEFKEELIYNLKEEEINNISNKEFRRRYKEKAFSWRGKKIIQRNIEILER

SEQ ID NO: 79200 - protein, 297 aa, Paraclostridium bifermentans
  misc_feature (1)..(297): tr|A0A1X2JG09|A0A1X2JG09_PARBF Epoxyqueuosine reductase OS=Paraclostridium bifermentans OX=1490 GN=B2H97_11420 PE=4 SV=1
MNKNKLKEFCKSIGINCVGIAGVGPYHDLENIIKDRTKKDFITGMEETSIEKRINPRASMENAESIIVCAFPYFVGDVVDSNLSKYCYGMDYHIVVKEKLQQIADYIDSEIEGFQYMIFADNGPLVDRYLASVSGIGYYGINNNIITDEYGSFVFIGYIINNYYFESDKKSEKSCAKCGKCITSCPGKAILGNFEMNPKKCLSYITQKKEDLSEDEKIALKNNKKIFGCDICQDVCPHNISISKTNIKEFKEQLIYNLKEEEINNISNKEFRRRYKEKAFSWRGKKIIQRNIEILER

SEQ ID NO: 79201 - protein, 297 aa, Paraclostridium bifermentans
  misc_feature (1)..(297): tr|T4VTD0|T4VTD0_PARBF Epoxyqueuosine reductase OS=Para clostridium bifermentans ATCC 638 OX=1233171 GN=queG PE =4 SV=1
MNKNKLKEFCKSIGINCVGIAGVGPYHDLENIIKDRTKKDFITGMEETSIEKRINPRASMESAESIIVCAFPYFVEDIVDSNLSKYCYGMDYHIVVKEKLQQIADYIDSEIEGFQYMIFADNGPLVDRYLASISGIGYYGINNNIITDEYGSFVFIGYIINNYYFESDKKSEKSCVKCGKCITSCPGKAILGDFEMNPKKCLSYITQKKEDLSEDEKIALKNNKKIFGCDICQDVCPHNISISKTNIKEFKEELIYNLKEEEINNISNKEFRRRYKEKAFSWRGKKIIQRNIEIIER

SEQ ID NO: 79202 - protein, 338 aa, Paracoccus aestuarii
  misc_feature (1)..(338): tr|A0A418ZYG7|A0A418ZYG7_9RHOB tRNA epoxyqueuosine(34) reductase QueG OS=Paracoccus aestuarii OX=453842 GN=que G PE=4 SV=1
MEAEARAVGFAAMGVMRPDGVPELAGRLADFVARGRHGQMGWMAERMGWRGDPAALWPEARSVVMLAELYTPEGDPLEVLERRDRAAVSVYAQGRDYHDLVKKRLKRLGRWLLETAPEPGHAIKVFVDTAPVMEKPLAQAAGLGWQGKHTNLLSRDLGSWFFLGAIFTTMPLPPDAPQVSHCGSCRACLDICPTGAFPAPYQLDARRCISYLTIEHKGPVEPDLRALMGNRIYGCDDCLAVCPWNKFAQAGSEMRYRGIIDAPPLAELAGLDDAGFRARFSGSPIKRIGRDRFVRNVLYAIGNSGDAGLIAVARGLQGDADPVVAEAASWAVARLGPA

SEQ ID NO: 79203 - protein, 344 aa, Paracoccus alcaliphilus
  misc_feature (1)..(344): tr|A0A1H8HR31|A0A1H8HR31_9RHOB Epoxyqueuosine reductase OS=Paracoccus alcaliphilus OX=34002 GN=SAMN04489859_10 1061 PE=4 SV=1
MKQALAAEAEAVGFSRMRVTTPDSVPEIAERLSAFLEAGRHGQMGWMAERVHWRGDPSALWPEARSVIVLAELYTPDHDPLEVLESRDRAAISVYAQGRDYHDLVKKRLKRLGRWLLEETQRRGAEGEQIKVFVDTAPVMEKPLAQAAGMGWQGKHTNLLSRELGSWFFLGSIFTTLALPVDPPEKPHCGNCRACLDICPTGAFPAPFQLDARRCISYLTIEHKGPVDPELRPLMGNRIYGCDDCLAVCPWNKFARKGSETRYHGLVGAPHLADLAVLDDAGFRARFSGSPIKRIGRDRLVRNVLYAIGNSGRADLIPVAQGLAGDADGAVADAARWAVMALRR

SEQ ID NO: 79204 - protein, 337 aa, Paracoccus alkenifer
  misc_feature (1)..(337): tr|A0A1H6MZB9|A0A1H6MZB9_9RHOB Epoxyqueuosine reductase OS=Paracoccus alkenifer OX=65735 GN=SAMN04488075_2413 PE=4 SV=1
MKKELAARALDEGFSAVRVTTPDAIPQAAARLAEYVAQGRHGQMGWMEERMHWRGAPDALWPEARAVVMLAETYTPPHDPREDLAQRDRGAISVYAQGKDYHDIVKSRLKRVGRWLIEQAGGEIKVFVDTAPVMEKPLAQAAGLGWQGKHTNLVSRELGSWFFLGAIFTTLPLPPDPAEPDRCGSCRACLDACPTDAFPAPFQLDARRCISYLTIEHKGPVDEELRPLLGNRIYGCDDCLAACPWNKFAAEAREMRYHGPHRAPPLAELAALDDAAFRARFSGSPIKRIGRDRMVRNVLYAIGNSGDPALRPLAAARLDDPDPAVADAAAWALGRLA

SEQ ID NO: 79205 - protein, 374 aa, Paracoccus aminophilus
  misc_feature (1)..(374): tr|S5Y2V4|S5Y2V4_PARAH 4Fe-4S ferredoxin, iron-sulfur c luster binding protein OS=Paracoccus aminophilus JCM 76 86 OX=1367847 GN=JCM7686_3024 PE=4 SV=1
MRRSNRARPSAAFSPITCRACRQRRIMPNSTSEAEALKARLGAAALAEGFSDMGICRPDAVPALPERLDHFLKEERHGQMDWMAERSHWRANPAALWPEAKSVIMLAELYTPDHDPMEVTRLSDKGAISVYAQGKDYHDLVKKRLKRVGRWLIDQAKGAEIKVFVDTAPVMEKPLAQAAGLGWQGKHTNLLSRRLGSWFFLGSIFTTIDLPKDAAETSHCGNCRACLTACPTDAFPAPYQLDARRCISYLTIEHKGPVDLELRPLLGNRIYGCDDCLAACPWNKFAQDASELRYHGPHRAPDLAELAKLDDPSFREQFSGSPIKRIGRNRLVRNVLYAIGNSARPELRASAESLLDDEDLAVSDAARWALDRLR

SEQ ID NO: 79206 - protein, 328 aa, Paracoccus aminovorans
  misc_feature (1)..(328): tr|A0A1I3B0P7|A0A1I3B0P7_9RHOB Epoxyqueuosine reductase OS=Paracoccus aminovorans OX=34004 GN=SAMN04488021_118 58 PE=4 SV=1
MAEGFSALGICAPDANPHLPERLAAFLAEGRHGDMAWMAERTHWRAAPDALWPEARSVIMLAELYTPEHDPLEIIHHPDRGAVSVYAQGKDYHDLVKKRLKRLGGWLVGLTGCEIKVFVDTAPVMEKPLAQAAGLGWQGKHTNLLSRELGSWFFLGAIFTTLDLPKDAPERSHCGSCRACLDACPTGAFPAPYQLDARRCISYLTIEHKGPVDPELRPMLGNRIYGCDDCLAACPWNKFAQAATELRYHGPHGGPALAELAALDDAGFRERFAGSPIKRIGRDRMVRNVLYAIGNSGLAHLRPLAEALAQDPDPAVADAARWACERLP

SEQ ID NO: 79207 - protein, 350 aa, Paracoccus bengalensis
  misc_feature (1)..(350): tr|A0A3D9XHD3|A0A3D9XHD3_9RHOB Epoxyqueuosine reductase OS=Paracoccus bengalensis OX=302403 GN=BDD41_2634 PE=4 SV=1
MRCSTSRPTDPAEIRSRLEQQARAEGFSALGICAPDANPQLPERLAAFLEQGRHGQMGWMAERAHWRASPGSLWPEARSVIMLAELYTPEHDPMEVIGHKDRGAVSVYAQGKDYHDLVKKRLKRLGGWLVGLTGCEIKVFVDTAPVMEKPLAQAAGLGWQGKHTNLLSRELGSWFFLGAIFTTLELPRDAAERSHCGSCRACLDACPTGAFPAPYQLDARRCISYLTIEHKGPVDPELRPSLGNRIYGCDDCLAACPWNKFAQEATELRYHGPHGAPALAELAALDDAGFRERFSGSPIKRIGRDRMVRNVLYAIGNSGLAHLRPLAESLADDPDPAVADAARWACERLP

SEQ ID NO: 79208 - protein, 352 aa, Paracoccus chinensis
  misc_feature (1)..(352): tr|A0A1G9C3D4|A0A1G9C3D4_9RHOB Epoxyqueuosine reductase OS=Paracoccus chinensis OX=525640 GN=SAMN04487971_1016 9 PE=4 SV=1
MPPAGGAGSPQDIWAKKNELVARALAEGFSAARVTTPDAIPQAAGRLAAYVAKGRHGQMGWMAERMNWRGAPDALWPEARSVIMLAEAYTPPHDPREDLARPDRGAVSVYAQGKDYHDIVKARLKRLGRWMIERWGGEIKVFVDTAPVMEKPLAQAAGLGWQGKHTNLLSRDLGNWFFLGAIFTTLALPPDAPEAEHCGSCRACLDACPTGAFPAPFQLDARRCISYLTIEHKGPVDPELRPMLGNRIYGCDDCLAACPWNKFAVQAQEMRYHGPHRAPALEELASLDDAGFRARFSGSPIKRIGRDRMVRNALYAIGNSGQARLRPVAQGLVDDPDPAVADAARWAVRRLA

SEQ ID NO: 79209 - protein, 365 aa, Paracoccus contaminans
  misc_feature (1)..(365): tr|A0A1W6CXF2|A0A1W6CXF2_9RHOB tRNA epoxyqueuosine(34) reductase QueG OS=Paracoccus contaminans OX=1945662 GN= B0A89_07615 PE=4 SV=1
MRSSTSRPQGGAAPRPPGADSPRDISVQKKDLVAQALAEGFSAVRVTTPDAVPQAAARLAAFVAAGRHGQMGWMAERMNWRGDPAALWPEARAVIMLAEAYTPPHDPREDLARPGRGAVSVYAQGRDYHDIVKARLKRVGRWLIDRAGGEIKVFVDTAPVMEKPLAQAAGLGWQGKHTNLLSRALGNWFFLGAIFTTLPLLPDPPEAEHCGSCRACLDACPTDAFPAPFQLDARRCISYLTIEHRGPVDEGLRPLMGNRIYGCDDCLAACPWNKFAVAAGEMRYHGPHRAPLLEDLAVLDDAGFRARFAGSPIKRIGRDRMVRNVLYAMGNSGMARLRPLAQGLAEDADPAVRDAARWAAGRLAG

SEQ ID NO: 79210 - protein, 347 aa, Paracoccus denitrificans
  misc_feature (1)..(347): tr|A0A2W4ZRL1|A0A2W4ZRL1_PARDE tRNA epoxyqueuosine(34) reductase QueG OS=Paracoccus denitrificans OX=266 GN=qu eG PE=4 SV=1
MRNSTSEPEIIKAEVMARALTEGFSAARVTTPGSVPEIAERLQQFVAKGRHGQMAWMAERMGWRGDPAALWPHAKSVIMLAEAYTPAHDPLDDLALRDRGAVSVYAQGKDYHDIVKARLKRLGRWLIERFGGEIKVFVDTAPVMEKPLAAAAGLGWQGKHTNLLSRELGNWFFLGSIFTTLEMPPDTAEVDHCGSCRKCLDICPTNAFPAPRQLDARRCVSYLTIEHKGPVDHEFRAALGNRIYGCDDCLAICPWNKFATAAREIRYHGPHRAPDLAMLAGMDDAGFRAHFAGSPIKRIGRDRMVRNALYAIGNSADPSLRPVAQGLTEDPDAAVADAARWAVERLT

SEQ ID NO: 79211 - protein, 347 aa, Paracoccus denitrificans
  misc_feature (1)..(347): tr|A1B4D7|A1B4D7_PARDP Epoxyqueuosine reductase OS=Para coccus denitrificans (strain Pd 1222) OX=318586 GN=queG PE=3 SV=1
MRSWISDPAEIRSRLEQQARAEGFSALGICAPDANPQLPERLAAFLEQGRHGQMGWMAERTHWRASPATLWPEARSVVMLAELYTPEHDPMAVLDHKNRGAVSVYAQGKDYHDLVKKRLKRLGGWLVGLTGCEIKVFVDTAPVMEKPLAQAAGLGWQGKHTNLLSRELGSWFFLGAIFTTLDLPKDAPEHSHCGSCRACLDACPTGAFPAPYQLDARRCISYLTIEHKGPVDPELRPMLGNRIYGCDDCLAACPWNKFAQAATELRYHGPHGAPVLAELAQLDDAGFRERFSGSPIKRIGRDRMVRNVLYAIGNSGLAHLRPLAEALRQDPDPGVADAAQWACERLP

SEQ ID NO: 79212 - protein, 348 aa, Paracoccus gahaiensis
  misc_feature (1)..(348): tr|A0A4U0RFB8|A0A4U0RFB8_9RHOB tRNA epoxyqueuosine(34) reductase QueG OS=Paracoccus gahaiensis OX=1706839 GN=q ueG PE=4 SV=1
MKDDIAAEAVAVGFARMGVTRPDGAPETAARLDAFLAEGHHGQMAWMAERVAWRGNAAALWPEARSVIMLAELYTPEGDPLAVLEQRDRAAVSVYAQGRDYHDLVKKRLKRLGRWMLEAAPEPGHQIKVFVDTAPVMEKPLAQAAGLGWQGKHTNLLSRDLGSWFFLGAIFSTMPLPADAPEGGHCGSCRACLDVCPTGAFPAPYRLDARRCISYLTIEHKGPVDPDLRALMGNRIYGCDDCLAVCPWNKFAQVGSEMRYRGIIDAPPLAELAGLDDAGFRARFSGSPIKRIGRDRFVRNVLYAIGNSGDAALVEVARGLCGDADPVVAEAAAWAVGRLEGRPDGLQG

SEQ ID NO: 79213 - protein, 369 aa, Paracoccus haeundaensis
  misc_feature (1)..(369): tr|A0A5C4R467|A0A5C4R467_9RHOB Epoxyqueuosine reductase OS=Paracoccus haeundaensis OX=225362 GN=queG PE=3 SV=1
MPSLTSAEGGGASPPSPGGDPPRGIWAKQKARIQAEARAVGFAAMGVMRPDGVPELAGRLADFVAQGRHGQMGWMAERMSWRGDPAALWPEARSVVMLAELYTPEGDPLAVLDQRDRAAVSVYAQGRDYHDLVKKRLKRLGRWMLETAPEPGHQIKVFVDTAPVMEKPLAQAAGLGWQGKHTNLLSRDLGSWFFLGAIFTTMPLPPDAPQVSHCGSCRACLDVCPTGAFPAPYQLDARRCISYLTIEHKGPVDPDLRALMGNRIYGCDDCLAVCPWNKFAQAGSEMRYRGIIDAPPLAELAGLDDAAFRARFSGSPIKRIGRDRFVRNVLYAIGNSGDAALAPVARGLTGDADPVVAEAASWAAARLAR

SEQ ID NO: 79214 - protein, 352 aa, Paracoccus halophilus
  misc_feature (1)..(352): tr|A0A099F5L9|A0A099F5L9_9RHOB Epoxyqueuosine reductase OS=Paracoccus halophilus OX=376733 GN=IT41_04895 PE=4 SV=1
MRCSTSRTPLTDPAEIRARLDEQARAEGFSALGICAPDADPRLPERLAAFLDKDRHGQMGWMAERVHWRAAPAALWPEAQSVIMLAELYTPEHDPIEILKYPERGAVSVYAQGKDYHDIVKKRLKRLGGWLVGLTGCEIKVFVDTAPVMEKPLAQAAGLGWQGKHTNLLSRELGSWFFLGAVFTTLDLPKDTAEQEHCGSCRACLDACPTDAFPAPYQLDARRCISYLTIEHKGPVDPELRPLMGNRIYGCDDCLAACPWNKFARAATELRYHGPHGGPALAELAALDDAAFRARFSGSPIKRIGRDRMTRNVLYAIGNSGLAELRPIAQSLLDDPDPGVADAARWACERLP

SEQ ID NO: 79215 - protein, 369 aa, Paracoccus hibiscisoli
  misc_feature (1)..(369): tr|A0A4U0QNH2|A0A4U0QNH2_9RHOB Epoxyqueuosine reductase OS=Paracoccus hibiscisoli OX=2023261 GN=queG PE=3 SV=1
MPSLISAEGGGASPPSPDGDSPRDIWVKKKAETEAEARAVGFAAMGVMRPGGVPELAGRLADFVGRGRHGQMGWMAERMGWRGDPSALWPEARSVVMLAELYTPEGDPLAVLERRDRAAVSVYAQGRDYHDLVKKRLKRLGRWLLETAPEPGHQIKVFVDTAPVMEKPLAQAAGLGWQGKHTNLLSRDLGSWFFLGAIFTTMPLPPDAPQVSHCGSCRACLDVCPTGAFPAPYQLDARRCISYLTIEHKGPVEPELRALMGNRIYGCDDCLAVCPWNKFAQAGSEMRYRGIIDAPPLAELAGLDDAGFRARFSGSPIKRIGRDRFVRNVLYAIGNSGDAELAPVARGLEGDADPVVAEAASWAVARLAR

SEQ ID NO: 79216 - protein, 332 aa, Paracoccus homiensis
  misc_feature (1)..(332): tr|A0A1I0AF12|A0A1I0AF12_9RHOB Epoxyqueuosine reductase OS=Paracoccus homiensis OX=364199 GN=SAMN04489858_1022 05 PE=4 SV=1
MRVAAPDAVPELPERLRHFLDQGRHGQMGWMAERTHWRADPAALWPEARAVVMLAELYTPAGDPLEVLDRRDHAAVSVYAQGRDYHDLVKKRLKRVGRWLLEQHPGHQIKVFVDTAPVMEKPLAEAAGLGWQGKHTNLLARDLGSWFFLGAIFTTVPLPADAPEVSHCGSCRACLDICPTKAFPAPYQLDARRCISYLTIEHHGPVDPDLRPLMGNRIYGCDDCLAVCPWNKFAQAGSEMRYRGIIDAPPLAELAVLDDAGFRARFSGSPIKRIGRNRFVRNVLYAIGNSGDASLLPLARGLIGDPDETVADAADWAAAWLQDQSRKSSPSR

SEQ ID NO: 79217 - protein, 347 aa, Paracoccus laeviglucosivorans
  misc_feature (1)..(347): tr|A0A521FQP6|A0A521FQP6_9RHOB Epoxyqueuosine reductase OS=Paracoccus laeviglucosivorans OX=1197861 GN=queG PE =3 SV=1
MRFWISDPGEIRARLEEQARAEGFNALGICDPDANPHLPERLAEFLAQERHGQMEWMAERTAWRASPSALWPEARSVIMLAELYTPDHDPLAVLEQPDRGAVSVYAQGKDYHDLVKKRLKRLGGWLVNLTGCEIKVFVDTAPVMEKPLAQAAGLGWQGKHTNLLSRELGSWFFLGAIFTTLDLPKDQPARENCGSCRACLDACPTGAFPAPFQLDARRCISYLTIEHKGPVDPELRPMLGNRIYGCDDCLAACPWNKFAQDATELRYHGPHGAPALAELAALDDAAFRARFSGSPIKRIGRDRMVRNVLYAIGNSGLAHLRPVAEELRNDPDPTVADAAEWACERLP

SEQ ID NO: 79218 - protein, 347 aa, Paracoccus lutimaris
  misc_feature (1)..(347): tr|A0A368YQ66|A0A368YQ66_9RHOB Epoxyqueuosine reductase OS=Paracoccus lutimaris OX=1490030 GN=queG PE=3 SV=1
MRSWISDPTDIRARLEEQARAEGFSALGICAPDANPQLPERLAAFLKADRHGQMGWMAERTAWRAAPDALWPEARSVIMLAELYTPEHDPVEILTHPDRGAVSVYAQGKDYHDIVKKRLKRLGGWLVGLTGCEIKVFVDTAPVMEKPLAQAAGLGWQGKHTNLLSRELGSWFFLGAIFTTLDLPKDAPEREHCGSCRSCLDACPTGAFPAPYQLDARRCISYLTIEHKGPVDPELRPLLGNRIYGCDDCLAACPWNKFAQAATELRYHGPHGGPALAEFAALDDAAFRERFSGSPIKRVGRDRMVRNVLYAIGNSGRPDLRPAAEALLHDPDPAVADAARWACGRLP

SEQ ID NO: 79219 - protein, 347 aa, Paracoccus mutanolyticus
  misc_feature (1)..(347): tr|A0A2Z4PD90|A0A2Z4PD90_9RHOB Epoxyqueuosine reductase OS=Paracoccus mutanolyticus OX=1499308 GN=queG PE=3 SV =1
MRCWISDPAEIRSRLTEQARAEGFSALGICAPDANPQLPERLAAFLEQGRHGQMDWMADRAHWRADPSALWPEARSVIMLAELYTPGHDPLAVLDQRDRGAVSVYAQGRDYHDLVKKRLKRLGGWLVNLTGCEIKVFVDTAPVMEKPLAQAAGLGWQGKHTNLLSRDLGSWFFLGAIFTTLELPRDAPERERCGSCRACLDACPTGAFPAPYQLDARRCVSYLTIEHRGPVDPELRPMLGNRIYGCDDCLAACPWNKFAQEASEMRYHGPHGAPALAELAQLDDAAFRARFSGSPIKRIGRDRMVRNVLYAIGNSGLAHLRPLAEALRDDPDPAVADAAGWACERLP

SEQ ID NO: 79220 - protein, 335 aa, Paracoccus pantotrophus
  misc_feature (1)..(335): tr|A0A495PRU5|A0A495PRU5_PARPN Epoxyqueuosine reductase OS=Paracoccus pantotrophus OX=82367 GN=BDE18_0665 PE=4 SV=1
MRLEQQARAEGFSALGICAPDANPQLPERLAAFLAEGRHGQMGWMAERAHWRASPASLWPEARSVVMLAELYTPEHDPMEAVRHKDRGTVSVYAHGKDYHDLVKKRLKRLGGWLVGLTGCEIKVFVDTAPVMEKPLAQAAGLGWQGKHTNLLSRELGSWFFLGAIFTTLELPKDAAERSHCGSCRACLDACPTGAFPAPYQLDARRCISYLTIEHKGPVDPELRPMLGNRIYGCDDCLAACPWNKFAQAATELRYHGPHGAPALAELAQLDDAGFREHFSGSPIKRIGRDRMVRNVLYAIGNSGLAHLRPLAEALADDPDPAVADAARWACERLP

SEQ ID NO: 79221 - protein, 350 aa, Paracoccus pantotrophus; identical to SEQ ID NO: 79207
  misc_feature (1)..(350): tr|A0A1K1Y6U4|A0A1K1Y6U4_PARPN Epoxyqueuosine reductase OS=Paracoccus pantotrophus OX=82367 GN=SAMN04244548_01 431 PE=4 SV=1

SEQ ID NO: 79222 - protein, 363 aa, Paracoccus salipaludis
  misc_feature (1)..(363): tr|A0A2A2GL87|A0A2A2GL87_9RHOB tRNA epoxyqueuosine(34) reductase QueG OS=Paracoccus salipaludis OX=2032623 GN= queG PE=4 SV=1
MPSLISEERGALPPAGSAGSPQDIWAKKKELVARASAEGFSAARVTRPDAIPQAAGRLAEYVAQGRHGQMDWMAERMNWRGAPDALWPEAQSVIMLAEAYTPGHDPREDLARPDRGAVSVYAQGKDYHDIVKARLKRLGRWMLERWGGEIKVFVDTAPLMEKPLAQAAGLGWQGKHTNLLSRDLGNWFFLGAIFTTLPLPPDPPEAEHCGSCRACLDACPTGAFPAPFQLDARRCISYLTIEHKGPVDPELRPMLGNRIYGCDDCLAACPWNKFAVQAQEMRYHGPHRAPALDELARLDDAGFRARFSGSPIKRIGRDRMVRNALYAIGNSGQARLRPVAQGLVDDPDPAVADAARWAAGRLA

SEQ ID NO: 79223 - protein, 298 aa, Paracoccus saliphilus
  misc_feature (1)..(298): tr|A0A1N7LUR8|A0A1N7LUR8_9RHOB Epoxyqueuosine reductase OS=Paracoccus saliphilus OX=405559 GN=SAMN05421772_104 202 PE=4 SV=1
MNWMAERTHWRGDPAALWPEARSVIMLAELYTPDHDPLAVLEQPDRAAISVYAQGKDYHDLVKKRLKRLGRWLLEQEQGHEIKVFVDTAPVMEKPLAEAAGLGWQGKHTNLLSRDLGSWFFLGAIFTTLELPVDEPEAEHCGSCRACLDICPTNAFPAPFQLDARRCISYLTIEHKGPVDLELRELMGNRIYGCDDCLAVCPWNKFAQAGTEMRYRGIVEAPPLEELALLDDAGFRARFSGSPIKRIGRDRFVRNVLYAIGNSEEPRLAEAARPLVNDPDEAVADAARWALLRLALQP

SEQ ID NO: 79224 - protein, 340 aa, Paracoccus sanguinis
  misc_feature (1)..(340): tr|A0A099G5F3|A0A099G5F3_9RHOB Epoxyqueuosine reductase OS=Paracoccus sanguinis OX=1545044 GN=IX56_17105 PE=4 SV=1
MFARKNLILGRARDEGFSAVGVTTPEAIPQAAGRLAAFLDAGRHGQMVWMEERAGWRGDPAALWPAARSVVMLAESYAPGHDPLDDLGRRDRGAISVYAQGKDYHDIVKPRLKRLGRWMIERFGGEIKVFVDTAPVMEKPLAQAAGLGWQGKHTNLLSRGLGNWFFLGAIFTTLELPPDTPEGEHCGSCRACLDICPTGAFPAPFQLDARRCISYLTIEHRGPVDPELRARMGNRVFGCDDCLAVCPWNKFAVAAADLRYHGPHRAPALAELAGLDDAGFRARFAGTPVKRIGRDRLVRNALYAIGNSGMPALRPVAQGLCEDADPAVADAARWAVGRLS

SEQ ID NO: 79225 - protein, 319 aa, Paracoccus sanguinis
  misc_feature (1)..(319): tr|A0A1H2TVI3|A0A1H2TVI3_9RHOB Epoxyqueuosine reductase OS=Paracoccus sanguinis OX=1545044 GN=SAMN05444276_101 1089 PE=4 SV=1
MTTPDAIPQAAGRLAAFLDAGRHGQMGWLEERALWRGDPAALWPEARSVVMLAESYAPGHDPLDDLGRRDRGAISVYAQGKDYHDIVKPRLKRLGRWMIERFGGEIKVFVDTAPVMEKPLAQAAGLGWQGKHTNLLSRDLGNWFFLGAIFTTLELPADAPEGEHCGSCRACLDICPTGAFPAPFQLDARRCISYLTIEHRGPVDPELRARMGNRVFGCDDCLAICPWNKFAVAAADLRYHGPHRAPALAELAGLDDAGFRARFAGTPVKRIGRDRLVRNALYAIGNSGIPALRPVAQGLCEDADPAVADAARWAVGRLS

SEQ ID NO: 79226 - protein, 344 aa, Paracoccus sediminis
  misc_feature (1)..(344): tr|A0A238W7Z3|A0A238W7Z3_9RHOB Epoxyqueuosine reductase OS=Paracoccus sediminis OX=1214787 GN=SAMN06265378_103 426 PE=4 SV=1
MRVTTPDAVPEVARRLQQFLEAGRHGQMAWMAERTHWRGDPAALWPEARSVIVLAELYTPDHDPLAVLDQPDRAAISVYAQGRDYHDLVKKRLKRLGRWLMDQAPGEAIKVFVDTAPVMEKPLAQAAGLGWQGKHTNLLSRDLGSWFFLGSIFTTIPLPPDAPEREHCGSCRACLDACPTDAFPAPFQLDARRCISYLTIEHKGPVDPQLRPLMGNRIYGCDDCLAVCPWNKFARAGSEMRYRGAEPAPRLADLAALDDAGFRERFSGSPIKRIGRDRFVRNVLYAIGNSGRADLADVARGLTADGDPAVADAACWAIGRLERAQGVTTGNRPRQDRCGPAGAP

SEQ ID NO: 79227 - protein, 368 aa, Paracoccus seriniphilus
  misc_feature (1)..(368): tr|A0A239PMK2|A0A239PMK2_9RHOB Epoxyqueuosine reductase OS=Paracoccus seriniphilus OX=184748 GN=queG PE=3 SV=1
MPNSISDRSPEPAAPADGGRDDKGLHEFKQALDVQAREMGFAQMRVTRPDSVPRIAERLQEFLRANRHGQMGWMAERTHWRGDPAALWPEARSVIMLAELYTPDHDPLEVLKHPGLGAVSVYAQGRDYHDIVKKRLKRLGRWLLEHHPDEQIKVFVDTAPVMEKPLAQAAGLGWQGKHTNLLSRELGSWFFLGAIFTTCALPPDPPETERCGSCRACLDICPTSAFPAPFQLDARRCISYLTIEHRGPVDPDLRAMMGNRIYGCDDCLAVCPWNKFARQGQEMRYRGIIDAPPLTELAALDDAAFRARFSGSPIKRIGRDRMVRNVLYAIGNSGQPQLRPVAQGLTDDPDEAVADAARWAATRLSVPD

SEQ ID NO: 79228 - protein, 345 aa, Paracoccus siganidrum
  misc_feature (1)..(345): tr|A0A418ZR06|A0A418ZR06_9RHOB tRNA epoxyqueuosine(34) reductase QueG OS=Paracoccus siganidrum OX=1276757 GN=q ueG PE=4 SV=1
MKAALAEEARAVGFSRMRVTRPDAVPEIADRLRAFLEAGRHGQMGWMEERSHWRGDPAALWPEARSVIVLAEVYTPDHDPLEVLESRDRAAVSVYAQGRDYHDLVKKRLKRLGRWLLEEARRQGAPDAQIKVFVDTAPVMEKPLAQAAGMGWQGKHTNLLSRDLGNWFFLGSIFTTLALPPDPPEEQHCGNCRACLDICPTGAFPAPFQLDARRCISYLTIEHRGPVDPELRPLMGNRVYGCDDCLAICPWNKFAREGAEMRYRGLVGAPPLAELAMLDDAGFRARFSGSPIKRIGRDRLVRNVLYAIGNSGRPDLAAVAQGLTQDADAAVADAARWAVGRLRPR

SEQ ID NO: 79229 - protein, 337 aa, Paracoccus solventivorans
  misc_feature (1)..(337): tr|A0A1M7J2H1|A0A1M7J2H1_9RHOB Epoxyqueuosine reductase OS=Paracoccus solventivorans OX=53463 GN=SAMN05444389_ 11070 PE=4 SV=1
MKKALVARALDEGFSAVRVTTPDAIPQAAARLAEYVAQGRHGQMGWMEERMHWRGAPDALWPEARAVVMLAETYTPPHDPREDLARRDRGAVSVYAQGKDYHDIVKARLKRVGRWLIEQAGGEIKVFVDTAPVMEKPLAQAAGLGWQGKHTNLVSRELGSWFFLGAIFTTLPLPPDPPEPDRCGSCRACLDACPTNAFPAPFQLDARRCISYLTIEHKGPVDEELRPLLGNRIYGCDDCLAACPWNKFAAEAREMRYHGPHRAPPLAELAVLDDAAFRARFSGSPIKRIGRDRMVRNVLYAIGNSGDPALRPLAAARLGDPDPAVADAAAWALGRLP

SEQ ID NO: 79230 - protein, 340 aa, Paracoccus sp.
  misc_feature (1)..(340): tr|A0A2D8WXA8|A0A2D8WXA8_9RHOB tRNA epoxyqueuosine(34) reductase QueG OS=Paracoccus sp. OX=267 GN=queG PE=4 SV =1
MKEALAAEALAAGFAKMRVARPDAIPEAAGRLRAFLQAGRHGQMGWMAERSHWRGDPAALWPEARSVVMLADLYTPDHDPLAVLEARDRAAISVYAQGRDYHDLVKKRLKRLGRWMLTRHQDEAIKVFVDTAPVMEKPLAQAAGLGWQGKHTNLLARDLGSWFFLGAIFTTLDLPPDPPEDEHCGSCRACLDICPTGAFPAPFQLDARRCISYLTIEHKGPVDPELRPLMGNRIYGCDDCLAVCPWNKFAREGSEMRYRGIAGAPTLAELAVLDDAGFRARFAGSAIKRIGRNRFIRNVLYAIGNSADRRLAPVARNLRGDADPVVADAATWAEARLTER

SEQ ID NO: 79231 - protein, 343 aa, Paracoccus sp.
  misc_feature (1)..(343): tr|A0A1L9BRB0|A0A1L9BRB0_9RHOB Epoxyqueuosine reductase OS=Paracoccus sp. SM22M-07 OX=1520813 GN=queG PE=3 SV= 1
MWAKKKAEIETEAKAIGFSRMGVTTTDAVPELAGRLAAFLEAGRHGQMDWMAERTHWRGDPQALWPEARSVIMLAELYTPDHDPLAVLDQRDRAAVSVYAQGKDYHDLVKKRLKRLGRWMLEQTPGHQIKVFVDTAPVMEKPLAQAAGLGWQGKHTNLLSRDLGSWFFLGAIFSTLPLPPDAPQGEHCGSCRACLDVCPTGAFPAPFQLDARRCISYLTIEHKGPVDPELRPLMGNRIYGCDDCLAVCPWNKFAQSGTEMRYRGIIDAPPLAELALLDDAGFRARFSGSPIKRIGRDRFVRNVLYAIGNSGDATLIPVAQGLCGDPDRAVADAAAWAVARLAD

SEQ ID NO: 79232 - protein, 339 aa, Paracoccus sphaerophysae
  misc_feature (1)..(339): tr|A0A099FGE4|A0A099FGE4_9RHOB Epoxyqueuosine reductase OS=Paracoccus sphaerophysae OX=690417 GN=queG PE=3 SV= 1
MSAKKKLILDRARVEGFSAARVTTPDAIPQAAGWLAEFVAAGRHGQMSWMAERMGWRGDPAALWPAARSVVMLAESYAPPHDPRADLARPDRGAVSVYAQGKDYHDIVKARLKRLGRWMIDSFGGDIKVFVDTAPVMEKPLAQAAGLGWQGRHTNLLSRDLGNWFFLGAIFTTLPLTPDAPEAEHCGSCRACLDVCPTDAFPGPFRLDARRCISYLTIEHRGPVDEALRPLMGNRIYGCDDCLAVCPWNKFAAEAADLRYHGPHRAPPLEELAALDEAGFRARFAGSPIKRIGRDRMVRNALYAIGNSALPRLRPVAQARVDDPDPAVADAARWAVARL

SEQ ID NO: 79233 - protein, 347 aa, Paracoccus sulfuroxidans
  misc_feature (1)..(347): tr|A0A562NQ71|A0A562NQ71_9RHOB Epoxyqueuosine reductase OS=Paracoccus sulfuroxidans OX=384678 GN=IQ24_01862 PE =4 SV=1
MRCLISDPAEIRQRLEEQAHVEGFSALGICAPDAAPALPERLAAFLADGHQGQMEWLADRSHWRADPTALWPEARSIIMLAELYTPEHDPMQVLHQKDRGAVSVYAQGKDYHDLVKKRLKRLGRWLIDTAGGEIKVFVDTAPVMEKPLAQAAGLGWQGKHTNLLSRQLGSWFFLGAIFTTHELPRDAPEVQHCGNCTACLDACPTKAFPAAFQLDARRCISYLTIEHKGPVDPELRPLLGNRIYGCDDCLAVCPWNKFAQAATEMRYHGPHGAPALAELAMLDDAGFRALYSGSPIKRIGRDRMVRNVLYAIGNSGLAELRPVAQSLLDDPDPTVADAARWASARLK

SEQ ID NO: 79234 - protein, 350 aa, Paracoccus thiocyanatus
  misc_feature (1)..(350): tr|A0A3D8PHT8|A0A3D8PHT8_9RHOB tRNA epoxyqueuosine(34) reductase QueG OS=Paracoccus thiocyanatus OX=34006 GN=q ueG PE=4 SV=1
MRCSTSKAADPAEIRSRLEMQARAEGFSALGICAPGANPQLPERLAAFLEQGRHGQMGWMAERAHWRASPPTLWPQARSVVMLAELYTPEHDPMAVIGHKDRGAVSVYAQGKDYHDLVKKRLKRLGGWLVGLTGCEIKVFVDTAPVMEKPLAQAAGLGWQGKHTNLVSRELGSWFFLGAIFTTLDLPKDAAEPSHCGSCRACLDACPTGAFPAPYQLDARRCISYLTIEHKGPVDPELRPSLGNRIYGCDDCLAACPWNKFAQAASELRYHGPHGAPVLAELAALDDAAFRERFSGSPIKRIGRDRMVRNVLYAIGNSRLAHLRPVAQALQDDPDPAVADAARWACERLP

SEQ ID NO: 79235 - protein, 350 aa, Paracoccus thiocyanatus
  misc_feature (1)..(350): tr|A0A1N6S147|A0A1N6S147_9RHOB Epoxyqueuosine reductase OS=Paracoccus thiocyanatus OX=34006 GN=SAMN05421641_10 6162 PE=4 SV=1
MRCSTSKAADPAEIRSRLEMQARAEGFSALGICAPDANPQLPERLAAFLEQGRHGQMGWMAERAHWRASPPTLWPQARSVVMLAELYTPEHDPMAVIGHKDRGAVSVYAQGKDYHDLVKKRLKRLGGWLVGLTGCEIKVFVDTAPVMEKPLAQAAGLGWQGKHTNLVSRELGSWFFLGAIFTTLDLPKDAAEPGHCGSCRACLDACPTGAFPAPYQLDARRCISYLTIEHKGPVDQELRPSLGNRIYGCDDCLAACPWNKFAQAASELRYHGPHGAPALAELAALDDAGFRERFSGSPIKRIGRDRMVRNVLYAIGNSGLAHLRPVAQALQDDPDPAVADAARWACERLP

SEQ ID NO: 79236 - protein, 337 aa, Paracoccus tibetensis
  misc_feature (1)..(337): tr|A0A1G5EVE5|A0A1G5EVE5_9RHOB Epoxyqueuosine reductase OS=Paracoccus tibetensis OX=336292 GN=SAMN05660710_012 50 PE=4 SV=1
MASEAEAVGFSGMGVTRPDAVPGLAERLAAFLEAGRHGQMAWMAERRHWRGDPAALWPEARSVVMLAELYTPESDPLAVLEQREQAAISVYAQGKDYHDLVKKRLKRLGRWLLETAPEPGHQIKVFVDTAPVMEKPLAAAAGLGWQGKHTNLLSRGLGSWFFLGAIFTTMPLPADTPEREHCGSCRACLDACPTGAFPAPFQLDARRCISYLTIEHKGPVDPELRPLMGNRIYGCDDCLAVCPWNKFAQAGSEMRYRGIVGAPPLAELAALDDAGFRARFSGSPIKRIGRDRFVRNVLYAIGNSGSAGLREVAAGLVGDPDPAVADAARWAVARLGG

SEQ ID NO: 79237 - protein, 350 aa, Paracoccus versutus
  misc_feature (1)..(350): tr|A0A369U1S7|A0A369U1S7_PARVE tRNA epoxyqueuosine(34) reductase QueG OS=Paracoccus versutus OX=34007 GN=queG PE=4 SV=1
MRCSTSRPTDPAEIRSRLEQQARAEGFSALGICAPDANPQLPERLAAFLEQGRHGQMGWMAERAHWRASPGSLWPEARSVIMLAELYTPEHDPMEVIGHKDRGAVSVYAQGKDYHDLVKKRLKRLGGWLVGLTGCEIKVFVDTAPVMEKPLAQAAGLGWQGKHTNLLSRELGSWFFLGAIFTTLELPRDAAERSHCGSCRACLDACPTGAFPAPYQLDARRCISYLTIEHKGPVDPELRPSLGNRIYGCDDCLAACPWNKFAQEATELRYHGPHGAPALAELAALDDAGFRERFSGSPIKRIGRDRMVRNVLYAIGNSGLAHLRPLVESLADDPDPAVADAARWACERLP

SEQ ID NO: 79238 - protein, 350 aa, Paracoccus versutus; identical to SEQ ID NO: 79207
  misc_feature (1)..(350): tr|A0A3E0CB14|A0A3E0CB14_PARVE Epoxyqueuosine reductase OS=Paracoccus versutus OX=34007 GN=ATH84_100755 PE=4 S V=1

SEQ ID NO: 79239 - protein, 347 aa, Paracoccus yeei
  misc_feature (1)..(347): tr|A0A386UIN1|A0A386UIN1_9RHOB Epoxyqueuosine reductase OS=Paracoccus yeei OX=147645 GN=queG PE=3 SV=1
MRCWISDPAEIRSRLTEQAQAEGFSALGICAPDANPQLPERLAAFLEQGRHGQMDWMADRAHWRADPSALWPEARSVIMLAELYTPGHDPLAVLDQRDRGAVSVYAQGRDYHDLVKKRLKRLGGWLVNLTGCEIKVFVDTAPVMEKPLAQAAGLGWQGKHTNLLSRDLGSWFFLGAIFTTLELPRDAPERERCGSCRACLDACPTGAFPAPYQLDARRCVSYLTIEHRGPVDPELRPGLGNRIYGCDDCLAACPWNKFAQEASEMRYHGPHGAPALAELAQLDDAAFRARFSGSPIKRIGRDRMVRNVLYAIGNSGLAHLRPLAEALRDDPDPAVADAAGWACERLP

SEQ ID NO: 79240 - protein, 347 aa, Paracoccus yeei
  misc_feature (1)..(347): tr|A0A1V0GT57|A0A1V0GT57_9RHOB Epoxyqueuosine reductase OS=Paracoccus yeei OX=147645 GN=queG PE=3 SV=1
MRCWISDPAEIRSRLTEQAQAEGFSALGICAPDANPQLPERLAAFLEQGRHGQMDWMADRAHWRADPSALWPEARSVIMLAELYTPGHDPLAVLDQRDRGAVSVYAQGRDYHDLVKKRLKRLGGWLVNLTGCEIKVFVDTAPVMEKPLAQAAGLGWQGKHTNLLSRTLGSWFFLGAIFTTLELPRDAPEAERCGSCRACLDACPTGAFPAPYQLDARRCVSYLTIEHRGPVDPELRPGLGNRIYGCDDCLAACPWNKFAQEASELRYHGPHGAPALAELAQLDDAAFRARFSGSPIKRIGRDRMVRNVLYAIGNSGLAHLRPLAEALRDDPDPAVADAAGWACERLP

SEQ ID NO: 79241 - protein, 340 aa, Paracoccus zhejiangensis
  misc_feature (1)..(340): tr|A0A2H5F2H0|A0A2H5F2H0_9RHOB tRNA epoxyqueuosine(34) reductase QueG OS=Paracoccus zhejiangensis OX=1077935 G N=queG PE=4 SV=1
MKADLATQAGIEGFAKMGVCRPDAVPQLPARLAEFLEAGREGQMGWMAERTGWRGNPAALWPEARSVVMLAEVYSPDHDPLAVLDQPDRAAVSVYAQGKDYHDLVKKRLKRLGRWLIDAHGGEIKVFVDTAPVMEKPLAQAAGLGWQGRHTNLLARDLGSWFFLGAIFTTLDLPPDPPEVEHCGNCRACLDICPTGAFPAPFQLDARRCISYLTIEHKGPVDPDLRALMGNRIYGCDDCLAVCPWNKFAREASELRYRGVIDAPPLAELATLDDAGFRARFSGSPIKRIGRDRFVRNVLYAIGNSGLPQLRAVAQGLTGDADPTVADAARWAAGRLEFPA

SEQ ID NO: 79242 - protein, 410 aa, Paracraurococcus sp.
  misc_feature (1)..(410): tr|A0A4R4DNX5|A0A4R4DNX5_9PROT Epoxyqueuosine reductase OS=Paracraurococcus sp. NE82 OX=2527868 GN=queG PE=3 S V=1
MLQSIEAPGTRESVEAGRAAAEAIRAEALRLGFGTVGFTEALLPEAVRARLEDFLAAGMHGSMGWMADRAAQRAQPRGLWPEAVSVVTLGMNYGPAENPLAALARRDRGAISVYAQGRDYHDVVKSRLKQLGRWMVQRFKGSELKVFVDTAPVAEKPLAQRAGLGWQGKHTNLVSRSHGSWLFLGEVYTTLALPPDPPERDHCGGCHRCLDICPTAAFPAPYRLDARRCLSYLTIEHKGPIPEEFRVPMGNRIYGCDDCLAVCPWNKFAKAHSEPGFAPRAALRAPKLADLAALDDAGFRALFSGSPVKRIGRDRFVRNVMIAVGNSGDPSLRPVAQARAEDADPVVAEAARWAVGRLDEAGTIAPPPSHACGAGSATGRQPLPGVAGVRRTAPNGVEVPHHPRRLADEP

SEQ ID NO: 79243 - protein, 311 aa, Parafilimonas terrae
  misc_feature (1)..(311): tr|A0A1I5WKT4|A0A1I5WKT4_9BACT Epoxyqueuosine reductase OS=Parafilimonas terrae OX=1465490 GN=queG PE=3 SV=1
MNKIHHTKFIKDSAEQLGFHYCGIAKAVKLDDDARRLEQWLQQGMHGNMHYMENYFDLRTDPRKLVPGAKSVITLLLNYFPSKQQEQDIPKISKYAYGKDYHEMIREKLNSLLELIRQNIGDINGRGFVDSAPVLERSWAVRSGAGWIGKNGNLITKQQGSFFFIATLITDLDLIADDAFAKDYCGSCRKCIDHCPTNAIQANKVIDGSRCISYFTIELKDAIIPAEMQGKFEHWMFGCDICQDVCPWNRFSKPTEEIAFTPIPEILNLSTKEWESMSEEAFRKTFKYSPLKRAKYKGLQRNLKFIQTTKL

SEQ ID NO: 79244 - protein, 380 aa, Parageobacillus caldoxylosilyticus
  misc_feature (1)..(380): tr|A0A150L3L9|A0A150L3L9_9BACI Epoxyqueuosine reductase OS=Parageobacillus caldoxylosilyticus OX=81408 GN=queG PE=3 SV=1
MDVMALKQEIIEYSKTIGIDKIGFASADPFVELKERLRRQQELGYQSGFEEPDIEKRTTPSLLLPEAKSIIAIALAYPSKMRNAPRGTKTERRGIFCRASWGKDYHDILRERLEKLEAFILEKVPQARVKSMVDTGELADRAVAERAGIGWSGKNCSIITPEFGSFVYLGEMITNIPFPPDEPIESRCGTCTKCIDACPTGALVQGGQLNAQRCISLLTQTKGFLADEFRDKIGNRLYGCDTCQMVCPENKGKDFHLHPEMEPDPEVAKPKLIPLLHISNREFKEKFGPVAGSWRGKKPIQRNAILALAHYKDKTAIPHLLKLLKEDRRPVIRGTAAWALGKIGDTSVITDLQKASQTEKDPEVLAEIEKGLQLLQASKE

SEQ ID NO: 79245 - protein, 380 aa, Parageobacillus caldoxylosilyticus; identical to SEQ ID NO: 79244
  misc_feature (1)..(380): tr|A0A023DJ23|A0A023DJ23_9BACI Epoxyqueuosine reductase OS=Parageobacillus caldoxylosilyticus NBRC 107762 OX=1 220594 GN=queG PE=3 SV=1

SEQ ID NO: 79246 - protein, 380 aa, Parageobacillus genomosp.
  misc_feature (1)..(380): tr|A0A023CS82|A0A023CS82_9BACI Epoxyqueuosine reductase OS=Parageobacillus genomosp. 1 OX=1295642 GN=queG PE=3 SV=1
MDVTALKQEIIEYSKMIGIDKIGFASADPFVELKERLRRQQELGYQSGFEEPDIEKRTNPSLLLPEAKSIIAIALAYPSKMRNAPRGTKTERRGIFCRASWGKDYHDILRERLEKLETFILEKVPQARVKSMVDTGELADRAVAERAGIGWSGKNCSIITPEFGSYVYLGEMITNIPFPPDEPVENRCGTCTKCIDACPTGALVQGGQLNAQRCIAFLTQTKGFLADEFRNKIGNRLYGCDTCQMVCPANKGKDFHLHPEMEPDPEVAKPKLIPLLHISNREFKEKFGPVAGSWRGKKPIQRNAILALAHYKDKTAIPHLLKLLKEDSRPVIRGTAAWALGKIGDTNVIPDLQEASQTEKDPEVLAEIEKGLQLLQASKE

SEQ ID NO: 79247 - protein, 390 aa, Parageobacillus thermantarcticus
  misc_feature (1)..(390): tr|A0A1I0TXQ7|A0A1I0TXQ7_9BACI Epoxyqueuosine reductase OS=Parageobacillus thermantarcticus OX=186116 GN=queG PE=3 SV=1
MDAAALKQEIIEYSKTIGIDKIGFASADPFVELKERLRRQQELGYQSGFEEPDIEKRTNPSLLLPEAKSIIAIALAYPSKMKNAPRGTKTERRGIFCRASWGKDYHDVLRERLEKLEAFILERVPHARMKSMVDTGELADRAVAERAGIGWSGKNCSIITPEFGSYVYLGEMITNIPFPPDEPIESRCGTCTKCIDACPTGALVQGGQLNAQRCISFLTQTKGFLADEFRDKIGNRLYGCDTCQMVCPENKRKDFHIHPEMEPDPEVVKPKLIPLLHISNREFKEKFGSLAGAWRGKKPIQRNAILALAHYKDKTAVPHLLKLLKEDSRPVIRGTAAWALGKIGDTRVVSDLEEASRMEKDPEVLSEIQKGLQLLCSKNEEKGKNRSPLT

SEQ ID NO: 79248 - protein, 389 aa, Parageobacillus thermoglucosidasius
  misc_feature (1)..(389): tr|A0A1B7KUD4|A0A1B7KUD4_PARTM Epoxyqueuosine reductase OS=Parageobacillus thermoglucosidasius OX=1426 GN=queG PE=3 SV=1
MDAAALKKEIIEYSKTIGIDKIGFASADPFVELKERLRRQQELGYQSGFEEQDVEKRTNPSLLLPEAKSIIAIALAYPSKMKNAPRGTKMERRGIFCRASWGKDYHDVLRERLGKLEAFILERVPHAKVKSMVDTGELADRAVAERAGIGWSGKNCSIITPEFGSYVYLGEMITNIPFPPDEPIESRCGTCTKCIDACPTGALVQGGQLNAQRCISFLTQTKGFLADEFRDKIGNRLYGCDTCQMVCPENKGKDFHLHPEMEPDPEVVKPKLIPLLHISNREFKEKFGSLAGAWRGKKPIQRNAILALAHYKDKTAVPHLLKLLKEDSRPVIRGTAAWALGKIGDTRVVPDLEEASRTEKDREVLSEIQKGLQLLHSNEEKGKNRSPAT

SEQ ID NO: 79249 - protein, 389 aa, Parageobacillus thermoglucosidasius
  misc_feature (1)..(389): tr|A0A401XXU8|A0A401XXU8_PARTM Epoxyqueuosine reductase OS=Parageobacillus thermoglucosidasius OX=1426 GN=queG PE=3 SV=1
MDAAALKQEIIEYSKTIGIDKIGFASADPFVELKERLRRQQELGYQSGFEEQDIEKRTNPSLLLPEAKSIIAIALAYPSKMKNAPRGTKMERRGIFCRASWGKDYHDVLRERLEKLEAFILEKVPHARVKSMVDTGELADRAVAERAGIGWSGKNCSIITSEFGSYVYLGEMITNIPFPPDEPVESRCGTCTKCIDACPTGALVQGGQLNAQRCISFLTQTKGFLADEFRDKIGNRLYGCDTCQMVCPENKGKDFHLHPEMEPDPEVVKPKLIPLLHISNREFKEKFGSLAGAWRGKKPIQRNAILALAHYKDKTAVPHLLKLLKEDSRPVIRGTAAWALGKIGDMRVIPDLEEAGRTEKDHEVLLEIQKGLQLLRSKQEKGKNRSPAT

SEQ ID NO: 79250 - protein, 389 aa, Parageobacillus toebii; identical to SEQ ID NO: 76996
  misc_feature (1)..(389): tr|A0A150MJE8|A0A150MJE8_9BACI Epoxyqueuosine reductase OS=Parageobacillus toebii OX=153151 GN=queG PE=3 SV=1

SEQ ID NO: 79251 - protein, 389 aa, Parageobacillus toebii; identical to SEQ ID NO: 76991
  misc_feature (1)..(389): tr|A0A3M0EY03|A0A3M0EY03_9BACI Epoxyqueuosine reductase OS=Parageobacillus toebii NBRC 107807 OX=1223503 GN=qu eG PE=3 SV=1

SEQ ID NO: 79252 - protein, 397 aa, Paraglaciecola agarilytica
  misc_feature (1)..(397): tr|K6X3Q6|K6X3Q6_9ALTE Epoxyqueuosine reductase OS=Para glaciecola agarilytica NO2 OX=1125747 GN=queG PE=3 SV=1
MSFAQYDLHQLAQNIKAWGEALGFQQVGIADIDLSRHEHKLQAWLDEGYHGQMNFMAEHGMKRARPAELLPGTLRVISVRMDYLPPDAKFAQTLKNKDTAYISRYALGRDYHKLLRNRLKKLGEKIRSECTTTNFRPFVDSAPVLEHALAEKAGIGWTGKHSLTLNKEGGSWFFLGELFIDIPLPVDEPVEEQCGSCNACITICPTQAIVAPYVVDAKRCISYLTIELKGAIPEEFRRALGNRIYGCDDCQLICPWNRYAKLTKESDFHPRDMLQDKTLAELAYWDESTFLKNTEGSAIRRIGHERWQRNIAVALGNAPYSQQICEVLTKLEVSGTDLVKEHAQWALKEQEAKKQLSLEVVNISDDTDTDDSLLPKQAQRLNQRLIRSIEKGLTRDA

SEQ ID NO: 79253 - protein, 381 aa, Paraglaciecola arctica
  misc_feature (1)..(381): tr|K6Z6B9|K6Z6B9_9ALTE Epoxyqueuosine reductase OS=Para glaciecola arctica BSs20135 OX=493475 GN=queG PE=3 SV=1
MSFLNTSELLSLSENIKAWGKALGFQQVGICDVNLEQHESHLQSWLEKGYAGEMHYMAEHGMKRARPAELLPGTMRVISVRMDYLPPDAKFAQTLKNKQQAYISRYALGRDYHKLLRARLKKLGDKIKAECAELNFRPFVDSAPVLEHAIAEKAGIGWTGKHSLTINKEAGSWFFLGELFVDIPLPVDKAVVENCGSCTACLTICPTQAIVEPYVVDARRCISYLTIEQKGAIPEQYRSLIGNRVYGCDDCQLICPWNRYANITDEADFHPRQKLMSQELIDLFAWNEETFLKNTEGSPIRRIGFERWQRNLAVGLGNAAYSERIVNTLQAALSQATDLVKEHIQWALQQHQNKASQNEKNDSRLTQRLVRSIEKGLVRDA

SEQ ID NO: 79254 - protein, 383 aa, Paraglaciecola hydrolytica
  misc_feature (1)..(383): tr|A0A136A508|A0A136A508_9ALTE Epoxyqueuosine reductase OS=Paraglaciecola hydrolytica OX=1799789 GN=queG PE=3 SV=1
MTQLDTQALVLLAENIKAWGKTLGFQQVGICDVDLSQHEGRLQNWLDQGYAGEMHYMSEHGMKRARPAELQPGTLRAISVRMDYLPPDAQFARSLKNKNQAYISRYALGRDYHKLMRARLKQLGEKIKAECGELNYRPFVDSAPVLEHALAEKAGLGWTGKHSLTLNKKAGSWFFLGELLIDLPLPVDAPATEHCGSCTACITICPTQAIVEPYVVDARRCISYLTIEQKGAIPTEFRTLIGNRIYGCDDCQLICPWNRYASITAEADFQPRKDLLAKELVDLFNWDEQTFLKLTEGSAIRRIGYERWQRNLAVGLGNAPYSSEIVDVLIKAKAQASDLVKEHIDWALEQQAIKALAIKAPEPQQRLTERLIRSVEKGLPRDA

SEQ ID NO: 79255 - protein, 397 aa, Paraglaciecola mesophila
  misc_feature (1)..(397): tr|K6YPJ6|K6YPJ6_9ALTE Epoxyqueuosine reductase OS=Para glaciecola mesophila KMM 241 OX=1128912 GN=queG PE=3 SV =1
MSFAQYDLHQLAQNIKAWGEALGFQQVGIADIDLSTHENKLQSWLDSGYNGQMNFMAEHGMKRARPAELLPGTLRVISVRMDYLPPDAKFAHTLRNKESAYISRYALGRDYHKLLRNRLKKLGEKIRTQCTTANFRPFVDSAPVLEHALAEKAGIGWTGKHSLTLNQQGGSWFFLGELFIDIPLPVDEPVEEQCGSCNACMTICPTQAIVAPYVVDAKRCISYLTIELKGAIPEAFRRALGNRIYGCDDCQLICPWNRYAKITSETDFHPRDVLQDKTLAELAMWDESTFLKNTEGSAIRRIGHERWQRNISIALGNASYSTHTYEALTVLAAQGTDLVQEHARWALNEQDLKKAQSIPVVSIEDNTPLDDSLLAPQAKRLNQRLIRSIEKGLARDA

SEQ ID NO: 79256 - protein, 396 aa, Paraglaciecola polaris
  misc_feature (1)..(396): tr|K7AAJ0|K7AAJ0_9ALTE Epoxyqueuosine reductase OS=Para glaciecola polaris LMG 21857 OX=1129793 GN=queG PE=3 SV =1
MSFAQYDLHQLAQNIKAWGEALGFQQVGIADIDLSAHEEKLQTWLDNGYHGQMNFMAEHGMKRARPDELLPGTLRVISVRMDYLPPDAKFAQTLKNKDAAYISRYALGRDYHKLLRNRLKKLGEKIRSECTTASFRPFVDSAPVLEHALAEKAGIGWTGKHSLTLNQQGGSWFFLGELFINIPLPVDEPVKEQCGSCNACITICPTQAIVGPYVVDAKRCISYLTIELKGAIPEEFRPLLGNRIYGCDDCQLICPWNRYAQLTNESDFHPREALQAKSLAELSEWDEETFLRATEGSAIRRIGHERWQRNISVALGNAPYSDSTRAALTVLAEQGTELVKEHALWGLKEQERKRAQYITIIDISAHEQDSALLAKHSQRLNQRLIRSVEKGLVRDA

SEQ ID NO: 79257 - protein, 362 aa, Paraglaciecola psychrophila
  misc_feature (1)..(362): tr|M4RVP4|M4RVP4_9ALTE Epoxyqueuosine reductase OS=Para glaciecola psychrophila 170 OX=1129794 GN=queG PE=3 SV= 1
MSSLNTYELLSLAKNIKAWGKVLGFQQVGICDVNLEQHESHLQSWLDKGYAGEMNYMVEHGMKRARPAELMPGTMRVISVRMDYLPPNAKFAHTLKNKKQAYISRYALGRDYHKLLRSRLKKLGEKIKTECEQLNFRPFVDSAPVLEHAIAEKAGIGWTGKHSLTINKEAGSWFFLGELFVDIALPVDQPVEENCGSCKACITICPTQAIVEPYVVDARRCISYLTIEQKGAIPEQYRALIGNRVYGCDDCQLICPWNRYANITAEADFHPRQKLMSQELIDLFAWDESTFLKNTEGSAIRRIGFERWQRNLAVGLGNAPYSLEIVSTLQSALSHTTDLVKEHIQWALKQHKNKATNEEKNR

SEQ ID NO: 79258 - protein, 381 aa, Paraglaciecola sp.
  misc_feature (1)..(381): tr|A0A2N1D9E3|A0A2N1D9E3_9ALTE Epoxyqueuosine reductase OS=Paraglaciecola sp. MB-3u-78 OX=2058332 GN=queG PE=3 SV=1
MSSLNTSELLSLAENIKAWGKVLGFQQVGICDVDLEQHESHLQSWLEKGYAGEMHYMAEHGMKRARPAELLPGTMRVISVRMDYLPPDAKFAHTLKNKQQAYISRYALGRDYHKLLRARLKKLGDKIKTECEDLNFRPFVDSAPVLEHAIAEKAGIGWTGKHSLTINKEAGSWFFLGELFVDIPLPVDKAVEDNCGNCTACITICPTQAIVEPYVVDARRCISYLTIEQKGAIPEQYRSLIGNRVYGCDDCQLICPWNRYAHITDEADFHPRQKLMSQELIDLFAWDEPTFLKNTEGSAIRRIGFERWQRNLAVGLGNAPYSTQIVSTLQGALDHATDLVKEHIQWALAQHQHRATQDEKSDNRLTQRLVRSIEKGLVRDA

SEQ ID NO: 79259 - protein, 364 aa, Parahaliea aestuarii
  misc_feature (1)..(364): tr|A0A5C8ZP45|A0A5C8ZP45_9GAMM Epoxyqueuosine reductase OS=Parahaliea aestuarii OX=1852021 GN=queG PE=3 SV=1
MSEPSQQTPPLTASQQQSLLRLIRAWAEELGFQQVGITDVDLGEHRDYLQKWLDAGYHGSMDYMARHGDKRSRPEQLVPDTCRVISVRMDYHLGDTQPLAVLNNPRKAYISRYTLGRDYHKLIRKRLAQLARRIEAEAGGGHYRAFVDSAPVLERAIAERAGLGWIAKNTMLINDRAGSWFFLGEIYTDLPLATSEPRTSKHCGSCTACLDICPTQAFVGPYQLDARRCISYLTIEHDGPIDEELRPLMGNRIFGCDDCQLVCPWNKFAQPTGEDDFRPRHGLEAADLVDLFLWDEDTYLARTEGSALRRIGHERWLRNLAVALGNAPSSAALLAALALRRGHPSALVREHVEWAIARHEPGPD

SEQ ID NO: 79260 - protein, 367 aa, Parahaliea aestuarii
  misc_feature (1)..(367): tr|A0A5C8ZKY8|A0A5C8ZKY8_9GAMM Epoxyqueuosine reductase OS=Parahaliea aestuarii OX=1852021 GN=queG PE=3 SV=1
MTPDKPTTDTPTLSPEAQQDLLGRIHAWAAELGFQQVGVADVDLGEHREYLQKWLDAGYHGSMDYMARHGSKRSRPEGLVPGTCRVLSLRMDYHQNDTQPLAVLDNPQQAYISRYTLGRDYHKLIRKRLAQLARRIEQEAGGGHFRAFVDSAPVLERAIAERAGLGWIAKNTMLINDKAGSWFFLGEIYTDLPLPAGPPQTSKHCGTCTACLDVCPTNAFVGPYQLDARRCISYLTIEHDGPIDPALRPLMGNRVFGCDDCQLVCPWNKFARPTAESDFRPRHNLDAPDLVELFLWDEETYLARTEGSALRRIGHERWLRNLAVALGNAPGSPAIMAALDSRREHPSALVREHVEWALARHRGTQGD

SEQ ID NO: 79261 - protein, 379 aa, Paraliobacillus ryukyuensis
  misc_feature (1)..(379): tr|A0A366EA86|A0A366EA86_9BACI Epoxyqueuosine reductase OS=Paraliobacillus ryukyuensis OX=200904 GN=DES48_1051 79 PE=4 SV=1
MAYETLKEEIIAYGKSIGIDKIGFAAANEFAEMKSRLKLQQDSGYQSGFEKGTIEERTEPTLHLSDAQSIIAIAVAYPSRMKNPPKNKKGSRRGNFCRASWGLDYHHVLNGKLEQLSTFIASKIAGFESRSMVDTGELSDRAVAERAGIGFSGKNTMIITPEFGSYVYLGEMITNIPFPPDEPVDDGCGDCTKCLDACPTGALVEPGRLNAQNCIAFVTQTKGFLPDKYREIMGNQLYGFDTCQVVCPKNKQVDTHLHPELEPEPDLVKPELLPLLSISNREFKERFGSMAGSWRGKKPIQRNAIIALAHYKETTAIPELIRLMKEDPRPVIRGTAAWAIGKIGTEDGLAAIKQAQTNEQDEQVLHEMEKGLAYYTQVT

SEQ ID NO: 79262 - protein, 382 aa, Paraliobacillus sp.
  misc_feature (1)..(382): tr|A0A0U1KM93|A0A0U1KM93_9BACI Epoxyqueuosine reductase OS=Paraliobacillus sp. PM-2 OX=1462524 GN=queG PE=4 SV =1
MAYQTLKQEIITYSKSIGIDKIGFAAANEFSAMKSRLKQQQDDGYQSGFEKGTIEERTEPVLHLADAESIIAIAVAYPSRMKKPPKSSKGSRRGNFCRASWGMDYHHVLNEKLDKLSTFIASKVPGFQCRSMVDTGELSDRAVAERAGIGFSGKNTMIITPEFGSYVYLGEMITNIPFPPDEPVDDGCGECTKCLDACPTGALVEPGRLNAQNCIAFVTQTKGFLPDKYREIMGNQLYGFDTCQVVCPKNKQVDTHLHPELEPEPDLVKPELIPLLSISNREFKERFGSMAGSWRGKKPIQRNAIIALAHYKDEAAIPELIRLMKVDPRPVIRGTAAWAIGKIGTKEGFKAIRQAQTNEEDEDVLNEMDKGLTYELKQVEKS

SEQ ID NO: 79263 - protein, 371 aa, Paramaledivibacter caminithermalis
  misc_feature (1)..(371): tr|A0A1M6MMD4|A0A1M6MMD4_9CLOT Epoxyqueuosine reductase OS=Paramaledivibacter caminithermalis DSM 15212 OX=112 1301 GN=SAMN02745912_01320 PE=4 SV=1
MITKGKIIKYSKEIGIDLIGFVKAEVFKELRDMLKKREEKNYLSGFEEKSIEKRINPYLTLENVETIIVIGIPYFIDEADIEQSKSCGNVGNISRSSWGKDYHIVLKEKMKSLTEYIAAEDPDFKYKYFTDTGPLVDRYLAYRAGIGWYGRNNCIISYDYGSWIFIGYILCNLKIKPDDSLKTRCINCNKCINSCPTGALMKNNIYNSKLCISYLTQTKEDIKYELREKMGNSLYGCDICQLVCPHNRKRLAGNKDFIPKKNSSKPDLLDLLKLSNEQFKKEFGDTALAWRGNRIMKRNALIALGNCGSQEVIDHLVEYLNNPSIMIKKYCAWAIIRLNKDKGKKILNEHLKKEKEREVIDEILKLYKYYL

SEQ ID NO: 79264 - protein, 384 aa, Paramesorhizobium deserti
  misc_feature (1)..(384): tr|A0A135I041|A0A135I041_9RHIZ Epoxyqueuosine reductase OS=Paramesorhizobium deserti OX=1494590 GN=queG PE=3 S V=1
MKRSNNERLKRFLAEEARAEGFDLMAVTTPDAIPQAGERLRQYITDKHHGTMEWMEETAERRASPGALWPEVRSVIMLAMNYGPEDDPLAVLNRRDRAAISVYAQNRDYHDIIKGKLKQIAGRFAARAGSDVKVFVDTAPVMEKPLAAAAGIGWQGKHTNLVSREFGSWLFLGSIFTTAEIAPDEPETDHCGSCRACLDICPTNAFPAPYRLDARRCISYLTVEHKGPIAHEFRKALGNRIYGCDDCLAVCPWNKFAEEAHEAKLRARDDLKAPKLEALLALDDAAFRTLFSGSPVKRIGRDRFLRNVLIAAGNSGDQNLLSQVEQLLDDPSPLVRGTAVWALGQLAEPRIFRKLRKALTASETDDTVLAEWRMAERQDPVGER

SEQ ID NO: 79265 - protein, 315 aa, Paramuribaculum intestinale
  misc_feature (1)..(315): tr|A0A2V1IWH0|A0A2V1IWH0_9BACT tRNA epoxyqueuosine(34) reductase QueG OS=Paramuribaculum intestinale OX=209415 1 GN=queG PE=4 SV=1
MNSMSSRCDVPGHADLEGLMSQSGAYRFGIAAVEPVDGRSAAAYDQWIAAGCHDTMDYLDRYADVRRDPSLLLEGARSMIVAAFPYAAPVLPGEGKLRFAAYALGDDYHEVLRRRLEGAAEVLRQRWGGLTRVCVDTAPLRERYWAVRAGLGFIGLNCQLILPGAGSYFFIGTILSTVDMTPDAPCRLSCAGCRRCVVYCPGQALDGNPSHPSLDARRCLSCLTIEHRGPLPSGVRLGRRVYGCDTCQIACPHNRMADPVRPLPEFEPRPELLELTRDDLLSMDQQRFSTLFRHSAIKRAKLAGLQRNALSVEPD

SEQ ID NO: 79266 - protein, 373 aa, Paraperlucidibaca baekdonensis
  misc_feature (1)..(373): tr|A0A3E0H885|A0A3E0H885_9GAMM Epoxyqueuosine reductase OS=Paraperlucidibaca baekdonensis OX=748120 GN=queG PE =3 SV=1
MCAMTRIPLRPAANLSPPDLHALKADIADWARALGFQQMGVSGIDLGEHPAHLKRWLAQGFEAGMGWMHEPKRASPAELVPNTQRIISLRMDYLPADPRILETLADGERAYIARYALGRDYHKLIRKRVQKLADRMSEAIGPFGYRAFVDSAPVLEKAIASQAGLGWMGKHTLILNRHAGSYFFLAELFTDVALPVDAPVSSHCGSCSACMNICPTQAIIAPYVLDANKCISYLTIEHRGVIAEPLRRAIGNRIFGCDDCQLVCPWNRYARASAEPDFVPRHGLDGPALLELWHWDEATWQSRTEGMPLRRTRYEGWLRNVSIALANAPANATIVQALEQRRESLSSSEHLNAVVAEHIDWAISEQAQKLSLR

SEQ ID NO: 79267 - protein, 374 aa, Paraphotobacterium marinum
  misc_feature (1)..(374): tr|A0A220VD34|A0A220VD34_9GAMM Epoxyqueuosine reductase OS=Paraphotobacterium marinum OX=1755811 GN=queG PE=3 SV=1
MHKNKKYNWSKLKHQINNWSLELGFQEMGVTDLDLNNYTPHYLDWLEKKFHGEMSWIAKNIDKRTSPEKLVDDTIRILSFRMDYLPPDAGFANNLKQNNMAYISRYASGRDYHKIMRKRLQKLADKINNSFEDDFKFRAFVDSAPVLERPIAEKAGIGWQGKNSLIINKKAGSWFFLGELYVNIPLPIDSPVTNDCGKCSSCIKICPTNAIVGDKVVDATKCISYLTIEYAGVIPIELRKKMGNRIYGCDDCQLVCPWNRFASITNEKDFYFKDITKNQKLFDLLRWDESQFLKKTEGSPIRRIGYVKWIRNIIVAMGNSNLSEEEKLYIKSLRGKNKIWDEHIDWSLNNQIKSLKSNTQKLIRIIEKGLTRDA

SEQ ID NO: 79268 - protein, 338 aa, Paraprevotella clara
  misc_feature (1)..(338): tr|R5NBG9|R5NBG9_9BACT Putative iron-sulfur cluster-bin ding protein OS=Paraprevotella clara CAG:116 OX=1263095 GN=BN471_02425 PE=4 SV=1
MSVDRTCSVSAERERFMQKRMVKTENILSATQIKAEAARLGFSACGLAPAGPVAPQHAAFFKRWLGEGRQAGMAYMEGHEAKRLDPRLLVEGCRTVVSVALNYRPSTPIPDHKLQIAWYAYGQDYHDIMRQKLNNLIEALRHSTPEGTLQGRAFCDTAPVLERYWAWRCGLGWIGRHTQLVIPRAGSAFFLGELMLNLPADAYDAPFPTDRCGTCRRCIEACPTQALEEGRGLDVRRCLSYLTIENRGGIPEEAAARMYPYFYGCDRCLRACPHLRSAPPTTEPAFTPRPELLQMEEEDWMALDVERYRMLFKGSAVKRAKYEGLIRNLKALRGNGDR

SEQ ID NO: 79269 - protein, 318 aa, Paraprevotella clara
  misc_feature (1)..(318): tr|G5SPD5|G5SPD5_9BACT Putative iron-sulfur cluster-bin ding protein OS=Paraprevotella clara YIT 11840 OX=76296 8 GN=HMPREF9441_01217 PE=4 SV=1
MVKTENILSATQIKAEAARLGFSACGLAPAEPVAPLHAAFFKRWLGEGRQAGMAYMEGHEAKRLDPRLLVEGCRTVVSVALNYRPSTPIPDHKLQIAWYAYGQDYHDIMRQKLNSLLEALRHSTPEGTLQGRAFCDTAPVLERYWAWRCGLGWIGRHTQLVIPRAGSAFFLGELMLNLPADAYDAPFPTDRCGTCRRCIEACPTQALEEGRGLDARRCLSYLTIENRGGIPEEAAARMYPYFYGCDRCLRACPHLRSAPPATEPAFTPRPELRQMEEEDWMGLDVERYRMLFKGSAVKRAKYEGLIRNLKALRGNGDR

SEQ ID NO: 79270 - protein, 316 aa, Paraprevotella xylaniphila
  misc_feature (1)..(316): tr|F3QV99|F3QV99_9BACT Putative iron-sulfur cluster-bin ding protein OS=Paraprevotella xylaniphila YIT 11841 OX =762982 GN=HMPREF9442_02124 PE=4 SV=1
MTKNILSATQIKAEAARLGFSACGLAPAGPVAPQHAAFFKRWLGEGRQAGMAYMEGHEAKRLDPRLLVEGCRTVVSVALNYHPSTPIPDHKLQIAWYAYGKDYHDIMRQKLNGLLEALRHSTPEGTLQGRAFCDTAPVLERYWAWRCGLGWIGRHTQLVIPRAGSAFFLGELMLNLPADAYDTPFPTDRCGTCRRCIEACPTHALEEGCGLDARRCLSYLTIENRGGIPEEVAARMYPYFYGCDRCLRACPHLRSAISTTEPAFTPRPELLQMEEEDWVRLDVEHYRMLFKGSAVKRAKYEGLIRNLKALRGHGDK

SEQ ID NO: 79271 - protein, 379 aa, Pararheinheimera mesophila
  misc_feature (1)..(379): tr|A0A3P3QRB0|A0A3P3QRB0_9GAMM Epoxyqueuosine reductase OS=Pararheinheimera mesophila OX=1547515 GN=queG PE=3 SV=1
MTSTINWQQLAEQIKVWGQQLGFQQIGITDTDLTSEEPKLQQWLDAGFHGEMDYMAAHGMKRARPAELHPGTIRVISARMDYLPEHAQFAANLADPSMAYISRYALGRDYHKLIRNRLKQLGERIEKELGALGFRPFVDSAPILERPLAVKAGLGWQGKHSLVLNQEAGSWFFLGELLVDIPLPVDPVHTGDCGTCVACLTICPTQAIVAPYTVDARRCISYLTIELQGAIPEEFRPLLGNRIYGCDDCQLVCPVNRAAKTTQEQDFQRRPQWLNTSLLELWRWSEAEFLRYTEGSAIRRIGYQRWQRNIAVALGNAPFDPVIVDALEQQLAQSSELVAEHIRWALGQQQKKSLLQNNLLNRQTDRLIRVIQKGLPRDA

SEQ ID NO: 79272 - protein, 379 aa, Pararheinheimera tangshanensis
  misc_feature (1)..(379): tr|A0A5C8M0M6|A0A5C8M0M6_9GAMM Epoxyqueuosine reductase OS=Pararheinheimera tangshanensis OX=400153 GN=queG PE =3 SV=1
MTNSINWQQLAEQIKEWGQQLGFQQIGITDTDLTSEEPKLQQWLDAGYHGEMDYMAAHGMKRARPAELHPGTIRVISVRMDYLPEHAQFAANLADPSMAYISRYALGRDYHKLIRNRLKQLGERIEKELGALGFRPFVDSAPILERPLAVKAGLGWQGKHSLVLNQDAGSWFFLGELLVDIPLPVDAVHTGDCGSCVACITICPTQAIVAPYTVNARRCISYLTIELQGAIPEEFRPLLGNRIYGCDDCQLVCPVNRAADTTQEQDFQRRPQWLNTSLLDLWRWTETEFLNYTEGSAIRRIGYQRWQRNIAVALGNAPFDPAIVDALEQQLALASDLVAEHIQWALRQQQNKSLLQQNLLSRQTDRLVRVIQKGLPRDA

SEQ ID NO: 79273 - protein, 386 aa, Pararhizobium polonicum
  misc_feature (1)..(386): tr|A0A1C7P6L3|A0A1C7P6L3_9RHIZ Epoxyqueuosine reductase OS=Pararhizobium polonicum OX=1612624 GN=queG PE=3 SV= 1
MPGDALHTEKHDKRLRTLTRFLKEEARDKGFDVCRVTLPDSIPQAPERLADFLDRGYHGTMDWMAETAARRSDPRVLWSDVRSVVLFGMNYGPDEDPRSILGKPDLGAISVYARNRDYHDVIKGKLKEVATRFAARAGVDVKVFVDTAPVMEKPLAEQAGLGWQGKHTNLVSREFGSWLFLGSLFTTAELLVDAPERDHCGSCRACLDACPTDAFPAPYKIDARRCISYLTIEHKGPIDPGIRARIGNRIYGCDDCLAACPWNKFAAAASEMKLQAREDLKAPPLSYLLTLDDTAFRTFFSGSPVKRIGRDRFVRNCLIAAGNSGDAGLIDICAELSKDTSPTVRGMAIWALSRLMAAGDFTHFAARRHGETDPEVLAEWKMAGVV

SEQ ID NO: 79274 - protein, 375 aa, Pararhizobium sp.
  misc_feature (1)..(375): tr|A0A506U617|A0A506U617_9RHIZ Epoxyqueuosine reductase OS=Pararhizobium sp. BGMRC6574 OX=2590452 GN=queG PE=3 SV=1
MDERAEERLRARLIADAGRLGFSGVRITRADAIPAAKGRLDHFLAEGRHGTMAWMADTADRRGAPLTLWPAARSVVMLAMNYAPESDPLAILDQPAHGAISVYARHRDYHDVIKGKLKEMASRLAAASGADVKVFVDTAPVMEKPLAEAAGLGWQGKHTNLVSRELGSWLFLGSIFTSAELTPDAAESDHCGSCRACLDVCPTDAFPAPYQLDARRCISYLTIEHAGPIPHEFRKAIGNRIYGCDDCLAVCPWNKFAKVAREQKLQARADLDAPPLARLLALDDGAFRQLFSGSPIKRIGRTRFMRNVLIAAGNSNDASLVEPCRALLDDAEPLVRGAAVWALGELLDHRSLSALEATVEELDPSVRSEWAAALG

SEQ ID NO: 79275 - protein, 347 aa, Pararhodobacter aggregans
  misc_feature (1)..(347): tr|A0A2T7URP8|A0A2T7URP8_9RHOB Epoxyqueuosine reductase OS=Pararhodobacter aggregans OX=404875 GN=queG PE=3 SV =1
MGLKAALAARARAEGFAAMGVTRPDAVPELAGRLAAFVEAGRHGQMGWMAERMPWRGDPAALWAEARSVIMLAELYTPDEDPMAAVARREAGAISVYARGRDYHDVVKARLKRLGRWLIEEARQRGETPEIKVFVDTAPVMEKPLAAAAGLGWQGKHTNLLGRDLGNWFFLGAIFTTLELEPDAPARENCGSCTACLQACPTAAFPAPFQLDARRCISYLTIEHHGPVDPELRALIGNRIYGCDDCLAACPWNKFAAAATEVKYAARDDLRAPPLAELAALDDAGFRARFSGSPIKRIGRDRFVRNVLYAIGNSGAPGLAPVAEALVADPDETVAEAARWALTRLRP

SEQ ID NO: 79276 - protein, 351 aa, Pararhodobacter sp.
  misc_feature (1)..(351): tr|A0A2T8HVF4|A0A2T8HVF4_9RHOB Epoxyqueuosine reductase OS=Pararhodobacter sp. AM505 OX=2172121 GN=queG PE=3 S V=1
MARAVEAFEPEAFKERLVARALEEGFSAARITRPDAIPQAAARLKDYVEAGRHGQMGWMEERMAWRGNPAALWPEARSVLMLAEAYTPAHDPMAVLAQPEKGAISVYAQNRDYHDVVKKRLKRLGRWMIEAVGGEIKVFVDTAPVMEKPLAEAAGLGWQGKHTNLLSRDLGNWFFLGAIFTTLEMPVDAPARENCGSCTACLEACPTDAFPAPFQLDARRCISYLTIEHKGPIDPELRALIGNHIYGCDDCLAACPWNKFAVAASEVKYAARPDLIAPDLAELAGLDDAGFRALFSGSPVKRIGRDRFVRNVLYAIGNSGKPHLKPVAQGLTEDPDATVAEAARWAVSRLE

SEQ ID NO: 79277 - protein, 345 aa, Pararhodobacter sp.
  misc_feature (1)..(345): tr|A0A2U2C6A8|A0A2U2C6A8_9RHOB Epoxyqueuosine reductase OS=Pararhodobacter sp. CIC4N-9 OX=2184063 GN=queG PE=3 SV=1
MGLKAALDARARDEGFAAMGVTRPDALPELAGRLETFVAAGYHGQMGWMAERMRWRGDPAALWPEARSVIMLAELYTPDEDPMAAVARHEAGAISVYARGRDYHDVVKKRLKRLGRWLIDEAARRGETAEIKVFVDTAPVMEKPLAQAAGLGWQGKHTNLLGRDLGNWFFLGAIFTTLELEPDAPERERCGSCTACLTACPTDAFPAPFKLDARRCISYLTIEHHGPVDEDLRAKLGNRIYGCDDCLAACPWNKFAAAASEVKYAAREDLRAPPLAELAALDDAGFRARFSGSPIKRIGRDRFVRNVLYAIGNSGQPALRPVAEALTDDPDATVADAARWAVSRL

SEQ ID NO: 79278 - protein, 356 aa, Pararhodospirillum oryzae
  misc_feature (1)..(356): tr|A0A512H4F5|A0A512H4F5_9PROT Epoxyqueuosine reductase OS=Pararhodospirillum oryzae OX=478448 GN=queG PE=3 SV =1
MVSEKQRAQLRARAHALGFEACAITAARLPEGAGEDLRAFVAQGHHGPMAWMAETLERRADPRVLWPEAVSVVTLGLSYAPPEIPDPTGGDPTRACFSVHARHRDYHAVAKGRAKTLAQWMVSRLGGAVKVFVDTAPVMEKPLAHAAGLGWQGKHTNLVSPRFGSWLVLAEVFTTVDLPPDPPMPDRCGACRRCLDACPTGALTAPHVMDARRCLACLTIETPGPIPEPLRGAMGNRVYGCDACLAVCPWNRFAPPTTEPALVARPDLIDPPLAELAALDDPGFRARFSGTGVRRLGYARFKRNVLIALGNSGAPALKDAVAPFLDDPDPVIADAARWAWGRLGAEEGNEEGEGHE

SEQ ID NO: 79279 - protein, 349 aa, Pararhodospirillum photometricum
  misc_feature (1)..(349): tr|H6SN67|H6SN67_PARPM Epoxyqueuosine reductase OS=Para rhodospirillum photometricum DSM 122 OX=1150469 GN=queG PE=3 SV=1
MPRGRWGILSPSEAIRARALALGFSAVALTRATLAPGVREDLLAYLAEGRHGPMAWMAETAERRGDPRVLWPEAVSVVTLGLSYAPARDPRHDAPSPSHASLSVHARHRDYHDVAKGRAKLLAQWMGAKLGGAVKVFVDTAPVMEKPLARAAGLGWVGKNTVLIHPVHGTWLVLAEVFTTLALDPDPPMADRCGTCRRCLDACPTGALTAPGRMDARRCLACLTLETPGPLPEALRPALGNRIYGCDACLVVCPWNRFAPPTTEPALTARPDLCAPPLAALLALDDAGFRAFFRGSGMRRLGHARFLRNVLMAAGNSADPGLRPAVAALADHPDALVRDAAAWALARLG

SEQ ID NO: 79280 - protein, 385 aa, Parashewanella curva
  misc_feature (1)..(385): tr|A0A3L8PZF2|A0A3L8PZF2_9GAMM Epoxyqueuosine reductase OS=Parashewanella curva OX=2338552 GN=queG PE=3 SV=1
MLNSSQLKILADNIKSWAKEIGFAHVGICDTDLADEEPKLQEWLDKGYHGEMHYMANHGMMRARPHELQPGCLRVISVRMDYLPPEAGFATNLKDPNLGYISRYAGGRDYHKMMRNRIKKLGDRIASHLQELGEAMPEYRPFVDSAPILERPLADKAGIGWTGKHSLILSRNAGSWFFLGELLINVPLPVDEPVNNECGKCVACIKSCPTNAIVEPYVVDGRRCISYLTIEHQGSIPEEFRPLIGNRIYGCDDCQLVCPVNSEAPLTEEWDFHIRDAIKLPKLVDLFQWTDQEFLTRMQGSAIRRIGHSLWLRNIAIALGNAPFSEEIIQVLKLKRDAHDVSEMVREHIDWALEQQNIKRESELDINRKTLRVIKAVERGLQRDR

SEQ ID NO: 79281 - protein, 386 aa, Parashewanella spongiae
  misc_feature (1)..(386): tr|A0A3A6TZL4|A0A3A6TZL4_9GAMM Epoxyqueuosine reductase OS=Parashewanella spongiae OX=342950 GN=queG PE=3 SV=1
MLSADTLRQLADKIKLWGKELGFAHIGICDTDLTSEEPKLQQWLDNGYHGDMHYMANHGMMRARPHELQPGCLRVISARMDYLSPNAGFAINLRDPNLAYISRYAGGRDYHKMMRNRLKKLGDRIADEMKSLGEELPDYRPFVDSAPVLERPLAEKAGIGWTGKHSLILNKDAGSWFFLGELMINLPLPVDIPIKEGCNTCVACIKSCPTNAIVEPYVVDGRRCISYLTIEHQGSIDKELRPLMGNRIYGCDDCQLVCPVNGAAPLTNESDFHTRDELTQPKLLDLFHWTEPEFLTRMQGSPIRRIGHQQWLRNIAIALGNAPFSNEVIESLTSKVASGELNEVALEHVHWAIEQQKSKQITQTDVVNRKTYRVIKAVEKGLPRDA

SEQ ID NO: 79282 - protein, 352 aa, Parasphingopyxis lamellibrachiae
  misc_feature (1)..(352): tr|A0A3D9FGF8|A0A3D9FGF8_9SPHN Epoxyqueuosine reductase OS=Parasphingopyxis lamellibrachiae OX=680125 GN=queG PE=3 SV=1
MTIDTLSTRLKEQALAEGFAACGIAPADAAPKTAERLREWLAAGAHGEMLWMESRAHHRERPKALWPDVQSLVMLGMSYAPKEDPLRLAGEADIGRISVYAQGKDYHDPVKKALKRVARWLIAEAAKDGTEADVKVFVDTAPVMEKPLSEAAGIGWQGKHTNLLSREHGNWLFLGAIYTTLNLNADTPATDRCGSCTACQTACPTDAFPSPYRLDARRCISYLTIEHAGPIPHEFREAMGNRIYGCDDCLAVCPWNKFADQARANKAFAPRAELAAPALADLLALDDPGFRKVFSGSPIKRIGRNRMVRNCLIAAGNSGDGALKEPVRALLGDPDEVVREAADWAVGRLRSF

SEQ ID NO: 79283 - protein, 387 aa, Parcubacteria group; identical to SEQ ID NO: 75468
  misc_feature (1)..(387): tr|A0A0G1G3V8|A0A0G1G3V8_9BACT Epoxyqueuosine reductase OS=Parcubacteria group bacterium GW2011_GWA2_43_13 OX= 1618826 GN=queG PE=3 SV=1

SEQ ID NO: 79284 - protein, 436 aa, Parcubacteria group
  misc_feature (1)..(436): tr|A0A0G0IV67|A0A0G0IV67_9BACT 4Fe-4S ferredoxin-type d omain-containing protein OS=Parcubacteria group bacteri um GW2011_GWD1_38_16 OX=1618936 GN=US78_C0009G0003 PE=4 SV=1
MNIQEKIKKIAEELGFDLVGVADVVDVVTGYEQLAISEKLYDWVKKGYHADMKWFADSVEKRKDILKVMPGAKSVICVAMNYYNNTNIRMSTNDTNNTNKENMIGKIARYAHGRDYHKIFDKKLKLFSQKLKEIFPEGEFKYYSDTGPVLERAWAQRAGLGFIGKNTNLITKYGSWVLLGEIITNADFSMDKVGIFTKSNFSNNNFIQEFPNLKPQISKQIPNFKFKNFKQFIDFWKLKNWKLFGNWLFGNWKLNKLDFNKINRVNTCDGCERCIKSCPTGALCAPYMVDARKCISYLTIEYKGEIPMELREKMGNRIFGCDACQEVCPFNIGRSSFAKATADKAESELTEKMIAGKEIDLREILSIKTDEEFLRKFAGSPVMRAKRKGLIRNACIVAGNSGDGSLLPYLEKCLKDKELIIVETARWAIGKLELGV

SEQ ID NO: 79285 - protein, 373 aa, Parendozoicomonas haliclonae
  misc_feature (1)..(373): tr|A0A1X7ARD7|A0A1X7ARD7_9GAMM Epoxyqueuosine reductase OS=Parendozoicomonas haliclonae OX=1960125 GN=queG PE= 3 SV=1
MPLYLFNPVTESPNHSQSPISTALSQQELAQLAADIKLWARELGFQDAGITDINLGEHEQHLTNWLARDFHGEMDYMTSHGNMRSRPEELVPGTLRIISVRMDYLPGDTQTVRILQQPEKAYISRYSLGRDYHKLIRKRITQLGKRIEDKVGKFGYRAFVDSAPVLEKALAEKAGLGWIGKNTLLLNNKAGSWFFLGELFTDLPLPIDEPQQTSHCGSCFACAEICPTDAIVGPHQLDARRCISYLTIELKGAIPEEFRKPIGNRVFGCDDCQIICPWNKFAKNTCETDFLPRHKLDSTDLADLFLWTEEEFLDRTAGSPIRRTGFEGWLRNLAVGLGNAPTNDKVISALQARLDYPSEIVQEHVRWALEQHK

SEQ ID NO: 79286 - protein, 383 aa, Parvibaculum lavamentivorans
  misc_feature (1)..(383): tr|A7HPJ0|A7HPJ0_PARL1 Epoxyqueuosine reductase OS=Parv ibaculum lavamentivorans (strain DS-1 / DSM 13023 / NCI MB 13966) OX=402881 GN=queG PE=3 SV=1
MPISISDRAKDLNALRGELLARAKEAGFDDVGIARADARGDLPARLDEWLVEGRHGNMDWMAETAARRAAPATLWPEAKSVIMLAMNYGPDTDPLEILGHRDRAAISVYAQNRDYHDLVKKRLKQVARWLAKTSGAEVKVFVDTAPVMEKPLAEAAGLGWQGKHTNLVSRTLGSWFFLGSIFTTLDFEADKRHDDRCGECRRCLDACPTKAFPAPYELDARRCISYLTIEHKGHIAREFREPMGNRIYGCDDCLAVCPWNKFANRAREEAFHPRDELRAPLLSDLARLDDAAFRAFFSGSPVKRIGRDRFVRNVLIAIGNSGDPSLVPVTTALLEDASPLVRAMAVWALAQLGQGDILRARAETALQAEADEAVREEWRYSLR

SEQ ID NO: 79287 - protein, 383 aa, Parvibaculum sp.
  misc_feature (1)..(383): tr|A0A2D8XFL2|A0A2D8XFL2_9RHIZ Epoxyqueuosine reductase OS=Parvibaculum sp. OX=2024848 GN=queG PE=3 SV=1
MSATEQPGVAILKADIIAQAKAAGFDDVGFSPADLSEETQTDFQEWLDRGAHGDMAWMEETRERRASPTALWSEVKSVIVLAMNYGPDGDPLETLRHPDKANISVYARNRDYHDLVKKRLKRVARWLVDETGCELKVFVDTAPILEKPVAAGSSLGWQGKHTNLVSSELGSWFFIGSIFTNLELPPEAPHADQCGSCHACLDACPTNAFPGPYELDARRCISYLTIEHKGHIAPEFRGPMANRIYGCDDCLAACPWNKFARAASEHALKPREDLTSPDLSELLALDDTGFRALFAGSPVKRIGRDRFLRNVLIAAGNSGDETLLPQVTDHLGDASELVRAMAVWALGELASPKDIERARLEHGDRETDGDVRAEWARLPSLPR

SEQ ID NO: 79288 - protein, 379 aa, Parvibaculum sp.
  misc_feature (1)..(379): tr|A0A2D4VG54|A0A2D4VG54_9RHIZ Epoxyqueuosine reductase OS=Parvibaculum sp. OX=2024848 GN=queG PE=3 SV=1
MPISTSENADLKTRIAAKAREAGFDAVGFTRADARPDLPARLSRWLELRRQGDMGWMEETAARRSDPLTLWPEAKSVVMLAMNYGPAENPLPRLEERDRAVFSVYAQNRDYHDLVKKRLKRVARWLAEEASVEVKVFVDTAPVMEKPFAEAAGLGWQGKHTNLVSSELGSWFFLGAIFTTQALEPDTPHEDRCGSCRACQDVCPTDAFPQAYELDATRCISYLTIEHKGHIPHEFRRPMGNRIYGCDDCLAVCPWNKFAQEARETAFHPREDLVSPLLADLVTLDDAAFRARFSGSPVKRIGRDRFIRNVLIAVGNAGDPVLAIHARRLLSDPSPLVRAMAVWALGELFTGEEVAALAKEHLPSEEDEDVRAEWRSLAG

SEQ ID NO: 79289 - protein, 400 aa, Parvibium lacunae
  misc_feature (1)..(400): tr|A0A368L1L9|A0A368L1L9_9BURK Epoxyqueuosine reductase OS=Parvibium lacunae OX=1888893 GN=queG PE=3 SV=1
MPGCNVCAKAWPSFSVARESGRATIMKMDESAKKQLVQQISTWANALGFADLRIGPARIDPAAQARLASWLAAGYHGKMDYMARHEALRRDPTQLHPQTLRVISLRMNYLPASTTDNWVDQAWETLNRPGQAYVSLYARGRDYHKVLRQRLQQLANQIQQQVAVDFPDMDYRVFTDSAPVMEVELGQQAGLGWRGKHTLLLTREAGSMFFLGEIFTNLDLPMDSPTAPEAMHCGTCRRCLDVCPTQAIVAPYSLDARRCISYLTIENKGAIPVELRPLMGNRIYGCDDCQLICPWNKFAQRAPINDFDVRNGLDSASLVALFAWTEREFNERLQGSPIRRIGYGPWLRNIAVALGNALRDSASHQAAIMIEALQAKVDDPDPLVREHVAWALAQQPSGAT

SEQ ID NO: 79290 - protein, 397 aa, Parvularcula bermudensis
  misc_feature (1)..(397): tr|E0TI55|E0TI55_PARBH Epoxyqueuosine reductase OS=Parv ularcula bermudensis (strain ATCC BAA-594 / HTCC2503 / KCTC 12087) OX=314260 GN=queG PE=3 SV=1
MAKSNGTTTTPTSSPGAPDVDGTALRDDAASIKQAIRAEAHTLGFEACRFTAPTLPPQMGEGLTAMVEAGYHGEMDWLADRQEQRSAPRRLWPEVRSVIVLGVNYGPSDDPLARLDQRSLGNISVYAQNDDYHDLIKKRLKRLGRWIGQTYDTDLKVFVDTAPVAEKPLAAQAGLGWQGKHTNLVSRSYGSWLFLGVIYLAIELPPDSAETDHCGQCRQCLDICPTDAFPAPYQLDARRCISYLTIEHKGTIPMPLRSAMGNRIYGCDDCLAVCPWNKFAKATEEPAFLPRAALRAPQLADLSALDDAGFRALFRKSPVKRIGRDRFVRNVMIAIGNSGNAALRSALRPRLADPSPPVRAMAVWAWRQLDGDDTVLRTAMAHEQDPEVLAEIDSTTV

SEQ ID NO: 79291 - protein, 334 aa, Parvularcula sp.
  misc_feature (1)..(334): tr|A0A355C2I8|A0A355C2I8_9PROT tRNA epoxyqueuosine(34) reductase QueG (Fragment) OS=Parvularcula sp. OX=197920 7 GN=queG PE=4 SV=1
LFEFLGGGRHGDMAWMESRAAERADPKALWPEAKSIVMLGLNYGPEDDPLALLAARTKGSISVYARGRDYHDVVKKKLKALARAIVAEMGGEVKVFVDTAPVMEKPLAARAGIGWQGKHTNLVSRAHGSWLFLGAIFTTLTIAPDAPEGDHCGICTRCLDVCPTQAFPTPYQLDARRCVSYLTIEHKGPIPNELRAAMGNRIYGCDDCLAVCPWNKFASLAREVQLHAREANAAQDLAELARLDDAAFRARFSGSPIKRTGRDRFVRNVLIAIGNSGTMALAASARALLDDASPLVRGASAWALRRLAPDEADALRAGALARESDAEVAAEWRD

SEQ ID NO: 79292 - protein, 373 aa, Parvularcula sp.
  misc_feature (1)..(373): tr|A0A371RHV8|A0A371RHV8_9PROT Epoxyqueuosine reductase OS=Parvularcula sp. SM1705 OX=2292771 GN=queG PE=3 SV= 1
MDKPQTDIREKIRAEALALGFDVCRFTPAHLPERIGQHLQTAIADGHHGTMDWLATRTDERSQPQTLWEGAKTVIMLGVNYGPEDDPLARLEWRDRGNISVYAQNEDYHDIIKKRLKQLGRWLGHEFETELKVFVDTAPVAEKPLAAQAGLGWQGKHTNLVSREFGSWLFLGAIYTALELPGDEPETDHCGSCRACLDICPTDAFPAPYRLDARACISYLTIEHKEPIPEQYRAKMGNRIYGCDDCLTVCPWNKFAAEAREAKLIAREELRAPTLAELSTLDDEVFRALFRKSPIKRIGRDRFIRNVMIAMGNSGDTSLLSAIEARLSDPSPLVRGMAVWAWAQLGGAAERLHKLRENEEEPHVRAELETALK

SEQ ID NO: 79293 - protein, 381 aa, Parvularculaceae bacterium
  misc_feature (1)..(381): tr|A0A520R4K8|A0A520R4K8_9PROT Epoxyqueuosine reductase OS=Parvularculaceae bacterium OX=2510335 GN=queG PE=3 SV=1
MPQHIPHIEDSIKQMGHELGFDAVRIARAHLSDETGERLDQFVELERHGDMGWMAARRDERRHPRGLWADARSIIMVAMNYGPDEDPLTILNRPNEGAISVYAKGRDYHDVLKKRLKQFARRLIDTHGGALKVFVDTAPVMEKPLAQRAGIGWQGKHTNVVSTDHGSWLFLGSIFTTLDLVADIPETDHCGSCQACLDICPTKAFPAPYQLDARKCISYLTIEHKGHIPPAYRKAIGNRIYGCDDCLAVCPWNKFAHAAKEAKLKARDALNAPSLRELSELDDTSFRAFFSGSPVKRTGRDRFIRNVMIAIGNSGNGEFHDAIKPRLADPSPLVRVAAVWAAKQLFSKETFSVLSQTALLSEKDAHVRAEWTSGISGTTPG

SEQ ID NO: 79294 - protein, 362 aa, Paucibacter aquatile
  misc_feature (1)..(362): tr|A0A2N8L1F6|A0A2N8L1F6_9BURK Epoxyqueuosine reductase OS=Paucibacter aquatile OX=2070761 GN=queG PE=3 SV=1
MRRWALELGFSQIGVADIDLHSAEAGLLAWLEAGFHGSMHYMQSHGLKRARPAELVPGTLRVLSLRMDYLPRDSGADWQAVEWQRLADPQRAQISLYARGRDYHKVLRARLQLLATRLSEAVGPFGYRVFTDSAPVLEVELASRSGIGWRGKHTLTLHRDVGSMFFLGEIYIDLPLPLSEPVTAHCGQCSACLEACPTGAIVAPYRVDARRCVSYLTIEHEGAIPIELRPLIGNRLYGCDDCQLICPWNKFAQKAQLADFDARPAMAGGDLLSYWSWSEEQFLRQTEGSAMRRIGHGRWQRNLAVVSGNALRQREWPALRAVLLAQRAQAGELLAEHLDWALAQNADVAATENAAPPATAAG

SEQ ID NO: 79295 - protein, 364 aa, Paucibacter sp.
  misc_feature (1)..(364): tr|A0A3N7CDE6|A0A3N7CDE6_9BURK Epoxyqueuosine reductase OS=Paucibacter sp. KBW04 OX=2153361 GN=queG PE=3 SV=1
MTDQLRAWALELGFSQIGVADIDLSRAEPGLLAWLEAGFHGSMHYMEAHGLKRARPAELVPGTVRVLTARMDYLPRNSPGDWQAIEWAGLKSPQHAQLSIYARGRDYHKVLRNRLQKLAERLAEAVGPLGYRAFTDSAPVLEVELAARSGLGWRGKHTLTLHRQAGSMFFLGEIYLDLPLPLSEPVTAHCGQCRACVDVCPTQAIVAPYRVDARRCVSYLTIEHEGAIPLELRPLIGNRIYGCDDCQLICPWNKFAQKATLPDFDVRPGLAGARLLQLWAWDEATFLRQTEGSAIRRIGHARWQRNLAVALGNALRAEDSAEIRAALQSQRSGASDLLAEHIDWALAQGAGLRSSAAQLTKAVP

SEQ ID NO: 79296 - protein, 352 aa, Paucibacter sp.
  misc_feature (1)..(352): tr|A0A0U3DAP3|A0A0U3DAP3_9BURK Epoxyqueuosine reductase OS=Paucibacter sp. KCTC 42545 OX=1768242 GN=queG PE=3 SV=1
MQALMGQLRAWALELGFSQIGVADIDLSSAEPGLQAWLSAGFHGSMHYMQAHGLKRARPAELVPGTVRVLTARMDYLPQDSRSDWQALEWQGLRDPQRAQLSIYARGRDYHKVLRSRLQKLAERLGQSIGPFGYRVFTDSAPVLEVELASRSGIGWRGKHTLTLHREAGSMFFLGEIYLDLPLPLSEPVTAHCGQCRACLDVCPTQAIVAPYRVDARRCISYLTIEHEGAIPLELRPLMGNRIYGCDDCQLACPWNKFAAKAVVADFDARPELDGASLLQLWAWDEAQFLRRTEGSAIRRIGHARWQRNLAVAMGNALRQGEDSNLRAALQSARPQASALLAEHIDWALAQA

SEQ ID NO: 79297 - protein, 366 aa, Paucibacter toxinivorans
  misc_feature (1)..(366): tr|A0A4R6QUR4|A0A4R6QUR4_9BURK Epoxyqueuosine reductase OS=Paucibacter toxinivorans OX=270368 GN=queG PE=3 SV= 1
MHHPKNDPPDLDAQALLEKLRGWARELGFSQIGVADINLADAEPGLAAWLAAGFHGSMHYMEVHGMKRARPAELVPGTLRVLSLRMDYLPAATPTDWQAIEWQGLAEPQRAQVSLYARGRDYHKVLRRRLQQLADRLQAEIGPFGHRCFTDSAPVLEVELASRGGLAWRGKHTLALHREAGSMFFLGELFVDLPLPLTEATSAHCGQCTACIDVCPTQAIVGPYRVDARRCISYLTIEQDGPIPLELRAAMGNRIYGCDDCQLVCPWNKFAQRATLPDFDARPELSAPTLLQLWQWDEPAFLRHTEGSAIRRIGHGRWRRNLAVAIGNALRAEEVPALRLALTEARAGASELLSEHIDWALAQEPV

SEQ ID NO: 79298 - protein, 373 aa, Paucimonas lemoignei
  misc_feature (1)..(373): tr|A0A2X4AAJ0|A0A2X4AAJ0_PAULE Epoxyqueuosine reductase OS=Paucimonas lemoignei OX=29443 GN=queG PE=3 SV=1
MPVITVDPPNTVDLVTLAQSIKEWGRELGFQQVGIAGLDLAEHEQHLERWLEAGYHGEMDYMAAHGSKRSHPDELVPGTLRVVSLRMDYLPGDTEMTQRLTEPEKAYVSRYALGRDYHKLIRKRVQQLAERIQQAIGPFGYRAFVDSAPVLEKAIAEQAGLGWIGKNTLVLNRKAGSFFFLSELFVDLPLPLDAPHATEHCGRCTACLDICPTAAFVGPYVLDARRCISYLTIELKTAIPEELRPLIGNRVFGCDDCQIVCPWNRFARPTDQSDFQPRHNLDNAGLAELFMWDEDKFLSNTEGSPLRRAGYERWLRNLAVGLGNAPSTIPVLQALEARRDYPSELVREHVEWALKQHEQRRMPTPQDQCSSPL

SEQ ID NO: 79299 - protein, 354 aa, Paucimonas lemoignei
  misc_feature (1)..(354): tr|A0A4R3HYN5|A0A4R3HYN5_PAULE Epoxyqueuosine reductase OS=Paucimonas lemoignei OX=29443 GN=queG PE=3 SV=1
MQALAEAIPAWGRELGLADVRIAAIDLTAEETGLQAWLDAGMHGEMHYMASHGMKRARPAELVPGTVRVISARIDYLPQDASPDWRANERRRHGDPGAAVVSVYARGRDYHKVLRNRLQKLAERIAEKAGPFGYRVFTDSAPVLEVALADKSGLGWRGKHTLLLNRQAGSMFFLGEIYTDLPLPVDAPMAPHCGTCHACIDACPTQAIVGPYRLDARRCISYLTIELKGSIPEDLRPLIGNRIYGCDDCQLVCPWNKFAQRAVVPDFEVRNGLDAASLIDLFAWSEEEFNRRLEGSPIRRIGHESWLRNIAVALGNAAAGQGARPGMVAALKARADHPSEMVREHVTWALARHQ

SEQ ID NO: 79300 - protein, 379 aa, Pectobacterium actinidiae
  misc_feature (1)..(379): tr|A0A1V2R020|A0A1V2R020_9GAMM Epoxyqueuosine reductase OS=Pectobacterium actinidiae OX=1507808 GN=queG PE=3 S V=1
MSYPYDLNELAQHIKQWGQALGFQQVGICDTDLSAEEPRLQDWLDKQYHGEMDWMARHGMLRARPHELLPGTLRVISVRMNYLPAKAAFASTLRNPELGYVSRYALGRDYHKLLRQRLKKLGDQIQEYCGELNFRPFVDSAPIMERPLAAKAGLGWVGKHSLILNREAGSWFFLGELLIDLPLPVDRPQEEQCGRCVACMTTCPTGAIVAPYTVDARRCISYLTIELEGPIPEEFRPLMGNRIYGCDDCQLICPWNRFSQLTDEADFSPRAALHTPELLALFGWNEEKFLRITEGSPIRRIGHLRWLRNIAVALGNAPYQDSIVLALQARLGESELLDEHIHWAIHQQMERRASLGIDVQSTQKKRLIRAVEKGLPRDA

SEQ ID NO: 79301 - protein, 379 aa, Pectobacterium aquaticum
  misc_feature (1)..(379): tr|A0A426IKM3|A0A426IKM3_9GAMM Epoxyqueuosine reductase OS=Pectobacterium aquaticum OX=2204145 GN=queG PE=3 SV =1
MSYPYDLNELAQHIKQWGQALGFQQVGICDTDLSAEEPRLQDWLDKQYHGEMDWMARHGMLRARPHELLPGTLRVISVRMNYLPAKAAFASTLKNPELGYVSRYALGRDYHKLLRQRLKKLGDQIQEYCGELNFRPFVDSAPIMERPLAAKAGLGWVGKHSLILNREAGSWFFLGELLIDLPLPVDRPQEEQCGRCVACMTTCPTGAIVAPYTVDARRCISYLTIELEGPIPEEFRPLMGNRIYGCDDCQLICPWNRFSQLTDEADFSPRAALHTPELLTLFGWNEEKFLRITEGSPIRRIGHLRWLRNIAVALGNAPYQDSIVLALQARLGESELLDEHIHWAIRQQLERRALLEIDVQSTQKKRLIRAVEKGLPRDA

SEQ ID NO: 79302 - protein, 379 aa, Pectobacterium atrosepticum
  misc_feature (1)..(379): tr|Q6D061|Q6D061_PECAS Epoxyqueuosine reductase OS=Pect obacterium atrosepticum (strain SCRI 1043 / ATCC BAA-67 2) OX=218491 GN=queG PE=3 SV=1
MSYPYDLNELAQHIKQWGQALGFQQVGICDTDLSVEEPRLQAWLDKQYHGEMDWMARHGMLRARPHELLPGTLRVISVRMNYLPAKAAFASTLKNPELGYVSRYALGRDYHKLLRQRLKKLGDQIQEYCGELNFRPFVDSAPIMERPLAAKAGLGWVGKHSLILNREAGSWFFLGELLIDLPLPVDRPQEEQCGRCVACMTTCPTGAIVAPYTVDARRCISYLTIELEGSIPEEFRPLMGNRIYGCDDCQLICPWNRFSQLTDEADFSPRAVLHTPELLALFGWNEEKFLRITEGSPIRRIGHLRWLRNIAVALGNAPYQDRIVLALQTRLGESELLDEHIHWAIHQQLERRASLEIDVQSTQKKRLIRAVEKGLPRDA

SEQ ID NO: 79303 - protein, 379 aa, Pectobacterium betavasculorum
  misc_feature (1)..(379): tr|A0A093UA47|A0A093UA47_9GAMM Epoxyqueuosine reductase OS=Pectobacterium betavasculorum OX=55207 GN=queG PE=3 SV=1
MSYPYDLNELAQHIKQWGQALGFQQVGICDTDLSAEEPRLQAWLDKQYHGEMDWMARHGMLRARPHELLPGTLRVISVRMNYLPAKAAFASTLKNPELGYVSRYALGRDYHKLLRQRLKKLGDQIQEYCGELNFRPFVDSAPIMERPLAAKAGLGWVGKHSLILNREAGSWFFLGELLIDLPLPVDRPQEEQCGRCVACMTTCPTGAIVAPYTVDARRCISYLTIELEGPIPEEFRPLMGNRIYGCDDCQLICPWNRFSQLTDEADFSPRAALHTPELLVLFGWNEEKFLRITEGSPIRRIGHLRWLRNIAVALGNAPYQDSIVLALQTRLGESELLDEHIHWAIRQQLERRASLEIDVQSTQKKRLIRAVEKGLPRDA

SEQ ID NO: 79304 - protein, 379 aa, Pectobacterium brasiliense
  misc_feature (1)..(379): tr|A0A086ELF1|A0A086ELF1_9GAMM Epoxyqueuosine reductase OS=Pectobacterium brasiliense OX=180957 GN=queG PE=3 S V=1
MSYPYDLNELAQHIKQWGQALGFQQVGICDTDLSAEEPRLQDWLDKQYHGEMDWMARHGMLRARPHELLPGTLRVISVRMNYLPAKAAFASTLKNPELGYVSRYALGRDYHKLLRQRLKKLGDQIQEYCGELNFRPFVDSAPIMERPLAAKAGLGWVGKHSLILNREAGSWFFLGELLIDLPLPVDRPQEEQCGRCVACMTTCPTGAIVAPYTVDARRCISYLTIELEGPIPEEFRPLMGNRIYGCDDCQLICPWNRFSQLTDEADFSPRAALHTPELLALFSWNEEKFLRITEGSPIRRIGHLRWLRNIAVALGNAPYQDSVVLALQARLGESELLDEHIHWAVHQQLERRALLGIDVQSTQKKRLIRAVEKGLPRDA

SEQ ID NO: 79305 - protein, 379 aa, Pectobacterium brasiliense
  misc_feature (1)..(379): tr|A0A3S0ZX81|A0A3S0ZX81_9GAMM Epoxyqueuosine reductase OS=Pectobacterium brasiliense OX=180957 GN=queG PE=3 S V=1
MSYPYDLNELAQHIKQWGQELGFQQVGICDTDLSAEEPRLQDWLDKQYHGEMDWMARHGMLRARPHELLPGTLRVISVRMNYLPAKAAFASTLKNPELGYVSRYALGRDYHKLLRQRLKKLGDQIQEYCGELNFRPFVDSAPIMERPLAAKAGLGWVGKHSLILNREAGSWFFLGELLIDLPLPVDRPQEEQCGRCVACMTTCPTGAIVAPYTVDARRCISYLTIELEGPIPEEFRPLMGNRIYGCDDCQLICPWNRFSQLTDEADFSPRAALHTPELLALFGWNEEKFLRITEGSPIRRIGHLRWLRNIAVALGNAPYQDSIVLALQARLGESELLDEHIHWAVHQQLERRASLGIDVQSTQKKRLIRAVEKGLPRDA

SEQ ID NO: 79306 - protein, 379 aa, Pectobacterium carotovorum; identical to SEQ ID NO: 79305
  misc_feature (1)..(379): tr|A0A419AEH0|A0A419AEH0_PECCA Epoxyqueuosine reductase OS=Pectobacterium carotovorum OX=554 GN=queG PE=3 SV=1

SEQ ID NO: 79307 - protein, 379 aa, Pectobacterium carotovorum
  misc_feature (1)..(379): tr|C6DFK4|C6DFK4_PECCP Epoxyqueuosine reductase OS=Pect obacterium carotovorum subsp. carotovorum (strain PC1) OX=561230 GN=queG PE=3 SV=1
MSYPYDLNELAQHIKQWGQELGFQQVGICDTDLSAEEPRLQDWLDKQYHGEMDWMARHGMLRARPHELLPGTLRVISVRMNYLPAKAAFASTLKNPELGYVSRYALGRDYHKLLRQRLKKLGDQIQEYCGELNFRPFVDSAPIMERPLAAKAGLGWVGKHSLILNREAGSWFFLGELLIDLPLPVDLPQEEQCGRCVACMTTCPTGAIVAPYTVDARRCISYLTIELEGPIPEEFRPLMGNRIYGCDDCQLICPWNRFSQLTDEADFSPRAALHTPELLTLFGWNEEKFLRITEGSPIRRIGHLRWLRNIAVALGNAPYQDSIVLALQTRLGESELLDEHIHWAIRQQLERRASLEIDVQSTQKKRLIRAVEKGLPRDA

SEQ ID NO: 79308 - protein, 379 aa, Pectobacterium odoriferum
  misc_feature (1)..(379): tr|A0A094S794|A0A094S794_9GAMM Epoxyqueuosine reductase OS=Pectobacterium odoriferum OX=78398 GN=queG PE=3 SV= 1
MSYPYDLNELAQHIKQWGQALGFQQVGICDTDLSAEEPRLQDWLDKQYHGEMDWMARHGMLRARPHELLPGTLRVISVRMNYLPAKAAFASTLKTPELGYVSRYALGRDYHKLLRQRLKKLGDQIQEYCGELNFRPFVDSAPIMERPLAAKAGLGWVGKHSLILNREAGSWFFLGELLIDLPLPVDQPQEEQCGRCVACMTTCPTGAIVAPYTVDARRCISYLTIELEGPIPEEFRPLMGNRIYGCDDCQLICPWNRFSQLTDEADFSPRAALHAPELLVLFGWNEEKFLRITEGSPIRRIGHLRWLRNIAVALGNAPYQDSIVLALQARLGESELLDEHIHWAINQQLGRRASLGIDIQSTQKKRLIRAVEKGLPRDA

SEQ ID NO: 79309 - protein, 379 aa, Pectobacterium parmentieri
  misc_feature (1)..(379): tr|A0A0H3IDL2|A0A0H3IDL2_PECPM Epoxyqueuosine reductase OS=Pectobacterium parmentieri OX=1905730 GN=queG PE=3 SV=1
MSYPYDLNELAQHIKQWGQALGFQQVGICDTDLSAEEPRLQAWLDKQYHGEMDWMARHGMLRARPHELLPGTLRVISVRMNYLPAKAAFASTLKNPELGYVSRYALGRDYHKLLRQRLKKLGDQIQEYCGELNFRPFVDSAPIMERPLAAKAGLGWVGKHSLILNREAGSWFFLGELLIDLPLPVDRPQEEQCGRCVACMTTCPTGAIVAPYTVDARRCISYLTIELEGPIPEEFRPLMGNRIYGCDDCQLICPWNRFSQLTDEADFSPRAALHTPELLVLFGWNEEKFLRITEGSPIRRIGHLRWLRNIAVALGNAPYQDNIVLALQTRLGESELLNEHIHWAIQQQLARRALLEIDVQSTQKKRLIRAVEKGLPRDA

SEQ ID NO: 79310 - protein, 379 aa, Pectobacterium parmentieri
  misc_feature (1)..(379): tr|A0A3Q9JXP2|A0A3Q9JXP2_PECPM Epoxyqueuosine reductase OS=Pectobacterium parmentieri OX=1905730 GN=queG PE=3 SV=1
MSYPYDLNELAQHIKQWGQALGFQQVGICDTDLSAEEPRLQAWLDKQYHGEMDWMARHGMLRARPHELLPGTLRVISVRMNYLPAKAAFASTLKNPELGYVSRYALGRDYHKLLRQRLKKLGDQIQEYCGELNFRPFVDSAPIMERPLAAKAGLGWVGKHSLILNREAGSWFFLGELLIDLPLPVDRPQEEQCGRCVACMTTCPTGAIVAPYTVDARRCISYLTIELEGPIPEEFRPLMGNRIYGCDDCQLICPWNRFSQLTDEADFSPRAALHTPELLVLFGWNEEKFLRITEGSPIRRIGHLRWLRNIAVALGNAPYQDNIVLALQTRLGESELLDEHIHWAIQQQLARRALLEIDVQSTQKKRLIRAVEKGLPRDA

SEQ ID NO: 79311 - protein, 379 aa, Pectobacterium peruviense
  misc_feature (1)..(379): tr|A0A0J5XD85|A0A0J5XD85_9GAMM Epoxyqueuosine reductase OS=Pectobacterium peruviense OX=2066479 GN=queG PE=3 S V=1
MSYPYDLNELAQYIKQWGQALGFQQVGICDTDLSAEEPRLQDWLDKQYHGEMDWMARHGMLRARPHELLLGTLRVISVRMNYLPAKAAFASTLKNPELGYVSRYALGRDYHKLLRQRLKKLGDQIQEYCGELNFRPFVDSAPIMERPLAAKAGLGWVGKHSLILNREAGSWFFLGELLIDLPLPVDRPQEEQCGRCVACMTTCPTGAIVAPYTVDARRCISYLTIELEGPIPEEFRPLMGNRIYGCDDCQLICPWNRFSQLTDEADFSPRAALHTPELLVLFGWNEEKFLRITEGSPIRRIGHLRWLRNIAVALGNAPYQDSIVLALQTRLGESELLDEHIHWAIHQQLERRASLEIDVQSTQKKRLVRAVEKGLPRDA

SEQ ID NO: 79312 - protein, 379 aa, Pectobacterium polaris; identical to SEQ ID NO: 79301
  misc_feature (1)..(379): tr|A0A433P207|A0A433P207_9GAMM Epoxyqueuosine reductase OS=Pectobacterium polaris OX=2042057 GN=queG PE=3 SV=1

SEQ ID NO: 79313 - protein, 379 aa, Pectobacterium polaris
  misc_feature (1)..(379): tr|A0A3A4AI48|A0A3A4AI48_9GAMM Epoxyqueuosine reductase OS=Pectobacterium polaris OX=2042057 GN=queG PE=3 SV=1
MSYPYDLNELAQHIKQWGQALGFQQVGICDTDLSAEEPRLQDWLDKQYHGEMDWMARHGMLRARPHELLPGTLRVISVRMNYLPAKAAFASTLKNPELGYVSRYALGRDYHKLLRQRLKKLGDQIQEYCGELNFRPFVDSAPIMERPLAAKAGLGWVGKHSLILNREAGSWFFLGELLIDLPLPIDRPQEEQCGRCVACMTTCPTGAIVAPYTVDARRCISYLTIELEGPIPEEFRPLMGNRIYGCDDCQLICPWNRFSQLTDEADFSPRAALHTPELLTLFGWNEEKFLRITEGSPIRRIGHLRWLRNIAVALGNAPYQDSIVLALQARLGESELLDEHIHWAIRQQLERRALLEIDVQSTQKKRLIRAVEKGLPRDA

SEQ ID NO: 79314 - protein, 379 aa, Pectobacterium polonicum
  misc_feature (1)..(379): tr|A0A4U7KHX5|A0A4U7KHX5_9GAMM Epoxyqueuosine reductase OS=Pectobacterium polonicum OX=2485124 GN=queG PE=3 SV =1
MSYPYDLNELAQHIKQWGQALGFQQVGICDTDLSAEEPRLQDWLDKQYHGEMDWMARHGMLRARPHELLPGTLRVISVRMNYLPAKAAFASTLKNPELGYVSRYALGRDYHKLLRQRLKKLGDQIQEYCGELNFRPFVDSAPIMERPLAAKAGLGWVGKHSLILNREAGSWFFLGELLIDLPLPVDRPQEEQCGRCVACMTTCPTGAIVAPYTVDARRCISYLTIELEGPIPEEFRPLMGNRIYGCDDCQLICPWNRFSQLTDETDFSPRAALHTPELLALFGWNEEKFLRITEGSPIRRIGHLRWLRNIAVALGNAPYQDNIVLALQTRLGESELLDEHIHWAIRQQLARRASLEIDVQSTQKKRLIRAVEKGLPRDA

SEQ ID NO: 79315 - protein, 379 aa, Pectobacterium punjabense
  misc_feature (1)..(379): tr|A0A2T3VUT9|A0A2T3VUT9_9GAMM Epoxyqueuosine reductase OS=Pectobacterium punjabense OX=2108399 GN=queG PE=3 S V=1
MSYPYDLNELVQHIKQWGQALGFQQVGICDTDLSAEEPRLQAWLDKQYHGEMDWMARHGMLRARPHELLPGTLRVISVRMNYLPAKAAFASTLKNPELGYVSRYALGRDYHKLLRQRLKKLGDQIQEYCGELNFRPFVDSAPIMERPLAAKAGLGWVGKHSLILNREAGSWFFLGELLIDLPLPVDRPQEEQCGRCVACMTTCPTGAIVAPYTVDARRCISYLTIELEGPIPEEFRPLMGNRIYGCDDCQLICPWNRFSQLTDETDFSPRAALHTPELLTLFGWNEEKFLRITEGSPIRRIGHLRWLRNIAVALGNTPYQDSIVLALQTRLGESELLDEHIHWAIQQQLARRALLEIDVQSTQKKRLIRAVEKGLPRDA

SEQ ID NO: 79316 - protein, 379 aa, Pectobacterium wasabiae
  misc_feature (1)..(379): tr|A0A1D7YY58|A0A1D7YY58_9GAMM Epoxyqueuosine reductase OS=Pectobacterium wasabiae CFBP 3304 OX=1175631 GN=que G PE=3 SV=1
MSYPYDLNELAQHIKQWGQALGFQQVGICDTDLSAEEPRLQAWLDKQYHGEMDWMARHGMLRARPHELLPGTLRVISVRMNYLPAKAAFASTLKNPELGYVSRYALGRDYHKLLRQRLKKLGDQIQEYCGELNFRPFVDSAPIMERPLAAKAGLGWVGKHSLILNREAGSWFFLGELLIDLPLPVDRPQEEQCGRCVACMTTCPTGAIVAPYTVDARRCISYLTIELEGPIPEEFRPLMGNRIYGCDDCQLICPWNRFSQLTDEADFSPRAALHTPELLLLFGWNEEKFLRITEGSPIRRIGHLRWLRNIAVALGNAPYQDSIVLALQTRLGESELLDEHIHWAIRQQLARRASLEIDVQSTQKKRLIRAVEKGLPRDA

SEQ ID NO: 79317 - protein, 312 aa, Pedobacter africanus
  misc_feature (1)..(312): tr|A0A1W2DDJ8|A0A1W2DDJ8_9SPHI Epoxyqueuosine reductase OS=Pedobacter africanus OX=151894 GN=queG PE=3 SV=1
MAANASTYSKMIKDEAFRLGFMQCGIARATFLEEEAPKLEKWLQDNHHGKMGYMENHFDKRLDPRLLVEGSKSVISLSLNYYPDKQQSDPEAPKISKYAYGMDYHQVIKDKLFQLLNYIRQEIGEVDGRAFVDSAPVLDRAWAKRAGIGWIGKNSNLINKKSGSFFFLAELIVDLELEYDHPFETDHCGTCTKCIDACPTEAILSPFVIDAKKCISYLTIELREEIDQDFKDKMDNWMFGCDVCQDVCPWNRFAVPHTEPLFKPNAQLLEMKKEDWLDITEDVFKTIFKNSAVKRTKFKGLTRNIDFIKKTS

SEQ ID NO: 79318 - protein, 327 aa, Pedobacter alluvionis
  misc_feature (1)..(327): tr|A0A497YCW8|A0A497YCW8_9SPHI Epoxyqueuosine reductase OS=Pedobacter alluvionis OX=475253 GN=queG PE=3 SV=1
MINENVLIPKPYLCRPVYNNYAKYSQLIKDEALRLGFMACGIAKAEFLEEEAPRLENWLNQNRHGEMKYMENYFDKRLDPRLLVDGAKSVISLSLNYYTEEKQSDPNAPKISKYAYGQDYHTVIKEKLKELTHFIEENIGEVSGRAFVDSAPVLDRAWAKKSGIGWIGKNSNLISKTDGSFFFLAELIVDLELDYDHPYQADYCGSCTRCLDACPTDAIIAPQVVDGTKCISYLTIELKNEIPNEFKDKMSNWMFGCDICQDVCPWNRFSKAHNEEAFKPENGLLDLNAKDLTEITDDVFKKVFKGSAVKRTKFNGLKRNIDFLKPE

SEQ ID NO: 79319 - protein, 311 aa, Pedobacter alluvionis
  misc_feature (1)..(311): tr|A0A5F0B2Q0|A0A5F0B2Q0_9SPHI Epoxyqueuosine reductase OS=Pedobacter alluvionis OX=475253 GN=queG PE=3 SV=1
MYNNYAKYSQLIKDEALRLGFMACGIAKAEFLEEEAPRLENWLNQNRHGEMKYMENYFDKRLDPRLLVDGAKSVISLSLNYYTEEKQSDPNAPKISKYAYGQDYHTVIKEKLKELTHFIEENIGEVSGRAFVDSAPVLDRAWAKKSGIGWIGKNSNLISKTDGSFFFLAELIVDLELDYDHPYQADYCGSCTRCLDACPTDAIIAPQVVDGTKCISYLTIELKNEIPNEFKDKMSNWMFGCDICQDVCPWNRFSKAHNEEAFKPENGLLDLNAKDLTEITDDVFKKVFKGSAVKRTKFNGLKRNIDFLKPE

SEQ ID NO: 79320 - protein, 320 aa, Pedobacter antarcticus
  misc_feature (1)..(320): tr|A0A1I1ZY58|A0A1I1ZY58_9SPHI Epoxyqueuosine reductase OS=Pedobacter antarcticus OX=34086 GN=queG PE=3 SV=1
MRPNSVNYTQLIKDEALRLGFQQCGIAKADFLEEEAPRLEKWLKNQHHGSMSYMENHFDKRLDPRILVDDAKSVISLTLNYFPEQQQIDPDAPRISKYAYGKDYHLVIKDKLFQLLGFIQEQIGEVSGRAFVDSAPVLDRAWAKRAGIGWVGKNSNIISKKTGSFFFLAELIIDLDLVPDQPFTTDHCGSCTKCIDACPTDAILSPAIIDANKCISYLTIELRDEIPAQFNQQMGNWMFGCDICQDVCPWNRFAVPNQEPEFQPAPNLLEMKRDDWLDITEDVFSKLFKNSAVKRTKFKGLVRNLDFIKQNPVNETPTSE

SEQ ID NO: 79321 - protein, 320 aa, Pedobacter antarcticus; identical to SEQ ID NO: 79320
  misc_feature (1)..(320): tr|A0A081PD23|A0A081PD23_9SPHI Epoxyqueuosine reductase OS=Pedobacter antarcticus 4BY OX=1358423 GN=queG PE=3 SV=1

SEQ ID NO: 79322 - protein, 311 aa, Pedobacter bauzanensis
  misc_feature (1)..(311): tr|A0A4R1M317|A0A4R1M317_9SPHI Epoxyqueuosine reductase OS=Pedobacter bauzanensis OX=653929 GN=queG PE=3 SV=1
MSVASTYSALIKKEAERLGFLSCGISKADFLEDEAPHLERWLKNNYQGELYYMENNFDKRLDPRLLVDDAKSVISLSYNYFTEEKQQDPQAPKLSKYAYGTDYHFVIKDKLKELLLFIQEHIGEVSGRAFVDSAPVLDKAWAERAGLGWIGKHSLLLSKQKGSFFFLSELIVDLELEYDSKIQTDHCGSCTKCIDACPTDALLDNKTVNASKCISYLTIELKESIPSSFSGKMDNWMFGCDICQDVCPWNRFSIQHQEPLFNPHPDLLGMTKQDWEEITEDTFKKIFKKSAVKRTKYAGLKRNITFLDQHT

SEQ ID NO: 79323 - protein, 311 aa, Pedobacter borealis
  misc_feature (1)..(311): tr|A0A4R8P0Y2|A0A4R8P0Y2_9SPHI Epoxyqueuosine reductase OS=Pedobacter borealis OX=475254 GN=queG PE=3 SV=1
MYNNEAKYSQLIKEEALRLGFLSCGIAKAEFLEEEAPRLEKWLNQNHHGEMKYMENYFDKRLDPRLLVDGAKSVISLSLNYYTEEKQSDPNAPKISKYAYGQDYHTVIKEKLKELTYFIEENIGEVSGRAFVDSAPVLDRAWAKKSGIGWIGKNSNLISKTDGSFFFLAELIVDLELGYDHTYQADYCGSCTRCLDACPTDAIIAPQVVDGSKCISYLTIELKNEIPNEFKDKMSNWMFGCDICQDVCPWNRFSKAHNEDAFKPENGLLDLNHKDLMEITEDVFKKVFKGSPVKRTKFTGLKRNIDFLKPE

SEQ ID NO: 79324 - protein, 313 aa, Pedobacter caeni
  misc_feature (1)..(313): tr|A0A1M4X221|A0A1M4X221_9SPHI Epoxyqueuosine reductase OS=Pedobacter caeni OX=288992 GN=queG PE=3 SV=1
MLNNSAKYSKMIKAEALRLGFMQCGIAKAGFLEEEAPRLEQWLANNHHGEMGYMENHFDKRLDPRLLVDDSKSVISLTLNYFPEERQQDPDAPKISKYAYGTDYHTVIKDKLFQLLNFISEEIGEVSGRAFVDSAPVMDRAWAKRAGIGWIGKNSNLINKKSGSFFFLAELIVDLDLEYDTPFETDHCGTCTKCIDACPTDAILSPFIIDAKKCISYLTIELREEIPQSFNDKMENWMFGCDICQDVCPWNRFSVPHSEPKFQPNENLLQMKREDWLDITEDVFKTIFKNSAVKRTKFKGLTRNIDFIKTLPK

SEQ ID NO: 79325 - protein, 311 aa, Pedobacter chitinilyticus
  misc_feature (1)..(311): tr|A0A3S3PDH4|A0A3S3PDH4_9SPHI Epoxyqueuosine reductase OS=Pedobacter chitinilyticus OX=2233776 GN=queG PE=3 S V=1
MFNQASKYSHMIKQEAQRLGFMSCGIAKAEFLEEEAPRLENWLKNNHHGEMGYMENYFDKRLDPRLLVEGAKSIVSLTLNYYSEEKQRDEHAPKISKYAYGMDYHAVIKEKLQELMHFIRENIGEVDGRCFVDSAPVMDKAWAQKAGLGWRGKNSNLISKQAGSFFFLAELIIDLDLDYDNPFPTDHCGSCTRCIDACPTNAIVAPYKVDGSKCISYLTIELKNEIPTEFKGKMDNWMFGCDVCQDVCPWNRFATVHNEENFKPKEELLGLSKSELLDMTDEVFKKVFKNSPVKRTKFTGLKRNIDFLKQS

SEQ ID NO: 79326 - protein, 315 aa, Pedobacter cryoconitis
  misc_feature (1)..(315): tr|A0A127VBD7|A0A127VBD7_9SPHI Epoxyqueuosine reductase OS=Pedobacter cryoconitis OX=188932 GN=queG PE=3 SV=1
MYNNPSKYSQLIKDEALRLGFMQCGIAKAGFLEEEAPRLEKWLKDNRHGQMSYMENHFDKRLNPTLLVDDAKSVISLTLNYFPEERQTDPDAPKISKYAYGADYHTVIKDKLFLLLSFIEENIGEVSGRAFVDSAPVLDRAWAKRAGIGWIGKNSNIISKKSGSFFFLAELIIDLDLVYDEPFATDHCGTCTKCIDACPTDAILSPFIIDATKCISYLTIELRDEIPKSFDDKMENWMFGCDICQDVCPWNRFSVPHTEPKFKPNENLLGMKREDWLDITEDVFKQIFKNSAVKRTKFKGLTRNIDFIRQIPDES

SEQ ID NO: 79327 - protein, 315 aa, Pedobacter cryoconitis
  misc_feature (1)..(315): tr|A0A327T585|A0A327T585_9SPHI Epoxyqueuosine reductase OS=Pedobacter cryoconitis OX=188932 GN=queG PE=3 SV=1
MYNNPAKYSQLIKDEALRLGFMQCGIAKAGFLEEEAPRLEKWLTDNRHGQMSYMENHFDKRLNPTLLVDDAKSVISLTLNYFPEERQTDPDAPKISKYAYGADYHTVIKDKLFLLLSFIEENIGEVSGRAFVDSAPVLDRAWAKRAGIGWIGKNSNIISKKSGSFFFLAELIIDLDLVYDEPFATDHCGTCTKCIDACPTDAILSPFIIDATKCISYLTIELREEIPKSFDDKMENWMFGCDICQDVCPWNRFSVPHTEPKFKPNENLLNMKREDWLDITEDVFKQIFKNSAVKRTKFKGLTRNIDFIRQIPDES

SEQ ID NO: 79328 - protein, 311 aa, Pedobacter duraquae
  misc_feature (1)..(311): tr|A0A4R6IQ91|A0A4R6IQ91_9SPHI Epoxyqueuosine reductase OS=Pedobacter duraquae OX=425511 GN=queG PE=3 SV=1
MFSTAATNSKKIKDEAIRLGFMQCGIAKAGFLEEEAPRLERWLADNRHGKMAYMENHFDKRLDPRLLVEDAKSVISLSLNYFPEVIQADPNAPKISKYAYGKDYHLVIKEKLFQLLSFIEEEIGEVAGRAFVDSAPVLDRAWAKQSGLGWIGKNSNLINKKSGSFFFLAELIIDLELEYDTPFLTDHCGTCTRCIDACPTDAILAPAIIDATKCISYLTIELKDQIPEQFSNKMDNWMFGCDICQDVCPWNKFSVPHQEPEFAASESIVHMRKEDWEDITEDVFSKIFKNSAVKRTKFKGLTRNIDFIKRT

SEQ ID NO: 79329 - protein, 314 aa, Pedobacter ginsengisoli
  misc_feature (1)..(314): tr|A0A2D1U4Z3|A0A2D1U4Z3_9SPHI Epoxyqueuosine reductase OS=Pedobacter ginsengisoli OX=363852 GN=queG PE=3 SV=1
MNSNSAKYSKMIKDEAIRLGFMQCGIAKAEFLEDEAPRLEKWLNNNYHGEMAYMENHFDKRLDPRLLVDDSKSVISLTLNYFPEEQQTDPDAPKISKYAYGTDYHLVIKDKLFQLLNFISEEIGEVSGRAFVDSAPVLDRAWAKRAGIGWIGKNSNLISKKSGSFFFLAELIVDLDLQYDNAFETDHCGTCTKCIDACPTEAILSPFIIDAKKCISYLTIELREEIPSTFNDKMDNWMFGCDICQDVCPWNRFSAPHSEPQFQPNEKLLNMKREDWLDITEDVFKSIFKNSAVKRTKFKGLTRNIDFIKKLPDN

SEQ ID NO: 79330 - protein, 311 aa, Pedobacter ginsenosidimutans
  misc_feature (1)..(311): tr|A0A0T5VGT3|A0A0T5VGT3_9SPHI Epoxyqueuosine reductase OS=Pedobacter ginsenosidimutans OX=687842 GN=queG PE=3 SV=1
MYNNSAKYSQLIKDEALRLGFMACGISKAEFLEEEAPRLEKWLNQNHHGEMKYMENYFDKRLDPRLLVEDAKSVISLSLNYYTEEKQSDPDAPKISKYAYGQDYHIVIKDKLKELTHFIEENIGEVSGRAFVDSAPVLDRAWAKKSGIGWIGKNSNLISKTDGSFFFLAELIVDLELDYDHPYQADYCGTCTRCLDACPTDAIIAPQVVDGTKCISYLTIELKNEIPNEFKDKMSNWMFGCDICQDVCPWNRFSKAHNEEAFKPENGLLDLNAKDLIEITDDVFKKVFKGSAVKRTKFTGLKRNIDFLKPE

SEQ ID NO: 79331 - protein, 311 aa, Pedobacter glucosidilyticus
  misc_feature (1)..(311): tr|A0A0B8YD16|A0A0B8YD16_9SPHI Epoxyqueuosine reductase OS=Pedobacter glucosidilyticus OX=1122941 GN=queG PE=3 SV=1
MKDKQQAYANMIKAEAKRLGFMFCGIAKADFLAEEAPKLEQWLKEGRHGKMSYMENHFDKRLDPRLLVDGAKSVISVALNYYSPQQQTAAEAPKISKYAYGTDYHFVIKDKLKALQQFISENIGEVAGRAFVDSAPVLDKIWAKKAGIGWIGKNSNLLNKKTGSFFFLAELIIDLELAYDLPFQTDHCGTCTKCIDACPTEAIIKPYVVDGSKCISYLTIELKEQIPNEFKGKMDNWMFGCDICQDVCPWNRFSTPHQEEQFNPHPDLLHLNKKDWEEITDDVFSKLFKKSAVKRTKLAGLQRNISFLKPY

SEQ ID NO: 79332 - protein, 318 aa, Pedobacter hartonius
  misc_feature (1)..(318): tr|A0A1H4H2U8|A0A1H4H2U8_9SPHI Epoxyqueuosine reductase OS=Pedobacter hartonius OX=425514 GN=queG PE=3 SV=1
MYNNAAKYSQLIKDEAIRLGFMQCGIAKAGFLEEEAPRLENWLKNNHHGQMEYMENHFDKRLDPRLLVDDAKSVISLTLNYFPSESQSDPDAPKISKYAYGTDYHTVIKDKLFQLLNFINETIGAVSGRAFVDSAPVLDRAWAKRAGIGWVGKNSNIISKKSGSFFFLAELIIDLGLAYDEPFQTDHCGSCTRCIDACPTEAILSPFVIDARKCISYLTIELKDEIPKSFDKQMDNWMFGCDICQDVCPWNRFSVPHTEPAFQPGENLLQMKREDWLDITEDVFRQIFKHSAVKRTKFKGLTRNIDFIRQIPGDNAPI

SEQ ID NO: 79333 - protein, 312 aa, Pedobacter heparinus
  misc_feature (1)..(312): tr|C6XW19|C6XW19_PEDHD Epoxyqueuosine reductase OS=Pedo bacter heparinus (strain ATCC 13125 / DSM 2366 / CIP 10 4194 / JCM 7457 / NBRC 12017 / NCIMB 9290 / NRRL B-1473 1 / HIM 762-3) OX=485917 GN=queG PE=3 SV=1
MLNNASRYSKLIKAEALRLGFMQCGIAKADFLEEEAPKLEKWLHNNHHGQMAYMENHFDKRLDPRLLVEDSRSVISLTLNYFPAEQQQDPDAPKISKYAYGMDYHQVIKDKLYQLLNFIREEIGEVAGRAFVDSAPVLDRAWAKRAGIGWIGKNSNLINKKSGSFFFLAELIVDLELEYDQPFTADHCGTCTKCIDACPTDAILSPFIIDAKKCISYLTIELKEEIDQDFKGKMDNWMFGCDICQDVCPWNRFSAPHSEPMFKPNERLLQMKREDWQDITEDVFKTIFKNSAVKRTKYKGLTRNIDFIKKSS

SEQ ID NO: 79334 - protein, 311 aa, Pedobacter insulae
  misc_feature (1)..(311): tr|A0A1I2WNU3|A0A1I2WNU3_9SPHI Epoxyqueuosine reductase OS=Pedobacter insulae OX=414048 GN=queG PE=3 SV=1
MHSKTTKYSQLIKAEALRLGFMACGISKATFLEEEAPRLEQWLKNNHHGEMSYMENHFDKRLDPRLLVEDAKSVISLTLNYFTTENQLDPLAPKISKYAYGEDYHTVIKEKLKALLAFINQEIGEVGGRCFVDSAPVMDKAWAQKSGLGWRGKNSNLISKETGSFFFLAELIIDLELAYDSPFVADHCGSCTRCIDACPTEAIVAPYTVDGSKCISYLTIELKNEIPVTFKDKMENWMFGCDICQDVCPWNRFATPHHETAFNPPTELLAFKKADLIEMTDEVFKRVFKGSAVKRTKFTGLKRNIDFLNRL

SEQ ID NO: 79335 - protein, 312 aa, Pedobacter jejuensis
  misc_feature (1)..(312): tr|A0A3N0BTK8|A0A3N0BTK8_9SPHI Epoxyqueuosine reductase OS=Pedobacter jejuensis OX=1268550 GN=queG PE=3 SV=1
MFNNSSKYSQLIKDEAIRLGFIGCGISKAEFLETEAPRLEQWLNMNHHGEMKYMENYFDKRLDPRLLVDGAKSVISLSLNYYTDDKQNDPEAPKISKYAYGQDYHSVIKEKLKALLIFIEENIGEVGGRAFVDSAPVLDRAWAQRSGIGWIGKNSNLISKQNGSFFFLAELIVDLELDYDSPFHTDHCGTCTRCLDACPTDAIISPQVVDGSKCISYLTIELKNEIPVEFKDKMDNWMFGCDICQDVCPWNRFSKAHNEDAFKADNGLLELNAKELTEITDEVFRKVFKGSAVKRTKFAGLKRNIDFLKSTE

SEQ ID NO: 79336 - protein, 311 aa, Pedobacter kyonggii
  misc_feature (1)..(311): tr|A0A4Q9HA67|A0A4Q9HA67_9SPHI Epoxyqueuosine reductase OS=Pedobacter kyonggii OX=1926871 GN=queG PE=3 SV=1
MYNNSAKYSQLIKDEALRLGFMACGISKAEFLEEEAPRLEKWLNQNRHGEMKYMENYFDKRLDPRLLVEDAKSVISLSLNYYTEEKQSDPDAPKISKYAYGQDYHTVIKDKLKELTHFIEENIGEVSGRAFVDSAPVLDRAWAKKSGIGWIGKNSNLISKTDGSFFFLAELIVDLELDYDHPYQADYCGSCTRCLDACPTDAIIAPQVVDGTKCISYLTIELKNEIPSEFKDKMSNWMFGCDICQDVCPWNRFSKAHNESAFKPENGLLDLNAKDLTEITDDVFKKVFKGSAVKRTKFSGLKRNIDFLKPE

SEQ ID NO: 79337 - protein, 311 aa, Pedobacter kyungheensis
  misc_feature (1)..(311): tr|A0A0C1G7C9|A0A0C1G7C9_9SPHI Epoxyqueuosine reductase OS=Pedobacter kyungheensis OX=1069985 GN=queG PE=3 SV= 1
MYNNSAKYSQLIKDEALRLGFLACGIAKAEFLEEEAPRLEKWLSQNHHGEMKYMENYFDKRLDPRLLVEGAKSVISLSLNYYTDETQSDPDAPKISKYAYGQDYHTVIKDKLKELTHFIETNIGEVSGRAFVDSAPVLDRAWAKKSGIGWIGKNSNLISKSSGSFFFLAELIIDLELDYDHPYQADYCGSCTRCLDACPTDAIIAPQVVDGSKCISYLTIELKNEIPAEFKDKMSNWMFGCDICQDVCPWNRFSKAHNEAAFKPESGLLDLSAKDLTEITDEVFKKVFKGSAVKRTKFAGLKRNIDFLKPE

SEQ ID NO: 79338 - protein, 315 aa, Pedobacter lusitanus
  misc_feature (1)..(315): tr|A0A0D0GB82|A0A0D0GB82_9SPHI Epoxyqueuosine reductase OS=Pedobacter lusitanus OX=1503925 GN=queG PE=3 SV=1
MYNNPAKYSQLIKDEALRLGFMQCGIAKAGFLEEEAPRLEKWLKDNRHGQMSYMENHFDKRLNPQLLVDDAKSVISLTLNYFPEERQTDPDAPKISKYAYGADYHTVIKDKLFQLLNFIQENIGEVSGRAFVDSAPVLDRAWAKRAGIGWIGKNSNIISKKSGSFFFLAELIIDLDLVYDNPFTTDHCGTCTKCIDACPTDAILSPFIIDATKCISYLTIELREEIPKSFDNKMDNWMFGCDICQDVCPWNRFSVPHTEPEFKPNQNLLGMKREDWLDITEDVFKQIFKNSAVKRTKFKGLTRNIDFIRQIPDEA

SEQ ID NO: 79339 - protein, 309 aa, Pedobacter luteus
  misc_feature (1)..(309): tr|A0A1T5AQG1|A0A1T5AQG1_9SPHI Epoxyqueuosine reductase OS=Pedobacter luteus OX=572036 GN=queG PE=3 SV=1
MISKKDYTKFIKSEAQKLGFLSCGISKAGFLEKEAPLLETWLKNGSNGEMGYMENHFDKRLDPTLLVDGAKSVISLSINYYTDQLQTDPDAPKISRYAFGEDYHKVIKDKLRQLIEIIQEHIGEVNGRAFVDSAPVLDKAWANKSGLGWIGKNSNLISKKVGSFFFLAELITDLELEYDVAPTEDHCGTCTRCIDACPTNAIVEPYVVDGSRCISYLTIELKNEIPSEFKGKMDNWMFGCDICQDVCPWNKFSLLHTEPSFEANPSVLGMTAPEWREITQETFSKVFKNSAVKRTKFSGLKRNIEFLKS

SEQ ID NO: 79340 - protein, 313 aa, Pedobacter metabolipauper
  misc_feature (1)..(313): tr|A0A4R6T0X3|A0A4R6T0X3_9SPHI Epoxyqueuosine reductase OS=Pedobacter metabolipauper OX=425513 GN=queG PE=3 SV =1
MYNNPEKYSKLIKDEALRLGFMQCGIAKAEFLEDEAPRLEKWLHSGHHGEMAYMENHFDKRLDPRLLVDDARSVISLTLNYFPQEVQTDPDAPKISKYAYGSDYHLVIKDKLFQLLNFISENIGEVSGRAFVDSAPVLDRAWAKRAGIGWIGKNSNLINKKSGSFFFLAELIVDLELSYDNPFETDHCGTCTRCIDACPTDAILSPFVIDAKKCISYLTIELRDEIPKTFNDKMDNWMFGCDICQDVCPWNKFSVPHSEPGFKANENLLNMKREDWLDITEDVFRSIFKNSAVKRTKFKGLTRNIDFLKTLPD

SEQ ID NO: 79341 - protein, 312 aa, Pedobacter nutrimenti
  misc_feature (1)..(312): tr|A0A318UMY5|A0A318UMY5_9SPHI Epoxyqueuosine reductase OS=Pedobacter nutrimenti OX=1241337 GN=queG PE=3 SV=1
MLNNSSRYSKIIKEEALRLGFMQCGISQAVFLEEEAPRLEKWLHQNHHGKMSYMENHFDKRLDPRLLVDDAKSVISLTLNYFPQDRQVDENAPKISKYAYGTDYHLVIKDKLFQLLEFIREHIGEVSGRAFVDSAPVLDRAWAKKSGIGWVGKNSNIISKKSGSFFFLAELIVDLDLEYDHPFTTDHCGTCTKCMDACPTEAILSPYIIDAKKCISYLTIELKEEIPATFRDKMDNWMFGCDICQDVCPWNRFSVPHAEPLFKPKENLLEMKKEDWLDITDEVFKTIFKNSAVKRTKFKGLTRNIEFIKKTS

SEQ ID NO: 79342 - protein, 312 aa, Pedobacter nyackensis
  misc_feature (1)..(312): tr|A0A1W2DTQ0|A0A1W2DTQ0_9SPHI Epoxyqueuosine reductase OS=Pedobacter nyackensis OX=475255 GN=queG PE=3 SV=1
MLNNASRYSKMIKAEASRLGFMQCGIAKAEFLEDEAPKLEKWLKNKHHGQMAYMENHFDKRLDPRLLVDDSKSVISLTLNYFPEERQTDPAAPKISKYAYGADYHQVIKDKLFQLLNFIGEEIGEVAGRAFVDSAPVLDRAWAKRAGIGWIGKNSNLINKKNGSFFFLAELIVDLELEYDNPFQTDHCGTCTKCIDACPTEAILSPFVIDANKCISYLTIELREEIDPAFQNKMDNWMFGCDVCQDVCPWNRFSAPNVEPLFKPNEQLLQMKREDWLDITEDVFKTIFKNSAVKRTKFKGLTRNIDFIKKTL

SEQ ID NO: 79343 - protein, 311 aa, Pedobacter psychrophilus
  misc_feature (1)..(311): tr|A0A179DBJ5|A0A179DBJ5_9SPHI Epoxyqueuosine reductase OS=Pedobacter psychrophilus OX=1826909 GN=queG PE=3 SV =1
MLNSKNLYTEIIKAEAKRLGFSFCGISKAGFLEEEAPRLENWLNNNYNGKMDYMNNHFDKRLDPRLLVDDAKSVILLSLNYYTEEGQTDVNAPKISKYAYGKDYHFVIKDKLKSLMHFIEENIGEVKGRAFVDSAPVMDKAWAKKAGLGWIGKNTNLISRDNGSFFFIAELITDLDLNYDNPFEDDFCGTCTKCIDACPTDAIIDPYVVDGSKCISYLTIELKDQIPEEFKGKMDNWAFGCDICQDVCPWNRFSVPHQHEEFKPHPDLLKLNKKDWEEITSDVFSEVFRNSAVKRTKLEGLKRNISFLKER

SEQ ID NO: 79344 - protein, 327 aa, Pedobacter psychrotolerans
  misc_feature (1)..(327): tr|A0A4R2HBN9|A0A4R2HBN9_9SPHI Epoxyqueuosine reductase OS=Pedobacter psychrotolerans OX=1843235 GN=queG PE=3 SV=1
MINQNVLNPKPYLCSSVYNNATKYSQLIKNEAKRLGFLDVGISKAEFLESEAPRLEKWLHQNHHGEMKYMENYFDKRLDPRLLVDGAKSVISLSLNYYTEEKQLDPNAPKISKYAYGQDYHTVIKDKLKALTHFIEENIGEVSGRAFVDSAPVLDRAWAKKSGIGWIGKNSNLISKTEGSFFFLAELIVDLALDYDHPFQTDHCGTCTRCLDACPTDAIIAPQVVDGTKCISYLTIELKNEIPTEFKDKMSNWMFGCDICQDVCPWNRFSKAHNEEAFKPENGLLDLSAKDLTEITDDVFKKVFKGSAVKRTKYNGLKRNIDFLKPE

SEQ ID NO: 79345 - protein, 300 aa, Pedobacter rhizosphaerae
  misc_feature (1)..(300): tr|A0A1H9M0Y2|A0A1H9M0Y2_9SPHI Epoxyqueuosine reductase OS=Pedobacter rhizosphaerae OX=390241 GN=queG PE=3 SV= 1
MIKEEALRLGFIACGISKATFLEEEAPRLENWLLQNHHGEMKYMENYFDKRLDPRLLVDDAKSVISLSLNYYTPDKQTDPNAPKISKYAYGQDYHTVIKEKLKELLFFIEENIGAVSGRAFVDSAPVLDRAWAKRSGIGWIGKNSNLISKTDGSFFFLAELIIDLELDYDHPFQTDHCGTCTRCLDACPTDAIIAPQIVDGSKCISYLTIELKEEIPNEFKDKMSNWMFGCDICQDVCPWNRFSKAHNEQAFMPENGLLDLSAKELTEITDEVFKKVFKGSAVKRTKFSGLKRNIDFLKE

SEQ ID NO: 79346 - protein, 309 aa, Pedobacter ruber
  misc_feature (1)..(309): tr|A0A1G9X7W2|A0A1G9X7W2_9SPHI Epoxyqueuosine reductase OS=Pedobacter ruber OX=990371 GN=queG PE=3 SV=1
MINRAQYSRFIKSEALKLGFLFCGISKAEFLEEEAPRLENWLKKGYNAEMSYMENHFDKRLDPCKLVYGAKSVISLALNYYTDQKQKDPFAPKISQYAYGDDYHAVIKEKLNQLMQLIQEGIGEVSGRSFVDSAPVLDKVWAKKAGLGWIGKHTNLINKKSGSFFFLAELIIDLDLEYDLAPTKDHCGTCTKCIDACPTDAIVGPYVVDGSRCISYLTIELKNELPTEFKGKMDNWMFGCDICQDVCPWNKFSVLNTEPLFNPHDDLLELSQRDWQEINEDTFKKVFENSAVKRTKFSGLKRNIDFLRS

SEQ ID NO: 79347 - protein, 318 aa, Pedobacter soli
  misc_feature (1)..(318): tr|A0A1G6SP12|A0A1G6SP12_9SPHI Epoxyqueuosine reductase OS=Pedobacter soli OX=390242 GN=queG PE=3 SV=1
MPYLCRLVYNNSAKYSQLIKDEALRLGFLACGIAKAEFLEEEAPRLEKWLSQNHHGEMKYMENYFDKRLDPRLLVEGAKSVISLSLNYYTDETQSDPDAPKISKYAYGLDYHTVIKDKLKELTHFIETNIGEVSGRAFVDSAPVLDRAWAKKSGIGWIGKNSNLISKSSGSFFFLAELIIDLELDYDNPYQADYCGSCTRCLDACPTDAIIAPQVVDGSKCISYLTIELKNEIPTAFKDKMSNWMFGCDICQDVCPWNRFSKAHNEAAFKPESGLLDLSAKDLTEITDEVFKKVFKGSAVKRTKFAGLKRNIDFLKPE

SEQ ID NO: 79348 - protein, 77 aa, Pedobacter sp.
  misc_feature (1)..(77): tr|A0A519VMS4|A0A519VMS4_9SPHI tRNA epoxyqueuosine(34) reductase QueG (Fragment) OS=Pedobacter sp. OX=1411316 GN=EOO85_33910 PE=4 SV=1
MFNQVSKYSQMIKREALRLGFMSCGIAKAEFLEEEAPRLEKWLKNNHHGEMSYMENHFDKRLDPRLLVEGSKSIVSL

SEQ ID NO: 79349 - protein, 314 aa, Pedobacter sp.
  misc_feature (1)..(314): tr|A0A3E0EIN5|A0A3E0EIN5_9SPHI Epoxyqueuosine reductase OS=Pedobacter sp. YR510 OX=2135720 GN=queG PE=3 SV=1
MHFVYNNAVKYSQLIKDEAIRLGFLSCGISKADFLEEEAPRLEQWLNKNHHGEMKYMENYFDKRLDPRLLVDGAKSVISLSLNYYTEEKQADPNAPKISKYAYGQDYHHVIKDKLKALTHFIEENIGEVSGRAFVDSAPVLDRAWAKKSGIGWVGKNSNLISKTDGSFFFLAELIIDLELDYDHPFQTDHCGTCTRCIDACPTDAIIAPQVVDGTKCISYLTIELKNEIPNEFKDKMSNWMFGCDICQDVCPWNRFSKVHSEAAFKAENGLLDLTEKDLTEITDEVFKKVFKGSAVKRTKLAGLKRNIDFLKTE

SEQ ID NO: 79350 - protein, 313 aa, Pedobacter steynii
  misc_feature (1)..(313): tr|A0A1D7QP14|A0A1D7QP14_9SPHI Epoxyqueuosine reductase OS=Pedobacter steynii OX=430522 GN=queG PE=3 SV=1
MLNNSVKYSRMIKAEALRLGFMQCGIAKADFLEEEASRLEKWLKNNHHGEMGYMENHFDKRLDPRLLVDDSKSVISLTLNYFPEERQQDPDAPKISKYAYGTDYHLVIKDKLFQLLNFISEEIGEVSGRAFVDSAPVMDRAWAKRAGIGWIGKNSNLINKKSGSFFFLAELIVDLELEYDNPFETDHCGTCTKCIDACPTDAILSPFIIDAKKCISYLTIELREEIPQSFNDKMENWMFGCDICQDVCPWNRFSVPHSEPKFQPNENLLQMKREDWLDITEDVFKTIFKNSAVKRTKFKGLTRNIDFIKTAPK

SEQ ID NO: 79351 - protein, 313 aa, Pedobacter steynii
  misc_feature (1)..(313): tr|A0A1G9JXJ9|A0A1G9JXJ9_9SPHI Epoxyqueuosine reductase OS=Pedobacter steynii OX=430522 GN=queG PE=3 SV=1
MLNNSAKYSKMIKAEALRLGFMQCGIAKAGFLEEEAPRLTKWLENNHHGEMAYMENHFDKRLDPRLLVDDSKSVISLTLNYFPEERQADPDAPKISKYAYGTDYHLVIKDKLFQLLNFISEEIGEVSGRAFVDSAPVMDRAWAKRAGIGWIGKNSNLINKKSGSFFFLAELIIDLDLEYDSPFETDHCGTCTKCIDACPTDAILSPFIIDAKKCISYLTIELREEIPQSFNDKMENWMFGCDICQDVCPWNRFSVPHSEPKFQPNENLLQMKKEDWLDITEDVFKAIFKNSAVKRTKFKGLTRNIDFIKTVPK

SEQ ID NO: 79352 - protein, 311 aa, Pedobacter suwonensis; identical to SEQ ID NO: 79323
  misc_feature (1)..(311): tr|A0A1I0U685|A0A1I0U685_9SPHI Epoxyqueuosine reductase OS=Pedobacter suwonensis OX=332999 GN=queG PE=3 SV=1

SEQ ID NO: 79353 - protein, 311 aa, Pedobacter terrae
  misc_feature (1)..(311): tr|A0A561GFZ5|A0A561GFZ5_9SPHI Epoxyqueuosine reductase OS=Pedobacter terrae OX=405671 GN=queG PE=3 SV=1
MYNNSAKYSQLIKDEALRLGFIACGIAKAEFLEEEAPRLENWLNQNRHGEMKYMENYFDKRLDPRLLVDGAKSVISLSLNYYTEEKQSDPNAPKISKYAYGQDYHTVIKEKLKELTHFIEENIGEVSGRAFVDSAPVLDRAWAKKSGIGWIGKNANLISKTDGSFFFLAELIVDLELDYDHPYQADYCGSCTRCLDACPTDAIIAPQVVDGTKCISYLTIELKNEIPNEFKHKMGNWMFGCDICQDVCPWNRFAKAHDEEAFKPENGLLDLNAKELMEITDDVFKKVFKGSAVKRTKFTGLKRNIDFLKPE

SEQ ID NO: 79354 - protein, 311 aa, Pedobacter terrae
  misc_feature (1)..(311): tr|A0A1G7P5D1|A0A1G7P5D1_9SPHI Epoxyqueuosine reductase OS=Pedobacter terrae OX=405671 GN=queG PE=3 SV=1
MYNNHVKYSQLIKEEAFRLGFLSCGIAKAEFLEEEAPRLENWLNQNRHGEMKYMENYFDKRLDPRLLVDGAKSVISLSLNYYTEEKQSDPNAPKISKYAYGQDYHTVIKEKLKELTHFIEENIGEVSGRAFVDSAPVLDRAWAKKSGIGWIGKNSNLISKTDGSFFFLAELIVDLELDYDHPYQADYCGSCTRCLDACPTDAIIAPQVVDGSKCISYLTIELKNEIPNAFKDKMSNWMFGCDICQDVCPWNRFAKTHNEDAFKPENGLLDLNAKDLMEITDDVFKKVFKGSAVKRTKFTGLKRNIDFLKSE

SEQ ID NO: 79355 - protein, 321 aa, Pedobacter tournemirensis
  misc_feature (1)..(321): tr|A0A4Q0MGD8|A0A4Q0MGD8_9SPHI Epoxyqueuosine reductase OS=Pedobacter tournemirensis OX=699437 GN=queG PE=3 SV =1
MFTNATKYSKLIKDEALKLGFMFCGISKATYLEEEAPRLEAWLSQGKHGKMAYMENHFDKRLDPRKLVEGAKSVISLGLNYYTDAQPIDTMAPKISKYAYGKDYHDVIKEKLKELFKIMSDNIGDIGGRAFVDSAPVLDRAWAKRSGLGWIGKNSNLINKHSGSFFFLAELIVDLELEYDMPLAKDHCGTCTRCIDACPTEAIVAPQVVDGSRCISYLTIELKEELPIEFKDKMDNWMFGCDICQDVCPWNRFSTLHNEAAFTPHPSLLDMNRTEWEEITEDIFQQLFKGSPVKRTKFSGLKRNIEFLRTFENAPSLIEGD

SEQ ID NO: 79356 - protein, 321 aa, Pedobacter tournemirensis
  misc_feature (1)..(321): tr|A0A543GYN9|A0A543GYN9_9SPHI Epoxyqueuosine reductase OS=Pedobacter tournemirensis OX=699437 GN=queG PE=3 SV =1
MFTNATKYSKLIKDEALKLGFMFCGISKATYLEEEAPRLEAWLSQGKHGKMAYMENHFDKRLDPRKLVEGAKSVISLGLNYYTDAQPIDTMAPKISKYAYGKDYHDVIKEKLKELFKIMSDNIGDIGGRAFVDSAPVLDRAWAKRSGLGWIGKNSNLINKHSGSFFFLAELIVDLELEYDMPLAKDHCGTCTRCIDACPTEAIVAPQVVDGSRCISYLTIELKEELPIEFKDKMDNWMFGCDICQDVCPWNRFSTLHNEAAFTPHPSLLDMNRTEWEEITEDIFQQLFKGSPVKRTKFTGLKRNIDFLRTLENVPSFTEGD

SEQ ID NO: 79357 - protein, 318 aa, Pedobacter westerhofensis
  misc_feature (1)..(318): tr|A0A521CY82|A0A521CY82_9SPHI Epoxyqueuosine reductase OS=Pedobacter westerhofensis OX=425512 GN=queG PE=3 SV =1
MYNNAAKYSKLIKDEALRLGFMQCGIAKAGFLEEEAPRLENWLKNQHHGQMAYMENHFDKRLDPRLLVEDAKSVISLTLNYFPVEQQSDPNAPKISKYAYGADYHTVIKDKMFQLLNFINEQIGAVSGRAFVDSAPVLDRAWAKRAGIGWVGKNSNIISKKSGSFFFLAELIVDLDLEYDAPFATDHCGTCTKCIDACPTDAILSPFVIDANKCISYLTIELREEIPATFGNQMENWMFGCDICQDVCPWNRFSAPHTEPAFEPNAQLLQMKREDWLDITEDVFKQIFKHSAVKRTKFKGLTRNIDFIKQLPAAEGKC

SEQ ID NO: 79358 - protein, 314 aa, Pedobacter xixiisoli
  misc_feature (1)..(314): tr|A0A285ZU41|A0A285ZU41_9SPHI Epoxyqueuosine reductase OS=Pedobacter xixiisoli OX=1476464 GN=queG PE=3 SV=1
MQKMFNQASKYSQMIKQEALRLGFMSCGIAKADFLEEEAPRLENWLEANHHGEMAYMENYFDKRLDPRILVEGSKSIVSLTLNYFTEEKQIDINAPKISKYAYGMDYHSVIKDKLQELMAFIREEIGEVDGRCFVDSAPVMDKAWAQKAGLGWRGKNSNLISKQAGSFFFLAELIIDLELEYDNPFPTDHCGSCTRCIDACPTDAIIAPYTVDGSRCISYLTIELKNEIPAEFKGKMDNWMFGCDVCQDVCPWNRFSTVHQEENFTPKEDLLGLSKSDLIEMTDEVFKRVFKNSPVKRTKYNGLKRNIDFLQEP

SEQ ID NO: 79359 - protein, 311 aa, Pedobacter yonginense
  misc_feature (1)..(311): tr|A0A317EQF1|A0A317EQF1_9SPHI Epoxyqueuosine reductase OS=Pedobacter yonginense OX=651869 GN=queG PE=3 SV=1
MYNNSAKYSQLIKDEAIRLGFLSCGISKAEFLEEEAPRLEKWLKNNHHGEMKYMENYFDKRLDPRLLVDDAKSVISLSLNYYTKENQTDVHAPKISKYAYGQDYHTVIKEKLKFLLSFIEENIGEVSGRAFVDSAPVLDRAWAKKSGIGWVGKNSNLISKTDGSFFFLAELIIDLELDYDYPFQTDHCGTCTRCLDACPTDAIIAPQVVDASKCISYLTIELKEEIPTEFKDKMANWMFGCDICQDVCPWNRFSKAHNEEAFNPQKGLLDLNEKDLIELTDEVFTKVFKGSAVKRTKFKGLKRNIDFLKSS

SEQ ID NO: 79360 - protein, 312 aa, Pedobacter yulinensis
  misc_feature (1)..(312): tr|A0A2T3HKK6|A0A2T3HKK6_9SPHI Epoxyqueuosine reductase OS=Pedobacter yulinensis OX=2126353 GN=queG PE=3 SV=1
MATKSSSYAAMIKAEATRLGFFQCGIARAAFLEEEAPRLENWLKQNAHGEMAYMENHFDKRLDPRLLVPGARSVISLALNYYTDQKQEDPEAPKISKYAFGTDYHTVIKEKLFALLDFIRQNIGDVDGRAFVDSAPVMDKAWAKRAGLGWQGKNSNLISQKKGSFFFLAELIIDLELDYDEAFQNDHCGSCTRCIDACPTDAIAQPYVVDGSRCISYLTIELKNEIPAAFKGKMDNWVFGCDICQDVCPWNRFSTVHQEQAFRPADGLLNMSREQISEITEDVFRKVFKGSAVKRTKFSGLQRNIDFLRETD

SEQ ID NO: 79361 - protein, 322 aa, Pedosphaera parvula
  misc_feature (1)..(322): tr|B9XE33|B9XE33_PEDPL Uncharacterized protein OS=Pedos phaera parvula (strain Ellin514) OX=320771 GN=Cflav_PD4 587 PE=4 SV=1
MTSAAPPATAELFQRWLAAGKHGGMSWLERNAHKRIDPQQVLANAKSIITLAVSYSPCSVLNPPRSTGLIARYARFADYHDVLAGRLKALTDFLNQLAGEGTRSLWYVDTGPLLERDIAQRSGLGFVGKHTNIISRRLGNWIFLSEIITTLELAPDTPEHNRCGSCTRCLTACPTNAITAPFQLDARRCISYLTIELKGSIPVELRPLIGNRIYGCDDCLAACPWNRFAQEGSMMKPHARPDLATPDLIELLSLDDTAFKQRFAGTPMLRTKRRGILRNVCVALGNIGDDSALPVLEHAAQDTDPIIAEHAQWAMEQIRQRE

SEQ ID NO: 79362 - protein, 349 aa, Pedosphaera sp.
  misc_feature (1)..(349): tr|A0A2D8UTD4|A0A2D8UTD4_9BACT tRNA epoxyqueuosine(34) reductase QueG OS=Pedosphaera sp. OX=2024890 GN=queG PE =4 SV=1
MSSSLEQPIREAAWKLGFGACQFTHAGQPDRFSAYQKWIQDGMHGEMSYLDRHQEKKGDLQKVLPGMKSIISLATSYLPPESSAPHPETFTGKVARYARFEDYHHVLEAPLKALCKELETLGGKGHTHLHYVDTGPIMERDLAQRAGLGFTGKHTNLISRKLGNWFFISEILTTLKLIPDKPEPNRCGHCARCLEACPTEAITEPFKLDARRCISYWTIEYKGSIPMEMRPLIGDRVFGCDDCLEVCPWNRFAKESERMKPVYLERLHQPDLLEWLELDDEGFKQKFRGTPMIRTKRRGLLRNVCVALGNTANAQALPALEKARQDPNGLIAEHARWAIDQIKKRLNSR

SEQ ID NO: 79363 - protein, 403 aa, Pedosphaera sp.
  misc_feature (1)..(403): tr|A0A2A2RRC5|A0A2A2RRC5_9BACT Epoxyqueuosine reductase OS=Pedosphaera sp. Tous-C6FEB OX=1982324 GN=queG PE=3 SV=1
MRRAGEHGAALGEGNRRTCAAQFPRRRPSAAADVKAAIRQRARELGFDECRFTSAAAPEHAAHLDRWLAAGQHGEMAWIARNAHKRVDPQQVLAGARTVICLAVSYAGEEAVSIQCSVSSGGTEAPARKTEHGSLNTGVVARYARFPDYHDLLAEPLRQLTAFVDQFGGGTRSLWYVDTGPVLERDLAQRAGLGFAGKHTNLISRRLGNWFFLAEILTPLALEPDAPEKNRCGSCTRCMTACPTAAITAPFQLDARRCISYLTIELKGAIPVELRPALGNRIYGCDDCLAACPWNRFAQAGSLMRAHARNDLAQPELLALLALDETAFKRRFAGTPMLRTKRRGLLRNVCVALGNVGDAAALPALHQAAADPEPLIAEHARWAIQQIAQRSGGTAPPEGASGN

SEQ ID NO: 79364 - protein, 367 aa, Pelagibaca abyssi
  misc_feature (1)..(367): tr|A0A1P8UUH1|A0A1P8UUH1_9RHOB Epoxyqueuosine reductase OS=Pelagibaca abyssi OX=1250539 GN=queG PE=3 SV=1
MTLKARLISEAQEVGFAACRICRPGDVPQAASRLAAFLEAGYHGQMGWMAERTGWRGDPQALWPEARSVIMLAENYGPEADPLAVLEARDRAAISVYAQNRDYHDVVKKKLKRLGRWLLAEAERGGGKDLGGVLLSSAEPTAAHAAAKPPEIKVFVDTAPVMEKPLGQAAGLGWQGKHTNLVSREIGSWFFLGAIFTTLELPPDGAERDHCGSCRACLDACPTDAFPAPYKLDARRCISYLTIEHKGPVDEALRPLLGNRIYGCDDCLAVCPWNKFARTAHEVKYHARPDLQAPQLAELAGLDDAAFRALFSGSPIKRIGRDRFLRNVCYAIGNSGDAALLPAAQALCEDPDETLRDAARWAVARLS

SEQ ID NO: 79365 - protein, 394 aa, Pelagibacteraceae bacterium
  misc_feature (1)..(394): tr|A0A2D5WY17|A0A2D5WY17_9PROT tRNA epoxyqueuosine(34) reductase QueG OS=Pelagibacteraceae bacterium OX=202677 5 GN=queG PE=4 SV=1
  misc_feature (199)..(199): Xaa can be any naturally occurring amino acid
  misc_feature (305)..(305): Xaa can be any naturally occurring amino acid
MSKRNNSHTEIPTKRKFTEADSSINLKSSEKKLIESAILFGFDQAKIVDIKKTKNQNIELLNFLEKNYHGEMSWMADRTEIRSDPKNIWNEAKSILVLASNYHFHENSLSLLEKKDKGIISVYARGRDYHLTIKKRLKSLSRWIVENYKCNIKYFVDTAPVMEKPLAMKAGIGWQGKHTNIVSKEYGSWLFLSSIFLDXTLESNDEMIDHCGSCQRCIDICPTDAIERPYHINASKCISYLTIEHKSHIPEIFRKKIGNRVYGCDDCLAICPWNKYAKKTTNIDFLPRDEFNEPKLKNFLKLDDXGFRKLFSTTSIKRIGRNRFLRNVLIAVGNSGEKNFIEDIIPLLNDESNLVRAMAIWSLNQLCEKEKFEKLKKQYFHLESDQDVIKEWNE

SEQ ID NO: 79366 - protein, 371 aa, Pelagibacteraceae bacterium
  misc_feature (1)..(371): tr|A0A1Z8V100|A0A1Z8V100_9PROT tRNA epoxyqueuosine(34) reductase QueG OS=Pelagibacteraceae bacterium TMED65 OX =1986644 GN=CBC25_02060 PE=4 SV=1
MKMKDLKKKINIEVLNNGFDVLGFTKVHVNKEIGKNYSEFLKNNCHGEMKWLERHYEKKINPRLIWNDVKTILVVGQNYAPNENPLKYNQERNKANISVYARNHDYHKIMQDKLLNIQSWLKNELKMQSKVFVDTSPILEKYFAEKANLGWQGKHTNLVSKKYGSWLFLGEIFLPIDIEDKYEEQGDCGTCEKCLDICPTNAFLGNNKIDARKCISYLTIEHKGPIPMTLRKKIGNKVYGCDDCLSICPWNKFSTETKEDKLNSNKSLNNLDFFLNFNKQKFEIYFSESPVKRIGWERFLRNIIIASGNSQNISLIDSLYPHLKNDYPIIRGACVWSLFQLLCRNEKNKLRRKLLLEEKNEYVIFELRMNS

SEQ ID NO: 79367 - protein, 389 aa, Pelagibacterales bacterium
  misc_feature (1)..(389): tr|A0A2F0AJV4|A0A2F0AJV4_9PROT tRNA epoxyqueuosine(34) reductase QueG OS=Pelagibacterales bacterium OX=2026776 GN=queG PE=4 SV=1
MILLLLHITKIWIFELTDTFFDKIEKYSKSLGFQDIKVTNFSDFNIYSKHLREFIKNKFYGEMNWIKEKSLIRENPTNIWEEAKSALVFGLNYGPDYSPFSELKNKKTGYISIYARRKDYHKVIKSKLKNIGRFICRNSDIKVKVFVDTAPIMEKPLAELSNMGWIGKHTNLVSKKYGSWLFLGIILTNYNFNQSKKHKINNCGTCNACNEACPTNAFTSPYKLDARKCISYLTIEHKTHIKRKYRSLIGNRIFGCDDCLAVCPWNKFAKTHSDIKLDINNNLVLQPLKSLVSLDEESFRKKFSGTPLKRLGYNRFLRNILIAIGNSGDKSLVDCAINKLEHNSSLVRAMAVWALFQLSADRFKEEKKLRYSKERDLDVREEWHEGNIK

SEQ ID NO: 79368 - protein, 377 aa, Pelagibacterales bacterium
  misc_feature (1)..(377): tr|A0A2D5FV79|A0A2D5FV79_9PROT tRNA epoxyqueuosine(34) reductase QueG OS=Pelagibacterales bacterium OX=2026776 GN=queG PE=4 SV=1
MKNLHEKIKSKALELEFDAIGFCEADLPESVTKHLHEFIDKGRHGSMKWLAETSHRRSQPRNMWQSAMTAIVLGCNYGPEYDPLKALNNKNIGNISVYAQNKDYHKWVKGRLKNLAGWLVSKTKGQVKVFVDTAPLMEKPLAEISKIGWVGKHTNLVSRDFGSWLFLGVILLDLNIIEEKNKIQKSNCGTCSQCIDICPTNAFVAPYKLDANKCISYLTIEHKTHIPREYRSLMGNRIYGCDDCLAVCPWNKYAKISNNMSFLPREDLKKPSLESLSILSDKDFRVYFSGSPIKRIGRNQFIRNVLIAMGNSSNKLLVKHIIDLLGDSSPIVRLSAIWALGQLCQESFFIEMNKRVNEEKDKEVISEWLETKKEINH

SEQ ID NO: 79369 - protein, 373 aa, Pelagibacterium halotolerans
  misc_feature (1)..(373): tr|G4R994|G4R994_PELHB Iron-sulfur cluster-binding prot ein OS=Pelagibacterium halotolerans (strain DSM 22347 / JCM 15775 / CGMCC 1.7692 / B2) OX=1082931 GN=KKY_3442 PE=4 SV=1
MSAGGETIVAQLRARASFLGFSTFGIAPADARPDLPQKLQSALQSGWHGDMEWMEETRDRRESPAALWPAVKSVVMVGANYAPDENPLNRLTDKSLANVSVYAQMRDYHDVIKGRLKDLAGLLARRTGAEVKVFVDTAPVMEKPLAEAAGLGWQGKHTVLLSRDAGSWLFLGTIFTSAELPASTPEAEKCGTCTKCLDICPTDAFPAPFRLDARKCLAYYSVEHKGQIPLQFRKPMGNRVFGCDDCLAVCPWNKFASATRDAKLSARETIRDAGLSDMLALDDRRFRDFFAQTPVKRLGSARFLRNCLVAAGNSGDRHHLPAIERLFTHESPLVRGMAIWAVRQLADTAETEGLRAKTLATETDPEVRAEWSQ

SEQ ID NO: 79370 - protein, 371 aa, Pelagibacterium luteolum
  misc_feature (1)..(371): tr|A0A1G7SQ16|A0A1G7SQ16_9RHIZ Epoxyqueuosine reductase OS=Pelagibacterium luteolum OX=440168 GN=queG PE=3 SV= 1
MSADGNTIVSELRARAKTLGFDSVGITSADARPDLSQKLASALDQHWHAGMEWMEETRERRQQPKALWPDVKSIIMVGANYGPAENPLDRLVDKNLANVSVYAQMRDYHEVIKGRLKDLAGFLARRTGAEVKVFVDTAPVMEKPLAEAAGLGWQGKHTVLLSRDAGSWLFLGAIFTSADLPADAPEPEKCGSCTRCLDICPTNAFPAPFRLDARKCLAYYSVEHKGQIPIEFRKPMGNRVFGCDDCLAVCPWNKFARQTRDDKLAARETIRDAQLSDMLALDDPAFRDFFAQTPVKRLGAARFLRNCLVAAGNSGDHTHIPAVSRALAHESPLVRGMAVWALRQLAEPDEAAGYRHHTIETDLEVLAEWSH

SEQ ID NO: 79371 - protein, 373 aa, Pelagibacterium sp.
  misc_feature (1)..(373): tr|A0A3D3SR38|A0A3D3SR38_9RHIZ Epoxyqueuosine reductase OS=Pelagibacterium sp. OX=1967288 GN=queG PE=3 SV=1
MSSKGDSIVAELRARAADLGFAGFGIAPADARPDLPQKLQSALQSGWHADMGWMADTEERRKSPAALWPDVKSVIMVGANYGPEENPLDRLADTSLANVSVYAQMRDYHDVIKGRLKDLAGLLARRTGAEVKVFVDTAPVMEKPLAEAAGLGWQGKHTVLLSREAGSWLFLGAIFTSADLPASTPAEEKCGTCTKCLDICPTDAFPAPFRLDARKCLAYYSVEHKGQIPVEFRKPMGNRVFGCDDCLAVCPWNKFASATRDAKLSARQAIRNAGLSDMLALSDAAFRDFFAQTPVKRLGSARFLRNCLVAAGNSGDTAYLAAIKRLIAHDSPLVRGMAIWALRQLAREGEADAQRARSLATEPDPEVRAEWSH

SEQ ID NO: 79372 - protein, 371 aa, Pelagibacterium sp.
  misc_feature (1)..(371): tr|A0A369W437|A0A369W437_9RHIZ Epoxyqueuosine reductase OS=Pelagibacterium sp. XYN52 OX=2282655 GN=queG PE=3 S V=1
MTPEGDRLVAELRARATQLGFDSLGIARADARPDLAARLGFALDAGWHAGMEWMETTRDRRQRPNALWPEARSILMLGTSYAPETDPLARLADPGLANISVYAQGRDYHEVIKGRLKELAGLLARRSGAEVKVFVDTAPVMEKPLAEAAGLGWQGKHSVLLSRQAGSWLFLGAIFTTAELPPDAPETEKCGSCTRCLDICPTDAFPAPFRLDARKCLAYYSVEHKGQIPLRFRKPMGNRVFGCDDCLAVCPWNKFARRSRDDKLAARPALRDARLTDMLALDDTAFRGMFAQTPVKRLGSARFLRNCLVAAGNSGDRDHLPAIARLLRHDSPLVRGMAVWAARQLAGPREAAALRAGNDETDPEVLAEWTH

SEQ ID NO: 79373 - protein, 362 aa, Pelagibaculum spongiae
  misc_feature (1)..(362): tr|A0A2V1H4W9|A0A2V1H4W9_9GAMM Epoxyqueuosine reductase OS=Pelagibaculum spongiae OX=2080658 GN=queG PE=3 SV=1
MNPFTEQQLSEIQSWLKQQAAELGFAQVVVSNPDLAVESEKFQQWVDQGLHGEMDYLARNHDLRAEPAKLLPETCRVVSFAMDYLPEKQSIQLLSQPDKAYVSRYALGRDYHKLIRKRLTNLGKQLENKLSELNADFKLVYRPFVDSAPVMERQIAEQGGMGWIGKHTLLLNRKHGSWFFLAELFINLPLATEQPVKGHCGKCSACIDICPTQAITGPYQLDARRCISYLTIEHPGSIPVELRSMMGNRIYGCDDCQLVCPWNRFAKLSVEDDFQPRQKLDNAQLLELFQWDEAQFLKNTEGSPIRRAGFERWQRNLAIALGNALAKDIQQQPQIISALKEAEINSTAVVNEHIQWALQQVS

SEQ ID NO: 79374 - protein, 354 aa, Pelagicola litoralis
  misc_feature (1)..(354): tr|A0A4U7N1W1|A0A4U7N1W1_9RHOB Epoxyqueuosine reductase OS=Pelagicola litoralis OX=420403 GN=queG PE=3 SV=1
MSSDLKARLVAEAQAIGFDLCRICRPHDVGHVPEGLAGFLAQDYQGQMGWLNERTHWRSNPAALWPEAQSVIMLGESYTPEHDPTAVHTMPERGAISVYAQNKDYHDIVKKRLKRLARWLIAETGDATQVKVFVDTAPVPEKPLGQAAGLGWQGKHTNLVSRDLGSWFFLGSVFTTVHLEADAAEVDHCGSCRSCLDACPTGAFPAPHQIDARRCISYLTIEHHGPVDEDLRPMLGNRIYGCDDCLAACPWNKFAVEASEMRYFARDDLKAPELAFLVTLDDAEFRKFFSGSPIKRIGRNRFIRNVLYAMGNSGNAEFMAPASSLCADPDMTVVDAAQWALKRLKAVANGQAQA

SEQ ID NO: 79375 - protein, 360 aa, Pelagicola litorisediminis
  misc_feature (1)..(360): tr|A0A1Y5RMA5|A0A1Y5RMA5_9RHOB Epoxyqueuosine reductase OS=Pelagicola litorisediminis OX=1312363 GN=queG PE=3 SV=1
MSPKVFMPRKNMDDLKNRLVARALEEGFDACRICRPWDVGHVPEQLAAFLDRGYHGQMGWLAERSHWRGAPEVLWPEARSVIVLGESYTPGEDPRATIGQPEVGTISVYARNRDYHDLVKKRLKRLARWLIDEAGGEVKVFVDTAPVPEKPLGQAAGLGWQGKHTNLVSRDLGSWFFIGSVFSTLEIETDLAEIDHCGSCRACLDACPTDAFPAPYQLDARRCISYLTIEHKGPVDEGLRPLMGNRIYGCDDCLAACPWNKFAVAARELRYHAREDLKAPELAALATLDDGGFREMFSGSPIKRIGRDRFVRNVLYAIGNSATPELKPMAQALCDDPDAAVADAARWAVRRLESDANGLE

SEQ ID NO: 79376 - protein, 358 aa, Pelagicola sp.
  misc_feature (1)..(358): tr|A0A2U2CWK8|A0A2U2CWK8_9RHOB Epoxyqueuosine reductase OS=Pelagicola sp. LXJ1103 OX=2175247 GN=queG PE=3 SV=1
MHEGLKARLNVQALAEGFDLMRICRPDAVPEVPERLAAFLEAGRHGQMGWLEERSAWRGDPAALWPEARSVIMLGESYTPQEDPLANLTVPELGTVSVYARNRDYHDLVKKRLKRLARWLLAECGPGGPEAAPPEVKVFVDTAPVPEKPLGQAAGLGWQGKHTNLVSRDMGNWFFIGSIFTTIDLAPDAAEIDHCGSCRACLDVCPTDAFPAPYELDARRCISYLTIEHKGPVDPALRPLLGNRIYGCDDCLAACPWNKFAQEARELRYHARPDLVAPRLDELAGLDDAAFRALFSGSPIKRIGRDRFLRNVLYAIGNSGRVDLLPSAEAHLDDPDEAVADAARWAQSRLQSAANRLE

SEQ ID NO: 79377 - protein, 351 aa, Pelagimonas varians
  misc_feature (1)..(351): tr|A0A238KLI5|A0A238KLI5_9RHOB Epoxyqueuosine reductase OS=Pelagimonas varians OX=696760 GN=queG PE=3 SV=1
MTDSDLKTRLVAEALDVGFSAARICRPDAVPQVMDRLQAFLDAGYHGQMGWMADRVHWRGAPDVLWPQAQSVVMLAENYGPDFDPRAVLGQRDRGAISVYAQNKDYHDVAKKRLKRLGRWLIEAARRGGEEIEIKVFVDTAPVPEKALGMAAGLGWQGKHSNLVSRELGSWFFLGALFTTLKMEPDAAGRDNCGNCHACLDVCPTDAFPAPYQVDARRCISYLTIEHKGPVAEDLRNKMGNHIYGCDDCLAACPWNKFAQKAAEVKYHAREDLLAPKLADLAVLDDTGFRALFSGSPIKRIGRDRFVRNVLYAIGNSGDAALGSVAHSLLDDPDEAVADAAAWAIAQLEGR

SEQ ID NO: 79378 - protein, 378 aa, Pelagirhabdus alkalitolerans
  misc_feature (1)..(378): tr|A0A1G6NAQ3|A0A1G6NAQ3_9BACI Epoxyqueuosine reductase OS=Pelagirhabdus alkalitolerans OX=1612202 GN=SAMN0542 1734_11510 PE=4 SV=1
MANETLKAEIIEYAKSIGIDKIGFAAANPFAEMKSRLKMQQDDDYQSGFEKGTIEERTEPELHLDDAESIIAIAVAYPSRMKSRPTNKKGNRRGNFCRASWGHDYHIVLNEKLEKLEAYIASRVTGFRSRSMVDTGELSDRAVAERAGIGFSGKNCSIITPEFGSYVYLGEMITNIPFPSDEPVDDGCGDCTLCIEACPTGALVAPGRLNAQNCIAFVTQTKGFMPDEYREKVGNQLYGFDTCQLVCPKNKGIDTHHHPELEPDPELVKPELLPLLSISNREFKQSFGKMAGSWRGKKPIQRNAIIALAHYKETSAVDRLIELMKEDPRPVIRGTAAWAIGKIGREDGRQAILDCQQQEVDEEVLEEMAKGLAYFSHR

SEQ ID NO: 79379 - protein, 357 aa, Pelagivirga sediminicola
  misc_feature (1)..(357): tr|A0A2T7G8R5|A0A2T7G8R5_9RHOB Epoxyqueuosine reductase OS=Pelagivirga sediminicola OX=2170575 GN=queG PE=3 SV =1
MDALKRQLVDQAHAEGFDLARICRPWDVPQVPDRLQTFLEKERHGQMHWMAERSHWRADPAALWPEAQSVIMLGESYTPEHDPLEVLGRRSEGAISVYAQNRDYHDLVKKRLKRLARWLIAQTSPDTEVKVFVDTAPVPEKPLGAAAGLGWQGKHTNLVSRDLGSWFFIGSIFTTLTLEADAAETDHCGSCRACLDVCPTGAFPAPYQLDARRCISYLTIEHSGPVAPELRALMGNRIYGCDDCLAVCPWNKFAKEARELRYRARDDLLGPPLAELADLDDTSFRAMFSGSPIKRIGVLRFLRNVLYAIGNSGDPALLPAAERHCDAQDATVADAARWAVMRLKGVENGMDSGADPA

SEQ ID NO: 79380 - protein, 301 aa, Pelobium manganitolerans
  misc_feature (1)..(301): tr|A0A419S2X0|A0A419S2X0_9SPHI Epoxyqueuosine reductase OS=Pelobium manganitolerans OX=1842495 GN=queG PE=3 SV =1
MIKTEALRLGFSSCGISKATFLEQEAPKLENWLKNDFNGKMDYMNNHFDKRLDPRLLVDDAKSIISVTLNYFTPAKQADDKAPKLSKYAYGMDYHYVLKDKLKALTNFITEEIGEVNGRAFVDSAPVLDKAWAQKGGLGWRGKNTNLISKNNGSFFFLGELIVDLDLQEDAPFTTDHCGSCTRCIDACPTDAIVAPYVVDGSKCISYLTIELKEQLPGEFKGKMDNWMFGCDVCQDVCPWNRFSVPNQEPSFQPHPDLLHIKKHEWEDITTEVFQKVFKKSPVKRTKYEGLKRNIDFLKQV

SEQ ID NO: 79381 - protein, 314 aa, Pelodictyon luteolum
  misc_feature (1)..(314): tr|A0A165LYA0|A0A165LYA0_PELLU Epoxyqueuosine reductase OS=Pelodictyon luteolum OX=1100 GN=A3K90_02375 PE=4 SV =1
MHEAPTTLARKIRQEAHRLGFSAIGFAAPPPGFLAVERYDEMLRDGRHGEMTYLETGAPARRHPESLLPGLKTVVSLAVSYRHNPPGGRAKLSRYAMVADYHTVMRKKAESLLDCIERLNGCKPNAFIAVDGAPVLEKEWAERSGMARTGKNTLAIVPSAGTFVFLGELLLDIEIREERPLLPNLCGSCTKCIDACPTGALQGPGKIDARRCISYLTIELKREFTAEESAMIGRNLFGCDTCQENCPHNQRPAINPDPAFSPRQELTGLDPERILQLTRSGFNALFAGTPVWRIGLKRLKRNARAIIANELQRS

SEQ ID NO: 79382 - protein, 314 aa, Pelodictyon luteolum
  misc_feature (1)..(314): tr|Q3B5Q9|Q3B5Q9_PELLD Iron-sulfur cluster-binding prot ein OS=Pelodictyon luteolum (strain DSM 273 / 2530) OX= 319225 GN=Plut_0434 PE=4 SV=1
MHEAPTTLARKIRQEALRLGFSSIGFAAPPPGFLAVERYDEMLRDGRHGEMTYLETGAPARRHPESLLPGLKTVISLAVSYRHNPPGGRAKLSRYAMIADYHTVVRKKAEALLDCIERLSDSKPNAYIAVDGAPVLEKEWAERSGMARTGKNTLAIVPSAGTFVFLGELLLDIEIREERPLLPNLCGSCTKCIDACPSGALLGPGKIDARRCISYLTIELKREFTAEESAMIGRNLFGCDTCQEHCPHNQRPAINPDPAFSPRKELIGLEPERILQLTRSGFNALFAGTPIWRIGLKRLKRNARAVLANEQRSS

SEQ ID NO: 79383 - protein, 324 aa, Pelodictyon phaeoclathratiforme
  misc_feature (1)..(324): tr|B4SDT4|B4SDT4_PELPB 4Fe-4S ferredoxin-type domain-co ntaining protein OS=Pelodictyon phaeoclathratiforme (st rain DSM 5477 / BU-1) OX=324925 GN=Ppha_2257 PE=4 SV=1
MADPSTTLARQIRKEAARLGFAAIGFSAPVRQPIAMQHVTDMVREKRHGEMGYMEKQMEERSNPSLLFTGLHTIISTAICYNYPLSHDDGLPKISKYALIDDYHRVVRNKLEALVAAIQLLVEEPLQARITVDSAPLLEKAWAEEAAIGKTGKNTLLKVPSAGSYVFLGEILVDREIISTKLSLPNYCGSCSNCLERCPTGALLEPGKIDASRCISYLTVELKRDFTAEEAAMIGDWLFGCDLCQEVCPYNRQASITANESFVLRQNLIGITTEEILNLTKSSFRELFYGTPIFRIGLRRLKRNALAVADNLKKAKEDTIPTNF

SEQ ID NO: 79384 - protein, 384 aa, Pelolinea submarina
  misc_feature (1)..(384): tr|A0A347ZSP5|A0A347ZSP5_9CHLR Epoxyqueuosine reductase OS=Pelolinea submarina OX=913107 GN=DFR64_0974 PE=4 SV =1
MQTVSTINNKIKAEANRLGFSFLQITRPIQPPHYEAYLHWLADSHTGEMKYLSSERTRQSRQTPAGLLDNAQSILTFGVRYAPLTQSLPSEEDTQNPVGLVASYALHADYHDALKQAAHRLMDFIVRETGKNIQYRVFVDSSALLEKDTAFMAGAGWIGKNSLIITPETGSFQVLGCILTDLELISDKPFSKDLCGSCQKCQDSCPTGCITDNHNLRADECIAYLTIEYKGVIPRHLRSRMGLWVFGCDICQNVCPWNHKPQTQPFQVSPLLPQVMEPGIDLLAEIKLDEDSFRKKYAGSPILRATHTGFQRNLIIAMGNSGSQACLPALKKILRESPAWLLRLHAAWAISSLRSPDMRQILEKALSMEDDERVRDELRCCLNQ

SEQ ID NO: 79385 - protein, 361 aa, Pelomonas puraquae
  misc_feature (1)..(361): tr|A0A254NAB8|A0A254NAB8_9BURK Epoxyqueuosine reductase OS=Pelomonas puraquae OX=431059 GN=queG PE=3 SV=1
MRGWAHELGFSQIAVADVDLSSAEPGLLAWLEAGHHGRMHYMAAHGLKRARPAELVPGTLRVITARMDYLPRDTQPGWQAVEWAGLARPAQAQVSIYARGRDYHKVLRQRLQKLADRLVAEVGPLGYRVFTDSAPVLEVELATRSGLGWRGKHTLTLHREAGSMFFLGEIFIDLALPLTDPVTAHCGECTACLQACPTAAITAPYRVDARRCISYLTIEHDGPIPPELRAAMGNRVYGCDDCQLTCPWNKFAQPAMLADFDVRPGMAGTPIATLLDWDEAEFLRRTEGSAIRRIGFVRWRRNLAVAAGNALRQADDAGLRAALNRAAQGADALVAEHIAWALSAPAAADALSSGPPFTGVS

SEQ ID NO: 79386 - protein, 359 aa, Pelomonas saccharophila
  misc_feature (1)..(359): tr|A0A4R3UJJ4|A0A4R3UJJ4_PELSC Epoxyqueuosine reductase OS=Pelomonas saccharophila OX=304 GN=queG PE=3 SV=1
MQEVPSTVDVAALLTRLRGWARELGFSQIAVADVDLSSAEPGLQAWLDAGHHGRMHYMASHGLKRARPAELVPGTLRVITARMDYLPQGTGPGWQAVEWAGLASPQQAQISIYARGRDYHKVLRQRLQKLAEQLQAEVGPRGYRVFTDSAPVLEVELAARSGLGWRGKHTLTLRRDAGSMFFLGEIFIDLALPLTDAVSAHCGECRACMDVCPTAAITAPYRVDARRCISYLTIEHDGPIPVELRPLIGNRVYGCDDCQLACPWNKFAQPAVLADFDVRPGMAGAPIAELLGWDEAEFLRRTEGSAIRRIGFERWQRNLAVAAGNALRGGAEALRQPLQRLRDTATPLVREHIDWALAH

SEQ ID NO: 79387 - protein, 354 aa, Pelomonas sp.
  misc_feature (1)..(354): tr|A0A5C7V2Y7|A0A5C7V2Y7_9BURK Epoxyqueuosine reductase OS=Pelomonas sp. OX=1909303 GN=queG PE=3 SV=1
MRGWARELGFSQIAVAGIDLSSAEPGLLAWLAAGHHGRMHYMAAHGLKRARPAELVPGTLSIITARMDYLSRDTAPGWQAVEWSGLARAEQAQLSLYARGRDYHKVLRQRLQKLAERLAAEVGPLGHRVFTDSAPVLEVELAARSGLGWRGKHTLALHREAGSMFFLGEIFVDLALPPTEPVSGHCGACTACVDACPTGAITAPYRVDARRCVSYLTIEHDGPIPEDLRPLLGNRIYGCDDCQLACPWNKFAQPALLADFDARPGMAGSSLVQLLDWDEAEFLRRTEGSAIRRIGFERWQRNLAVAAGNALRAGVDGGLRDALQRTGQGASALVREHVEWALCCAPLVSVTPSA

SEQ ID NO: 79388 - protein, 378 aa, Pelomonas sp.
  misc_feature (1)..(378): tr|A0A0Q8GPG3|A0A0Q8GPG3_9BURK Epoxyqueuosine reductase OS=Pelomonas sp. Root662 OX=1736580 GN=queG PE=3 SV=1
MQEVPSTVDASALMESLRGWARELGFSQIGVADVDLSHAEPGLQAWLDAGHHGRMQYMAAHGMKRARPAELVPGTLRVITARMDYLPQESLPGWQAVEWTGLAEPGQAQISIYARGRDYHKVLRQRLQKLAERLFDSVGPRGYRVFTDSAPVLEVELAARSGLGWRGKHTLTLHRDAGSMFFLGEIFIDLDLPLTEAVNAHCGECRACIDVCPTAAITAPYRVDARRCISYLTIEHDGAIPEDLRPLMGNRVYGCDDCQLACPWNKFAQPAVLADFDVRPGMAGAPIALLLSWDEDEFLRRTEGSAIRRIGFSRWRRNLAVAAGNALRIRDDAGLRAALRRAGQGADALVAEHIAWALSAPPASAALSSEPPCPGATE

SEQ ID NO: 79389 - protein, 296 aa, Pelosinus fermentans
  misc_feature (1)..(296): tr|I8RHF3|I8RHF3_9FIRM Uncharacterized protein OS=Pelos inus fermentans B4 OX=1149862 GN=FB4_2893 PE=4 SV=1
MKETLRKFCNSIHIECMGIAGIGPYWELERILKERIDKGQYTEFEEKDLKKRIDPKATMENVQSIIVCIFPYYVGERPEANIAKYTCGLDYHTVIRDKLEAIGNFLTKQLPEFEYKTFVDNGPLVDRYLAYLAGLGFYGINSHIITEKYGSYVAIGYILTNYPFTVDKPLQRTCLQCGKCSKACPGEIILGNFAIDPRRCKSYLTQKKGELTADEIKIIKKTNLVFGCDSCQDVCPHNSQIALSNIREFQENIVQQLSYEELMSISNKEFSRRYGDRAFSWRGRKLLVRNFEYIMH

SEQ ID NO: 79390 - protein, 372 aa, Pelosinus fermentans
  misc_feature (1)..(372): tr|I9DA52|I9DA52_9FIRM PBS lyase HEAT domain protein re peat-containing protein OS=Pelosinus fermentans JBW45 O X=1192197 GN=JBW_00358 PE=4 SV=1
MSLTKKIKEFALDVGYSKVGIIPADSFPEYLADITNRSEMYSFFLKGASRAAEPRSQMPAAKSIITTVYDYSQKNFPQELTDKIGRVYQARCYGAPLDRIHGARPQLMKQFLENSGCEVGIGTMVPERIAAAKAGIVNFGRNNFAYADGIGSFIYLTSFVVDQELEYDTPTLEVGCPKGCRACMKACPTQAIYEPQKLNPLRCISYNNFFRQDGFPGGSFIPYDIREKIGTKIHGCDICQEVCPRNRKNLTAPKPDDEYLTHIAKEYILPNFLHMTDDFYQTRVQPLMHNYIKHKKYFQRNAAIALGNLADPAAVQDLTLAMADPEELVREYAAWALGKIATNKAKQVLEAARASETSLSVQQEITTALLSI

SEQ ID NO: 79391 - protein, 296 aa, Pelosinus propionicus
  misc_feature (1)..(296): tr|A0A1I4KFX6|A0A1I4KFX6_9FIRM Epoxyqueuosine reductase OS=Pelosinus propionicus DSM 13327 OX=1123291 GN=SAMN0 4490355_101746 PE=4 SV=1
MKETLRNFCNSIHIECMGIAGIGPYWELERILKERIDKGQFTEFEEKDLKKRTDPKTTMENVQSIIVCIFPYYAGEQAEANIAKYTYGLDYHSIIKDKLETIGIYLKKQMPAFEYKAFVDNGPLVDRYLAYLAGLGFYGINSHIITEKYGSYIAIGYILTNYPFKVDKPLQRTCMQCGQCSKACPGEIILGNFAIDPRRCKSYLTQKKGELTVEEIQIIKKTNLVFGCDSCQDVCPHNSKIVFSNIREFQENLVQQLRYEELISISNKEFSRRYKDRAFSWRGRKLLVRNFEYIMH

SEQ ID NO: 79392 - protein, 372 aa, Pelosinus propionicus
  misc_feature (1)..(372): tr|A0A1I4NXD9|A0A1I4NXD9_9FIRM Epoxyqueuosine reductase OS=Pelosinus propionicus DSM 13327 OX=1123291 GN=SAMN0 4490355_10545 PE=4 SV=1
MSLTKKIKEFALDIGYSKVGIIPADSFSDYLADISNRSEMYSFFLKGASRAADPRSQMPTAKSIITTVYDYSQKNFPQELTDKIARIYQARCYNAPPDRIHGARPQLLRRFLENAGCEVGIGTIVPERIAAAKAGIVNFGRNNFAYANGIGSFIYLTSFLVDQELEYDAPTLEVGCPEGCRACIKACPTQAIYEPQKLNPLRCIAYNNFFRQDEMPGGSFVPYDIREKIGTKIHGCDICQEVCPRNRKKVTAQKADDEYLTQIAKDYTLTNFLHMTDDFYQTRVQPLMHNYIKHKKYFQRNAAIALGNLADPAAIPDLALAMADTEELVREYAAWALGKIGSNPAKQVLEVSLASEVSPAVQREITAALLAM

SEQ ID NO: 79393 - protein, 302 aa, Pelosinus sp.
  misc_feature (1)..(302): tr|A0A075K719|A0A075K719_9FIRM Uncharacterized protein OS=Pelosinus sp. UFO1 OX=484770 GN=UFO1_0429 PE=4 SV=1
MGWHLMKETLREFCKSIGIESMGIAPTGPYVELQQILKERISKGRFTEFEEQELQVRVNPQLTMDSVQSIIVCLFPYYPGEKKAANVAKYTYSVDYHRIIRRKLEEVGDFLGKKIPGFEYKAYVDNGPLVDRYLAYIAGLGFYGLNSHIITDAYGSYVFIGYILTNYPFETDIPLKRTCMKCGACKKACPGSSILGANGIDPRTCRSYLTQKKGELTRLEIDVIRKTNLVFGCDSCQEVCPHNAGIALSNIEEFQEDRMEELNYDELVGISNKEFMRRYGNRAFSWRGRKLLVRNFEYLKDS

SEQ ID NO: 79394 - protein, 374 aa, Pelosinus sp.
  misc_feature (1)..(374): tr|A0A075KIH6|A0A075KIH6_9FIRM PBS lyase HEAT domain pr otein repeat-containing protein OS=Pelosinus sp. UFO1 O X=484770 GN=UFO1_3924 PE=4 SV=1
MSLTSQIKEFALDLGYSKVGIIPADDFQEYIDELTNRSEMYAFYIQSPYRPLNSAKPRSVMPTAKSIITTVYDYSQKEFPKELTDIMGRVYQARAYNAPPEHVNGARTQLMRDFLRKLGCEVGENIILPERLVAAKAGIVDFGRNNFAYAEGIGSFIYLTSFLVDQELEYDSPTVEVGCPKGCSACMKACPTQAIYEPNKLNPSRCIPFNTFFTQDGMAGSYIQPEIREKMGTKVYGCDICQEVCPRNQARIKAKLPEDRFLSKVVEDFSLANMLNMTDEFHATRIQPLMFNYVKERKYLQRNAAIALGNLGDPAFVPDLAVAMENKEELVRSYAAWALGKIGGKQAIQILKENLSKETSAAVKKEIKAALFVS

SEQ ID NO: 79395 - protein, 252 aa, Pelotomaculum propionicicum
  misc_feature (1)..(252): tr|A0A4Y7RYF9|A0A4Y7RYF9_9FIRM Epoxyqueuosine reductase OS=Pelotomaculum propionicicum OX=258475 GN=queG PE=4 SV=1
MKALIKDVLGRTVSENGRQGLYRGPLTGFARADDPLFSELKQAVGTSHLLPSDILAGAKSVAAFFIPFSKELVEVNKKHAYVAREWAEAYIETNRLISLCCERLAEALAAEGVKTNWQQPTHNFDPEKLISFWSHKHVAYICGLGAFGLHHMLITAAGCAGRVGSIVMDQPIDPTPRPETQYCLFHSGGKCLACVRNCPTGALTREGLNKQKCYERCLEVDAYYSDLGVCDVCGKCATGPCAVRELQPGQGV

SEQ ID NO: 79396 - protein, 248 aa, Pelotomaculum schinkii
  misc_feature (1)..(248): tr|A0A4Y7R869|A0A4Y7R869_9FIRM Epoxyqueuosine reductase OS=Pelotomaculum schinkii OX=78350 GN=queG_2 PE=4 SV=1
MKDLIENTINRVITENQLGGQTAYRAPLLGYAQAADPLFQQLKTAVGPGHLLPDDLLPEAATVLAFFLPFTKQLVENNREHPYVARSWAIAYIETNALISLCCKEIAATLASNGVKAAWQQPTHNFDPVQLCSRWSHKHVAYICGLGEFGLHQMLITAYGCAGRFGSLVIDLPLSPSPRPAVQRCLFYLRGKCLACVKKCPSGALTTKGLDKQKCYNYLLEVDSFYSDLGVCDACGKCAACGPCAVID

SEQ ID NO: 79397 - protein, 265 aa, Pelotomaculum schinkii
  misc_feature (1)..(265): tr|A0A4Y7RAM7|A0A4Y7RAM7_9FIRM Epoxyqueuosine reductase OS=Pelotomaculum schinkii OX=78350 GN=queG_1 PE=4 SV=1
MLLQTIKEKLDDYVLNSPQNIVNELETMRIYDQPLVGVAGVEDALWKKLKDTDVVGPQHLSPQEWLVGAKSVVSYFLPYTQRIRRSNCSEGFPSTEWLYGRYEGEMFNNALCSFVVDLIKKAGGRAIAPSIDKRLTVVNRRSNWSERHVAFIAGLGTFSLNRSMITSLGSAGRFGSVIVDFELEPTQRLYKEFDEYCTKCGVCIDRCPPQAISEKGKDNGICSHFLDEVRERYKPRYGCGKCQTSVPCEDKNPKEKVYESMMAVK

SEQ ID NO: 79398 - protein, 265 aa, Pelotomaculum sp.; identical to SEQ ID NO: 79397
  misc_feature (1)..(265): tr|A0A4Y7S3D4|A0A4Y7S3D4_9FIRM Epoxyqueuosine reductase OS=Pelotomaculum sp. FP OX=261474 GN=queG_2 PE=4 SV=1

SEQ ID NO: 79399 - protein, 275 aa, Pelotomaculum sp.
  misc_feature (1)..(275): tr|A0A1V4VRA4|A0A1V4VRA4_9FIRM Epoxyqueuosine reductase OS=Pelotomaculum sp. PtaB.Bin104 OX=1811693 GN=queG_2 PE=4 SV=1
MMQHLKNLILNYAKEKGAALVGFAPVSRWSEQGEVPEEFHPTYIWPPARTVIVIGMAMPLPMVETTPSALHMELYNSSNRELDGLAYHLTNYLNGLGHASFYFPRDCYGSIKILLEKPLAAFSHVMAAKYAGLGTLGLSHNLLTPQFGPRVRLVSVFTAAELPSDGMLAKEQCIKCKACITCCPPAALNWDGKAPLADYDKIACAKWHEELTRRRCYPCGICTKVCPVGEDRKNVYQEKGIMKKYLEEEKALARDPNDPRYRSWTHVRNFGSWQK

SEQ ID NO: 79400 - protein, 304 aa, Peptoanaerobacter stomatis
  misc_feature (1)..(304): tr|V9HVT4|V9HVT4_9FIRM 4Fe-4S ferredoxin-type domain-co ntaining protein OS=Peptoanaerobacter stomatis OX=79693 7 GN=HMPREF9630_00273 PE=4 SV=1
MSSIVKNSILNLNLPYEIEYAILNLEDEELLKSQQDFFGFLTNRKNDNLITSLESDDINSRVFAQNVLEDAKSIIVILFPYLTDEHSKNGNLSMYCMGVDYHISVRDMLCEIVKYIKNFHKDADFYIQSDTGTLNERFFAFYSGVGRLGINSMIFSDIYGSYVNIGLIVTDLLLDEKKSEKKYCDKCMACVKSCPGGAINGDFTINSYRCASYITQKKGELNEQEQRIIKKSKKIFGCDVCQNVCHFNNNVKTIPKNCDIIKTIKNEDIDELSNKKFKEKYILRAFNFRGKSVIKRNLDILKDD

SEQ ID NO: 79401 - protein, 304 aa, Peptoanaerobacter stomatis
  misc_feature (1)..(304): tr|G9WYK3|G9WYK3_9FIRM 4Fe-4S ferredoxin-type domain-co ntaining protein OS=Peptoanaerobacter stomatis OX=79693 7 GN=HMPREF9629_01254 PE=4 SV=1
MSSIVKKSILNLNLPYEIEYAILNLEDEELLKSQQDFFCFLTNRKNDNLITSLESDDINSRVFAQNVLENAKSIIVILFPYLTDEHSKNGNLSMYCMGMDYHISVKDMLCEIVKYIKNFHKDSGFYIQSDTGTLNERFFAFYSGLGRLGINSMIFSDIYGSYVNIGLIVTDLLLNEKKYDKKYCDQCMACVKSCPGGAINGDFTINSYRCASYITQKKGELNEHEQGIIKKSKKIFGCDVCQNVCHFNNNVKTIPKNCDIIKTIKNEDIDELSNKKFKEKYISRAFNFRGKSVIKRNLDILKDD

SEQ ID NO: 79402 - protein, 320 aa, Peptoclostridium sp.
  misc_feature (1)..(320): tr|A0A416QFJ1|A0A416QFJ1_9FIRM tRNA epoxyqueuosine(34) reductase QueG OS=Peptoclostridium sp. AF21-18 OX=22922 43 GN=queG PE=4 SV=1
MLIKDGFEGIEKKSRNDIVKSIFLEYGVECCGIAPVKFGNEIREILQKRADENHLSGMEESDIDKRLDATLIMEDAKSIIVAAFPYYCGENNDSNISCYCRGYDYHLVIRGIMNNICEKIQEKFSNGENCTNENSIKMEIFVDNGPLVDRYLAYISGIGFWGMNGSIITDKYGSYVFIGYIVTNLDIEKDAPLEKTCLKCGKCIKSCPGNALLEGYDMDAKKCLSYITQKKGELSDDEKNIIKENKIIFGCDMCQKVCPHNKNVEMTNIEEFKNDLIEKLDLDEINRISNKEFKRRYYNRAFSWRGKGIIKRNLEILEED

SEQ ID NO: 79403 - protein, 364 aa, Peptococcaceae bacterium; identical to SEQ ID NO: 78531
  misc_feature (1)..(364): tr|A0A357VE17|A0A357VE17_9FIRM tRNA epoxyqueuosine(34) reductase QueG OS=Peptococcaceae bacterium OX=2052179 G N=queG PE=4 SV=1

SEQ ID NO: 79404 - protein, 344 aa, Peptococcaceae bacterium
  misc_feature (1)..(344): tr|A0A3G1KM19|A0A3G1KM19_9FIRM Fe-S oxidoreductase OS=P eptococcaceae bacterium DCMF OX=1761012 GN=DCMF_00870 P E=4 SV=1
MSMEKLIQNKAYEFGYEKCGIVRIQDLDGYDERLLERIDKVPASKMFYQNQSRLTHLPEQYPWAKSVIVTVSHYGHYQIPGQLKGRIAKHYIFDGRVNGESKEFKKSVAMEQFLQDLGLKTASNRNFGIVGLRWAAMKAGLGIIRRNNFFYTESGSWVELEAWITDRDMELVESTNLPACPEGCTNCIKACPTGSLSSPYTMNPVSCVSFLTTFGGRDLAKDPLGKSFGSWIYGCDACQDACPMNSGKWTEKDEFPGVSETSLCLTPENMMEMEEEFYQHNIQPKFFYLSPAELWKWKVNVLNFMRNNYQENYKQYIMEACNHENEKIRDLARMIRQELSLTDY

SEQ ID NO: 79405 - protein, 302 aa, Peptoniphilus coxii
  misc_feature (1)..(302): tr|A0A134AGK3|A0A134AGK3_9FIRM Putative iron-sulfur clu ster-binding protein OS=Peptoniphilus coxii OX=755172 G N=HMPREF1863_00873 PE=4 SV=1
MEIEAIKNRIGFHDVAHIPAVALHEMKAIFEQREKNGRRLPIEPDSVNERIDPRCVLPSARSIVVAFEQTPFAEKMPEAKPGYGRLAGVSRDRDYHHLLGEKLRRLEQALKEEYPELESYLQVDTGPLYERGFAELTGKGFLGRNGLFIHDTLGSYVGIGLLVTNLPGGEIKVSEKKCGDCMKCVSACPGGALSKEGIVDPRRCRSWITQKRGELTEREKHIMGDWLYGCDQCQIVCPKNQGIEHTFQVEDPVEHISLDAIRETSNRTFKESFGHLSGSWRGAKQWKKNADYIDDYFGKDRE

SEQ ID NO: 79406 - protein, 303 aa, Peptoniphilus ivorii
  misc_feature (1)..(303): tr|A0A448V0G2|A0A448V0G2_9FIRM Epoxyqueuosine reductase OS=Peptoniphilus ivorii OX=54006 GN=queG PE=4 SV=1
MDLEEIKNKAGFHDLAHIPLTVLTEMEVILAARREAGERLDIEPKDDRSRYDFRAVFPAGRSVYVAFEQIPFERKLSAPRAGYGRLAGISRDVDYHLLLKHKIEVLQALLEEADPTIRCHRQIDTGPLYERGFAARTGRGFIGRNGNFIHRELGSYVTIGLLLVDRDCDGAAEIETCRCGSCMRCVRACPGGAIDPSGRLSPTRCRSWLSQKRGPLSEREREILADSLYGCDICQAVCPFNADIPARFQTKNPRTYIPLDEVEAQSNRTFRENFGHMSGAWRGARQWKKNAEYIRAYFKDRKR

SEQ ID NO: 79407 - protein, 294 aa, Peptoniphilus sp.
  misc_feature (1)..(294): tr|F9MTP1|F9MTP1_9FIRM Putative iron-sulfur cluster-bin ding protein OS=Peptoniphilus sp. oral taxon 375 str. F 0436 OX=879308 GN=HMPREF9130_0810 PE=4 SV=1
MNREAILKKAGLDVLGFCSARPLEKEKAYLLDRQAHFGLCKYEGQRIEERLDPSLHYSPVKSVLVFGINTKTRPIQLKKGQGLLAGISRIPDYHTVLKEAGNKLGQLLKLEDQAKLMVDSHPLMERAFAQRAGLGYIGENTALIHPVYGTYLALGLILTEKTFPYDGEVGGTCGSCKLCIQACPGGALKGEGVLDPMACLSYKTQSLEEGSRQLGPRLYGCDVCQEVCPKNKHVPLTSLDQILKEGISKEEIQDLSNREFKKKYGHLTGAWRGKKQWMENFKSVEAYWARKSKE

SEQ ID NO: 79408 - protein, 305 aa, Peptostreptococcaceae bacterium
  misc_feature (1)..(305): tr|J4KAZ0|J4KAZ0_9FIRM PF08331 domain protein OS=Peptos treptococcaceae bacterium AS15 OX=936556 GN=HMPREF1142_ 0523 PE=4 SV=1
MSIIDEAIKSLDLGYEIEYSTVSLMDENFICLQEDFLKFLEKRKKDGKISPLESSDIEKRAFPQKILQGAKTVITFLFPYMTSFHKDGNLSYYCMGLDYHIGVKNSLDRIVKYIGQYHKDAKFYIQSDIGELDEKFFAYNSGLGILGLNSLIISPLYGTYVNIGVIVTDLKFKPKIAEKKICDMCMKCQNSCPGKAINGDFTIESQKCASYITQKKGELSKDEIEILKKSGKIFGCDICQKVCHFNKNVKKISSTYDIINSIEKDDLQISNKEFKLKYGDRAFSFRGKSVLSRNIDLINIGEEIE

SEQ ID NO: 79409 - protein, 308 aa, Peptostreptococcaceae bacterium
  misc_feature (1)..(308): tr|A0A544QUP1|A0A544QUP1_9FIRM tRNA epoxyqueuosine(34) reductase QueG OS=Peptostreptococcaceae bacterium ZHW00 191 OX=2518162 GN=queG PE=4 SV=1
MSLTEIKKILKRHGIDVSGVCSSDMDENLKKYLYKREKEKGLSGMEESDISKRTDVYSVMEDANSIITAAFPYYTGYNTDSNISIYCSGKDYHTVIEGILNKVCSDIRDSLNDNEKENFRFEICVDTSPLVDRYIAYMSGIGFFGLNNNIITEKYGSYVFIGYIITNLNIEKSEPMDRECIKCGKCIEMCPGKALKEDYKMDAKRCLSYITQKKGEFSEQEKELIIKEKTVFGCDVCQKVCPHNENIEYTDIKEFMEDKIYNLEKNDIDNLSNREFKRKYGDRAFSWRGKGIIKRNLDLIEENNEKGV

SEQ ID NO: 79410 - protein, 318 aa, Peredibacter sp.
  misc_feature (1)..(318): tr|A0A2E5CAR5|A0A2E5CAR5_9PROT tRNA epoxyqueuosine(34) reductase QueG OS=Peredibacter sp. OX=2024850 GN=queG P E=4 SV=1
MSLLNLSGDFLKKIQVVDWGYTEASAPITYGHYETWTKSGLAGGLQYLTDHRKDLRKDLKEVFPEFSSALVFLFEYASEKKRLQKIDPPIKIASYVTGFDGMDYHHWIREKLDIISLKLSEEISGLKTFYSIDAQPVLERDLAYRAGLGWFGKNSMLISKKHGSYFIIGTLLLNQKLPLPTKLSVEPDHCGNCTACIDHCPTDAIVANKVVDASKCISTYTIEMFKEAEAPKGYPSKSNEVFGCDICQEVCPWNNKPLKRVEAGEEVDWVKFFERNPELILNDLEDMSNRQYRKKFKGTPLERTGRVGMIKNLNKLKS

SEQ ID NO: 79411 - protein, 396 aa, Perlucidibaca sp.
  misc_feature (1)..(396): tr|A0A2P6AUX5|A0A2P6AUX5_9GAMM Epoxyqueuosine reductase OS=Perlucidibaca sp. HR-E OX=2094561 GN=queG PE=3 SV=1
MTRIPVQARSPVSAHGAADGGRPAAGPGTAVLDAAALQALAEDIRRWGRELGFQQVGISGTDLGEHPAHLEKWLEAGHHADMEWLREPKRVDPAALKPGTRRVISLRMDYLPAEPRIHQILQDGSRAYIARYALGRDYHKIIRPRLQRLADRIAAEIGPFGYRAFVDSAPVLEKALASQAGLGWMGKHTVIINRRAGSYFFLGELFTDLPLPVDVPVSNHCGSCQACIDICPTKAIVAPYVLDAGKCISYLTIEYRGVIPVELRRPIGNRIFGCDDCQLVCPWNRYAQASQEPGFTPRHAFDGPPLLNLWDWDEATWLEQTAGMPLRRMNYTSWVRNLSIALGNAPASTEALTALTKRFSALETAGQLDEVLREHLLWAMAEQRDKLARLSPPPLR

SEQ ID NO: 79412 - protein, 311 aa, Petrimonas mucosa
  misc_feature (1)..(311): tr|A0A1G4G4R3|A0A1G4G4R3_9PORP Epoxyqueuosine reductase OS=Petrimonas mucosa OX=1642646 GN=queG PE=4 SV=1
MTFSEEIKAYARSLGFDACGICRAEESGEEARYMAWLSEECHAGMSYLERNIEKRLDPRLLVDGAKSIISVALNYFPHRFRHEDAPRFAYYAYGEDYHDVVKKKLSRLLEFIQGRSPGVSGRYFSDSAPVLERFWAARAGLGFVGKNTLLIIPGKGSYFFLGELIVDLELDYDSPLSQHCGKCRRCLDACPTGAIEKPKWVNARKCISYQTIENKGEISPEIIPRMSNNLYGCDICQLVCPWNRYARPHTTPEFHPSEQFLSLDYESLQEMDEDTYRKIFSKSAVKRAKFSGLKRNLEAWKCSRESGGEIS

SEQ ID NO: 79413 - protein, 311 aa, Petrimonas sp.
  misc_feature (1)..(311): tr|A0A3G9DWM7|A0A3G9DWM7_9PORP Epoxyqueuosine reductase OS=Petrimonas sp. IBARAKI OX=1978337 GN=PEIBARAKI_6730 PE=4 SV=1
MTFSEEIKQHALSLGFDACGICRAEESEQEAHYRSWLSEECHAGMDYLERNIDKRMDPRLMVEGARSIISVALNYFPHRFQHEDAPQFAYYAYGEDYHDIVKGKLSRLFDFIKLRFPGVSGRYFSDSAPVLERFWAARSGLGFVGKNTLLIIPGKGSYFFLGELIVDLELDYDSPISQNCGKCRRCLDACPTGAIEKPHWVNARKCISYQTIENKGEISSEIVPRLSNNVYGCDICQVVCPWNRYARPHSTPEFNPSDEFLSLDYKRLQEMDEDTYRRIFRRSAVKRAKFAGLKRNLDAWKSSQQTEGGIS

SEQ ID NO: 79414 - protein, 341 aa, Petrocella atlantisensis
  misc_feature (1)..(341): tr|A0A3P7PRV8|A0A3P7PRV8_9FIRM tRNA epoxyqueuosine(34) reductase QueG OS=Petrocella atlantisensis OX=2173034 G N=queG PE=4 SV=1
MKAQVIKEDIIKFCDSIGVQAVGFTSALPFNELKEDYQYRQQQHLNCTFEVRDSVLDLMDPKRIMTDAKSFISILEPHQPYSQIKPTSGIGRMASGTASLDYHKILDGHLEKLQIFLQEKYDIHGVKLCDTTPLSDRAIAVRAGLGVLRRNNMFYHKTMGSYVNIASLLIDFDLEATDHDKEAIPCGTCQICKVTCPTKAIIGDGTINSNRCISYLTQKNETSEEESKMIGNMIYGCDICQLRCPVNNKVKNPFVEFIVDQEVDLVTLLNIDNATFKNTYGRTASGWRGKRTLQRNAIAAMGNSGDRGMIEILNKYEDDNRSIIKREVQRAITRLKNIEVK

SEQ ID NO: 79415 - protein, 350 aa, Phaeobacter gallaeciensis
  misc_feature (1)..(350): tr|A0A1B0ZSG6|A0A1B0ZSG6_9RHOB Epoxyqueuosine reductase OS=Phaeobacter gallaeciensis OX=60890 GN=queG PE=3 SV= 1
MSAALKEKLIRQALDEGFVACRVCRPGDVPEVPARLQAFLEAGYHGQMGWMAERSHWRGDPAQLWPEARSVIMLAESYTPDEDPMAVVGQPDRGAVSVYARGKDYHDLVKKRLKRLARWLIAEAEKAGDPAEVKVFVDTAPVPEKPLGQAAGLGWQGKHTNLVSRDWGNWAFIGSVFTTLELPVDAPERDHCGSCRSCLAACPTDAFPAPYQLDARRCISYLTIEYKGPIDEELRGKMGNRIYGCDDCLAACPWNKFAVAASDMRYAAREGLSAPRLADLAALDDTAFRAMFSGSPIKRIGRDRFVRNVLYAIGNSGDPALGPVAARLTEDPDPVVADAARWAVQRIKGS

SEQ ID NO: 79416 - protein, 354 aa, Phaeobacter gallaeciensis
  misc_feature (1)..(354): tr|V9WPZ9|V9WPZ9_9RHOB Epoxyqueuosine reductase OS=Phae obacter gallaeciensis DSM 26640 OX=1423144 GN=queG PE=3 SV=1
MSSQMRETADIKNRLIAQALDEGFVACRICRPSDVPEVPDRLQAFLDAGYHGQMGWMEERSHWRGDPALLWPEARSVIMLAESYTPDVDPMDIVGQADRAAISVYARNKDYHDLVKKRLKRLARWLIAEAARAGDTAEVKVFVDTAPVPEKPLGQAAGLGWQGKHTNLVSRDWGNWAFIGSVFTTLDLPTDTAEPDHCGSCRSCLTACPTDAFPAPYQLDARRCISYLTIEHKGPIDEELRGKLGNRIYGCDDCLAACPWNKFAVAASDIRYEARPEFNAPKLAELAALDDPGFRALFSGSPIKRIGRDRFVRNVLYAIGNSGLPKLRPTAETLTEDPDPTVADAARWAVQRLT

SEQ ID NO: 79417 - protein, 350 aa, Phaeobacter inhibens
  misc_feature (1)..(350): tr|A0A135IEJ3|A0A135IEJ3_9RHOB Epoxyqueuosine reductase OS=Phaeobacter inhibens OX=221822 GN=queG PE=3 SV=1
MIKTADIKDRLVAQALAEGFVACRICRPSDVPEVPDRLQAFLDAGYHGQMGWMEERSHWRGDPAQLWPEARSVIMLAESYTPDVDPMDIVGQADRAAISVYARNKDYHDLVKKRLKRLARWLIAEAARVEEAAEVKVFVDTAPVPEKPLGQAAGLGWQGKHTNLVSRDWGNWAFIGSVFTTLDLPADAAEPDHCGSCRSCLTACPTDAFPAPYQLDARRCISYLTIEHKGPVDEELRAKLGNRIYGCDDCLAACPWNKFAVAASDVRYEARPEFNAPKLADLAALDDPGFRALFSGSPIKRIGRDRFVRNVLYAIGNSGLPKLRPTSEALTEDPDPTVADAARWAVQRLM

SEQ ID NO: 79418 - protein, 350 aa, Phaeobacter inhibens
  misc_feature (1)..(350): tr|I7F1D6|I7F1D6_PHAIB Epoxyqueuosine reductase OS=Phae obacter inhibens (strain ATCC 700781 / DSM 17395 / CIP 105210 / JCM 21319 / NBRC 16654 / NCIMB 13546 / BS107) OX=391619 GN=queG PE=3 SV=1
MIKTADIKDRLVAQALAEGFVACRICRPSDVPEVPDRLQAFLDAGYHGQMGWMEERSHWRGDPAQLWPEARSVIMLAESYTPDVDPMDIVGQADRAAISVYARNKDYHDLVKKRLKRLARWLITEAARVEEAAEVKVFVDTAPVPEKPLGQAAGLGWQGKHTNLVSRDWGNWAFIGSVFTTLDLPADATEPDHCGSCRSCLTACPTDAFPAPYQLDARRCISYLTIEHKGPVDEELRTKLGNRIYGCDDCLAACPWNKFAVAASDIRYEARPEFNAPKLADLAALDDPGFRALFSGSPIKRIGRDRFVRNVLYAIGNSGLPQLRPTAEALTEDPDSTVADAARWAVQRLT

SEQ ID NO: 79419 - protein, 350 aa, Phaeobacter italicus
  misc_feature (1)..(350): tr|A0A0H5D6V6|A0A0H5D6V6_9RHOB Epoxyqueuosine reductase OS=Phaeobacter italicus OX=481446 GN=queG PE=3 SV=1
MTDHSSLKDQLVAQALAEGFVSCRICRPWDVPEVPDRLQAFLDAGYHGQMAWMEERSHWRGDPAQLWPEARSVIMLAESYTPDVDPMEIVGQSDRGAISVYAQNKDYHDLVKKRLKRLARWLIAEAQKQGHEAEVKVFVDTAPVPEKPLGQAAGLGWQGKHTNLVSRDWGNWAFIGSVFTTLDLPADPAERDHCGSCRSCIAACPTDAFPAPYQLDARRCISYLTIEHKGPIDEDLRSKLGNRIYGCDDCLAACPWNKFAVAASDIRYEARPEFTAPKLAELATLDDAAFRALFSGSPIKRIGRDRFVRNVLYAIGNSAQPELRAVAQSLTTDPDPTVADAARWAAAQLA

SEQ ID NO: 79420 - protein, 350 aa, Phaeobacter piscinae
  misc_feature (1)..(350): tr|A0A291G4S0|A0A291G4S0_9RHOB Epoxyqueuosine reductase OS=Phaeobacter piscinae OX=1580596 GN=queG PE=3 SV=1
MKETAEIKERLVAQALAEGFVACRICRPSDVPEVPDRLQAFLDAGYHGQMGWMEERSHWRGDPAQLWPEARSVIMLAESYTPDVDPMDIVGQADRAAISVYARNKDYHDLVKKRLKRLARWLIAEAEKVNEATEVKVFVDTAPVPEKPLGQAAGLGWQGKHTNLVSRDWGNWAFIGSVFTTLDLPTDTAEPDHCGSCRSCLTACPTDAFPAPYQLDARRCISYLTIEHKGPIDEELRGKLGNRIYGCDDCLAACPWNKFAVAASDIRYEARPEFNAPKLAELAALDDPGFRALFSGSPIKRIGRDRFVRNVLYAIGNSGLPKLRPTAETLTEDPDPTVADAARWAVQRLT

SEQ ID NO: 79421 - protein, 354 aa, Phaeobacter piscinae
  misc_feature (1)..(354): tr|A0A291FT99|A0A291FT99_9RHOB Epoxyqueuosine reductase OS=Phaeobacter piscinae OX=1580596 GN=queG PE=3 SV=1
MSSQMIETADIKDRLIAQALAEGFVACRICRPSDVPEVPDRLQAFLDAGYHGQMGWMEERSHWRGDPAQLWPEARSVIMLAESYTPDVDPMDIVGQVDRAAISVYARNKDYHDLVKKRLKRLARWLIAEAARTGDPAEVKVFVDTAPVPEKPLGQAAGLGWQGKHTNLVSRDWGNWAFIGSVFTTLDLPADTAEPDHCGSCRSCLTACPTDAFPAPYQLDARRCISYLTIEHKGPIDEELRGKLGNRIYGCDDCLAACPWNKFAVAASDIRYEARPEFNAPKLAELAALDDPGFRALFSGSPIKRIGRDRFVRNVLYAIGNSGLPKLRPTAETLTEDPDPTVADAARWAVQRLT

SEQ ID NO: 79422 - protein, 350 aa, Phaeobacter porticola
  misc_feature (1)..(350): tr|A0A1L3I993|A0A1L3I993_9RHOB Epoxyqueuosine reductase OS=Phaeobacter porticola OX=1844006 GN=PhaeoP97_03332 PE=4 SV=1
MTEISSIKDRLVAQALAEGFVACRICRPWDVPEVPGRLKAFLEAGYHGQMGWMEERSHWRGDPAQLWPEAKSVIMLAESYTPDVDPMEVIGQADRAAISVYARNKDYHDLVKKRLKRLARWLIAEAAGDGETAGVKVFVDTAPVPEKPLGQAAGLGWQGKHTNLVSRDWGNWAFIGSVFTTLDLPVDEAERDHCGSCRSCVAACPTDAFPAPYQLDARRCISYLTIEHRGPIDEALRAKLGNRIYGCDDCLAACPWNKFAVAASDIRYEARPEFNAPRLSELAALDDPGFRALFSGSPIKRIGRDRFVRNVLYAIGNSGLPHLLPAARNLIEDPDPTVADAARWAVQRLI

SEQ ID NO: 79423 - protein, 350 aa, Phaeobacter sp.
  misc_feature (1)..(350): tr|A0A0P6RCT5|A0A0P6RCT5_9RHOB Epoxyqueuosine reductase OS=Phaeobacter sp. 11ANDIMAR09 OX=1225647 GN=AN476_122 60 PE=4 SV=1
MKSGSELKARLVAQALVEGFVSCRICRPWDVPQVAERLQQFLDQGYHGQMGWMAERSHWRGDPSVLWPEARSVIMLAESYTPEEDPMAVVGCADRGAVSVYARNKDYHDLVKKRLKRLARWLIEEARAEDETAEVKVFVDTAPVPEKPLGQAAGLGWQGKHTNLVSRDWGNWAFLGSVFTTLDLPVDGAEPDRCGSCSSCLTACPTEAFTAPYQMDARRCISYLTIEHKGPIDEELRGKLGNRIYGCDDCLSACPWNKFAVAASDLRYAARAELQAPKLAELALLDDAGFRAFFAGSPIKRVGRDRFVRNVLYAIGNSGRPELRGVAQGLAEDPDPTVADAAQWAVQRLS

SEQ ID NO: 79424 - protein, 346 aa, Phaeobacter sp.
  misc_feature (1)..(346): tr|A0A0P1IEB9|A0A0P1IEB9_9RHOB Epoxyqueuosine reductase OS=Phaeobacter sp. CECT 7735 OX=1715693 GN=queG PE=3 S V=1
MSAQLKENLLLQAKEIGFDLCRICRPDSVGHVPDGLGGFLEQGYHGQMGWLAERTHWRGNPAALWPEARSVIMLGQSYTPQHDPTTVHALSDKGAISVYAQNKDYHDLVKKRLKRLARWLIAETDPETQVKVFVDTAPVPEKPLGQAAGLGWQGKHTNLVSRDLGSWFFIGSVFTTVELDPDTAEIDHCGRCRACLDACPTDAFPAPNQIDARRCISYLTIEHHGPVDEDLRPLLGNRIYGCDDCLAACPWNKFAVEAREIKYHAREDLKAPDLETLVQLQDAEFRTLFSGSPIKRIGRNRFVRNVLYAIGNSGLPRLRPLAQDLCEDPDPTVSDAARWAVQQLSD

SEQ ID NO: 79425 - protein, 315 aa, Phaeodactylibacter luteus
  misc_feature (1)..(315): tr|A0A5C6RU35|A0A5C6RU35_9BACT Epoxyqueuosine reductase OS=Phaeodactylibacter luteus OX=1564516 GN=queG PE=3 S V=1
MDHRTRYTRIIREEAGRLGFAFIGFAKAMHMDEEARRLESWLNKGLHGEMGYMANHFEKRVDPTKLVPGAKTVISLMYNYFPEQGQTDPEAPKLSRYAYGKDYHFVLKDKLKALFTFIQEKVGAVEGRVFVDSAPVLERDWARRSGLGWVGRNTLLIHPKAGSYFFLAEAIVDLELVYDEPIKDYCGTCTRCVEACPTDAISPGGYVVDGSRCISYLTIELRASIPEEFSGKMENWMFGCDICQEVCPWNRFSTPHKEPDFEPHPDLLSMREEEWQELTEEVFRELFRKSAVKRTKYSGLKRNLDFLREGKKQSE

SEQ ID NO: 79426 - protein, 318 aa, Phaeodactylibacter xiamenensis
  misc_feature (1)..(318): tr|A0A098S8K2|A0A098S8K2_9BACT Epoxyqueuosine reductase OS=Phaeodactylibacter xiamenensis OX=1524460 GN=queG P E=3 SV=1
MSNKTLHTQMIREEAQRLGFAFVGFAKATRLDEEARRLEAWLNKGMHGEMGYLENHFEKRVDPRKLVPGAKTVVTLMYNHYTDRRPKDPDAPKISKYAYGKDYHFVLKHKLKDLMKYIQAEIGAVNGRVFVDSAPVLERDWAKRTGIGWVGKNTLLIHPKAGSYFFLAELIIDLDLVYDHPIKDYCGTCTRCIDACPTDAISPGGYVVDGSKCISYFTIELKGAIPEAYRDHFENWMFGCDICQEVCPWNRFSKPHQEPEFEPHPDLLDLSARDWEELTEEVFRELFRKSAVKRTKYEGLKRNINFLKPLSEKADHEA

SEQ ID NO: 79427 - protein, 345 aa, Phaeospirillum fulvum
  misc_feature (1)..(345): tr|A0A1H6IQI3|A0A1H6IQI3_PHAFV Epoxyqueuosine reductase OS=Phaeospirillum fulvum OX=1082 GN=SAMN04244559_02580 PE=4 SV=1
MKAGIRAQALRLGFCDVGFAPVAGLAVWSEGLTGFLAEGRHGEMDWLADTAERRVRPQALWPQARTAIVLATSHAPPDDPQAATRLPDRGAICAYARGRDYHDVIKKRLKALGRWLAEGYGAEVRACVDTAPVMEKPLAQQAGLGWQGRHTLLVSRRFGGWVFLSELLTDLDLPPDPPESDHCGTCRACVEACPTGALDGTGRIDPRLCLSYHTIEAKAPMPESLRSRMGNRIYGCDACQAACPWVRRSIPASPDFLPRIEAMLPRLGDLAQLDEADFRALFAGTPVKRVGRDRFVVTVLIAIGNSGRRELRPLVERLRLDPAAEVRAMAVWAASALGGEGAGEL

SEQ ID NO: 79428 - protein, 294 aa, Phaeospirillum fulvum
  misc_feature (1)..(294): tr|S9TUJ5|S9TUJ5_PHAFV 4Fe-4S ferredoxin-type domain-co ntaining protein (Fragment) OS=Phaeospirillum fulvum MG U-K5 OX=1316936 GN=K678_07647 PE=4 SV=1
MVKAEIRAQALRLGFCDVGFAPVDGEPRWAEDLFGFLAEGRQGEMNWLADTADRRVRPRALWPQARTAIVLATSHAPPDDPQTATRLPDRGAICAYARSRDYHDVIKKRLKVLARWLTERFGAEVRACVDTAPVMEKPLAQQAGLGWQGRHTLLVSKRNGGWMFLSELLTDLDLPPDLPESNHCGSCRACVEACPTGALDGEGRIDPRLCLSYHTIEAKAPMPEALRPRMGNRIYGCDACQAACPWVRFSAPSDPDFLPRIETMVPRLGDLAQLDEAGFRTLFVGTPVKRVGRD

SEQ ID NO: 79429 - protein, 346 aa, Phaeospirillum molischianum
  misc_feature (1)..(346): tr|H8FQI9|H8FQI9_PHAMO 4Fe-4S ferredoxin-type domain-co ntaining protein OS=Phaeospirillum molischianum DSM 120 OX=1150626 GN=PHAMO_210138 PE=4 SV=1
MIKAEIRARALSLGFCDVGFAPTDGLAYWSEDLSGFLAERRHGEMIWLADTAALRASSRALWPEARTAIVLATSHAPPDDPQAATRLPDRGTICAYARSRDYHDVIKKRLKALGRWLVERHGAEVRSCVDTAPVMEKPLAQQAGLGWQGRHTLLVSRRNGGWMFLSELLTDLDLPPDQPETNHCGTCRACVQACPTGALDGDGRIDPRRCLSYHTIEAKSPMPEALRPLLGNRIYGCDACQAACPWTRFSAPSDPDFLPRIETMLPRLGDLAALDEAEFRTLFAGTPVKRVGRDRFVATVLIAIANGGRTELLPLVERLALDPAAEVREMAVWAGSVLGSERAGEL

SEQ ID NO: 79430 - protein, 408 aa, Phenylobacterium deserti
  misc_feature (1)..(408): tr|A0A328AVW8|A0A328AVW8_9CAUL Epoxyqueuosine reductase OS=Phenylobacterium deserti OX=1914756 GN=queG PE=3 SV =1
MTISTSSSPEDLIRAEAQALGFDLCRFTDLDDAWPAAARLEQFVSEGRHGEMGWMAETLERRRHPRAMWADARSAIVLGVNYGPDRDPRELLADSTRAAISVYAQGDDYHDLIKKRLKALARFLQAKFGGELKVFVDTAPLLEKPLAERAGLGWQGKHTNLVSREFGSWLFLGSILTTLELAPDEAPAVHCGRCTACLDVCPTNAFPTPFQIDARRCISYLTIELKGAIPHEFRPALGNRIYGCDDCLAACPWNKFAQVSREQKLHARETLRGPGLAELSRLDDAAFRELFAKSPVKRIGRDRFLRNVLYAIGNSGEPALAVEARRLLGDPSPLVRGAAVWALGRLLSAEAFEALRAARRPVEADKDVQSEWNQTPLIPAKAGIQAELLVDAPRLPEPAPHGSPPSRG

SEQ ID NO: 79431 - protein, 383 aa, Phenylobacterium hankyongense
  misc_feature (1)..(383): tr|A0A328B1B9|A0A328B1B9_9CAUL Epoxyqueuosine reductase OS=Phenylobacterium hankyongense OX=1813876 GN=queG PE =3 SV=1
MTISTSERPEDLIRAEAKALGFDLCRFTDLDAAWPAAGRLAEFIDAGRHGEMGWMAETAERRAHPRAMWTEARSAVVLGMNYGPDADPLAILEQPTRAAISVYAQGDDYHELIKGRLKQLGGWLQARFGGQLKVFVDTAPLLEKPLAERAGLGWQGRHTNLVSREFGSWLFLGSILTTLDLTPDPVEAVHCGSCTACLEVCPTQAFPAPFQLDARRCISYLTIELKGPIPPEFRAALGNRIYGCDDCLAVCPWNKFAQQSAEQKLHAREALRAPSLAELSRLDDPAFRALFSKSPIKRIGRDRFLRNVLYAIGNSAEPALAAEARRLLDDPAPLVRGAAVWALSRLLDAEPFEALRAERAPSETDEQVRAEWSDVPVGEGHPA

SEQ ID NO: 79432 - protein, 378 aa, Phenylobacterium kunshanense
  misc_feature (1)..(378): tr|A0A328BDE5|A0A328BDE5_9CAUL Epoxyqueuosine reductase OS=Phenylobacterium kunshanense OX=1445034 GN=queG PE= 3 SV=1
MTTSTSDREELIREDLIRAEAQSLGFDLCRFTDIDEAWPAAGRLEQFVAAGRHGEMGWMAETLTRRRHPRAMWEGARSAIMLGVNYGPEHDPLEALADPARAAISVYAQGDDYHELIKARLKALARWLQGRFGGELKVFVDTAPLMEKPLAERAGLGWQGKHTNLVSRAFGSWLFLGAILTTLELEPDPAEAGGCGSCHACLDVCPTNAFPAPYQLDARRCISYLTIELKGPIPREFRPMLGNRIYGCDDCLAVCPWNKFASAAREQKLAARAELQAPALADLARLDDAAFRELFRKTPVKRIGRDRFVRNVLYAIGNSGRADLAAEAERLLDDPAPLVRGAAIWALSRLLEQQAFAALSDARRDSETDRYVLSEWAG

SEQ ID NO: 79433 - protein, 377 aa, Phenylobacterium sp.
  misc_feature (1)..(377): tr|A0A2D7ZPQ0|A0A2D7ZPQ0_9CAUL Epoxyqueuosine reductase OS=Phenylobacterium sp. OX=1871053 GN=queG PE=3 SV=1
MTISISETPEALIRRQALALGFDDCRLARADQPWSAGERLAEFVAEGRHGEMAWLETTLERRSHPQAMWDGARSAVMLGVNYGPDHDPRDVLEHPDRGAISVYAQGSDYHEVIKKRLKQLASWMAQTFGSEVKVFVDTAPLLEKPLAEASGLGWQGKHTNLVSRQFGSWLFIGSVLTSLELEPDPPGEDACGSCRACQDVCPTDAFPAPYQLDARRCISYLTIELSGPIPAEFRSALGNRIYGCDDCLAVCPWNKFAQGAREQQLQAREVLKAPRLEDLAALDDAAFRALFTKSAVKRLGRDRFVRNVLYALGNSGDPGMVPAVRARLSDEAPVVRGAAVWALARLLPADAFAAERALALSSEVDEAVRAEWGPGVP

SEQ ID NO: 79434 - protein, 373 aa, Phenylobacterium sp.
  misc_feature (1)..(373): tr|A0A1E4GZS4|A0A1E4GZS4_9CAUL Epoxyqueuosine reductase OS=Phenylobacterium sp. SCN 70-31 OX=1660129 GN=queG P E=3 SV=1
MTTSTSEREELIRAEAAALGFDLCRFTDIDEAWPAAARLLEFVDAGRHGEMGWMAETAERRRHPRAMWADARSAIVLGVNYGPDDDPMAVLAQPARGAISVYARGDDYHEVIKARLKALGRWLQARFGGELKVFVDTAPLLEKPLAERAGVGWQGRHTNLVSREFGSWLFLGSILTTLELTPDAPESMTCGTCRACLDVCPTDAFPAPFQLDARRCISYLTIELKGPIPREFRPALGNRIYGCDDCLAVCPWNKFAQQGREQKLAAREALNAPALADLARLDDPAFRDLFRKNPVKRIGRDRFVRNVLYAIGNSGVANLTTEAERLLDDPSPLVRGAAVWALSQCLAPEAFATLRAVRTPAEADTSVLEEWGG

SEQ ID NO: 79435 - protein, 372 aa, Phenylobacterium zucineum
  misc_feature (1)..(372): tr|A0A227JLL8|A0A227JLL8_9CAUL Epoxyqueuosine reductase OS=Phenylobacterium zucineum OX=284016 GN=queG PE=3 SV =1
MTISISDPRSAIRLKAEDLGFDVCGFAAVDSSWTAGDHLATFVAAGRHGDMDWLATTLSRRIHPGALWPDTRSAIMLGVNYGPDLDPLEVLRDRARAAISVYAQGDDYHDLIKGRLKQLGGWMAGRFGQDLKVFVDTAPLMEKPLAQAAGLGWQGKHTNLVSREFGSWLFLGAILTTADLVPDETSSDRCGQCRACLDICPTGAFPAPYQLDARRCISYLTIELKGPIPREFRRALGNRIYGCDDCLAVCPWNKFAKASSEIRLQARPALAQARLEDLVGLTEPDFRALFAKSPIKRIGRDRFIRNVLYALGNTQDDRHVASITALLEDPAPLVRGAAVWALKQILDDASFKTLRAARPEQDADLNVRAEWN

SEQ ID NO: 79436 - protein, 375 aa, Phenylobacterium zucineum
  misc_feature (1)..(375): tr|B4RBA4|B4RBA4_PHEZH Epoxyqueuosine reductase OS=Phen ylobacterium zucineum (strain HLK1) OX=450851 GN=queG P E=3 SV=1
MTISTSEPPEDLIRAEALALGFDLCRFTDLDDAWPAAARLAQYVEAGRHGEMAWMAETLERRSHPRAMWAGARSAVVLGINYGPRHDPLEVLGGPDRGAISVYAQNEDYHDLVKKRLKALGRWMQDRFGGELKVFVDTAPLMEKPLAERAGAGWQGRHTNLVSREYGSWLFLGSILTTLDLAPDAAEPMHCGSCTACLEACPTNAFPAPFQLDARRCISYLTIELKGPIPRELRPMLGNRIYGCDDCLAVCPWNKFAQAAREQKLAARPELTAPALADLARLDDAAFRALFTKSPVKRIGRDRFVRNVLYAIGNSGDPALAEPAATLLEDPSPLVRGAAVWALSRLLASADFVSLRNARLPAEADPGVREEWLAA

SEQ ID NO: 79437 - protein, 177 aa, Phormidesmis priestleyi
  misc_feature (1)..(177): tr|A0A2W4YXA4|A0A2W4YXA4_9CYAN Epoxyqueuosine reductase (Fragment) OS=Phormidesmis priestleyi OX=268141 GN=DCF 15_14760 PE=4 SV=1
IAKNGNVITRQYGSWVFLGEIITNLPLAADAPHTAHCGTCTRCLEACPTAAIRAPGVVDANRCIAYHTIENRAEVLPEAIAQNLQNWVAGCDICQDVCPWNQRFAQATDIADFAPYPENVSPTLANLATITEAEWNDRFPASALRRIKPPMLRRNAEAAIAAHEIAPQQPSAECYGH

SEQ ID NO: 79438 - protein, 318 aa, Phormidesmis priestleyi
  misc_feature (1)..(318): tr|A0A2T1D4V2|A0A2T1D4V2_9CYAN Epoxyqueuosine reductase OS=Phormidesmis priestleyi ULC007 OX=1920490 GN=queG P E=3 SV=1
MTDRASNLTDRIKQKALEVGFHKVGIAIVPVNSDDEKAAVTSLQSWLTQNHQADMAWMANPKRQDLRLVMPEARSLICVALNYYTAHDRPEGNDYAKISRYGWGRDYHRILHKKLKALSTWLEAQGDDIRARYYADTGPVQDKFWAQQAGIGWIAKNSNVITRDYGSWVFLGEVLTNLELIGDRPHTSHCGTCTRCLDACPTGAITQPFVVDANLCIAYHTIENRAETLPETITPHLGGWVAGCDICQDVCPWNQRFAQESDVADFQPYPGNVDPTLTELAELSDEEYDRRFPASALRRIKPAMMRRNARSNLRIDVE

SEQ ID NO: 79439 - protein, 322 aa, Phormidium ambiguum
  misc_feature (1)..(322): tr|A0A1U7ISJ5|A0A1U7ISJ5_9CYAN Epoxyqueuosine reductase OS=Phormidium ambiguum IAM M-71 OX=454136 GN=queG PE=3 SV=1
MVNTIIDSTQVKQKASELGFHQVGIASVDTEDESEAQKLQQWLALGYQADMQWMSNPKRENIRLIMPEVQSVICVALNYYISDQRPEGTEYAKISRYAWGRDYHKVMHKKLKALTNWLQEQGEGILARYYADTGPIQDKVWAQRAGIGWIAKNTNVITKKYGSWVFLAEVLTNLNLVPDTPHTHHCGTCTRCITACPTNAIRPLDNSSDSQTFVVDANCCIAYHTIENRSQDLPSAIAPHLNNWVAGCDICQDVCPWNQRFAKPTDVLEFQPYPGNVNPTLEELAEISDREWEKKFPASALRRIKPEMWRRNARTNLKYLHP

SEQ ID NO: 79440 - protein, 335 aa, Phormidium sp.
  misc_feature (1)..(335): tr|A0A0P8DMG3|A0A0P8DMG3_9CYAN Epoxyqueuosine reductase OS=Phormidium sp. OSCR OX=1666905 GN=queG PE=3 SV=1
MSQFANAPNRGQILEQAFDLGFHRVGIAAVPAEADEGETEAVHHLQTWLNQGYQADMDWMANPKRQDIRQVLPGVRSVIAVALNYYTDHQPSEGEDAEGEDGEDRVKISRYAWGRDYHRVLHRKLKQLSRWLESSGEGIRAKYYADTGPVQDKVWAERAGLGWIAKNGNLITRDYGSWVFLGEVLTTLPLESDRPHTDHCGTCTRCLDACPTEAIVRPTVVDANRCLAYHTIENRRDRLPDDIANNLNGWVAGCDICQEVCPWNQRFAKTTDVAEFEPYPQNLNPSGSELANLSEEDWDQRFRASALRRIKPAMWRRNSQAANKTEKTPSKTDEV

SEQ ID NO: 79441 - protein, 333 aa, Phormidium sp.
  misc_feature (1)..(333): tr|A0A522XDV5|A0A522XDV5_9CYAN Epoxyqueuosine reductase OS=Phormidium sp. SL48-SHIP OX=2518363 GN=queG PE=3 SV =1
MSQFVNAPNRHDILEQAFNLGFHRAGIAVVPPQADAGETEAVHHLQTWLNQGYQADMAWMANPKRQDIRQVLPGVRSVIAVALNYYTEHHPSEGDEGDESDDTVKISRYAWGRDYHRVLHRRLKQLSRWLEASGEGIQAKYYADTGPVQDKVWAERAGLGWIAKNGNLITRDYGSWVFLGEVLTNLPLEADRPHTDHCGTCTRCLDACPTEAIVRPTVVDANRCLAYHTIENRRDRLPDDIANTLNGWVAGCDICQDVCPWNQRFAQTTDVAEFEPYPQNLNPSGSELANLSEDDWDQRFRASALRRIKPAMWRRNSQAANKTQKTPSTTDEV

SEQ ID NO: 79442 - protein, 326 aa, Phormidium tenue
  misc_feature (1)..(326): tr|A0A1U7J2W7|A0A1U7J2W7_9CYAN Epoxyqueuosine reductase OS=Phormidium tenue NIES-30 OX=549789 GN=queG PE=3 SV= 1
MAQAAGLPDRQVVIDQALALGFHRVGIAAVEPEPSPAETAAVGHLQTWLNQGHQADMDWMANPRRQDIRQVLPGARSLICVALNYYTPHRHSDDPSHGKISRYAWGRDYHRVLHKRLKALSDWLTTAGEGTVQVRYYADTGPVQDKAWAQQAGLGWIAKNGNLITRQYGSWVFLGELITTLSLAPDAPQTSHCGTCTRCLEACPTGAITQPYVVDANRCIAYHTIENRDAALPEAIAPHLQNWVAGCDICQDVCPWNQRFAQPTTVDDFQPRPGNLTPNLDDLANLSEADWDSRFQASALRRIKPAMWRRNARAAQKWSGDHSANP

SEQ ID NO: 79443 - protein, 333 aa, Phormidium willei
  misc_feature (1)..(333): tr|A0A168S0E2|A0A168S0E2_9CYAN Epoxyqueuosine reductase OS=Phormidium willei BDU 130791 OX=399101 GN=queG PE=3 SV=1
MSQFVNTPNRDNILEYAFDLGFHRAGIAAVPPQADAAETEAVHHLQTWLDQGYQADMAWMANPKRQDIRQVLPGVRSVIAVALNYYTDYQPSQGDEGDEGEDRVKISRYAWGRDYHRVLHRKLKQLSRWLQASGEGIEAKYYADTGPVQDKVWAERAGLGWIAKNGNLITRDYGSWVFLGEVLTNLPLEADRPHTDHCGTCTRCLDACPTEAIVRPTVVDANRCLAYHTIENRRDRLPEDIADNLNGWVAGCDICQDVCPWNQRFAQTTDVAEFEPYPQNLNPSGSELANLSEEDWDQRFRASALRRIKPAMWRRNSQAANKTQKTPSTTDEV

SEQ ID NO: 79444 - protein, 377 aa, Photobacterium angustum
  misc_feature (1)..(377): tr|A0A2S7VSR7|A0A2S7VSR7_PHOAN Epoxyqueuosine reductase OS=Photobacterium angustum OX=661 GN=queG PE=3 SV=1
MTIDYHQLAEQIKTWGQELGFQQVGITDIDLSQHEAELQRWLDAGYHGDMDWMARHGMMRARPAELLPGTIRVISVRMNYLPPHAEFAQTLKQPQKAFISRYSLGRDYHKLIRNRLKQLGQRIEQVVGQFGCRPFVDSAPILERPLAQKAGLGWTGKHSLILNEQAGSWFFLGELLVDIPLPIDKPSSDQCGKCVACITSCPTGAIVEEGIVDARRCISYLTIEFDGVIPEQYRSAIGNRIYGCDDCQLVCPINRHGQLTEEHDYHCRDSLYQQDLLTLYAWDETTFLKNTEGSAIRRIGHIQWLRNITIALGNASYQIEIVEALQQRQGISELLDTHIDWALSQQQQRKDQLALEILPTKTKRLVRIIEKGLPRDA

SEQ ID NO: 79445 - protein, 377 aa, Photobacterium angustum
  misc_feature (1)..(377): tr|Q1ZKC1|Q1ZKC1_PHOAS Epoxyqueuosine reductase OS=Phot obacterium angustum (strain S14 / CCUG 15956) OX=314292 GN=queG PE=3 SV=1
MTIDYHQLAEQIKTWGQELGFQQVGITDIDLSQHEAELQRWLDAGYHGDMDWMARHGMMRARPAELLPGTIRVISVRMNYLPPHAEFAQTLKQPQKAFISRYSLGRDYHKLIRNRLKQLGQRIEQVVGQFGCRPFVDSAPILERPLAQKAGLGWTGKHSLILNEQAGSWFFLGELLVDIPLPIDKPSTDQCGKCVACITSCPTGAIVEEGIVDARRCISYLTIEFDGVIPEQYRSAIGNRIYGCDDCQLVCPINRHGQLTEEHDYHCRDSLYQQDLLTLYAWDEATFLKNTEGSAIRRIGHIQWLRNITIALGNAPYQIEIVEALQQRQGISELLDTHIDWALLQQQQRKDQLALEILPTKTKRLVRIIEKGLPRDA

SEQ ID NO: 79446 - protein, 377 aa, Photobacterium aphoticum
  misc_feature (1)..(377): tr|A0A0J1GJ67|A0A0J1GJ67_9GAMM Epoxyqueuosine reductase OS=Photobacterium aphoticum OX=754436 GN=queG PE=3 SV= 1
MTIDYHALRDKIKQWGLELGFQQVGISDVDLHEHEAQLQRWLDAGYHGEMDWMARHGMMRARPAELHPGTVRVISVRMDYLPPEAGFAQSLSQPDTAYISRYSLGRDYHKLIRNRLKRLGQRIEQEVGPFGYRPFVDSAPILERPLAEKAGLGWTGKHSLILNPHAGSWFFLGELLIDLPLPVDTPIENQCGKCVACKTSCPTGAIVEDGVIDARRCISYLTIEFDGVIPEALREPIGNRIYGCDDCQLVCPYNRYAEITQESDYHCRDSLAQQSLVALFQWDEAQFLKATEGSAIRRIGHVQWLRNLSIAMGNAPYDAAIVEALTQRLGEHALLDIHIDWALAQQTARRQADTITVLPARTQRLIRIVEKGLPRDA

SEQ ID NO: 79447 - protein, 214 aa, Photobacterium aphoticum
  misc_feature (1)..(214): tr|A0A090R2L4|A0A090R2L4_9GAMM Epoxyqueuosine (OQ) redu ctase QueG OS=Photobacterium aphoticum OX=754436 GN=JCM 19237_3711 PE=4 SV=1
MPVDTPIENQCGKCVACKTSCPTGAIVEDGVIDARRCISYLTIEFDGIIPEALREPIGNRIYGCDDCQLVCPYNRYAEITQESDYHCRDSLAQQSLVALFQWDEAQFLKATEGSAIRRIGHVQWLRNLSIAMGNAPYDAAIVEALTQRLGEHALLDIHIDWALAQQTARRQADAITVLPARTQRLIRIVEKGCHETPEPAQRCRPLCCNVIVEE

SEQ ID NO: 79448 - protein, 377 aa, Photobacterium aquae
  misc_feature (1)..(377): tr|A0A0J1GIY9|A0A0J1GIY9_9GAMM Epoxyqueuosine reductase OS=Photobacterium aquae OX=1195763 GN=queG PE=3 SV=1
MTIDYHALSDNIKQWGKELGFQQVGICDVDLREHEEELQRWLNAGYHGQMDWMARHGMMRARPDELVPGTIRVISVRMNYLPPEAGFAQSLSQPNSAYISRYSLGRDYHKLVRNRLKQLGQRIEQAVGSFGYRPFVDSAPILERPLAEKAGLGWTGKHSLIINQDAGSWFFLGELLVDLPLPVDRPVEKQCGKCVACITSCPTGAIIEDGVIDARRCISYLTIEFDGVIPEEFREAIGNRIYGCDDCQLVCPFNRFASVTDEPDYYCRDSLYQQPLATLYQWDEDTFLKHTEGSAIRRIGHQQWLRNLTIAMGNAPYSSDIVNALNARQGDSSLLDIHIEWALDKQHRQRQNLVTEALPTKTQRLIRIIEKGLPRDA

SEQ ID NO: 79449 - protein, 377 aa, Photobacterium aquimaris
  misc_feature (1)..(377): tr|A0A2T3IFT4|A0A2T3IFT4_9GAMM Epoxyqueuosine reductase OS=Photobacterium aquimaris OX=512643 GN=queG PE=3 SV= 1
MTIDYQQLALQIKTWGQELGFQAVGISDIDLSQHETQLQRWLDADYHGDMDWMARHGMMRARPQELLPGTVRVISVRMNYLPPQAGFAQTLKQPTKAYISRYSLGRDYHKLIRNRLKQLGQRIEAVVGEFGCRPFVDSAPVLERPLAEKAGLGWTGKHSLILNDQSGSWFFLGELLIDLPLPVDAPVVNQCGKCVACMTSCPTDAIIEAGVIDARRCISYLTIEFDGIIPEQYRTAIGNRIYGCDDCQLVCPFNRHGEITSETDYHCRDTLFQQDLVTLYTWNEATFLRNTEGSAIRRIGHTQWLRNITIALGNAPYQTDIIDALSARQGEHPLVDVHIEWALEQQHQKRQQIVIDVLPNATKRLVRIIEKGLPRDA

SEQ ID NO: 79450 - protein, 377 aa, Photobacterium aquimaris
  misc_feature (1)..(377): tr|A0A2T3HUN6|A0A2T3HUN6_9GAMM Epoxyqueuosine reductase OS=Photobacterium aquimaris OX=512643 GN=queG PE=3 SV= 1
MTIDYQQLALQIKTWGQELGFQAVGISDIDLSQHETQLQRWLDAGYHGDMDWMARHGMMRARPQELLPGTVRVISVRMNYLPPQAGFAQTLKQPTTAYISRYSLGRDYHKLIRNRLKQLGQRIEAVVGEFGCRPFVDSAPVLERPLAEKAGLGWTGKHSLILNDQSGSWFFLGELLIDLPLPVDTPVVNQCGKCVACMTSCPTGAIIEAGVVDARRCISYLTIEFDGIIPEQYRAAIGNRIYGCDDCQLVCPFNRHGEITSETDYHCRETLFQQDLVTLYAWNEATFLRNTEGSAIRRIGHTQWLRNITIALGNAPYQADIIEALSARQGEHPLVDVHIEWALEQQNQKRQQMVIDVLPNATKRLVRIIEKGLPRDA

SEQ ID NO: 79451 - protein, 377 aa, Photobacterium carnosum
  misc_feature (1)..(377): tr|A0A2N4UN66|A0A2N4UN66_9GAMM Epoxyqueuosine reductase OS=Photobacterium carnosum OX=2023717 GN=queG PE=3 SV= 1
MSIDYQQLALQIKTWGQELGFQAVGICDIDLTQHEAQLQRWLDAGYHGDMDWMARHGMMRARPQELLPGTIRVISVRMNYLPPQAGFAQTLKQPTKAYISRYSLGRDYHKLIRNRLKQLGQRIKSVVGEFGCRPFVDSAPVLERPLAEKSGLGWTGKHSLILNEQSGSWFFLGELLIDLPLPVDTPTTNQCGKCVACMTSCPTGAIIEAGVVDARRCISYLTIEFDGIIPEQYRAAIGNRIYGCDDCQLVCPFSRNGEITTETDYHCRDVLFQQDLVTLYQWNEATFLSNTEGSAIRRIGHTQWLRNITIALGNAPYQADIINALITRQGEHPLVDVHIKWALEQQQQKRQQMVIDVLPNATKRLVRIIEKGLPRDA

SEQ ID NO: 79452 - protein, 377 aa, Photobacterium damsela
  misc_feature (1)..(377): tr|A0A1Q9H0D5|A0A1Q9H0D5_PHODP Epoxyqueuosine reductase OS=Photobacterium damsela subsp. piscicida OX=38294 GN =queG PE=3 SV=1
MTIDLNQLSLDIKQWGKELGFQQVGICDVDLSQHEAQLQRWLDAGYHGDMDWMARHGMMRARPDELHPGTVRVISVRMNYLPPEAGFAQTLKAPEKGYISRYALGRDYHKLVRNRLKQLGQKIEAVVGPFGYRPFVDSAPILERPLAQKAGLGWTGKHSLILNQDAGSWFFLGELLIDLPLPVDEAIENQCGKCVACMTSCPTGAIVDEGVIDARRCISYLTIEYSGVIPEEFRPLIGNRIYGCDDCQLVCPHSRHGEITEETDYHCRPTLAQQDLLTLFSWDEKTFLKNTEGSAIRRIGHIQWLRNISIAMGNAPYQEAILIALEKCLGLDESLDIHLNWAIEQQKKRRDENSITVISNKAQRLVRIIEKGLPRDA

SEQ ID NO: 79453 - protein, 377 aa, Photobacterium damselae
  misc_feature (1)..(377): tr|A0A2T3QEG6|A0A2T3QEG6_9GAMM Epoxyqueuosine reductase OS=Photobacterium damselae OX=38293 GN=queG PE=3 SV=1
MTIDLNQLSLDIKQWGKELGFQQVGICDVDLSQHEAQLQRWLDAGYHGDMDWMARHGMMRARPDELHPGTVRVISVRMNYLPPEAGFAQTLKAPEKGYISRYALGRDYHKLVRNRLKQLGQKIEAVVGPFGYRPFVDSAPILERPLAQKAGLGWTGKHSLILNQDAGSWFFLGELLIDLPLPVDEALENQCGKCVACMTSCPTGAIVEEGVIDARRCISYLTIEYSGVIPEEFRPLMGNRIYGCDDCQLVCPHSRHGEITEETDYHCRPTLAQQDLLTLFSWDEKTFLKNTEGSAIRRIGHIQWLRNISIAMGNAPYQEAILIALEECLGLDETLDIHLNWAIGQQKKRRDENSITVISNKAQRLVRIIEKGLPRDA

SEQ ID NO: 79454 - protein, 400 aa, Photobacterium damselae
  misc_feature (1)..(400): tr|D0Z0H5|D0Z0H5_PHODD Epoxyqueuosine reductase OS=Phot obacterium damselae subsp. damselae CIP 102761 OX=67581 7 GN=queG PE=3 SV=1
MSYPDSIYFVINFAPFSVTCDSVMTIDLNQLSLDIKQWGKELGFQQVGICDVDLSQHEAQLQRWLDAGYHGDMDWMARHGMMRARPDELHPGTVRVISVRMNYLPPEAGFAQTLKAPEKGYISRYALGRDYHKLVRNRLKQLGQKIEAVVGPFGYRPFVDSAPILERPLAQKAGLGWTGKHSLILNQDAGSWFFLGELLIDLPLPVDEALENQCGKCVACMTSCPTGAIVEEGVIDARRCISYLTIEYSGVIPEEFRPLMGNRIYGCDDCQLVCPHSRHGEITEETDYHCRPTLAQQDLLTLFSWDEKTFLKNTEGSAIRRIGHIQWLRNISIAMGNAPYQEAILIALEECLGLDETLDIHLNWAIGQQKKRRDENSITVISNKAQRLVRIIEKGLPRDA

SEQ ID NO: 79455 - protein, 377 aa, Photobacterium frigidiphilum
  misc_feature (1)..(377): tr|A0A2T3J892|A0A2T3J892_9GAMM Epoxyqueuosine reductase OS=Photobacterium frigidiphilum OX=264736 GN=queG PE=3 SV=1
MSIDYTALTQQIKQWGKELGFQEVGICDVDLQKHEAQLQRWLDAGYHGEMDWMARHGMMRARPAELLPNTVRVISVRMNYLPPEAGFAQTLKQPLKAYISRYSLGRDYHKLIRNRLKQLGQRIEKEVGQFGYRPFVDSAPILERPLAEKAGLGWTGKHSLILNSDSGSWFFLGELLIDLPLPVDTPQENQCGKCVACITSCPTGAIVEEGIVDARRCISYLTIEFDGVIPEELREKIGNRIYGCDDCQLVCPFSRNGEITQETDYHCRDNLYQQDLTTLFLWDEATFLKNTEGSAIRRIGHIQWLRNIAIAMGNAPYNEDILEALNSRLALNEILDIHIQWAIKKQHNKYAKNAIDVLPSNTKRLVRIVEKGLPRDA

SEQ ID NO: 79456 - protein, 377 aa, Photobacterium gaetbulicola
  misc_feature (1)..(377): tr|A0A0B9H1N7|A0A0B9H1N7_9GAMM Epoxyqueuosine reductase OS=Photobacterium gaetbulicola OX=1295392 GN=queG PE=3 SV=1
MTIDYRDLTQKIKQWGQELGFQQVGISDVDLSQHEAQLQRWLDAGYHGDMDWMARHGMMRARPAELHPGTVRVISARMDYLPPEANFAHSLSHPETAYISRYALGRDYHKLIRNRLKRLGQLIEQEVGPFGYRPFVDSAPILERPLAEKAGLGWTGKHSLLLNQQAGSWFFLGELLIDLPLPVDKPKENKCGKCIACMTSCPTQAIVEEGVVDARRCISYLTIEFDGVIPEEFREAIGNRVYGCDDCQLVCPFNRFSDITQEADFHCRNSLKLQPLTTLYAWTEEAFLKHTEGSAIRRIGHLQWLRNLTIAMGNAPYSPAIIEALESREGQSALLDSHIQWAREKQLEKRGQDTINVQPARTKRLTRIVEKGLPRDA

SEQ ID NO: 79457 - protein, 377 aa, Photobacterium gaetbulicola
  misc_feature (1)..(377): tr|A0A0C5WI79|A0A0C5WI79_9GAMM Epoxyqueuosine reductase OS=Photobacterium gaetbulicola Gung47 OX=658445 GN=que G PE=3 SV=1
MTIDYRDLTQKIKQWGQELGFQQVGISDVDLSQHEAQLQRWLNAGYHGDMDWMARHGMMRARPAELHPGTVRVISARMDYLPPEANFAHSLRHPETAYISRYALGRDYHKLIRNRLKRLGQLIEQEVGPFGYRPFVDSAPILERPLAEKAGLGWTGKHSLLLNQQAGSWFFLGELLIDLPLPVDKPTENKCGKCIACMTSCPTQAIVEEGVVDARRCISYLTIEFDGVIPEEFREAIGNRVYGCDDCQLVCPFNRFSDITQEADFHCRNSLKLQPLTTLYAWTEEAFLKHTEGSAIRRIGHLQWLRNLTIAMGNAPYSPAIIEALESREGQSALLDSHIQWAREKQLEKRDPDAINVQPARTKRLTRIVEKGLPRDA

SEQ ID NO: 79458 - protein, 377 aa, Photobacterium galatheae
  misc_feature (1)..(377): tr|A0A066RSB7|A0A066RSB7_9GAMM Epoxyqueuosine reductase OS=Photobacterium galatheae OX=1654360 GN=queG PE=3 SV =1
MTLDFQQLASDIKQWGKALGFQHVGICDVDLSKHEAQLQRWLDAGYHGEMDWMARHGMMRARPAELLPGTVRVISVRMNYLPPEAGFAQTLKQPHQAYISRYALGRDYHKLVRNRLKQLGQKIEQAVGSFGYRPFVDSAPILERPLAEKAGLGWTGKHSLILSEDAGSWFFLGELLIDLPLPVDGPVENQCGKCVACMTSCPTQAIVAEGVIDARRCISYLTIELDGVIPEEFREAMGNRIYGCDDCQLVCPYNRAADVTSEQDYHCRPQLYQQDLLTLFQWDEATFQKQTEGSAIRRIGHIKWLRNLSVAIGNAPYDPSLLDALIERKGLDSMLDEHLDWAITRQQEKRAAASVDILPNKTKRLIRIVEKGLPRDA

SEQ ID NO: 79459 - protein, 386 aa, Photobacterium ganghwense
  misc_feature (1)..(386): tr|A0A0J1GYY7|A0A0J1GYY7_9GAMM Epoxyqueuosine reductase OS=Photobacterium ganghwense OX=320778 GN=queG PE=3 SV =1
MTIDYRDLANHIKQWGQELGFQQVGICDVDLSRHEAQLQRWLDAGYHGEMDWMARHGMMRARPAELLPGTVRVISVRMNYLPPEAGFAQSLGQPDTAYVSRYSLGRDYHKLIRNRLKQLGQKIEAAVGQFGYRPFVDSAPILERPLAEKAGLGWTGKHSLILNEHAGSWFFLGELLIDLPLPVDTPVENQCGKCVACMTSCPTGAIVEEGVIDARRCISYLTIEFDGVIPEEFREPIGNRIYGCDDCQLVCPFNRYADVTEEQDYHCRESLYQQPLATLFQWDENQFLKNTEGSAIRRIGHVQWLRNIAIAMGNAPYSTELVQALEQRLGEHELLDVHIQWALGKQHERVNQANQLPHLTAQRIEVLPAKTRRLIRIVEKGLPRDA

SEQ ID NO: 79460 - protein, 377 aa, Photobacterium halotolerans
  misc_feature (1)..(377): tr|A0A0F5V6W9|A0A0F5V6W9_9GAMM Epoxyqueuosine reductase OS=Photobacterium halotolerans OX=265726 GN=queG PE=3 SV=1
MMLDYQQLANDIKQWGKDLGFQHVGICDVDLSKHEAQLQRWLDAGYHGEMDWMARHGMMRARPAELLPGTVRVISVRMNYLPPEAGFAQTLKQPEKAYISRYALGRDYHKLVRNRLKQLGQRIEQVAGAFGYRPFVDSAPILERPLAEKAGLGWTGKHSLILSEDAGSWFFLGELLIDLPLPTDEPVDHQCGKCVACITSCPTQAIVAEGVVDARRCISYLTIELDGPIPEEFREAMGNRIYGCDDCQLVCPYNRQSAITDEPDYHCRPQLYQQDLLTLFHWDEATFLKNTEGSPIRRIGHLKWLRNLSVAIGNAPYAPELLNALIERKGLDSMLDEHLDWSIRRQIARRDEARVDVVTNKTQRLIRIVEKGLPRDA

SEQ ID NO: 79461 - protein, 377 aa, Photobacterium iliopiscarium
  misc_feature (1)..(377): tr|A0A2T3MCM5|A0A2T3MCM5_9GAMM Epoxyqueuosine reductase OS=Photobacterium iliopiscarium OX=56192 GN=queG PE=3 SV=1
MTIDYQQLALQIKTWGQELGFQAVGISDIDLSQHEVQLQRWLDADYHGDMDWMARHGMMRARPQELLPGTIRVISVRMNYLPPQAGFAQTLKQPTKAYISRYSLGRDYHKLIRNRLKQLGQRIETVVGEFGCRPFVDSAPVLERPLAEKAGLGWTGKHSLILNDQSGSWFFLGELLIDLPLPVDEPMNNQCGKCIACMTSCPTGAIIEAGVVDARRCISYLTIEFDGIIPEQYRAAIGNRIYGCDDCQLVCPFNRHGEITTEIDYHCRDTLFQQDLVTLYQWNEATFLKNTEGSAIRRIGHVQWLRNITIALGNAPYQTDIVAALATRQGEHPLVDIHIEWALEQQHQKRQQMVLDVLPNATKRLVRIIEKGLPRDA

SEQ ID NO: 79462 - protein, 377 aa, Photobacterium indicum
  misc_feature (1)..(377): tr|A0A2T3L198|A0A2T3L198_9GAMM Epoxyqueuosine reductase OS=Photobacterium indicum OX=81447 GN=queG PE=3 SV=1
MSIDYTALTQQIKLWGKELGFQDVGICDVDLQKHEAQLQRWLDAGYHGEMDWMARHGMMRARPAELLPNTVRVISVRMNYLPPEAGFAQTLKQPLKAYISRYSLGRDYHKLIRNRLKQLGQRIEKEVGQFGYRPFVDSAPILERPLAEKAGLGWTGKHSLILNSDSGSWFFLGELLIDLPLPVDTPQENQCGKCVACITSCPTGAIVEEGIVDARRCISYLTIEFDGVIPEELREKIGNRIYGCDDCQLVCPFSRNGEITQETDYHCRDNLYQQDLTTLFLWDEATFLKNTEGSAIRRIGHIQWLRNIAIAMGNAPYNVDILEVLNSRLALNEILDIHIQWAIKKQHNKYAKNAIDVLPSNTKRLVRIVEKGLPRDA

SEQ ID NO: 79463 - protein, 382 aa, Photobacterium jeanii
  misc_feature (1)..(382): tr|A0A178KQY5|A0A178KQY5_9GAMM Epoxyqueuosine reductase OS=Photobacterium jeanii OX=858640 GN=queG PE=3 SV=1
MSPDYTDLAQKIKQWGQALGFQHVGICNVDLSDHEAQLQRWLDMGYHGEMDWMARHGMMRARPDELLPGTVRVISVRMNYLPPDAGFADTLANPNKAYISRYSLGRDYHKLIRNRLKRLGQQIEQEVGQFGYRPFVDSAPILERPLAEKAGLGWTGKHSLILSQSAGSWFFLGELLIDLPLPVDTPETNQCGKCVACMTSCPTGAIVEEGVIDARRCVSYLTIEFDGVIPEEFREKIGNRIYGCDDCQLVCPFNRFSDLTEEADYHCRDTLYQQDLLTLYQWDEASFLKNTEGSAIRRIGHIQWLRNITIALGNAPYAPEIINALSERQGLSELLDIHIEWALEQQQLKREALAVDVLPSKTKRLVRIVEKGLPRDAHSPPQ

SEQ ID NO: 79464 - protein, 377 aa, Photobacterium kishitanii
  misc_feature (1)..(377): tr|A0A2T3QRX4|A0A2T3QRX4_9GAMM Epoxyqueuosine reductase OS=Photobacterium kishitanii OX=318456 GN=queG PE=3 SV =1
MTIDYQQLALQIKIWGQELGFQAVGISDVDLSEHETQLQRWLDAGYHGDMDWMARHGMMRARPQELLPGTVRVISVRMNYLPPQAGFAQTLKQPTKGYISRYSLGRDYHKLIRNRLKQLGQRIETVVGQFGCRPFVDSAPVLERPLAEKAGLGWTGKHSLILNDQSGSWFFLGELLIDLPLPVDAPVTNQCGKCVACMTSCPTGAIIESGVVDARRCISYLTIEFDGIIPEQYRAAIGNRIYGCDDCQLVCPFNRHGEITAETDYHCRESLFQQDLLTLYHWNEATFLKNTEGSAIRRIGHIQWLRNITIALGNAPYQADIVAALTNRQGEHPLVDVHIEWALEQQQQKYQQMIIDVLPSSTKRLVRIIEKGLPRDA

SEQ ID NO: 79465 - protein, 377 aa, Photobacterium kishitanii
  misc_feature (1)..(377): tr|A0A2T3KCC4|A0A2T3KCC4_9GAMM Epoxyqueuosine reductase OS=Photobacterium kishitanii OX=318456 GN=queG PE=3 SV =1
MTIDYQQLALQIKIWGQELGFQAVGISDVDLSEHETQLQRWLDAGYHGDMDWMARHGMMRARPQELLPGTVRVISVRMNYLPPQAGFAQTLKQPTKGYISRYSLGRDYHKLIRNRLKQLGQRIETVVGQFGCRPFVDSAPVLERPLAEKAGLGWTGKHSLILNDQSGSWFFLGELLIDLPLPVDAPVTNQCGKCVACMTSCPTGAIIESGVVDARRCISYLTIEFDGIIPEQYRAAIGNRIYGCDDCQLVCPFNRHGEITAETDYHCRESLFQQDLLTLYHWNEATFLKNTEGSAIRRIGHIQWLRNITIALGNAPYQADIVAALTNRQGEHPLVDVHIEWALEQQQQKYQQMVIDVLPSSTKRLVRIIEKGLPRDA

SEQ ID NO: 79466 - protein, 377 aa, Photobacterium leiognathi
  misc_feature (1)..(377): tr|A0A2T3M6B8|A0A2T3M6B8_PHOLE Epoxyqueuosine reductase OS=Photobacterium leiognathi OX=553611 GN=queG PE=3 SV =1
MTIDYQQLADQIKTWGQELGFQQVGISDIDLSQHEVELQRWIDAGYHGEMDWMARHGMMRARPAELLPGTIRVISVRMNYLPPDAGFAQTLKQPHKAYISRYSLGRDYHKLIRNRLKQLGQRIEQMVGQFGCRPFVDSAPILERPLAQKAGLGWTGKHSLILNEQAGSWFFLGELLVDIPLPVDIPTEEQCGKCVACITSCPTGAIVEEGVIDSRRCISYLTIEFDGVIPEQYRTAMGNRIYGCDDCQLVCPVNRHGQLTNEVDYHCRDSLYQQDLLTLYAWDEKTFLKNTEGSAIRRIGHIQWLRNITIALGNAPYQSEIIEALSTRQGLSDLLDIHIEWALEQQELKKVESEREILPTKTKRLVRIIEKGLPRDA

SEQ ID NO: 79467 - protein, 377 aa, Photobacterium leiognathi
  misc_feature (1)..(377): tr|A0A2T3KQA0|A0A2T3KQA0_PHOLD Epoxyqueuosine reductase OS=Photobacterium leiognathi subsp. mandapamensis OX=4 8408 GN=queG PE=3 SV=1
MTIDYQQLADQIKTWGQELGFQQVGISDIDLSQHEAELQRWIDAGYHGEMDWMARHGMMRARPAELLPGTIRVISVRMNYLPPDAGFAQTLKQPHKAYISRYSLGRDYHKLIRNRLKQLGQRIEQVVGQFGCRPFVDSAPILERPLAQKAGLGWTGKHSLILNEQAGSWFFLGELLVDIPLPVDTPTKEQCGKCVACITSCPTGAIVEEGIIDSRRCISYLTIEFDGVIPKQYRTAMGNRIYGCDDCQLVCPVNRHGQLTNEVDYHCRDSLYQQDLLTLYAWDEKTFLKNTEGSAIRRIGHIQWLRNITIALGNAPYQSEIIEALSTRQGLSDLLDIHIEWALEQQELKKVQSELEILPTKTKRLVRIIEKGLPRDA

SEQ ID NO: 79468 - protein, 377 aa, Photobacterium lipolyticum
  misc_feature (1)..(377): tr|A0A2T3MS73|A0A2T3MS73_9GAMM Epoxyqueuosine reductase OS=Photobacterium lipolyticum OX=266810 GN=queG PE=3 S V=1
MSIDYTALTQKIKQWGKELGFQQVGICDIDLKQHEAQLQRWLEAEYHGDMDWMARHGMMRARPAELQPGTVRVISVRMNYLPPDAGFAQTLKQPLKAYISRYALGRDYHKLIRNRLKRLGQLIEAEVGQFGHRPFVDSAPILERPLAEKAGLGWTGKHSLNLNDNSGSWFFLGELLIDLPLPVDTPVENQCGKCVACITSCPTGAIVKEGVIDARRCISYLTIEFSGVIPEDFREKIGNRIYGCDDCQLVCPFNRFSELTEETDYHCRDTLYQQDLLTLFQWDEKSFLKYTEGSAIRRIGHIQWLRNLAIAIGNAPYDADLLDALSKRSGFNELLDIHIRWAMTKQQEKRAELVIDVLPSKTKRLIRIVERGLPRDA

SEQ ID NO: 79469 - protein, 377 aa, Photobacterium lutimaris
  misc_feature (1)..(377): tr|A0A2T3ISG8|A0A2T3ISG8_9GAMM Epoxyqueuosine reductase OS=Photobacterium lutimaris OX=388278 GN=queG PE=3 SV= 1
MTIDYRNLTQKIKQWGQELGFQQIGISDVDLSQHEAQLQRWLDAGYHGDMDWMARHGMMRARPAELHPGTVRVISARMDYLPPEAGFAHSLNQPDTAYISRYALGRDYHKLIRNRLKRLGQLIAQEVGAFGYRPFVDSAPILERPLAEKAGLGWTGKHSLLLNQQAGSWFFLGELLVDLPLPVDSPEENQCGKCVACMTSCPTQAIVAEGVVDARRCISYLTIEYDGVIPEEFREAIGNRVYGCDDCQLVCPFNRFSEVTKEADYHCRDSLRQQPLTTLYAWTEDAFLKNTEGSAIRRIGHNQWLRNLTIAMGNAPYSPEIIEALESREGENALLDVHIQWAKDKQLERCQQDTISVLPASTKRLIRIVEKGLPRDA

SEQ ID NO: 79470 - protein, 377 aa, Photobacterium marinum
  misc_feature (1)..(377): tr|L8J3H4|L8J3H4_9GAMM Epoxyqueuosine reductase OS=Phot obacterium marinum OX=1056511 GN=queG PE=3 SV=1
MSIDYSELAHKIKQWGKELGFQQLGISDTDLQQHEAQLQRWLDAGYHGDMDWMARHGMMRARPAELLPGTIRVISVRMNYLPPEAGFAQSLNNPNTAYISRYSLGRDYHKLIRNRLKRLGQLIEQETGQFGYRPFVDSAPILERPLAQKAGLGWTGKNSLILNKEAGSWFFLGELLVDLPLPVDTPADNQCGKCVACITSCPTGAIIEEGVIDARRCISYLTIEYDGIIPEEFREPIGNRIYGCDDCQLVCPFNRFSNITDEADYHCRDSLNQPPLHELFQWTEKEFLKKTEGSAIRRIGHIQWLRNLTIAMGNAPYQDDILTALQARLGENELLDVHLQWAICKQEEKRKANVIDVLPAKTKRLVRIVEKGLPRDA

SEQ ID NO: 79471 - protein, 377 aa, Photobacterium phosphoreum
  misc_feature (1)..(377): tr|A0A2T3JED2|A0A2T3JED2_PHOPO Epoxyqueuosine reductase OS=Photobacterium phosphoreum OX=659 GN=queG PE=3 SV=1
MTIDYQQLALQIKIWGQELGFQAVGISDIDLSQHETQLQRWLDAGYHGDMDWMARHGMMRARPNELLPGTLRVISVRMNYLPPQAGFAQTLKQPTKAYISRYSLGRDYHKLIRNRLKQLGQRIETVVGEFGCRPFVDSAPVLERPLAEKAGLGWTGKHSLILNDQSGSWFFLGELLIDLPLPIDEPVSNQCGKCVACMTSCPTGAIIEAGVVDARRCISYLTIEFDGIIPEQYRAAIGNRIYGCDDCQLVCPFNRHGEITAETDYHCRDTLFQQDLVTLYQWNEATFLKNTEGSAIRRIGHMQWLRNITIALGNAPYQVDIVTALTMRQGEYPLVDIHIEWALEQQHQKHQQLVIDVLPSSTKRLVRIIEKGLPRDA

SEQ ID NO: 79472 - protein, 377 aa, Photobacterium phosphoreum
  misc_feature (1)..(377): tr|A0A0B7JEX2|A0A0B7JEX2_PHOPO Epoxyqueuosine reductase OS=Photobacterium phosphoreum ANT-2200 OX=1454202 GN=y jeS PE=3 SV=1
MTIDYQQLALQIKIWGQELGFQAVGISDVDLSEHETQLQRWLDAGYHGDMDWMARHGMMRARPQELLPGTVRVISVRMNYLPPQAGFAQTLKQPTKGYISRYSLGRDYHKLIRNRLKQLGQRIETVVGQFGCRPFVDSAPVLERPLAEKAGLGWTGKHSLILNDQSGSWFFLGELLINLPLPVDAPVTNQCGKCVACMTSCPTGAIIESGVVDARRCISYLTIEFDGIIPEQYRAAIGNRIYGCDDCQLVCPFNRHGEITAETDYHCRESLFQQDLLTLYHWNEATFLKNTEGSAIRRIGHIQWLRNITIALGNAPYQADIVAALTNRQGEHPLVDVHIEWALEQQQQKYQQMVIDVLPSSTKRLVRIIEKGLPRDA

SEQ ID NO: 79473 - protein, 377 aa, Photobacterium piscicola
  misc_feature (1)..(377): tr|A0A1T5I445|A0A1T5I445_9GAMM Epoxyqueuosine reductase OS=Photobacterium piscicola OX=1378299 GN=queG PE=3 SV =1
MSIDYQQLALQIKIWGQELGFQAVGICDIDLTQHEAQLQRWLDAGYHGDMEWMARHGMMRARPQELLPGTVRVISVRMNYLPPQAGFAQTLKQPTKAYISRYSLGRDYHKLIRNRLKQLGQRIESVVGEFGCRPFVDSAPVLERPLAEKSGLGWTGKHSLILNDHSGSWFFLGELLIDLPLPVDTPTTNQCGKCVACMTSCPTGAIIEAGVVDARRCISYLTIEFDGIIPEQYRAAMGNRIYGCDDCQLVCPFSRNGEITTETDYHCRDVLFQQDLVTLYQWNEATFLKNTEGSAIRRIGHTQWLRNITIALGNAPYQTNIIDALNARQGEHPLVDVHIEWALEQQHQKRQQMVIDVLPNATKRLVRIIEKGLPRDA

SEQ ID NO: 79474 - protein, 349 aa, Photobacterium profundum
  misc_feature (1)..(349): tr|Q6LM24|Q6LM24_PHOPR Epoxyqueuosine reductase OS=Phot obacterium profundum (strain SS9) OX=298386 GN=YJES PE= 3 SV=1
MDLQKHEAQLQRWLDAGYHGEMDWMARHGMMRARPAELLPNTVRVVSVRMNYLPPEAGFAQTLKQPLKAYISRYSLGRDYHKLIRNRLKQLGQRIEKEVGQFGYRPFVDSAPILERPLAEKAGLGWTGKHSLILNSDSGSWFFLGELLIDLPLPVDTPQENQCGKCVACITSCPTGAIIEEGVVDARRCISYLTIEFDGVIPEELREKMGNRIYGCDDCQLVCPFSRNGEITQETDYHCRDNLYQQDLTTLFLWDEATFLKNTEGSAIRRIGHIQWLRNIAIAMGNAPYNEDILEALNSRLALNEILDIHIQWAIKKQHNKYAKNAIDVLPSNTKRLVRIVEKGLPRDA

SEQ ID NO: 79475 - protein, 377 aa, Photobacterium profundum
  misc_feature (1)..(377): tr|Q1YXJ2|Q1YXJ2_9GAMM Epoxyqueuosine reductase OS=Phot obacterium profundum 3TCK OX=314280 GN=queG PE=3 SV=1
MSIDYTALTQQIKLWGKELGFQDVGICDVDLQKHEAQLQRWLDAGYHGEMDWMARHGMMRARPAELLPHTVRVISVRMNYLPPEAGFAQTLKQPLKAYISRYSLGRDYHKLIRNRLKQLGQRIEKEVGQFGYRPFVDSAPILERPLAEKAGLGWTGKHSLILNSDSGSWFFLGELLIDLPLPVDTPQENQCGKCVACITSCPTGAIVEEGIVDARRCISYLTIEFDGVIPEELREKIGNRIYGCDDCQLVCPFSRNGEITQETDYHCRDNLYQQDLTTLFLWDEATFLKNTEGSAIRRIGHIQWLRNIAIAMGNAPYNEDILETLNCRLALNEILDIHIQWAIKKQHDKYAKNAIDVLPSNTKRLVRIVEKGLPRDA

SEQ ID NO: 79476 - protein, 377 aa, Photobacterium proteolyticum
  misc_feature (1)..(377): tr|A0A1Q9G7U3|A0A1Q9G7U3_9GAMM Epoxyqueuosine reductase OS=Photobacterium proteolyticum OX=1903952 GN=queG PE= 3 SV=1
MNIDYSELTQKIKQWGKELGFQQVGISDIDLHQHEAQLQRWIDAGYHGDMDWMARHGMMRARPAELHPGTVRVISVRMNYLPPEAGFAQSLKQPDTAYISRYSLGRDYHKLIRNRLKRLGQLIEKEVGEFGYRPFVDSAPILERPLAEKAGLGWTGKHSLILSSEAGSWFFLGELLIDLPLPVDTPIDNQCGKCVACMTSCPTGAIVEEGVVDARRCISYLTIEFDGIIPEELREPIGNRIYGCDDCQLVCPFNRFSDLTEEVDYHCRDSLYQQPLHVLYQWTEKQFLKNTEGSAIRRIGHIQWLRNLTIAMGNAPYSADIFEALEQRLGENELLDIHIHWAMEIQTKRHQEHAIEILPGKTKRLIRIVEKGLPRDA

SEQ ID NO: 79477 - protein, 377 aa, Photobacterium rosenbergii
  misc_feature (1)..(377): tr|A0A2T3N5I2|A0A2T3N5I2_9GAMM Epoxyqueuosine reductase OS=Photobacterium rosenbergii OX=294936 GN=queG PE=3 S V=1
MTIDYRDLTKKIKQWGLELGFQQVGISDVDLSEHEAQLQRWLEAGYHGDMDWMARHGMMRARPAELHPGTVRVISARMDYLPPEAGFAYSLSHPETAYVSRYALGRDYHKLIRNRLKRLGQLIEQEVGPFGYRPFVDSAPILERPLAEKAGLGWTGKHSLLLNQQAGSWFFLGELLIDLPLPIDKPEENQCGKCIACMTSCPTKAIVEEGVVDARRCISYLTIEFDGVIPEEFREAIGNRVYGCDDCQLVCPFNRSSEVTKEADYHCRDSLKLQPLTTLYAWTEATFLKNTEGSAIRRIGHIQWLRNLTIAMGNAPYSPDIIEALESREGESALLDEHICWAKDKQHEKRQQDAVSVLPASTKRLVRIVEKGLPRDA

SEQ ID NO: 79478 - protein, 377 aa, Photobacterium sanctipauli
  misc_feature (1)..(377): tr|A0A2T3NA07|A0A2T3NA07_9GAMM Epoxyqueuosine reductase OS=Photobacterium sanctipauli OX=1342794 GN=queG PE=3 SV=1
MTIDYRELTVKIKQWGRELGFQHVGICDVDLRQHEAQLQRWLDAGYHGEMDWMARHGMMRAHPDELHPGTVRVISARMDYLPPEASFAQSLNKPESAYISRYSLGRDYHKLIRNRLKRLGQLIEQETGPFGYRPFVDSAPILERPLAEKAGLGWTGKHSLLLSKEAGSWFFLGELLIDLPLPVDEPEENQCGKCVACMTSCPTGAIVEEGIVDARRCISYLTIEFDGVIPEEFREAIGNRIYGCDDCQLVCPFNRFSSVTEEADYHCRDSLYQQSLTTLYQWTEAQFLKNTEGSAIRRIGHTQWLRNLTVAMGNAPYDSDIVKTLEQRRGESKLLDTHIDWALKKQHERCQSIEINVLPAKTQRLIRIVEKGLPRDA

SEQ ID NO: 79479 - protein, 377 aa, Photobacterium sanguinicancri
  misc_feature (1)..(377): tr|A0A135ZIU0|A0A135ZIU0_9GAMM Epoxyqueuosine reductase OS=Photobacterium sanguinicancri OX=875932 GN=queG PE= 3 SV=1
MSIDYNALALQIKLWGKELGFQHVGICDVDLSQHEAQLQRWLDAGYHGDMDWMARHGMMRARPHELLPGTVRVISVRMNYLPPNAEFAQTLKNPDKAYISRYSLGRDYHKLIRNRLKKLGQNIEQVVGQFGHRPFVDSAPILERPLAEKSGLGWTGKHSLILSQEAGSWFFLGELLIDLPLPVDTAETNQCGKCVACITSCPTGAIVEEGVVDARRCISYLTIEFDGVIPEEFREKIGNRIYGCDDCQLVCPFNRFSDITEEADYHCRDNLYQQDLLVLFDWNEAAFLKNTEGSAIRRIGHTQWLRNITIALGNAPYQPAIINALTEKLGLNEMLDVHLEWALAQQQQKRAEANLEILPTKTKRLVRIIEKGLPRDA

SEQ ID NO: 79480 - protein, 377 aa, Photobacterium sp.
  misc_feature (1)..(377): tr|A0A444JJ08|A0A444JJ08_9GAMM Epoxyqueuosine reductase OS=Photobacterium sp. BEI 247 OX=2485123 GN=queG PE=3 SV=1
MSIDYSELTQKIKQWGKELGFQQVGISDIDLHQHEAQLQRWIDAGYHGEMDWMARHGMMRARPAELHPGTVRVISVRMNYLPPEAGFAQSLKKPDTAYISRYSLGRDYHKLIRNRLKRLGQLIEKEVGEFGYRPFVDSAPILERPLAEKAGLGWTGKHSLILSPEAGSWFFLGELLIDLPLPVDIPVENQCGKCVACMTSCPTGAIVEEGIVDARRCISYLTIEFDGVIPEELREPIGNRIYGCDDCQLVCPFNRFSDITEEVDYHCRDSLYQQPLHVLYQWSEQQFLKNTEGSAIRRIGHIQWLRNLTIAMGNAPYHPDIYDALEQRLGDNELLDIHIQWAIGKQQEKRQESAIEVMPGKTKRLIRIVEKGLPRDA

SEQ ID NO: 79481 - protein, 377 aa, Photobacterium sp.
  misc_feature (1)..(377): tr|Q2BYL6|Q2BYL6_9GAMM Epoxyqueuosine reductase OS=Phot obacterium sp. SKA34 OX=121723 GN=queG PE=3 SV=1
MTIDYHQLAEQIKTWGQELGFQQVGITDIDLSQHEAELQRWLDAGYHGDMDWMARHGMMRARPAELLPGTIRVISVRMNYLPPHAEFAQTLKQPQKAFISRYSLGRDYHKLIRNRLKQLGQRIEQVVGQFGCRPFVDSAPILERPLAQKAGLGWTGKHSLILNEQAGSWFFLGELLVDIPLPIDKPSSDQCGKCVACITSCPTGAIVKEGIVDARRCISYLTIEFDGVIPEQYRSAIGNRIYGCDDCQLVCPINRHGQLTEEHDYHCRDSLYQQDLLTLYTWDEATFLKNTEGSAIRRIGHIQWLRNITIALGNAPYQIEIVGVLKQRQGICELLDTHIDWALSQQQQRKAQLALEILPTKTKRLVRIIEKGLPRDA

SEQ ID NO: 79482 - protein, 377 aa, Photobacterium swingsii
  misc_feature (1)..(377): tr|A0A2T3NSC7|A0A2T3NSC7_9GAMM Epoxyqueuosine reductase OS=Photobacterium swingsii OX=680026 GN=queG PE=3 SV=1
MSIDYHALAQQIKLWGQELGFQHVGICDVDLSQHEAQLQRWLDAGYHGEMDWMARHGMMRARPHELLPGTVRVISVRMNYLPPNAEFAQTLKNPAKAYISRYSLGRDYHKLIRNRLKKLGQNIEQVVGQFGHRPFVDSAPILERPLAEKSGLGWTGKHSLILSQEAGSWFFLGELLIDLPLPVDTPESNQCGKCVACMTSCPTGAIIEEGVVDARRCISYLTIEFDGIIPEEFREKIGNRIYGCDDCQLVCPFNRFSDITEEEDYHCRNSLYQQDTLALFAWDEATFLKNTEGSAIRRIGHIQWLRNLTIALGNAPYQPEIIDALNDKLALNEILDVHIYWALEQQQQKRAAISIDVLPTKTKRLVRIIEKGLPRDA

SEQ ID NO: 79483 - protein, 377 aa, Photobacterium toruni
  misc_feature (1)..(377): tr|A0A1T4TIJ2|A0A1T4TIJ2_9GAMM Epoxyqueuosine reductase OS=Photobacterium toruni OX=1935446 GN=queG PE=3 SV=1
MSIDYQQLALQIKTWGQELGFQAVGICDIDLTQHEAQLQRWLDAGYHGDMDWMARHGMMRARPHELLPGTIRVISVRMNYLPPQAGFAQTLKQPTKAYISRYSLGRDYHKLIRNRLKQLGQRIENVVGEFGCRPFVDSAPVLERPLAEKSGLGWTGKHSLILNDQSGSWFFLGELLIDLPLPVDTPQTNQCGKCVACMTSCPTDAIIEAGVVDARRCISYLTIEFDGIIPEQYRAAMGNRIYGCDDCQLVCPFSRHGEITTETDYHCRDVLFQQDLVTLYLWNEATFLKNTEGSAIRRIGHTQWLRNITIALGNAPYQADIVAALMTRQGEDPLVDVHIEWALEQQQQKRQQIVIDVLPNSTKRLVRIIEKGLPRDA

SEQ ID NO: 79484 - protein, 385 aa, Photorhabdus asymbiotica
  misc_feature (1)..(385): tr|B6VLM8|B6VLM8_PHOAA Epoxyqueuosine reductase OS=Phot orhabdus asymbiotica subsp. asymbiotica (strain ATCC 43 949 / 3105-77) OX=553480 GN=yjeS PE=3 SV=1
MATPLDLNLLTANIKQWGLSLGFQQVGICDTDLSVEEPKFQEWLDKQYHGEMAWMERHGMMRTRPNELLPGTLRVISVRMNYLPAKASFASTLNDSELGYVSRYALGRDYHKLLRQRLKKLGEQIQDYCYDFEYQGTLNFRPFVDSAPIMERPLAAKSGLGWVGKHSLILNKEAGSWFFLGELLINLPLPIDTPQEEHCGRCVACMTTCPTGAIVAPYVIDARRCISYLTIELEGVIPEEFRPLMGNRIYGCDDCQIICPWNRFSQLTDEGDFSPRATLHTPKLLDLFNWSEEKFLRITEGSAIRRIGHLRWLRNIIVALGNAPYQDDIVLSLQQKLGLNTMIDEHIHWAIEQQMTRRDANIVNLQTSQQKRLIRAVIKGLPRDA

SEQ ID NO: 79485 - protein, 399 aa, Photorhabdus australis
  misc_feature (1)..(399): tr|A0A1C0TXW2|A0A1C0TXW2_9GAMM Epoxyqueuosine reductase OS=Photorhabdus australis OX=286156 GN=queG PE=3 SV=1
MLHCGSLQHELISTMATPLDLHLLTTNIKQWGLSLGFQQVGICDTDLSVEEPKFQEWLDKQYHGEMAWMERHGMMRTRPNELLPGTLRVISVRMNYLPAKASFASTLNDPELGYVSRYALGRDYHKLLRQRLKKLGEQIQDYCHDFEYQGTLNFRPFVDSAPIMERPLAAKAGLGWVGKHSLILNKESGSWFFLGELLINLPLPVDTPQEECCGRCVACMTTCPTGAIVRPYVIDARRCISYLTIELEGVIPEELRPLMGNRIYGCDDCQIICPWNRFSQLTDENDFSPRATLHTPKLLDLFNWSEEKFLRITEGSAIRRIGHLRWLRNIIVALGNAPYQDDIVLSLQRKLGLNTMLDEHIHWAIEQQMTRRDANIVNVQTSQQKRLIRTVIKGLPRDA

SEQ ID NO: 79486 - protein, 385 aa, Photorhabdus heterorhabditis
  misc_feature (1)..(385): tr|A0A0M9CZG4|A0A0M9CZG4_9GAMM Epoxyqueuosine reductase OS=Photorhabdus heterorhabditis OX=880156 GN=queG PE=3 SV=1
MATPLDLNLLTTNIKQWGLSLGFQQVGICDTNLSVEEPKLQEWLDKQYHGEMAWMERHGMMRTRPHELLPGTLRVISVRMNYLPARASFASTLNDPELGYVSRYALGRDYHKLLRQRLKKLGEQIQDYCHNFEYQGILNFRPFVDSAPIMERPLAAKAGLGWVGKHSLILNKEAGSWFFLGELLINLPLPVDAPQEEHCGRCVACMTTCPTGAITAPYIIDARRCISYLSIELEGVIPEELRPLMGNRIYGCDDCQIICPWNRFSQLTDEDDFSPRAALHAPKLLDLFNWSEEKFLRITEGSAIRRIGHLRWLRNIIVALGNAPYQDDIVLSLQQKLGLNTMLDEHIHWAIEQQMTRRKANIINVQTSQQKRLIKAIIKGLPRDA

SEQ ID NO: 79487 - protein, 399 aa, Photorhabdus khanii
  misc_feature (1)..(399): tr|W3VA77|W3VA77_9GAMM Epoxyqueuosine reductase OS=Phot orhabdus khanii NC19 OX=1004151 GN=queG PE=3 SV=1
MLYCGSLQHKLISAMATPLDLHLLTTNIKQWGLSLGFQQVGICDTDLSVEEPKFQEWLDKQHHGEMAWMKRHGMMRTRPDELLPGTLRVISVRMNYLPAKASFASTLNDSKLGYISRYALGRDYHKLLRQRLKKLGEQIQNYCHDFEYQEILNFRPFVDSAPIMERPLAAKAGLGWVGKHSLILNREAGSWFFLGELLINLPLPVDTPQQEQCGRCVSCMTTCPTGAIIAPYTIDARRCISYLTIELEGIIPEEFRPLMGNRIYGCDDCQIICPWNRFSQLTDEGDFSPRATLHTPELLDLFNWSEEKFLRITEGSAIRRIGHLRWLRNIAVALGNAPYRDNIVLSLQQKLGLNTMLDEHIHWAIDQQMTRRETNTVNVQTSQQKRLIRAITKGLPRDA

SEQ ID NO: 79488 - protein, 385 aa, Photorhabdus laumondii
  misc_feature (1)..(385): tr|A0A329VLZ5|A0A329VLZ5_9GAMM Epoxyqueuosine reductase OS=Photorhabdus laumondii subsp. clarkei OX=2029685 GN =queG PE=3 SV=1
MTTPLNLNLLAANIKQWGHSLGFQQVGICDTDLSVEEPKLQEWLDKQYHGEMAWMKRHGMMRARPNELLPGTLRVISVRMNYLPAKASFASTLNDAELGYISRYALGRDYHKLLRQRLKKLGEQIQNYCHDFEYQGVLNFRPFVDSAPVMERPLAAKAGLGWVGKHSLILNREAGSWFFLGELLINLPLPIDPPQEEQCGRCVACMTTCPTGAIIAPYTIDARRCISYLTIELEGIIPEEFRPLMGNRIYGCDDCQIICPWNRFSQLTDEDDFSPRVTLHTPKLLDLFNWSEEKFLRITEGSAIRRIGYLRWLRNIIVALGNAPYQYDIILALQQRLGLNTMLDEHIHWAIEQQIIRRKTNTVSVQTAQQKRLIRAITKGLPRDA

SEQ ID NO: 79489 - protein, 393 aa, Photorhabdus laumondii
  misc_feature (1)..(393): tr|Q7MYT6|Q7MYT6_PHOLL Epoxyqueuosine reductase OS=Phot orhabdus laumondii subsp. laumondii (strain DSM 15139 / CIP 105565 / TT01) OX=243265 GN=queG PE=3 SV=1
MQYKPISTMTTPLNLNLLAAKIKQWGHSLGFQQVGICDTDLSVEEPKLQEWLDKQYHGEMAWMKRHGMMRARPNELLPGTLRVISVRMNYLPAKASFASTLNDAELGYISRYALGRDYHKLLRQRLKKLGEQIQNYCHDFEYQGVLNFRPFVDSAPVMERPLAAKAGLGWVGKHSLILNREAGSWFFLGELLINLPLPIDPPQEEQCGRCVACMTTCPTGAIIAPYTIDARRCISYLTIELDGIIPEEFRPLMGNRIYGCDDCQIICPWNRFSQLTDEDDFSPRVTLHTPKLLDLFNWSEEKFLRITEGSAIRRIGYLRWLRNIIVALGNAPYQYDIILALQQRLGLNTMLDEHIHWAIEQQIIRRKTNTVSVQTAQQKRLIRAITKGLPRDA

SEQ ID NO: 79490 - protein, 385 aa, Photorhabdus luminescens
  misc_feature (1)..(385): tr|A0A2S8R5J4|A0A2S8R5J4_PHOLU Epoxyqueuosine reductase OS=Photorhabdus luminescens OX=29488 GN=queG PE=3 SV=1
MTTPLDLNLLAANIKQWGLSLGFQQIGICDTDLSVEETKLQEWLDKQYHGEMAWMKRHGMMRARPNELLPGTLRVISVRMNYLPAKASFASTLNDAELGYISRYALGRDYHKLLRQRLKKLGEQIQNYCHDFEYQGVLNFRPFVDSAPIMERPLAAKAGLGWVGKHSLILNREAGSWFFLGELLINLPLPIDLPQKEQCGRCIACMTTCPTGAIIAPYTIDARRCISYLTIELEGIIPEEFRPLMGNRIYGCDDCQIICPWNRFSQLTDEDDFSPRAILHTPKLLDLFNWSEEKFLRITEGSAIRRIGYLRWLRNITVALGNAPYQYDIVLALQQKLGLNTMLDEHIHWAIKQQIIRRKTNTINVQTPQQKRLIRAITKGLPRDA

SEQ ID NO: 79491 - protein, 385 aa, Photorhabdus luminescens
  misc_feature (1)..(385): tr|A0A5C4RJR0|A0A5C4RJR0_PHOLU Epoxyqueuosine reductase OS=Photorhabdus luminescens subsp. sonorensis OX=11736 77 GN=queG PE=3 SV=1
MTTPLDLNLLAANIKQWGLSLGFQQVGICDTDLSVEEPKLQEWLDKQYHGEMAWMKRHGMMRARPDELLPGTLRVISVRMNYLPAKASFASTLNDAELGYISRYALGRDYHKLLRQRLKKLGEQIQNYCHDFEYQGVLNFRPFVDSAPIMERPLAAKAGLGWVGKHSLILNREAGSWFFLGELLINLPLPIDLPQEEQCGRCVACMTTCPTGAIIAPYTIDARRCISYLTIELEGIIPEEFRPLMGNRIYGCDDCQTICPWNRFSQLTDEDDFSPRATLHTPKLLDLFNWNEEKFLRITEGSAIRRIGYLRWLRNITVALGNAPYQYDIILALQQKLGLSTMLDEHIHWAIEQQIIRRKTNTINVQTSQQKRLIRAITKGLPRDA

SEQ ID NO: 79492 - protein, 399 aa, Photorhabdus namnaonensis
  misc_feature (1)..(399): tr|A0A1B8YBP1|A0A1B8YBP1_9GAMM Epoxyqueuosine reductase OS=Photorhabdus namnaonensis OX=1851568 GN=queG PE=3 S V=1
MLHCDALQYKLISTMTTPLDLNLLAANIKQWGLSLGFQQVGICDTDLSVEETKLQEWLDKQYHGEMAWMKRHGMMRARPDELLPGTLRVISVRMNYLPAKASFASTLNDTELGYISRYALGRDYHKLLRQRLKKLGEQIQNYCHDFEYQGVLNFRPFVDSAPIMERPLAAKAGLGWVGKHSLILNREAGSWFFLGELLINLPLPIDPPQEEQCGRCVACMTTCPTGAIIAPYTIDARRCISYLTIELEGIIPEEFRPLMGNRIYGCDDCQIICPWNRFSQLTDEDDFSPRAILHTPKLLDLFNWSEEKFLRITEGSAIRRIGYLRWLRNITVALGNAPYQYDIVLALQQKLGLNTMLDEHIHWAIEQQIIRRKTNTINVQTPQQKRLIRAITKGLPRDA

SEQ ID NO: 79493 - protein, 385 aa, Photorhabdus sp.
  misc_feature (1)..(385): tr|A0A329X4Y7|A0A329X4Y7_9GAMM Epoxyqueuosine reductase OS=Photorhabdus sp. HUG-39 OX=2029680 GN=queG PE=3 SV= 1
MTTPLDLNLLVSNIKQWGHSLGFQQVGICDTDLSVEEPKLQEWLDKQYHGEMAWMKRHGMMRARPDELFPGTLRVISVRMNYLPAKASFASTLNDAELGYISRYALGRDYHKLLRQRLKKLGEQIQNYCHDFEYQGVLNFRPFVDSAPIMERPLAAKAGLGWVGKHSLILNREAGSWFFLGELLINLPLPIDPPQEEQCGRCVACMTTCPTGAIIAPYTIDARRCISYLTIELEGIIPEEFRPLMGNRIYGCDDCQIICPWNRFSQLTDEDDFSPRVTLHTPKLLDLFNWSEEKFLRITEGSAIRRIGYLRWLRNIIVALGNAPYQYDIILALQQRLGLNTMLDEHIHWAIEQQIIRRKTNIVSVQTPQQKRLIRAITKGLPRDA

SEQ ID NO: 79494 - protein, 385 aa, Photorhabdus sp.
  misc_feature (1)..(385): tr|A0A4R4J6G4|A0A4R4J6G4_9GAMM Epoxyqueuosine reductase OS=Photorhabdus sp. MEX47-22 OX=2100167 GN=queG PE=3 S V=1
MTTPLDLNLLAANIKQWGLSLGFQQIGICDTDLSVEEPKLQEWLDKQYHGEMAWMKRHDMMRARPDELLPGTLRVISVRMNYLPAKASFASTLNDAELGYISRYALGRDYHKLLRQRLKKLGEQIQNYCHDFEYRGALNFRPFVDSAPIMERPLAAKAGLGWVGKHSLILNREAGSWFFLGELLINLPLPIDLPQEEQCGRCVACMTTCPTGAIIAPYTIDARRCISYLTIELEGIIPEEFRPLMGNRIYGCDDCQTICPWNRFSQLTDEDDFSPRATLHTPKLLDLFNWNEEKFLRITEGSAIRRIGYLRWLRNITVALGNAPYQYNIILALQQKLGLNTMLDEHIHWAIEQQIIRRKTNTINVQTSQQKRLIRAITKGLPRDA

SEQ ID NO: 79495 - protein, 399 aa, Photorhabdus temperata
  misc_feature (1)..(399): tr|A0A4R7Q424|A0A4R7Q424_PHOTE Epoxyqueuosine reductase OS=Photorhabdus temperata OX=574560 GN=queG PE=3 SV=1
MLYCGSLQHKLISAMATSLDLNLLVTSIKQWGLSLGFQQVGICDIDLSAEEPKLQEWLDKQYHGEMAWMKRHGMMRARPNELLPGTLRVISVRMNYLPAKASFASTLSDSALGYISRYALGRDYHKLLRQRLKKLGEQIQDYCHDFEYQGILNFRPFVDSAPIMERPLAAKAGLGWVGKHSLILNREAGSWFFLGELLINLPLPVDTRQEEQCGRCVACMTTCPTGAIIAPYTIDARRCISYLTIELEGVIPEEFRPLMGNRIYGCDDCQIICPWNRFSQLTDEGDFSPRAALHTPELLDLFNWSEEKFLRITEGSAIRRIGHLRWLRNIAVALGNAPYQDNIVLSLQQKLGLNTMLDEHIHWAIDQQMTRRATNTVNVQTSQQKRLIRAITKGLPRDA

SEQ ID NO: 79496 - protein, 399 aa, Photorhabdus temperata
  misc_feature (1)..(399): tr|A0A081RVC7|A0A081RVC7_PHOTE Epoxyqueuosine reductase OS=Photorhabdus temperata subsp. temperata Meg1 OX=139 3735 GN=queG PE=3 SV=1
MLYCGSLQHKLISTMANSLDLNLLVTNIKQWGHSLGFQQVGICDIDLSAEEPKLQEWLDKQYHGEMAWMKRHGMMRARPNELLPGTLRVISVRMNYLPAKASFASTLSDSALGYISRYALGRDYHKLLRQRLKKLGEQIQDYCHDFEYQGILNFRPFVDSAPIMERPLAAKAGLGWVGKHSLILNREAGSWFFLGELLINLPLPVDTLQEEQCGRCVACITTCPTGAIIAPYTIDARRCISYLTIELEGVIPEEFRPLMGNRIYGCDDCQIICPWNRFSQLTDEGDFSPRATLHTPELLDLFNWSEEKFLRITEGSAIRRIGHLRWLRNIAVALGNAPYQDNIVLSLQQKLGLNTMLNEHIHWAIDQQMTRRATNTVNVQTSQQKRLIRAITKGLPRDA

SEQ ID NO: 79497 - protein, 385 aa, Photorhabdus thracensis
  misc_feature (1)..(385): tr|A0A0F7LV71|A0A0F7LV71_9GAMM Epoxyqueuosine reductase OS=Photorhabdus thracensis OX=230089 GN=queG PE=3 SV=1
MATSLDLNLLVTSIKQWGLSLGFQQVGICDIDLSAEEPKLQEWLDKQYHGEMAWMKRHGMMRTRPNELLPGTLRIISVRMNYLPAKASFASTLSDSTLGYISRYALGRDYHKLLRQRLKKLGEQIQDYCHDFEYQGILNFRPFVDSAPIMERPLAAKAGLGWVGKHSLILNREAGSWFFLGELLINLPLPVDTLQEEQCGRCVACMTTCPTGAIIAPYTIDARRCISYLTIELEGVIPEEFRPLMGNRIYGCDDCQIICPWNRFSQLTDEGDFSPRATLHTPELLDLFNWSEEKFLRITEGSAIRRIGHLRWLRNIAVALGNAPYQDNIVLSLQQKLGLNTMLDEHIHWAIDQQMTRRATNTVNVQTSQQKRLIRAITKGLPRDA

SEQ ID NO: 79498 - protein, 370 aa, Phreatobacter cathodiphilus
  misc_feature (1)..(370): tr|A0A2S0NI68|A0A2S0NI68_9PROT Epoxyqueuosine reductase OS=Phreatobacter cathodiphilus OX=1868589 GN=queG PE=3 SV=1
MSDPAALRAAITAQARAEGFDAVGFTRPDAIAEAGPRLAEAVEAGRHGSMAWMAETLERRSHPNAMWPEGRSLVMLGVNYGPDENPLDGLTDRDRGLVSVYARGNDYHEVIKARLKALARWLVEETGCELKVFVDTAPLMEKPLAAAAGLGWQGKHTNLVSRDFGSWLFLGAVMTTLDIPPDTPERDHCGSCTACLSACPTDAFPRPYALDARRCISYLTIEHQGPIPREFRAAMGNRIYGCDDCLAVCPWNKFAETGRNMKLAAREHLKRPSLAELAQLDDAAFRALFTKSPVKRIGRDRFVRNVLIAIGNSGDPALAPVAADRLADPAAVVRGAAIWALRRLDPARVPARPPAGESDPDVLAEWRQSP

SEQ ID NO: 79499 - protein, 324 aa, Phreatobacter oligotrophus
  misc_feature (1)..(324): tr|A0A2T4Z035|A0A2T4Z035_9PROT Epoxyqueuosine reductase OS=Phreatobacter oligotrophus OX=1122261 GN=C8P69_1071 04 PE=4 SV=1
MAWMAETAARRGDPRVLWPEGRSLVMLGVNYGPDENPLDGLSDRTAGLISVYARGDDYHEVIKARLKAVGRWLAEETGCELKVFVDTAPLMEKPLAAAAGLGWQGKHTNLVSRGFGSWLFLGAIMTTLDMAADAPERDHCGSCSACLDICPTAAFPRPYALDARRCLSYLTIENKGPIPREFRKAMGNRIYGCDDCLAACPWNKFAQEGQNMKLAAREHLKRPALADLARLDDAAFRALFTRSPVKRIGRDRFLRNVLVAIGNSGDRALADVAIDLLVDPSPLVRGAAVWALGELAPERLAGGPRPDETDPDVLAEWNAALSTP

SEQ ID NO: 79500 - protein, 368 aa, Phreatobacter sp.
  misc_feature (1)..(368): tr|A0A4D7QN06|A0A4D7QN06_9PROT Epoxyqueuosine reductase OS=Phreatobacter sp. NMCR1094 OX=2570229 GN=queG PE=3 SV=1
MSDGQALRDAIRDAARAEGFDLVAFTTPDAIPHAGPRLKAAVDAGHHGSMAWMEETLERRSSPQVLWPEGRSIIMLAMNYGPETNPLEGLADREAGLISVYAQGDDYHDVIKAKLKAVGRWLVDETGCAIKVFVDTAPLMEKPLAAAAGLGWQGRHTNMVSRSFGSWLFLGSIMTTLEIAPDQPERDHCGSCRACLDICPTAAFPAPYQLDARRCISYLTIENKGPIPQEFRKAIGNRIYGCDDCLAVCPWNKFAEAGRQAKLAARAALKRPRLADLVILDDAAFRALFSKSPVKRVGRDRFIRNVLIAIGNSSDVSLAEPAATLLDDPSPLVRGAAIWALRQIAPERLPAGPATSETDPDVLKEWTT

SEQ ID NO: 79501 - protein, 391 aa, Phreatobacter stygius
  misc_feature (1)..(391): tr|A0A4D7BHS9|A0A4D7BHS9_9PROT Epoxyqueuosine reductase OS=Phreatobacter stygius OX=1940610 GN=queG PE=3 SV=1
MPAAAGGSGGRHARERDLRRSRLLNDPPALRQAITDQARLQGFTAIGFTRPDAIPEAAPRLAEAIAEGFHGAMAWMEETVERRADPGVLWPAARSVIMLGLNYGPDENPLDGLADRSSGLLSVYARGDDYHDLVKSRLKALGRWLGDETGCELKVFVDTAPLMEKPLAAAAGLGWQGKHTNLVSRDFGSWLFLGSVMTTLEIDVDEPEHDRCGSCRACLDVCPTSAFPAPYRLDARRCISYLTIENKGPIPREFRKAMGNRIYGCDDCLAVCPWNKFAKQGHELKLAARDGLRRPALADLARLDDPGFRALFSKSPVKRIGRDRFIRNVLIAIGNSGDVELAAEAESLMADASALVRGAAVWALRELAPARLAALDRGAETDPDVLLEWAS

SEQ ID NO: 79502 - protein, 348 aa, Phycisphaera mikurensis
  misc_feature (1)..(348): tr|I0ID47|I0ID47_PHYMF Uncharacterized protein OS=Phyci sphaera mikurensis (strain NBRC 102666 / KCTC 22515 / F YK2301M01) OX=1142394 GN=PSMK_10260 PE=4 SV=1
MIETLDALAAKIGFGLWGVADAAPAPAEEAARSRAWFAAGRAGEMGWLADSAEARLGVEAVLPGARSVVIVADSYGNTQPAGGSADRPEVAARNGSVRGRIARYAWGRDYHRVLKKKLHRLGDGLAAAFPDAAFRACVDTAPLDERRYAEAAGLGWRGKNSLLIHPRHGSFVLLGALLTTLELPTSAARGFPGPLAEPTDRCANCTRCIDACPTGAIDAGGHAIDPRRCISYLTIERRSVDPPGAAPDTHGWLAGCDVCQDVCPFNAIGTRHPLPVPLDFAPRPHAAGLDPAEVAGWTRADRLAATAGTALIRIKLPMWKRNAEAAEASRAASSKAEDAADLRQSPKR

SEQ ID NO: 79503 - protein, 356 aa, Phycisphaera sp.
  misc_feature (1)..(356): tr|A0A2G1ZUJ2|A0A2G1ZUJ2_9BACT tRNA epoxyqueuosine(34) reductase QueG OS=Phycisphaera sp. OX=2030824 GN=queG P E=4 SV=1
  misc_feature (104)..(104): Xaa can be any naturally occurring amino acid
MDGETDPAEWILQRCKAEGFALPGVCDASPPTRGQEFGDWLALGKHGEMSYLADNADAWLDPNKVLDGAQSAVMVADLYAVRDGSADEASPGFGRVARYARGRXYHKEMKARLHKVCDACKERWPGEAFRAFVDTVPINEREFAARAGLGWVAKHTLIIHPRLGSWMLLGGFLTTMKLDAPSGQVVHEDHCGTCTRCIDACPTDAITPYSVDGSKCISYLTIEHRPGIDESLAGKMQDWVGGCDICQEVCPHNSQRPNADEQESNPAYSPKRTGFDLLGVLNWDAKVRQESLRDNALKRIKLDQFRRNAAIAAGNAMRERDLPELRDRLAEIASDEGEPDLVRQAARWAMACHRGP

SEQ ID NO: 79504 - protein, 372 aa, Phycisphaera sp.
  misc_feature (1)..(372): tr|A0A3R7SET3|A0A3R7SET3_9BACT tRNA epoxyqueuosine(34) reductase QueG OS=Phycisphaera sp. TMED9 OX=1986611 GN= queG PE=4 SV=1
MSIEGSVAASDPEALTRFVLTRCDELEFALAGVCDAFPTSHEEHVRAWIAAGHHGTMGYLERRIEERISPEIYVPGATSIIMVADRYHDGRRDRIDPASPPRGRIARYARGRDYHKVMKRRLVRLARELGELLPDHHFRPCVDTAPLLEREHAMRAGLGLVGKNTLLIEPGVGSWMLLGGVVSTARLVPTSPKTGRTDPCGTCSRCIDACPTDAITPFAVDATRCLAYSTIEHRGEIEPALETATGDWLFGCDICQEVCPHASRKKRREASSIHPDYVERHADFDLLEVLGWTDESRRTIIEGSAAKRAAIGMWKRNALICAGNVLSEHPEAPGHAALLGRIREISVDAEEDTAVRGTAVRVLSRLSSSNGS

SEQ ID NO: 79505 - protein, 350 aa, Phycisphaeraceae bacterium
  misc_feature (1)..(350): tr|A0A2D5Z9A4|A0A2D5Z9A4_9BACT tRNA epoxyqueuosine(34) reductase QueG OS=Phycisphaeraceae bacterium OX=2026777 GN=queG PE=4 SV=1
MGEQGVIESLAADLGFALVGVAPAAPTAYRDYVRRWLDRGNQGEMSYLERHAEQRLDPRVLVPGARSVVCVADRHQGGKADGPTETGGRIARYAWGDDYHRIIKRRLHRLADRMRSRWPDDQHRAAVDTAPILEREHALRAGMGWIGKHTLLIHPTLGSYLLLGEIVTTRDLAPAGAAMADHCGTCTRCIDACPTGCIEEEGYRMDASRCISYLTIEHRGPIDADLQAQMGDWVAGCDVCQEVCPYNQEDRVSLIPSNPSYDARFPAPAVPLLELLDWDADQRRAAFKGSALKRIKLDPLRRNALIAAGNHLARTDDPALRAKILAIAEDMAEPSMIRETARQVLGRLGE

SEQ ID NO: 79506 - protein, 419 aa, Phycisphaeraceae bacterium
  misc_feature (1)..(419): tr|A0A1Z9QA61|A0A1Z9QA61_9BACT tRNA epoxyqueuosine(34) reductase QueG OS=Phycisphaeraceae bacterium TMED231 OX =1986831 GN=CBD91_05335 PE=4 SV=1
  misc_feature (241)..(241): Xaa can be any naturally occurring amino acid
  misc_feature (243)..(243): Xaa can be any naturally occurring amino acid
  misc_feature (259)..(259): Xaa can be any naturally occurring amino acid
  misc_feature (286)..(286): Xaa can be any naturally occurring amino acid
  misc_feature (328)..(329): Xaa can be any naturally occurring amino acid
  misc_feature (331)..(331): Xaa can be any naturally occurring amino acid
  misc_feature (389)..(389): Xaa can be any naturally occurring amino acid
  misc_feature (394)..(395): Xaa can be any naturally occurring amino acid
  misc_feature (407)..(407): Xaa can be any naturally occurring amino acid
  misc_feature (410)..(411): Xaa can be any naturally occurring amino acid
  misc_feature (413)..(414): Xaa can be any naturally occurring amino acid
  misc_feature (418)..(419): Xaa can be any naturally occurring amino acid
MVRHRLARDDGGRDSQRVRRRGCDHGIGRAGGGRASRTPRTLGGPSVTTDAGRAGEDAVHLTEKVLESCRSLDFTLSGVCDASPTSHAEAVRAWISAGRHGSMEWMEGRLEERLDPGVYLPGAASMIVVADRYHDGRRDRVDPDGPARGRIARYARGRDYHKVLKGRLVKLARTLSAAHPEADFRPCVDTAPILEREHAMRAGLGLVGKNTLLIEPGHGSWLLLGAVVSTLRLEPTPSRHXGXDPCGTCTRCIDACPTXAITPFSVDASRCIAYTTIEHRGDIPPXLAASTGDWLFGCDVCQEVCPHSVRKQRRLPLPIHPDYAPRRXXLXLLDVLGWDEDARNTTLQGTAARRATLWMWKRNALVCAGNALVRSPGRPGADELRERIXSIAEXXQENAAVRETAAXVLXXLXXSDGXX

SEQ ID NO: 79507 - protein, 370 aa, Phycisphaerae bacterium
  misc_feature (1)..(370): tr|A0A2E5DYJ8|A0A2E5DYJ8_9BACT tRNA epoxyqueuosine(34) reductase QueG OS=Phycisphaerae bacterium OX=2026778 GN =queG PE=4 SV=1
MSSSPQRQPSRPILDCCREAGFPVHGIADATESPTAPALREWLDSGKHGEMKWMTENVPVRIDPRVLVSGARSVIVVADRYGGEPDDSSSSGRGRIARYARGRDYHRYMKKRLHQVADRLSQLHPGETFRACVDTAPVLEREVAAAAGLGASGKHTLLIQPGVGSWMLLGEIVTTLAIEPTTNSLDRPQDPCGTCTRCIDACPTDAITPWSVDARRCISYLTIEHRTSVDPSFHEGMGEWLFGCDICQEACPHNQPTQLTRNQVRDDQYKGRPRPGDESGASLDVLEVLGWTEDDRREAFISSSMKRAKLDMIRRNAVIVAGNLIRRGPAAELLSQLRQLAADAEEAPLVRDTAIEVLRQLDEASDATEG

SEQ ID NO: 79508 - protein, 302 aa, Phycisphaerae bacterium
  misc_feature (1)..(302): tr|A0A1U9NKZ2|A0A1U9NKZ2_9BACT Epoxyqueuosine reductase OS=Phycisphaerae bacterium ST-NAGAB-D1 OX=1936003 GN=q ueG PE=4 SV=1
MAFELGFDLVGFTTAEPVSEKHSARLRDWLASGHAGDMHYMGRNFDKRTNPRALLPNARSVICVGLNYRTTKNGKPGAFANYALYEDYHKFVKDRLYMLAVEIKERVSPDRFKFKVCVDTVPLAERAIAERAGLGFIGKNRMLINPRLGGQILLGELVSTLDLPADNPIKNKCDGCNHCVEACPTGALHIDGTLDASRCISYLSMEHKGDIDEQLAGKMDGQLFGCDRCMLACPFEKIAPIRHNSDIRYFPERCNITAEQVLHWDEKDFLKVLSDSPCDRAGLAGIKRNARIAMANRKHDEH

SEQ ID NO: 79509 - protein, 312 aa, Phycisphaerales bacterium
  misc_feature (1)..(312): tr|A0A3C0YP76|A0A3C0YP76_9BACT tRNA epoxyqueuosine(34) reductase QueG OS=Phycisphaerales bacterium OX=2052180 GN=queG PE=4 SV=1
MSVEENIKQKALSLGFDLVGITSAQDIDSTQKDQFNNWLQNGCNGQMEFLARNIDNRFKPSTVLPDAKSVICAAINYKIKPITEKNYLQIASYALYPDYHTFIKDKLSALADFLKSIDKDVKYKICVDSSAIAEKAIAMRAGIGFIGKNRLITNQKFGSFLLLGEIVTSFKLEPDAPIEKQDCGKCKKCIEACPTGALCENGFDARKCISYLTIEHKSEIAKELQSKIGKRLFGCEECLKACPYNEKSPICEKKQIGFEAKNVKLTAEEVLGWTEKEFNAFAQNSVIHRTGLERIKRNALICRELREPQQLP

SEQ ID NO: 79510 - protein, 383 aa, Phycisphaerales bacterium
  misc_feature (1)..(383): tr|A0A3C0EIT7|A0A3C0EIT7_9BACT tRNA epoxyqueuosine(34) reductase QueG OS=Phycisphaerales bacterium OX=2052180 GN=queG PE=4 SV=1
MPDSPQSPTQPADPQDFIKGLGEQFGFAMTGITPASISDHVDFLDQWLADGKQGEMDYLANHRDIRIDPDKLLPGAQSVICVADRYPHETDLPTDPPAGRIARYAWGDDYHKVLKKRLMHLADALRKHYPDEQFRVAVDTAPILEREHAKRAGLGWIGKHTLLIHPHLGSWFALGVIITTLDLPTSDDQTMPDHCGTCTRCIDACPTQCIEPYQLDASRCISYLTLEHRSLIAPDLHEQMGDWIAGCDICQEVCPHNPRKPRKPRNPRKPRPAKVESAYPEHHVRYTPRPPAPSLNLLDILNWTAADRQQAFIGSALKRMKLEMVKRNALIAAGNHLTNHDNPTLRQKLNEMATDQNESDLVRQTAKQVTQRLDAQQQQQQQQ

SEQ ID NO: 79511 - protein, 382 aa, Phyllobacteriaceae bacterium
  misc_feature (1)..(382): tr|A0A2E1XX15|A0A2E1XX15_9RHIZ Epoxyqueuosine reductase OS=Phyllobacteriaceae bacterium OX=1871068 GN=queG PE= 3 SV=1
MPDAPRDAAGRLTAFIRREALAAGFDAVAVTSPDSIPQAAGRLGEFLAAGRHGTMAWMAETAERRGTPGALWPEVRSVVMLAMNYGPEHDPLAVLSQGDRAAISVYAQNRDYHDIIKGRLKTIAGKLTARAGSDVKVFVDTAPVMEKPLAEAAGLGWQGKHTNLVSRAFGSWLFLGSIFTTAELEHDAPERDHCGSCRACLDICPTDAFPAPYQLDARRCISYLTIEHKGAIPHALRPAMGNRIYGCDDCLAVCPWNKFAQSAREAKLKARDDLTAPRLADLLALDDTAFRAMFSGSPVKRIGRDRFLRNVLIAAGNSGEPALAGAVVPLLDDAAPQVRAMAVWALARLGGRDRLRAMAERLAGDMDEDVRAEWALAMEGED

SEQ ID NO: 79512 - protein, 388 aa, Phyllobacteriaceae bacterium; identical to SEQ ID NO: 78925
  misc_feature (1)..(388): tr|A0A3A8ABM3|A0A3A8ABM3_9RHIZ Epoxyqueuosine reductase OS=Phyllobacteriaceae bacterium StC1 OX=2184161 GN=que G PE=3 SV=1

SEQ ID NO: 79513 - protein, 387 aa, Phyllobacterium bourgognense
  misc_feature (1)..(387): tr|A0A368YWD4|A0A368YWD4_9RHIZ Epoxyqueuosine reductase OS=Phyllobacterium bourgognense OX=314236 GN=queG PE=3 SV=1
MILHSETYKPSQAQRLKQFILEESRAAGFDLVAITRPDAIPFAEERLRQYLALGRHASMDWMQETEERRASPQNLWPEVRSIIVLAMNYGPDGNPMAILQHKDKAAISVYAQNRDYHDIIKGKLKGVASRFASRAADEDLKVFVDTAPVMEKPLAEAAGLGWQGKHTNLVSRSHGSWLFLGTIFTTAELPPDEREADHCGSCHACLDVCPTNAFPAPYQLDAGRCISYLTIEHKEPIPLEFRKAMGNRIYGCDDCLAVCPWNKFAETARETKLQAREDLKSPSLASLLMLDDAAFRTMFSGSPIKRIGRDRFIRNVLIASGNSGDPGLIETVKTHLADPSPLVRGAAVWALSELMDEDGFAALRMHGAAKENDASVLTEWHKAAKNQ

SEQ ID NO: 79514 - protein, 391 aa, Phyllobacterium brassicacearum
  misc_feature (1)..(391): tr|A0A2P7BJP8|A0A2P7BJP8_9RHIZ Epoxyqueuosine reductase OS=Phyllobacterium brassicacearum OX=314235 GN=queG PE =3 SV=1
MLGAGAHNASRSPSNAQRLKQFILEESRAAGFDLVAITRPDAIPLAEERLRQYLALGRHASMEWMQQTKERRANPEVLWPEVRSIIVLAMNYGPDSDPLDILAQKDKAAISVYAQNRDYHDIIKGKLKGVASRFASRAAGENLKVFVDTAPVMEKPLAEAAGLGWQGKHTNLVSRSHGSWLFLGTIFTTAELPADERESDHCGSCHACLDICPTSAFPAPYQLDARRCISYLTIEHKGPIALEFRKAMGNRIYGCDDCLAVCPWNKFAGTAREAKLQARDDLRSPSLASLLTLDDATFRTLFTGSPVKRIGRDRFIRNVLIACGNSGEPALVAAIETHLADPSPLVRGAAVWALGELMGRDDFAALKLRHIAQESDADVLTEWRIAVKNQQ

SEQ ID NO: 79515 - protein, 380 aa, Phyllobacterium endophyticum
  misc_feature (1)..(380): tr|A0A2P7AZG6|A0A2P7AZG6_9RHIZ Epoxyqueuosine reductase OS=Phyllobacterium endophyticum OX=1149773 GN=queG PE= 3 SV=1
MNLDQQQRLKQFILAESRAAGFDVVAVTRPDAIPLAEERLRRYLALGRHASMEWMLETEQRRANPENLWPDVRSIIVLAMNYGPEGDPLTILKQKDRAAISVYAQNRDYHDIIKGKLKGIAGRFVSRAAGEDVKVFVDTAPVMEKPLAEAAGLGWQGKHTNLVSRNHGSWLFLGTIFTTAELPADERESDHCGSCQACLDICPTNAFPAPYQLDARRCISYLTIEHKGPIPPEFRQSMGNRIYGCDDCLAVCPWNKFAKAAHETKLRARDDLKSPSLASLLTLDDAAFRALFAGSPVKRIGRTRFLRNVLIASGNSGESGLIGPIEYHLADPSPLVRGAAVWALGQLMERTRFATLAIHHAVKENDADVLTEWHNAAKYR

SEQ ID NO: 79516 - protein, 392 aa, Phyllobacterium leguminum
  misc_feature (1)..(392): tr|A0A318T1K3|A0A318T1K3_9RHIZ Epoxyqueuosine reductase OS=Phyllobacterium leguminum OX=314237 GN=queG PE=3 SV =1
MPAGQRGALSRRRIRFKMGHTRSEKLKRFLIEEAKSVGFDAVAFTTPDAIPEAGARLREYLAQGNHGTMEWMEETAERRGDPRALWPEVRSIIMLAMNYGPERDPRAVLTRKDRAAISVYAQNRDYHDIIKGKLKHIASRFAARAGSDVKVFVDTAPVMEKPLAEAAGIGWQGKHTNLVSREFGSWLFLGSIFTTAEIAPDEAEADHCGSCRACLDICPTQAFPAPYRLDARRCISYLTIENKGPIPHEFRKAIGNRIYGCDDCLAVCPWNKFAQLASEMKLKARDDLKAPRLADLLALDDAAFRAFFSGSPVKRIGRDRFLRNVLIAAGNSEDGDLLAPVEQLLADPSPLVRGAAVWALGQLAGPEHVAGWRKRLGTQEKDVTVQAEWEAN

SEQ ID NO: 79517 - protein, 392 aa, Phyllobacterium myrsinacearum
  misc_feature (1)..(392): tr|A0A2S9JIX8|A0A2S9JIX8_9RHIZ Epoxyqueuosine reductase OS=Phyllobacterium myrsinacearum OX=28101 GN=queG PE=3 SV=1
MLPADAKAATRSGPKAQPHRLKEFIMEEARAAGFDLVAITRPDAIPLAEERLRHYLEKGRHASMAWMAETAERRANPQTLWPDVRSIIVLAMNYGPDSNPLEILARKDKAAISVYAQNRDYHDIIKGKLKGVASRFASRAAGENVKVFVDTAPVMEKPLAEAAGLGWQGKHTNLVSRSHGSWLFLGTIFTTAELEPDGREADHCGSCRACLDICPTNAFPAPYQLDARRCISYLTIEHKEPIAPEFRKAMGNRIYGCDDCLAVCPWNKFAATAREARLQARDDLKAPDLATFLALDDAAFRTLFSGSPVKRIGRDRFLRNVLIASGNSGQPDLVALVERHLDDPAPIVRGAAVWALGELVDAAHFATLQIRYAAQENDPGVLTEWRNAGKKQ

SEQ ID NO: 79518 - protein, 384 aa, Phyllobacterium salinisoli
  misc_feature (1)..(384): tr|A0A368K855|A0A368K855_9RHIZ Epoxyqueuosine reductase OS=Phyllobacterium salinisoli OX=1899321 GN=queG PE=3 SV=1
MATSISEAQAARLKRFLAEEAKAEGFDIMAVTTPDAIPQAGARLRQYLASGHHGTMQWLEETLERRADPRVLWPEVRSVIMLAMNYGPESDPLPVLARRDRAAISVYAQNRDYHDIIKGKLKQIASRFAARAGSDVKVFVDTAPVMEKPLAEAAGIGWQGKHTNLVSRSHGSWLFLGSIFTTAEIAPDRPETDHCGSCRACLDICPTSAFPAPYQLDARRCISYLTIEHKGPIAPEFRKAMGNRIYGCDDCLAVCPWNKFAEAAHETKLKARDDLKAPRLETLLALDDTAFRALFSGSPVKRIGRDRFLRNVLIAAGNSGDAGLLPHVERLLGDPSPVVRGAAIWALSQLSEPRIFGEWRKKLTASERDVTVIDEWRMADCIIS

SEQ ID NO: 79519 - protein, 392 aa, Phyllobacterium sophorae
  misc_feature (1)..(392): tr|A0A2P7BL56|A0A2P7BL56_9RHIZ Epoxyqueuosine reductase OS=Phyllobacterium sophorae OX=1520277 GN=queG PE=3 SV =1
MRMTGQSKTQSIKQSQQQRLKQFILEESRAAGFDLVAITRPDAIPLAEARLRKYLALGRHASMQWMQETEQRRANPQALWPQVRSIIVLAMNYGPDSDPLDILAQKDKAAISVYAQNRDYHDIIKGKLKGVASRFAARAAGEDLKVFVDTAPVMEKPLAEAAGLGWQGKHTNLVSRSHGSWLFLGTIFTTAEMPADSPEVDHCGSCRACLDICPTSAFPAPYQLDARRCISYLTIEHKEPIAHEFRKAMGNRIYGCDDCLAVCPWNKFAETAREAKLQARDDLRSPSLASLLILDDAAFRALFSGSPIKRIGRDRFMRNVLIACGNSGEPGLVEAVEPHLSDPSPLVRGAAVWALSELMDQDRFSVLQMRRAAQESDADVLTEWRIAVKNHS

SEQ ID NO: 79520 - protein, 388 aa, Phyllobacterium sp.
  misc_feature (1)..(388): tr|A0A2S9IRY6|A0A2S9IRY6_9RHIZ Epoxyqueuosine reductase OS=Phyllobacterium sp. 1N-3 OX=2100534 GN=queG PE=3 SV =1
MAISISDTGAAKLKRFLAEEAKAEGFDIMAVTTPDAIPQAGARLRQYLAQGHHGTMVWLEETAERRADPRALWPEVRSVIMLAMNYGPQSDPLPVLSAKDRAAISVYAQNRDYHDVIKGKLKQIAGRLAARAGSDVKVFVDTAPVMEKPLAEAAGIGWQGKHTNLVSRSHGSWLFLGSIFTTAEIMPDMPETDHCGSCRACLDICPTDAFPAPYRLDARRCISYLTIEHKGPIAPEFRKAMGNRIYGCDDCLAVCPWNKFAEEAHETKLKARDDLKAPPLETLLALDDAAFRAFFSGSPVKRIGRDRFLRNVLIAAGNSDDAGLLARVEQLLCDPSPLVRGAATWALSQLSEPKYFRKLRKKLTASERDDTVLAEWWLAYQQETGEER

SEQ ID NO: 79521 - protein, 380 aa, Phyllobacterium sp.
  misc_feature (1)..(380): tr|A0A1H0RZS0|A0A1H0RZS0_9RHIZ Epoxyqueuosine reductase OS=Phyllobacterium sp. YR620 OX=1881066 GN=queG PE=3 S V=1
MRAGQPDKLKQFIIDEARAHGFDLVAVTRPDAIPQAEERLRQYLALGRHATMDWMEETALRRARPDALWPEVRSVIVLAMNYGPDSNPLELLKERDKAAISVYAQNRDYHDIIKGKLKGIASRFVARAAGADVKVFVDTAPVMEKPLAEAAGIGWQGKHTNLVSRSHGSWLFLGTIFTTAELPADEPDSDHCGSCRACLDACPTQAFPAPYQLDARRCISYLTIEHKGPIAPEFRKAMGNRIYGCDDCLAVCPWNKFAESAREAKLKAREDLKSPGLGSLLGLDDAAFRELFTGSPIKRIGRDRFIRNVLIASGNSGRSELIERVEAHLADPSPLVRGAAVWALGELSEPGPLSALRMRHAAHENDLDVLTEWRNAVKNQ

SEQ ID NO: 79522 - protein, 392 aa, Phyllobacterium zundukense
  misc_feature (1)..(392): tr|A0A2N9VTB4|A0A2N9VTB4_9RHIZ Epoxyqueuosine reductase OS=Phyllobacterium zundukense OX=1867719 GN=queG PE=3 SV=1
MQMIGQSKTQSIEQSQQQRLKQFILEESRAAGFELVAITRPDAIPLAEERLRQYLALGRHASMDWMQETEERRASPQALWPQVRSIIVLAMNYGPDSDPLAVLSQRDKAAISVYAQNRDYHDIIKGKLKGVASRFASRAAGEDLKVFVDTAPVMEKPLAEAAGLGWQGKHTNLVSRSHGSWLFLGTIFTTAELPADSPEADHCGSCRACLDVCPTNAFPAPYQLDARRCISYLTIEHKEPIAFEFRKAMGNRIYGCDDCLAVCPWNKFAETARETKLQARDDLRSPSLASLLTLDDAAFRTLFSGSPIKRIGRDRFLRNVLIACGNSGETALIDAVQNHLSDPSPLVRGAAIWALSELMDQDRFAALHMRYAAQENHADVLTEWRNAVKNQS

SEQ ID NO: 79523 - protein, 379 aa, Phytobacter diazotrophicus; identical to SEQ ID NO: 77102
  misc_feature (1)..(379): tr|A0A4R4AXT7|A0A4R4AXT7_9GAMM Epoxyqueuosine reductase OS=Phytobacter diazotrophicus OX=395631 GN=queG PE=3 S V=1

SEQ ID NO: 79524 - protein, 379 aa, Phytobacter ursingii
  misc_feature (1)..(379): tr|A0A0G3QDP3|A0A0G3QDP3_9GAMM Epoxyqueuosine reductase OS=Phytobacter ursingii OX=1972431 GN=queG PE=3 SV=1
MSEPLDLNQLAHSIKQWGTELGFQQVGIADTDLSASEPKLQAWLDKQYHGEMEWMARHGMMRARPHELLPGTLRVISVRMNYLPANAAFASTLKNPTLGYVSRYALGRDYHKLLRNRLKQLGEKIQQHCASLNFRPFVDSAPILERPLAEKAGLGWVGKHSLILNRHAGSFFFLGELLIDLPLPVDQPIEENCGRCVACLTICPTGAIVEPYTVDARRCISYLTIELEGAIPEEFRPLIGNRIYGCDDCQLICPWNRFSQLTDEADFSPRKALHAPELIELFAWSESWFLKVTEGSAIRRIGHLRWLRNIAVALGNAPWDEANIRALEQRRGEHPLLDEHIEWAIAQQVEKRNACVVEVQTPKKQRLVRVIEKGLMRDA

SEQ ID NO: 79525 - protein, 379 aa, Phytobacter ursingii
  misc_feature (1)..(379): tr|A0A508UF94|A0A508UF94_9GAMM Epoxyqueuosine reductase OS=Phytobacter ursingii OX=1972431 GN=queG PE=3 SV=1
MSEPLDLNQLAHSIKQWGTELGFQQVGIADTDLSASEPKLQAWLDKQYHGEMEWMARHGMMRTRPHELLPGTLRVISVRMNYLPANAAFASTLKNPTLGYVSRYALGRDYHKLLRNRLKQLGEKIQQHCASLNFRPFVDSAPILERPLAEKAGLGWVGKHSLILNRHAGSFFFLGELLIDLPLPVDQPVEENCGRCVACLTICPTGAIVEPYTVDARRCISYLTIELEGAIPEEFRPLIGNRIYGCDDCQLICPWNRFSQLTDEADFSPRKALHAPELIELFAWSESWFLKVTEGSAIRRIGHLRWLRNIAVALGNAPWDEANIRALEQRRGEHPLLDEHIEWAIAQQVEKRNACVVEVQTPKKQRLVRVIEKGLMRDA

SEQ ID NO: 79526 - protein, 397 aa, Pigmentiphaga aceris
  misc_feature (1)..(397): tr|A0A5C0B001|A0A5C0B001_9BURK Epoxyqueuosine reductase OS=Pigmentiphaga aceris OX=1940612 GN=queG PE=3 SV=1
MSVQVVSLPIPVSAAASRSGADAYASSSVESCVPTPSLSPAQTTQLVADIRRWGEELGFGAVGFADLDLHDAGERMKQWLAQGMHGDMEYLERNMALRQDPSQMVPHARSAIMVRMQYAPASGPEITRHQQEGLASGERAVVANYALGRDYHKVLRQRLQKLADRVVASIGPFGYRVFTDSAPIMEVELARKAGLGWRGKHTLLLSREGSWFFLGEILTDLVLPPDPPAEPHCGGCRRCIVACPTQAIVAPYVLDARRCVSYLTIELAGSIPEPLRPLIGTRIYGCDDCQTACPWNKFAQAGDEPDFAPRQQLDASRMVDLFAWTQTEFETRTAGSAIRRIGHERWLRNLAVGLGNAKSSAEVRKALLSRAGHDSELVREHVAWALAQHETKVQPAV

SEQ ID NO: 79527 - protein, 379 aa, Pigmentiphaga kullae
  misc_feature (1)..(379): tr|A0A4Q7N8N5|A0A4Q7N8N5_9BURK Epoxyqueuosine reductase OS=Pigmentiphaga kullae OX=151784 GN=queG PE=3 SV=1
MGMGYHDSMSASPPFAPVSTQDGPDLAALAETIRGWGRELGFSAVGFADLDLDEAGQRLAAWVAEGMHGEMDYMERHLPLRQDPAQLVSGARSAIMVRMDYAPLDGPALAARQRQALEAGDRAVVAAYALGRDYHKVLRQRLQRLADRIAEHAGPFGYRVFTDSAPVMEVELARKAGLGWRGKHTLLLSRDGSWFFLGEILTDLPLPADSLETPHCGQCRRCIDACPTGAIVAPYVVDARRCISYLTIELKGSIPEALRPAIGTRVYGCDDCQTACPWNKYARASAEGDFAPRHGLDAASLLDLFAWSERDFDERTQGSAIRRIGYERWLRNLAVALGNAPPSDEARAALRARADHPAELVREHVRWALERQSRGKREV

SEQ ID NO: 79528 - protein, 379 aa, Pigmentiphaga sp.
  misc_feature (1)..(379): tr|A0A3G8GNT4|A0A3G8GNT4_9BURK Epoxyqueuosine reductase OS=Pigmentiphaga sp. H8 OX=2488560 GN=queG PE=3 SV=1
MGMGYHDSMSASPPFTPVSTQDGPDLAALAETIRGWGRELGFSAVGFADLDLDEAGQRLAAWVAEGMHGEMDYMERHLPLRQDPAQLVSGARSAIMVRMDYAPLDGPALAARQRQALEAGDRAVVAAYALGRDYHKVLRQRLQRLADRIAQHAGPFGYRVFTDSAPVMEVELARKAGLGWRGKHTLLLSRDGSWFFLGEILTDLPLPADHLETPHCGQCRRCIDACPTGAIVAPYVVDARRCISYLTIELKGSIPEALRPAIGTRVYGCDDCQTACPWNKYARACAEGDFAPRHGLDTASLLDLFAWTERDFDQRTQGSAIRRIGYERWLRNLAVALGNAPASDEARAALRERADHPSELVREHVRWALACQGRGKREV

SEQ ID NO: 79529 - protein, 369 aa, Pigmentiphaga sp.
  misc_feature (1)..(369): tr|A0A208XK76|A0A208XK76_9BURK Epoxyqueuosine reductase OS=Pigmentiphaga sp. NML080357 OX=2008675 GN=queG PE=3 SV=1
MSALPPNAPVSSSSGLDLAGLVESVRQWGRELGFSAVGVADLDLAEAGERLAAWVGEGMHGEMDYMERHLPLRRDPAQLVPNARSAIMVRMDYAPLDGPALAARQRSALADGATAVVASYALGRDYHKVLRQRLQRLADRIAGHIGPFGYRVFTDSAPIMEVELARKAGIGWRGKHTLLLSRDGSWFFLGEILTDLPLPADRLETPRCGQCRRCIDACPTGAIVAPYLLDARRCISYLTIELKGSIPEALRPAIGTHVYGCDDCQTACPWNKYARASDIPDFAPRHGLEAASLLELFAWTEADFDERTQGSAIRRIGYERWLRNVAVALGNAPPSEAVRAALRERVDHPSELVREHVRWALERQRAADD

SEQ ID NO: 79530 - protein, 377 aa, Pirellula sp.
  misc_feature (1)..(377): tr|A0A142Y341|A0A142Y341_9PLAN Epoxyqueuosine reductase OS=Pirellula sp. SH-Sr6A OX=1632865 GN=queG PE=4 SV=1
MKPMRDELEALAASAGFPLFGIANARESESFSNLRSWIEQGYHGTMHYLDDRLDAYRHPRSVLENCRSIVMLGMPYASHPDTRRRKHPAPTTPPTDLLGATNCSELRELPTGLDARIGNYAMGEVDYHDFIRSRLNTIVKKMEASAPGSKWRGVVDTAPLLERDYARLAGLGWIGKNTLLLHREWGSYFFLAALLTDLELPTDEPMQTNHCGSCRACLDVCPTHAFVEPHVLDASRCISYLTIEHRGPIEPTLRESMGNWIFGCDLCQIVCPWNRKRIDDHLPEFHPIHQESRNSLRHWLSLDEESFRQLYRTTPFWRTKLRGMQRNALIAAGNGNRSDLIDLIERHAQSEDPVVSDAAQWARNRITDPMPPPARNG

SEQ ID NO: 79531 - protein, 388 aa, Pirellula staleyi
  misc_feature (1)..(388): tr|D2R4T2|D2R4T2_PIRSD 4Fe-4S ferredoxin-type domain-co ntaining protein OS=Pirellula staleyi (strain ATCC 2737 7 / DSM 6068 / ICPB 4128) OX=530564 GN=Psta_2479 PE=4 S V=1
MSDERDQLTSQLKAEAQRLGFALVGVAPAISPAGFTHLREWIARGYAGEMQYLEKRLEAYAHPRHVLDGVQSVVMLAMHYRTAEPREVVPGTGRISRYAWGDGDYHDIIRERLDNLADWLQEKRASAAVRGVVDTAPLLERELASVAGLGWTGKHTLLINRQAGSYFFLAALLTSEELTTDQPHERDFCGSCTACLEACPTQAFPQAGVLDASRCISYLTIELKGQIPRELRSGLQNWIFGCDVCQDVCPWNRFSPVATEIVFQPREGENPADLLALIALDDAAFRTQFRGTPLWRTKRRGIVRNACVVLGNQRETRAVPQLIQLLRDPEAIIRGAAAWAVGEMASQLESDLARQALAEQLTREEDPEVREELEWALSRFSPSARSEA

SEQ ID NO: 79532 - protein, 379 aa, Piscibacillus halophilus
  misc_feature (1)..(379): tr|A0A1H9LIH1|A0A1H9LIH1_9BACI Epoxyqueuosine reductase OS=Piscibacillus halophilus OX=571933 GN=queG PE=3 SV= 1
MEINQLKQELIEYSKEIGVQKIGFTSTDTFETLKQRLMVQQSLSFHSGFEKGTIEERTTPTKLMPKAQSIISIALAYPSRMKDAPKSRKGDRRGIFARASWGKDYHDVLREKLNLIGEFLQKKLDGVACKAMVDTGELSDRAVAKRAGVGFVGKNCSLITEEYGSWVYLGELITNVPFEPDEPIEEGCGDCNICVDACPTGALVQGGQLNAQRCVAYQTITKSFLPDEFREKLGNRLYGCDTCQIVCPKNKGKDFHLHPEMEPDPELAKPKLIPLLKMSNREFKEKFGYMSGSWRGKKPIQRNAIVALAHYKDETALDTLEELMHKDPRPVIRGTAAWAIGKIGRQDAYEMIEKAMEKESDEDVLFEMEKGLEFLTQKI

SEQ ID NO: 79533 - protein, 389 aa, Pisciglobus halotolerans
  misc_feature (1)..(389): tr|A0A1I3CE13|A0A1I3CE13_9LACT Epoxyqueuosine reductase OS=Pisciglobus halotolerans OX=745365 GN=SAMN04489868_ 1179 PE=4 SV=1
MSTGAALKERIIAESKKIGIDKIGFTTAEPFEGLEERLHAQQEKGHHSGFEHKVIEERVYPELIFDEPKSIIAIALAYPTKIANKPPREKGVRRGEFARASWGTDYHDILREKMDRLIEYIREEAAEEVTFKPMVDTGELVDVAVAQRAGLGFIGRNGLLITEEFGSYVYLGEIITNLSFPADEPVPFGCGDCTRCIDACPTGALLGDGRMNAQLCLSYQTQTKGMMDEKFRRKIGHVIYGCDICQIVCPYNKGKDFHFHKEMEPDPEAVMPKLKPLLTISNREFKEKFGHMAGSWRGKKPLQRNAIIALGNSRDKSALPDLLQCVEKDIRPVIRGTAAWSISKIVTSRDEMVVEFLEEALEKETDKEASQEMTKAIETIRNKNEKRRR

SEQ ID NO: 79534 - protein, 355 aa, Piscirickettsiaceae bacterium
  misc_feature (1)..(355): tr|A0A2A4WL85|A0A2A4WL85_9GAMM Epoxyqueuosine reductase OS=Piscirickettsiaceae bacterium OX=2030828 GN=queG PE =3 SV=1
  misc_feature (162)..(162): Xaa can be any naturally occurring amino acid
MNANSTDFHQLAEDIKAYGKSLGFQQVGITDTELSEAEQQLSEWLDAGYHGDMSYMHKHGSKRTRPNELIPGTIRVISCRMDYLPETMQQTNKLMSNPAQAYISRYALGRDYHKVIRKKLQKLASHIEQSVGDFGYRAFVDSAPVMEKALAEKAGLGWIGKXSNLLNKQAGSWFFLGELYTDLPLPIDSPSTKHCGECTDCIDICPTQAIIAPYTVDARRCISYLTIELQGSIPEDLRPLMGNHIYGCDDCQQACPWNRFSQLTDENDFLARQQLDTATLIDLFNWHEEEFLTKTEGSAIRRIGYISWIRNIAIALGNAPFSPNITTTLAHKKAHPSPIIQEHVQWAMMQHEKKA

SEQ ID NO: 79535 - protein, 412 aa, Piscirickettsiaceae bacterium
  misc_feature (1)..(412): tr|A0A2M7M9M7|A0A2M7M9M7_9GAMM Epoxyqueuosine reductase OS=Piscirickettsiaceae bacterium CG_4_10_14_3_um_filte r_44_349 OX=1974075 GN=queG PE=3 SV=1
MLVDNHALYQLTEQIKQWGQSLGFADIGISNTDLSHYEPFFEDWLSHQYHGSMDYMAKHGRKRSRPDELEPGTLSLISVRMNYFDGEAYSAISQLQSSNKAYISRYALHKDYHKLMRKRLAQLAQKIETAIATLNPQSDESFRYRAFCDSAPVLERPIAEKAGLGFIGKNSLLIHPRAGSWFFLGELYINLKLPADPPFTQQGCGPCTACMDECPTQAIVDNAVVDARRCISYLTIEYDGVIEESLRPLIGNRIYGCDDCQLVCPWNRFTEPTQEQAFKAKAPLDEVDLLTLLHWDEAQFLTEMAGSPIRRIGYVKWLRNLCIAIGNDVYRAENINALNALQIDSDMVNTHRLWALNVQKQKQKTSSKTTRPGRFSTPNRPAVVAKYYLPKSGSASPINAVPIHQIRSKIEP

SEQ ID NO: 79536 - protein, 366 aa, Pistricoccus aurantiacus
  misc_feature (1)..(366): tr|A0A5B8T0J9|A0A5B8T0J9_9GAMM Epoxyqueuosine reductase OS=Pistricoccus aurantiacus OX=1883414 GN=queG PE=3 SV =1
MTSSPSLNSDTLCDLAERLKIWGRELGFQQLGITDTDLATHERYLERWLAAGHQGEMGFMAKHGTKRTRPEELVPGTLRVISVRMDYLPAEVETTKVLSQPDKAYVSRYALGRDYHKLMRKRLDQLAKRLEKEVGHFGYRAFVDSAPVMERALAQKAGLGWFGKNAMLLNPQAGSLFFLGELYTDLPLPVDAPFATEHCGRCSACRSACPTGAIVDDKIVDSRRCISYLTIELHGAIPEQYREAMGNRIYGCDDCQLVCPFTRFTRVSEEEDFAPRHDLDQAELLRLFAWSEEEFLHKTAGSAIRRIGYERWLRNLAVGLGNAPWSAALEAALKARLAYPSDLVREHVRWALARQSEKRGALIHVA

SEQ ID NO: 79537 - protein, 347 aa, Planctomicrobium piriforme
  misc_feature (1)..(347): tr|A0A1I3CY77|A0A1I3CY77_9PLAN Epoxyqueuosine reductase OS=Planctomicrobium piriforme OX=1576369 GN=SAMN054217 53_10312 PE=4 SV=1
MNPTHDLSALLKERGRELGFSLIGITPAARPETLDQFRDWLQQGFHGEMGYMARREEAYADPSGVMVGVKSVIVAAMNYGPGRATPPGSGRIAAYAQGAADYHDVLRERLKELAAVLHEARPGTKTRIAVDTAPLLERDLARRAGLGWFGKNTLLINKWEGSYFFLGGILTDCELPADAPHETSHCGTCTRCLEACPTQAFVGPHVLDARRCISYLTIELRGEPIPIELRPGMEDWMFGCDVCQQVCPWNRKATPSDEPAFLPAEITNLTSTQFLNLTEEEFSERFAATPLSRPGYINMARNAAIVLGNLQRRDALPELNKALWSPHEVVRDAAIWAIGQIEAASSE

SEQ ID NO: 79538 - protein, 336 aa, Planctomyces sp.
  misc_feature (1)..(336): tr|A0A2E8EYT1|A0A2E8EYT1_9PLAN 4Fe-4S ferredoxin-type d omain-containing protein OS=Planctomyces sp. OX=37635 G N=CMJ45_04745 PE=4 SV=1
MSLDEEPMKMDINDARRPKRRRTAGPVTETPETVLRNQQYTTEARRFQWIQREILAPKREGQVNETRVDVTDTAALTQQVKEFAKELGADIVGVAEYDPRFTFTDSDVLGHTRVIAFGFAMQYDVISDLGADSQTEVHRVYYRMYDISVTLAQYIGSMGYSARAHPNGGELAHVPYAYLAGLGELGKHGSLISPVLGSSFRLGLVSTDLPLDIDGPQDYGIDDTCARCTVCTRFCPGEAIHEEKQMVNGVERWHVDTGACEPYFLQLWGCKICLMVCPYNGRGLFKESYKGPGRDVARTKNSDGLLGLFASRTAEASQNPLLMAIHKKNVEEGGET

SEQ ID NO: 79539 - protein, 371 aa, Planctomyces sp.
  misc_feature (1)..(371): tr|A0A142YE11|A0A142YE11_9PLAN Epoxyqueuosine reductase OS=Planctomyces sp. SH-PL62 OX=1636152 GN=queG PE=3 SV =1
MHPRDLSRRLKEQAIALGFDRAGIAPAVRPPDYDRFRDWLDSGFDAGMTYLRKHADARAHPDSVLEGVRSVLMVSLVYGEGPSGPPRPTSGKIARYARGDDYHHVVRARLEALIEWLRAEAPGVSARAVVDTAPLLERDFARLAGLGWIGKNTLLIDRKLGSFTFLGALLVDVDLEPDAPHETSHCGTCTRCLDACPTDAFDGPHRLDARKCISYWTIEHVGPIPEPAGSNLDGWVFGCDVCQDVCPWNRKAPPGLIPELAPRPEWDAPDLLEWLGRSKGDWKRALRGSAMQRTRRNGLLRNAAMAMGVEGRLDAVPALAGRLADRGEDSAVRAAAAWALGRLATPEARAALDAHRHDDDPAVREAVAGAG

SEQ ID NO: 79540 - protein, 370 aa, Planctomycetaceae bacterium
  misc_feature (1)..(370): tr|A0A2E7ETE3|A0A2E7ETE3_9PLAN tRNA epoxyqueuosine(34) reductase QueG OS=Planctomycetaceae bacterium OX=202677 9 GN=queG PE=4 SV=1
MSLTTDLKTEAQRHGFDLVGACPAVTPTGIHRFYEWISSGYSGEMSYISGRAKAYEHPANVLAGVRSLLMLSMNYRTSDVSPTPDTTGRVSRYAWGGLDYHDVIHARLKKLVQFLKNRAPAAEARGVVDTAPLLEREYAQMAGLGWTGKNTLLINPRRGSWFFLAAILTTEELEYDDPFDMDHCGNCTACLDACPTDAFPQPYVLEATRCISYLTIELRESIPTDLRRSINNWVYGCDICQEVCPWNRRAPQSSLEEFEPRLDLSPLNLLSLFSLTDDEFRLLFRKTPLWRSKRRGLLRNAAIVLGNQRTEAAIDALTKGLNDAESIVRSACVWALGEIGTPKAIARLQRLQAEADEEVRREIEQALAAQ

SEQ ID NO: 79541 - protein, 393 aa, Planctomycetaceae bacterium
  misc_feature (1)..(393): tr|A0A1Z9EZJ4|A0A1Z9EZJ4_9PLAN tRNA epoxyqueuosine(34) reductase QueG OS=Planctomycetaceae bacterium TMED138 O X=1986834 GN=CBC98_00260 PE=4 SV=1
  misc_feature (3)..(4): Xaa can be any naturally occurring amino acid
  misc_feature (8)..(8): Xaa can be any naturally occurring amino acid
  misc_feature (15)..(15): Xaa can be any naturally occurring amino acid
  misc_feature (390)..(390): Xaa can be any naturally occurring amino acid
MPXXISNXDKGVVDXLQQEAHRLGFSRLGITSAEPPPRQDRFAQWLDQGFAGVMENWLRRHLPLRSSPESLLPGTQSVIMLATDYDAKTVASRESPNHGQIARYAVGRDYHDVLRSRLNHLGGWLEHAIPGCKTRGVVDSAPLAEREFAARAGLGWFGKNTMLIDQGAGSYFFLSGLLATVALPTHQPIEVDHCGTCTACLDICPTDALPEPRVLDATRCISALTIEDRGPVEGGLRSHFGNWIFGCDLCQEVCPWNRHAPGTEDPELQAIENEEMPSLIELLRLDQAAFRKKFHDSPILRAKRVGLLRSAAIALGNHPSASGDVPAGLASLCGVLQDKEPVIRGAAAWALGQWHYRMPEIAPTIVDALKARLAEEYDETVRQEIFSVLXHKE

SEQ ID NO: 79542 - protein, 351 aa, Planctomycetales bacterium
  misc_feature (1)..(351): tr|A0A354GQK2|A0A354GQK2_9BACT Epoxyqueuosine reductase OS=Planctomycetales bacterium OX=2053591 GN=queG PE=3 SV=1
MEESLESRLKQQAQALGFDLVGIAPAGPADGFDRLRDWLDHGFAGDMDYMHRHAEARRHPESVLPEVRSVVMLGMNYNPGNGPEESVSGKGRVARYARGADYHDVLRERLNHLLAWLQGERAACHGRGVVDTAPLLERDFARRAGLGWFGKNTMLLNKRLGSYFFLAALLVDVELQPDSPFEAHHCGTCTACLDACPTAAFVEPGVLDARRCISYLTIELKGAVPLDLRTGIGDWTFGCDICQEVCPWNRKAPAAANAAMQARPELESLDLIELLGLTDDEFRSRFRDTALMRTKRRGLLRNAALVLGNTGDERALPALRRAQEDTEPLIQEAARWAAAEIERRRDRIVLG

SEQ ID NO: 79543 - protein, 353 aa, Planctomycetales bacterium
  misc_feature (1)..(353): tr|A0A1U7GQW9|A0A1U7GQW9_9BACT Epoxyqueuosine reductase OS=Planctomycetales bacterium 71-10 OX=1895807 GN=queG PE=3 SV=1
MDDLARRLKGRALALGFDRVGIAPAQAPPGYPHFLAWLDAGRGAGMGYLADHAGARAHPGAILEGVRSVVMASLVYGGRSGQPAVGKVARYARGADYHTALRGRLELLAEWLRDEAPGVSARAVVDTAPLMERDFARLAGLGWIGKNTMLIDRKLGSFTVLGALLVDADLEPDAPHASSHCGTCTRCLDACPTGAFDGPYRLDARRCISYWTIEHQGPIPDAAAGELHGWAFGCDVCQDVCPWNRKAPAARIPEFAPRPEWEAPDLVEWLTRSKWRWKRLLTNSALRRAGRSGLVRNAALTLGVAGRVDAVPALAARLADPKEDPTIRHAAAWALGRIDAPEARAALDAHARG

SEQ ID NO: 79544 - protein, 372 aa, Planctomycetes bacterium
  misc_feature (1)..(372): tr|A0A2D6A734|A0A2D6A734_9BACT tRNA epoxyqueuosine(34) reductase QueG OS=Planctomycetes bacterium OX=2026780 G N=queG PE=4 SV=1
MSPPFPRPGLVEEMAREAGFDLVAFGPAGPGEHGAKLEEWIAAGRHGEMDYLERNLPRLLEPERLLPGARGAVALGYDYGRDGVALESGGRVARYAAGRDYHRALGSRMRRLTTALEREGVRGDSLRSGIDAVPILERALAAQAGIGFLAKSSGIIHAERGPWLLLAEVLTTEAFAPSAPATGSCGTCTACLDTCPTGAIVAPFEVDARRCLSYTTIELRGPIPHDYRAAQGDWLFGCDICIEACPFHSRTGPPHDDPDARLHPALETWQLVGLLALTPEQWNRDWTGTAMRRAGRAGLQRNAAIVLGNLGQEDAAPVLVKALEDSDAGVRTAAAWALCRLGRGRNEAMRALARETDLDVAADMRRSLAEFG

SEQ ID NO: 79545 - protein, 395 aa, Planctomycetes bacterium
  misc_feature (1)..(395): tr|A0A5C6FVX5|A0A5C6FVX5_9BACT Epoxyqueuosine reductase OS=Planctomycetes bacterium V7 OX=2528031 GN=queG PE=4 SV=1
MQSDPVPDDLKAEIRAVAGQLGFHLCGFAPAVSSQGHSDLLRWIDEGYAAEMDYFSQRVDAYKHPSGVLPGVRSIIALAYPYPSGSERIDATGKHIPSDGQTPSGRGKVARYAWTGDDYHDWIHPKLKTLCRTLQSCAPESRSRGVVDTAPLMEREVAQLAGLGWRGKNTLLLRPLVGSYFFLACVLTTVELQPDPPFDRFHCGTCTACLDACPTDAFPQPGVMDASRCISYLTIEHRGSIPQPLRPQIGDWVFGCDVCQEVCPWNRQSSRGDTKAGGESMASPEPTMTDLDLHDLFTLDDEQFRKRYRKTALWRTRRRGILRNAAIVLGNQGNTESLGPLTTGLSDHEPLVRSASAWALGRIGGKARSVLMQRLATEDDPEVIAEIQSAIDQLA

SEQ ID NO: 79546 - protein, 365 aa, Planctomycetia bacterium
  misc_feature (1)..(365): tr|A0A4P5WJA8|A0A4P5WJA8_9BACT Epoxyqueuosine reductase OS=Planctomycetia bacterium OX=2052181 GN=LBMAG46_0232 0 PE=4 SV=1
MACEQGFAGLGIAPAVTPTGFHGLLQWLQQGHHGEMAWMASRAELRRHPESLLPGCRSVLMAAMNYHDGSAGPAAGGARISRYAWGSEDYHGVLKRQLAPVVAHLRAALPSCRARVVVDSAPLLERDFGRLAGLGWFGRNTMLISRGFGSWFFLAGILTDAELVCDESEERSYCGSCTRCLDECPTDAFPESGVLDARRCISYLTIELRDRGIPRELRAGVGGWLFGCDVCQEVCPWNRFAPGECLSEFRDRRGAWPLMVDPAGLLRMGEVEFLQVFRGTPLERTGCEVLRRNAAIVLGNLPELGGEGELVSALEDESGLVRAAAGWALCRRGGEPGIAAVRARLLREGDAEVACDLRLSLEECG

SEQ ID NO: 79547 - protein, 320 aa, Planctomycetia bacterium
  misc_feature (1)..(320): tr|A0A1Z8SMN2|A0A1Z8SMN2_9BACT tRNA epoxyqueuosine(34) reductase QueG OS=Planctomycetia bacterium TMED53 OX=19 86839 GN=CBC13_04745 PE=4 SV=1
MENPMIPIPESGENSELEELRREALKLGFSALGIARAGISPHAERFRDWIQAGMHAGMSWLEKNTERRLDPTHSLEGAKSVVMLSLQYQDEIEAPPSAPKIARYARGRDYHKVMVPMLKALCDHISQSGRWKTWYCVDASPILERDWGEASGLGWIGKNGLLINREMGSWFFLGGIVTDRVLEATPATLDHCGSCTRCLDACPTNAIVKPRTVDARKCISYWTIEHKGDLPAESELHGWLFGCDICQEVCPWNTRPARIHPKIHDDLTPRPIPQSAEEILEFSEVDYLRYFAGTPVTRTGFSGLQRNARALIRESQGKDS

SEQ ID NO: 79548 - protein, 404 aa, Planctopirus ephydatiae
  misc_feature (1)..(404): tr|A0A518GTY8|A0A518GTY8_9PLAN Epoxyqueuosine reductase OS=Planctopirus ephydatiae OX=2528019 GN=queG PE=4 SV= 1
MIAARLKQTLLDAGFALVGIAPAVSPLGLDRLQDWLKAGYAGEMSYIERRQHAYAHPENVLPKVASIVMAAWNYQPQGSQAGLHDSRQRGRIAAYAQLPEDYHHWLKEKLHPAVSFLREHFPNDRTRTAIDTAPLLEREYASLAGLGWFGKNTMLIDRQQGSYLLLAGILTQTELPPDAPHQTHHCGSCTRCLEICPTEAFPQPGVLDARKCISYLTIEQKGLPVEPLRKGIGPWLLGCDLCQDVCPWNTKRQKVWSRAQIANEQQLTTVTDNETREASLVEAENNPALFLTISEEAFQQRFGKTPLERPGRAGMARNAAIVLGNIGTFNDWPEIEHGLADSSDVVRSACAWAAVELALREPLLKSIAETALRNRLPLEDNSTEAVATYRELRAALDRLTSPPA

SEQ ID NO: 79549 - protein, 413 aa, Planctopirus hydrillae
  misc_feature (1)..(413): tr|A0A1C3EL00|A0A1C3EL00_9PLAN tRNA epoxyqueuosine(34) reductase QueG OS=Planctopirus hydrillae OX=1841610 GN= A6X21_17885 PE=4 SV=1
MLIIPADKAMIADGLKQTLLDAGFALVGIAPAVSPLGLDRLHEWLQAGYAGEMSYIERRQHAYAHPENVLPRVASIVMAAWNYQPQGSPDTLDESRQRGRIAAYAQLPEDYHHWLKEKLQPGILFLRKHFPNDRTRTAIDTAPLLEREYASLAGLGWFGKNTMLIDRQQGSYLLLASILTQTELPPDAPHQTQHCGNCTRCLEICPTDAFPQPGVLDATKCISYLTIELKGLPAEPLRKGIGPWLLGCDLCQDVCPWNTKRQKVWSRAQSANDQQRTKLTDNETSEAALVEAESNPALFLTISEEAFQQRFGKTPLERPGRAGMARNAAIVLGNIGSFNDWPAIEHGLADSSAVVRSACAWAAVELALREPLLKSIAETALRNRLPLEDNSIETSATYRELQAALDRLTIPPA

SEQ ID NO: 79550 - protein, 404 aa, Planctopirus limnophila
  misc_feature (1)..(404): tr|D5STR4|D5STR4_PLAL2 4Fe-4S ferredoxin-type domain-co ntaining protein OS=Planctopirus limnophila (strain ATC C 43296 / DSM 3776 / IFAM 1008 / 290) OX=521674 GN=Plim _3280 PE=4 SV=1
MIAARLKQTLLDAGFALVGIAPAVSPLGLGRLQDWIQAGYAGEMSYIERRQHAYAHPENVLPQVASIVMAAWNYQPQGSPAGFHESRQRGRIAAYAQLPEDYHQWLKEKLQPAISILREHFPNDRTRTAIDTAPLLEREYASLAGLGWFGKNTMLIDRQQGSYLLLAGILTQTDLPPDAPHQTHHCGSCTRCLDICPTEAFPQPGVLDARKCISYLTIEQKGLPAEPLRKGIGPWLLGCDLCQDVCPWNTKRQKVWSRAQSTNEQQLTTVTDNETSEAALVEAENDPSLFLTISEEEFQQRFGKTPLERPGRSGMARNAAIVMGNIGTCDDWPAIEHGLADSSAVVRSACAWAAVELALREPLLKSIAETALRNRLPLEDNSLETSATYRELQAALDRLTIPPA

SEQ ID NO: 79551 - protein, 388 aa, Planifilum fimeticola
  misc_feature (1)..(388): tr|A0A2T0LAK0|A0A2T0LAK0_9BACL Epoxyqueuosine reductase OS=Planifilum fimeticola OX=201975 GN=queG PE=3 SV=1
MRPEEIKARLIEEAKRLNIDKIGFASADPFLELKERLIEHRRKGYESGFEEPDLEKRTHPDKTLPEAKSIIAVALAYPSRLPNPPKSKPGAYRGIFCRASWGKDYHHVLRERLEALKECLLAMVPTASAEILVDTGPLSDRAVAERAGIGWVGKNTALITEEFGSWVYLGEMITDVYLPPDTPVTEGCGDCTACLDACPTGALVQPGQLNAQACLAYLTQTKQMVPEPYREKIGNRLYGCDTCQVVCPKNRKVNFTHQREFRPDPEKVKPLLKPILGLSNRQFRREFGEMAGSWRGKGPIQRNAIIALAHFRDRSAVPLLSRLLREDPRPAIRGTSAWALGKIGGQEALDALCSADREETEADVRREIEQALARLRREEGSPGSSPKR

SEQ ID NO: 79552 - protein, 388 aa, Planifilum fulgidum
  misc_feature (1)..(388): tr|A0A1I2SCB5|A0A1I2SCB5_9BACL Epoxyqueuosine reductase OS=Planifilum fulgidum OX=201973 GN=queG PE=3 SV=1
MRPEEIKARLIEEAKRLNIDKIGFASADPFLELKERLIEHRRKGYESGFEEPDLEKRTRPDKILPEAKSLIAIALAYPSRLSNPPKSKPGAYRGIFCRASWGKDYHHVLRERLEALKKCLLDMVPTASAEVLVDTGPLSDRAVAERAGIGWVGKNTALITEEFGSWVYLGEMITDVYLPPDTPVTEGCGDCTACLDACPTGALVQPGQLNAQACLAYLTQTKQMVPEPYREKIGNRLYGCDTCQVVCPKNRKVNFTHQREFRPDPEKVKPLLKPILGMSNRQFRREFGEMAGSWRGRGPIQRNAIIALAHFRDRSAVPLLSRLLREDPRPVIRGTSAWALGKIGGEDALTALCEAEREETDADVRREIGQALARLRREEVSSGSPPKR

SEQ ID NO: 79553 - protein, 312 aa, Planktotalea frisia
  misc_feature (1)..(312): tr|A0A1L9NWH6|A0A1L9NWH6_9RHOB Epoxyqueuosine reductase OS=Planktotalea frisia OX=696762 GN=queG PE=4 SV=1
MPERLQTFVDAGRHGQMGWMAERMSWRGNPNALWPEAQSVIMLGESYTPEHDPLEILQHADRGAISVYAQNKDYHDLVKKRLKRLARWLIAESGGEVKVFVDTAPVPEKPLGAAAGLGWQGKHTNLVSRQMGNWFFLGSVFTTLELPVDEAEVDHCGSCTSCLDICPTAAFPAPYQLDARRCISYLTIEHKGPVDEELRALMGNRIYGCDDCLAICPWNKFAVEARELRYAARDELRAPRLAVFARLDDAEFRTMFSGSPIKRIGRDRFVRNVLYAIGNSSVAELRFVAQELVDDPDEAVADAARWASARLA

SEQ ID NO: 79554 - protein, 313 aa, Planktothricoides sp.
  misc_feature (1)..(313): tr|A0A0M1JUC6|A0A0M1JUC6_9CYAN Epoxyqueuosine reductase OS=Planktothricoides sp. SR001 OX=1705388 GN=queG PE=3 SV=1
MNYPITSNQIKQKAQEFGFHKVGISLVDEADSSAVSHLQSWLNYGYQADMQWMANPKRQDIRQVMPDVESVISVALNYYTPYQHSDEPKIAKISRYGWGRDYHRVLDKKLKAFSLWLEAQAPGIKARYYADTGPISDKFWAQQAGLGWIAKNGNLITREYGSWVFLGEVLTNLKLTGDRAHTQHCGTCNRCLEACPTQAIVKPFVVDANRCIAYHTIENRAEDLPDEIKSNLQGWVAGCDICQDVCPWNQRFAQPTDVKEFEPYPENLAPTLAELAELSEDEWNRRFPASALRRIKPEMWRRNARANLGNCEG

SEQ ID NO: 79555 - protein, 310 aa, Planktothrix agardhii
  misc_feature (1)..(310): tr|A0A1J1JK23|A0A1J1JK23_PLAAG Epoxyqueuosine reductase OS=Planktothrix agardhii OX=1160 GN=yjeS PE=3 SV=1
MMNSPINTNLVKQKALDLGFHQVGIAAITETEQNRQHLQSWLDQGYAADMAWMNSPKRQNIRELMPEVASVICVALNYYTPDQAPDNPELGKISRYARGRDYHKVLHKKLKTFSEWLQQQATGIQARYYADTGPIQDKVWAEKAGIGWISKNSNLITTKYGSWVFLGEILTNLILTPDIPHTQHCGTCTRCLEACPTGAITQPFVVDANRCIAYHTIENRAETLPENISKNLNGWVAGCDICQEVCPWNQSFAQETDVPEFQPYPENIAPKLTELAELSETEWDQRFRASALRRIKPQMWRRNARANLDY

SEQ ID NO: 79556 - protein, 318 aa, Planktothrix agardhii
  misc_feature (1)..(318): tr|A0A073CDK0|A0A073CDK0_PLAAG Epoxyqueuosine reductase OS=Planktothrix agardhii NIVA-CYA 126/8 OX=388467 GN=q ueG PE=3 SV=1
MSLWFLLVFMNSLINTNLVKQKALDLGFHQVGIAAITETEQNRQHLQSWLDQGYAADMAWMNSPKRQNIRELMPEVASVICVALNYYTPDQVPDNPELGKISRYARGRDYHRVLHKKLKTFSEWLQQQATGIQARYYADTGPIQDKVWAEKAGIGWISKNSNLITRKYGSWVFLGEILTNLILTPDPPHNQHCGTCTRCLEACPTGAITQPFVVDANRCIAYHTIENRAETLPENISKNLNGWVAGCDICQEVCPWNQSFAQETDVPEFQPYPENIAPKLTELAELSETEWDQRFRASALRRIKPQMWRRNARANLDY

SEQ ID NO: 79557 - protein, 309 aa, Planktothrix rubescens
  misc_feature (1)..(309): tr|A0A1J1L7H2|A0A1J1L7H2_PLARU Epoxyqueuosine reductase OS=Planktothrix rubescens OX=59512 GN=queG PE=3 SV=1
MNSLINTNLVKQKALDLGFHQVGIAAITETEQNRQHLQSWLDQGYAADMAWMNSPKRQNIRELMPEVASVICVALNYYTPDQVPDNPELGKISRYARGRDYHKVLHKKLKTFSEWLQQQATGIQARYYADTGPIQDKVWAEKAGIGWISKNSNLITTKYGSWVFLGEILTNLILTPDIPHTQHCGTCTRCLEACPTGAITQPFVVDANRCIAYHTIENRAETLPENISKNLNGWVAGCDICQEVCPWNQRFAQETDVPEFQPYPENIAPKLTELAELSETEWDQRFRASALRRIKPQMWRRNARANLDY

SEQ ID NO: 79558 - protein, 309 aa, Planktothrix sp.
  misc_feature (1)..(309): tr|A0A1T4ZIW9|A0A1T4ZIW9_9CYAN Epoxyqueuosine reductase OS=Planktothrix sp. PCC 11201 OX=1729650 GN=queG PE=3 SV=1
MNSAINTNLVKQKALDLGFHQVGIAAITETEENRQHLQSWLDQGYAADMAWMNSPKRQNIRQLMPEVASAICVALNYYTPDQQPENPELGKISRYARGRDYHRVLHKKLKTFSEWLQQQAPGIQARYYADTGPIQDKVWAEKAGIGWISKNSNLITTKYGSWVFLGEILTNLTLTPDPPHTQHCGTCTRCLEACPTGAITQPFVVDANRCIAYHTIENRAETLPENISKNLNGWVAGCDICQEVCPWNQRFSQETDVIEFQPYPENIAPKLTELAELSETEWDQRFRASALRRIKPQMWRRNARANLEY

SEQ ID NO: 79559 - protein, 309 aa, Planktothrix sp.
  misc_feature (1)..(309): tr|A0A3C1RMM8|A0A3C1RMM8_9CYAN Epoxyqueuosine reductase OS=Planktothrix sp. UBA8407 OX=2055758 GN=queG PE=3 SV =1
MNLPINTNLVKQKALDLGFHQVGIAAITETEENRQHLQSWLDQGYAADMAWMNNPKRQNIRQLMPEVASVICVALNYYTPAQAPDNPALGKISRYARGRDYHKVLHKKLKTFSEWLQQQATGIQARYYADTGPIQDKVWAQKAGIGWISKNSNLITTKYGSWVFLGEILTNLILTPDPPHTQHCGTCTRCLEACPTGAITQPFVVDANRCIAYHTIENRAETLPENISKNLNGWVAGCDICQEVCPWNQRFAQETDIPEFQPDPENIAPKLTELAELSETAWDHRFRASALRRIKPQMWRRNARANLAY

SEQ ID NO: 79560 - protein, 305 aa, Planktothrix tepida
  misc_feature (1)..(305): tr|A0A1J1LRZ4|A0A1J1LRZ4_9CYAN Epoxyqueuosine reductase OS=Planktothrix tepida PCC 9214 OX=671072 GN=queG PE=3 SV=1
MDSEQIKQKALILGFHKVGIAAISDMQDNNQRLQNWLNQGYAADMAWMNNPKRQDIRQLMPEVQSVICVALNYYTPQQYPEGQEFAKISRYARGRDYHRVLHKKLKIFCDWLQQQEAGIQARYYADTGPIQDKVWAQQAGIGWIAKNSNVITRDYGSWVFLGEILTNLTLTPDTPHTQHCGTCTRCLEACPTQAITQPFVVDANRCIAYHTIENRAETLPENISKQLNGWVAGCDICQEVCPWNQRFAQETNVIEFQPYPENLAPKLSELAELSEEEWDQRFRASALRRIKPQMWRRNARANLEF

SEQ ID NO: 79561 - protein, 381 aa, Planococcus antarcticus
  misc_feature (1)..(381): tr|A0A1C7DJA2|A0A1C7DJA2_9BACL tRNA epoxyqueuosine(34) reductase QueG OS=Planococcus antarcticus DSM 14505 OX= 1185653 GN=BBH88_16010 PE=4 SV=1
MNLDQFQKELVAYASDIGIDKIGFASAEPFYSLKHQLIRQQQLNYQSGFEESDVEKRTRPELLLNEAVSIIAIAIAYPSRMADAPQGVKGARRGMFSRSSWGKDYHAALRERLTLLEAFIAPHYPEARMRSMVDTGELSDRAVAERAGIGWSAKNTNIITPEFGSYVYLGEMITNIPFRFDEPMEDQCGDCRLCIDTCPTGAIVEGGQLNAQRCISFLTQTKGFLPDEFRGKIGNRIYGCDTCQTVCPKNKRKANQIHAEFEPDPEIAKPLLEPLLTISNREFKDKFGYVSGSWRGKKPIQRNAILALAHFKEKSAVPALIKLLESDERPVIRGTAAWAIGKIGTDEGLEAIKQAQQKEKDLEVQEEIQKGLAFFAERLKG

SEQ ID NO: 79562 - protein, 381 aa, Planococcus citreus
  misc_feature (1)..(381): tr|A0A497YEL2|A0A497YEL2_9BACL Epoxyqueuosine reductase OS=Planococcus citreus OX=1373 GN=DFR62_3501 PE=4 SV=1
MNLDQFQQQLVAYAAEIGIDKIGFASAEPFFSLKHRLIRQQQLNFQSGFEESDVEKRTRPELLMEEPVSIIAIAIAYPSKMEGAKPGVKGARRGIFSRSSWGKDYHAALRDRLALLESFIAAHYPEARMKSMVDTGELSDRAVAERAGIGWSAKNTNIITPEFGSYVYLGEMITNIPFEYDEPMEDQCGDCRLCIDTCPTGAIVEGGQLNAQRCISFLTQTKGFLPDEFRSKIGNRIYGCDTCQTVCPKNKRKANRIHPEFDPDPEIAKPLLEPLLTISNREFKEKFGHVSGSWRGKKPIQRNAILALAHFKEQSAVPALIELMNTDPRPVIRGTSAWAIGRIGTDEGRLALEHAQQQEKDEEVLAEIAKGLAFFSAETKG

SEQ ID NO: 79563 - protein, 381 aa, Planococcus donghaensis
  misc_feature (1)..(381): tr|A0A1C7EJ90|A0A1C7EJ90_9BACL tRNA epoxyqueuosine(34) reductase QueG OS=Planococcus donghaensis OX=414778 GN= BCM40_11425 PE=4 SV=1
MNLDQFQKELVAYASDIGIDKIGFASAEPFYSLKHQLIRQQQLNYQSGFEESDVEKRTRPELLLNEAVSIISIAIAYPSRMTDAPQGVKGARRGIFSRSSWGKDYHAALRERLTLLEAFITSRFPEARMRSMVDTGELSDRAVAERAGIGWSAKNTNIITPEFGSYVYLGEMITNIPFRFDEPIEDQCGDCRLCIDSCPTGAIVEGGQLNAQRCISFLTQTKGFLPDEFRGKIGNRLYGCDTCQTVCPKNKRKANQIHAEFEPDPEIAKPLLLPLLTISNREFKDKFGYVSGSWRGKKPIQRNAILALAHFKETAAVPVLIGLLKSDERPVIRGTAAWAIGKIGTAAGLAALQQAEASEKEEEVQEEIQKGLAFFAERSKG

SEQ ID NO: 79564 - protein, 381 aa, Planococcus donghaensis
  misc_feature (1)..(381): tr|E7RH32|E7RH32_9BACL 4Fe-4S ferredoxin-type domain-co ntaining protein OS=Planococcus donghaensis MPA1U2 OX=9 33115 GN=GPDM_08900 PE=4 SV=1
MNLDQFQKELVAYASDIGIDKIGFASAEPFYSLKHQLIRQQQLNYQSGFEESDVEKRTRPELLLNEAVSIISIAIAYPSRMTDAPQGVKGARRGIFSRSSWGKDYHAALRERLTLLEAFIASRFPEARMRSMVDTGELSDRAVAERAGIGWSAKNTNIITPEFGSYVYLGEMITNIPFRFDEPIEDQCGDCRLCIDSCPTGAIVEGGQLNAQRCISFLTQTKGFLPDEFRGKIGNRLYGCDTCQTVCPKNKRKANQIHAEFEPDPEIAKPLLLPLLTISNKEFKDKFGYVSGSWRGKKPIQRNAILALAHFKETAAVPVLIELLESDERPVIRGTAAWAIGKIGTAEGLIALQQAEKSEKEEEVQEEIQKGLAFFAERSKG

SEQ ID NO: 79565 - protein, 381 aa, Planococcus halocryophilus
  misc_feature (1)..(381): tr|A0A1C7DLZ9|A0A1C7DLZ9_9BACL tRNA epoxyqueuosine(34) reductase QueG OS=Planococcus halocryophilus OX=1215089 GN=BBI08_00610 PE=4 SV=1
MNLDQFQKELVAYASDIGIDKIGFASAEPFYSLKHQLIRQQQLNYQSGFEESDVEKRTRPELLLNEAVSIISIAIAYPSRMTDAPQGVKGERRGIFSRSSWGKDYHAALRERLALLEAFIASRYPEARMRSMVDTGELSDRAVAERAGIGWSAKNTNIITPEFGSYVYLGEMITNIPFRFDEPMEDQCGDCRLCIDSCPTGAIVEGGQLNAQRCISFLTQTKGFLPEEFRGKIGNRLYGCDTCQTVCPKNKRKANQIHAEFEPDPEIAKPLLLPLLTISNREFKDKFGYVSGSWRGKKPIQRNAILALAHFKETAAVPVLIQLLESDERPVIRGTAAWAIGKIGTAEGLVALQQAEKSEKEEEVQEEIQKGLAFFAERSKG

SEQ ID NO: 79566 - protein, 381 aa, Planococcus halotolerans
  misc_feature (1)..(381): tr|A0A365KNG7|A0A365KNG7_9BACL tRNA epoxyqueuosine(34) reductase QueG OS=Planococcus halotolerans OX=2233542 G N=queG PE=4 SV=1
MNLEQFQKELVAYASEIGIDKIGFASAEPFFNLKHQLIRQQQLQYQSGFEEPDVEKRTHPELLLEEAVTIIAIAIAYPSKMNDAPQGTKGARRGIFSRSSWGKDYHAALRERLTLLEAFIAAHYPDARMRSMVDTGELSDRAVAERAGIGWSAKNTNIITPEFGSYVYLGEMITNIPFTLNEPMEDQCGDCRLCIDTCPTGAIVEGGQLNAQRCISFLTQTKGFMPDEFRSKIGNRLYGCDTCQTVCPKNKRKANQIHAEFEPDPEIAKPLLEPLLKISNREFKEKFGYVSGSWRGKKPIQRNAILALAHFKEVSAVPALIDLLESDERPVIRGTAAWAIGKIGTAEGLHALKKAEEQEKDSEVLEEIQKGLAFFAEESKG

SEQ ID NO: 79567 - protein, 381 aa, Planococcus kocurii
  misc_feature (1)..(381): tr|A0A0U2J977|A0A0U2J977_9BACL Epoxyqueuosine reductase OS=Planococcus kocurii OX=1374 GN=AUO94_12045 PE=4 SV= 1
MNLDQFQKELVAYASDIGIDKIGFASAEPFYSLKHQLIRQQQLNYQSGFEESDVEKRTRPELLLNEAVSIVAIAIAYPSKMEDAPQGVKGARRGMFSRSSWGKDYHAALRERLTLLEAFIASRYPEARMRSMVDTGELSDRAVAERAGIGWSAKNTNIITPEFGSYVYLGEMITNIPFRFDEPMEDQCGDCRLCIDTCPTGAIVEGGQLNAQRCISFLTQTKGFLPDEFRSKIGNRLYGCDTCQTVCPKNKRKANQIHAEFEPDPEIAKPLLLPLLTISNREFKDKFGYVSGSWRGKKPIQRNAILALAHFKETAAIPVLIQLLDSDERPVIRGTAAWAIGKIGTDEGLEALKRVQQLEKDGEVQEEIQKGLAFFAERLKG

SEQ ID NO: 79568 - protein, 381 aa, Planococcus maitriensis
  misc_feature (1)..(381): tr|A0A365K3M1|A0A365K3M1_9BACL tRNA epoxyqueuosine(34) reductase QueG OS=Planococcus maitriensis OX=221799 GN= queG PE=4 SV=1
MNLDQFQQQLVAYASEIGIDKIGFASAEPFFNLKHRLIRQQQLNFQSGFEESDVEKRTRPELLMEEPVSIIAIAIAYPSKMGGAKQGVKGARRGIFSRSSWGQDYHSALRERLALLESFIAAHYPDARMKSMVDTGELSDRAVAERAGIGWSAKNTNIITPEFGSYVYLGEMITNIPFEYDEPMEDQCGDCRLCIDTCPTGAIVEGGQLNAQRCISFLTQTKGFLPDEFRSKIGNRIYGCDTCQTVCPKNKRKANRIHPEFDPDPEIAKPLLEPLLTISNREFKEKFGHVSGSWRGKKPIQRNAILALAHFKEQSAVPTLIELMNTDPRPVIRGTAAWAIGRIGTDEGRQALEHAQQQEKDEEVLAEIAKGLAFFSAETKG

SEQ ID NO: 79569 - protein, 381 aa, Planococcus maritimus
  misc_feature (1)..(381): tr|A0A150W3D7|A0A150W3D7_PLAMR Epoxyqueuosine reductase OS=Planococcus maritimus OX=192421 GN=AY633_13240 PE=4 SV=1
MNLDQFQQQLVAYASEIGIDKIGFASAEPFFNLKHRLIRQQQLNFQSGFEESDVEKRTRPELLMEEPVSIIAIAIAYPSKMEGATPGVKGARRGIFSRSSWGKDYHAALRDRLALLESFIAAHYPEARMKSMVDTGELSDRAVAERAGIGWSAKNTNIITPEFGSYVYLGEMITNIPFAYDEPLEDQCGDCRLCIDTCPTGAIVEGGQLNAQRCISFLTQTKGFLPDEFRSKIGNRIYGCDTCQTVCPKNKRKANRIHPEFDPDPDIAKPLLEPLLTISNREFKEKFGHVSGSWRGKKPIQRNAILALAHFKEQSAVPTLIDLMKADPRPVIRGTAAWALGRIGIDEGRQALERARQQETDEEVLAEIEKGLAFFSAETKG

SEQ ID NO: 79570 - protein, 381 aa, Planococcus maritimus
  misc_feature (1)..(381): tr|A0A1C7DYX8|A0A1C7DYX8_PLAMR tRNA epoxyqueuosine(34) reductase QueG OS=Planococcus maritimus OX=192421 GN=BB I11_06005 PE=4 SV=1
MNLDQFQQQLVAYAAEIGIDKIGFASAEPFFNLKHRLIRQQQLNFQSGFEESDVEKRTRPELLMEEPVSIIAIAIAYPSKMEGATPGVKGARRGIFSRSSWGKDYHAALRDRLALLESFIAAHYPEARMKSMVDTGELSDRAVAERAGIGWSAKNTNIITPEFGSYVYLGEMITNIPFAYDEPMEDQCGDCRLCIDTCPTGAIVEGGQLNAQRCISFLTQTKGFLPDEFRSKIGNRIYGCDTCQTVCPKNKRKANRIHPEFDPDPDIAKPLLEPLLTISNREFKEKFGHVSGSWRGKKPIQRNAILALAHFKEQSAVPTLIDLMKADPRPVIRGTAAWALGRIGVDEGRQALEHARQQEIDEEVLAEIEKGLTFFSAETKG

SEQ ID NO: 79571 - protein, 381 aa, Planococcus massiliensis
  misc_feature (1)..(381): tr|A0A098EMK7|A0A098EMK7_9BACL Epoxyqueuosine reductase OS=Planococcus massiliensis OX=1499687 GN=queG PE=4 SV =1
MNLDQFQEELVAYASEIGIDKIGFASAEPFYNLKHRLIRQQQLKFQSGFEEPDIEKRVRPDLLLDEAVSIIAIAIAYPSKMKDAPQGVKGARRGIFSRSSWGKDYHAALRERLVLLEAFIAAHYPEARMRSMVDTGELSDRAVAERAGIGWSAKNTSIITPEFGSYVYLGEMITNIPFRFDEPMEDQCGDCRLCIDVCPTGAIVEGGQLNATRCISFLTQTKGFLPDEFRGVIGNRLYGCDTCQTVCPKNKRKANQLHAEFEPDPEIAKPLLEPLLTISNKEFKAKFGYVSGSWRGKKPIQRNAILALAHFKEESAVPALIELLKSDERPVIRGTAAWAIGKIGTESGLEALKQAQLDEQDSEVAEEIQKGLAFYAEELKG

SEQ ID NO: 79572 - protein, 381 aa, Planococcus plakortidis
  misc_feature (1)..(381): tr|A0A1C7E4G4|A0A1C7E4G4_9BACL tRNA epoxyqueuosine(34) reductase QueG OS=Planococcus plakortidis OX=1038856 GN =BBI15_00825 PE=4 SV=1
MNLDQFQQQLVAYAAEIGIDKIGFASAEPFFNLKHRLIRQQQLNFQSGFEESDVEKRTRPELLMEEPVSIIAIAIAYPSKMDGAKQGVKGARRGIFSRSSWGKDYHAALRDRLALLESFIAAHYPDARMKSMVDTGELSDRAVAERAGIGWSAKNTNIITPEFGSYVYLGEMITNIPFEYDEPMEDQCGDCRLCIDTCPTGAIVEGGQLNAQRCISFLTQTKGFLPDEFRSKIGNRIYGCDTCQTVCPKNKRKVNRIHPEFDPDPEIAKPLLEPLLTISNREFKEKFGHVSGSWRGKKPIQRNAILALAHFKEQSAVPTLIELMNTDPRPVIRGTAAWAIGRIGTDGGRQALEHALQQEKDEEVLDEIAKGLAFFSAETKG

SEQ ID NO: 79573 - protein, 381 aa, Planococcus rifietoensis
  misc_feature (1)..(381): tr|A0A0U2YSS3|A0A0U2YSS3_9BACL Epoxyqueuosine reductase OS=Planococcus rifietoensis OX=200991 GN=AUC31_04915 P E=4 SV=1
MNLDQFQQQLVAYAAEIGIDKIGFASAEPFFSLKHRLIRQQQLNFQSGFEESDVEKRTRPELLMEEPVSIIAIAIAYPSKMEGATPGVKGARRGIFSRSSWGKDYHAALRDRLALLEAFIAAHYPEARTKSMVDTGELSDRAVAERAGIGWSAKNTNIITPEFGSYVYLGEMITNIPFEYDEPMEDQCGDCRLCIDTCPTGAIVEGGQLNAQRCISFLTQTKGFLPDEFRSKIGNRIYGCDTCQTVCPKNKRKANRIHPEFDPDPEIAKPLLEPLLTISNREFKEKFGHVSGSWRGKKPIQRNAILALAHFKEQSAVPTLIELMNTDPRPVIRGTAAWAIGRIGTDEGRQALELARQQEKDEEVLAEIEKGLAFFSAETKG

SEQ ID NO: 79574 - protein, 381 aa, Planococcus salinus
  misc_feature (1)..(381): tr|A0A3M8P8B2|A0A3M8P8B2_9BACL tRNA epoxyqueuosine(34) reductase QueG OS=Planococcus salinus OX=1848460 GN=que G PE=4 SV=1
MNLDQFQKELVAYASEIGIDKIGFASAEPFYNLKHQLIRQQQLNYQSGFEEPDVEKRTRPELLLNEAVSIIAIAIAYPSKMKDAPQGVRGARRGIFSRSSWGRDYHAALKERLTLLEAFIAAHYPEARMRSMVDTGELSDRAVAERAGIGWSAKNTNIITPEFGSYVYLGEMITNIPFQPDEPMEDQCGDCRLCIDTCPTGAIVEGGQLNAQRCISFLTQTKGFLPDEFRDKIGNRLYGCDTCQTVCPKNKRKANRIHPEFEPDPEIAKPLLEPLLKISNREFKGKFGYVSGSWRGKKPIQRNAILALAHFKEADAVPALIDLLQSDERPVIRGTAAWALGKIGTIEGLESLREVEKTEKDEEVQEEIQKGLAFFAEGLKG

SEQ ID NO: 79575 - protein, 381 aa, Planococcus sp.; identical to SEQ ID NO: 79567
  misc_feature (1)..(381): tr|A0A5B0CT11|A0A5B0CT11_9BACL tRNA epoxyqueuosine(34) reductase QueG OS=Planococcus sp. ANT_H30 OX=2597347 GN =queG PE=4 SV=1

SEQ ID NO: 79576 - protein, 381 aa, Planococcus sp.
  misc_feature (1)..(381): tr|A0A1Q2KWJ7|A0A1Q2KWJ7_9BACL tRNA epoxyqueuosine(34) reductase QueG OS=Planococcus sp. Y42 OX=2213202 GN=B0X 71_05050 PE=4 SV=1
MNLDEFQDKLVAYAHEIGIDKIGFTNAAPFFSLKHRLIRQQELNYQSGFEEPDIEKRTQPKLLLDEAVSIISIAIAYPSKMENAPTGKKGARRGIFARASWGIDYHTALRERLRLLEAFIAAHYPDARMRSMVDTGELSDRAVAERAGIGWSAKNCAVITPEFGSYVYLGEMITNLPFREDEPMEDQCGDCRLCLDVCPTGALIEGGQLNAQRCIAFLTQTKGSLPDEFRAKIGNRLYGCDTCQTVCPKNKGKANRIHEEFEPDPEIAKPLLEPLLNLSNREFKDRFGHVSGAWRGKKPIQRNAILALAHFKEQSAVPALIGVMERDPRPVIRGTAAWALGKIGTAEGLEALKQAEQRETDAEALEEIRKGLAFFAEELKG

SEQ ID NO: 79577 - protein, 381 aa, Planococcus versutus
  misc_feature (1)..(381): tr|A0A1B1RYI6|A0A1B1RYI6_9BACL tRNA epoxyqueuosine(34) reductase QueG OS=Planococcus versutus OX=1302659 GN=I8 58_002895 PE=4 SV=1
MNLEQFQKDIVAYASDIGIDKIGFASAEPFYSLKHQLIRQQQLNYQSGFEESDVEKRTRPELLLNEAVSIIAIAIAYPSKMVDAPQGVKGARRGIFSRSSWGKDYHAALRERLTLLEAFIASRYPEARMRSMVDTGELSDRAVAERAGIGWSAKNTNIITPEFGSYVYLGEMITNIPFRFDEPMEDQCRDCRLCIDSCPTGAIVEGGQLNAQRCISFLTQTKGFLPDEFRSKIGNRLYGCDTCQTVCPKNKRKANQIHAEFDPDPEIAKPLLEPLLAISNREFKDKFGYVSGSWRGKKPIQRNAILALAHFKEQSAVPVLIQLLQSDERPVIRGTAAWAIGKIGTDEGLKALKQVQQLEKDGEVQEEIQKGLAFFAERLKG

SEQ ID NO: 79578 - protein, 381 aa, Planomicrobium glaciei
  misc_feature (1)..(381): tr|A0A1G8DN36|A0A1G8DN36_9BACL Epoxyqueuosine reductase OS=Planomicrobium glaciei OX=459472 GN=SAMN04487975_10 625 PE=4 SV=1
MNLDQFQKDLVAYASEIGIDKIGFASAEPFYNLRHRLIRQQQLNYQSGFEEPDIDKRTRPALLLDEAVSIIAIAIAYPSKMKDAPQGVKGARRGIFSRSSWGKDYHAALRERLTLLEAFIAAHYPDARMRSMVDTGELSDRAVAERAGIGWSAKNTSIITPEFGSYVYLGEMITNIPFRFDEAMEDQCGDCRLCIDVCPTGAIVEGGQLNAQRCISFLTQTKGFLPDEFRTVIGNRLYGCDTCQTVCPKNKRKANGIHPEFEPDPEIAKPLLEPLLTISNREFKSKFGYVSGSWRGKKPIQRNAILALAHFKEESAVPALIELLIKDDRPVIRGTAAWALGKIGTEEGLQALKQAQHTEQDEDTLAEIQKGLAFFAEELKG

SEQ ID NO: 79579 - protein, 381 aa, Planomicrobium soli
  misc_feature (1)..(381): tr|A0A2P8G9D6|A0A2P8G9D6_9BACL Epoxyqueuosine reductase OS=Planomicrobium soli OX=1176648 GN=B0H99_11314 PE=4 SV=1
MNLEGFQQELVAYASEIGIDKIGFASAEPFYNLRHRLIRQQQLKYQSGFEEPDIDKRTRPDLLLDEAVSIIAIAIAYPSKMKDAPQGVRGARRGIFSRSSWGKDYHAALRERLTLLEAFIAAHYPEARMRSMVDTGELSDRAVAERAGIGWSAKNTNIITPEFGSYVYLGEMITNIPFRFDEPMEDQCGDCRLCIDSCPTGAIVEGGQLNAQRCVSFLTQTKGFLPDEFRTVIGNRLYGCDTCQTVCPKNKRKANQIHPEFDPDPEIAKPLLEPLLTISNKEFKAKFGYVSGSWRGKKPIQRNAILALAHFKEASAVPALIELLIRDERPVIRGTAAWAIGKIGTDEGLLALKQAEQREQDEEVLEEIQKGLAFFAEELKG

SEQ ID NO: 79580 - protein, 381 aa, Planomicrobium sp.
  misc_feature (1)..(381): tr|A0A5C5TA65|A0A5C5TA65_9BACL tRNA epoxyqueuosine(34) reductase QueG OS=Planomicrobium sp. CPCC 101079 OX=259 9618 GN=queG PE=4 SV=1
MNLEGFQQELVAYASEIGIDKIGFASAEPFYNLRHRLLRQQQLKYQSGFEEPDIDKRTRPDLLLDEAVSIIAIAIAYPSKMKDAPQGVKGARRGIFSRSSWGKDYHAALKERLTLLEAFIAAHYPDARMRSMVDTGELSDRAVAERAGIGWSAKNTNIITPEFGSYVYLGEMITNIPFRFDEPMEDQCGDCRLCIDSCPTGAIVEGGQLNAQRCISFLTQTKGFLPDEFRTVIGNRLYGCDTCQTVCPKNKRKANQIHAEFEPDPEIAKPLLEPLLSISNKEFKAKFGYVSGSWRGKKPIQRNAILALAHFKEEGAVPALIDLLINDDRPVIRGTAAWAIGKIGTAEGLIALKQAGQKEQDEEVLEEIHKGLAFFAEKLKG

SEQ ID NO: 79581 - protein, 381 aa, Planomicrobium sp.
  misc_feature (1)..(381): tr|A0A3L7J926|A0A3L7J926_9BACL tRNA epoxyqueuosine(34) reductase QueG OS=Planomicrobium sp. Y74 OX=2478977 GN= queG PE=4 SV=1
MNLEQFQKELVAYASEIGIDKIGFASAEPFFNLKHQLIRQQQLQYQSGFEEQDVEKRTHPELLLEEAVTIIAIAIAYPSKMNDAPQGTKGARRGIFSRSSWGKDYHAALRERLTLLEAFIAAHYPDARMRSMVDTGELSDRAVAERAGIGWSAKNTNIITPEFGSYVYLGEMITNIPFTLNEPMEDQCGDCRLCIDTCPTGAIVEGGQLNAQRCISFLTQTKGFLPDEFRSKIGNRLYGCDTCQTVCPKNKRKANQIHAEFEPDPEIAKPLLEPLLKISNREFKEKFGYVSGSWRGKKPIQRNAILALAHFKEVSAVPALIDLLESDERPVIRGTAAWAIGRIGTAEGLHALKKAEEQEKDSEVLGEIQKGLAFFAEESKG

SEQ ID NO: 79582 - protein, 360 aa, Plasticicumulans acidivorans
  misc_feature (1)..(360): tr|A0A317MWT6|A0A317MWT6_9GAMM Epoxyqueuosine reductase OS=Plasticicumulans acidivorans OX=886464 GN=queG PE=3 SV=1
MPANTLDPAAAAALLARIRDWGRELGFRQIGVAGIELAEAEARLFDWLAQGYHGEMNYMARHGALRARPAELVPGTLRVLSARLDYWPGAARGAWSVLADGQLAYLSRYALGRDYHKVVRRRLQQLAERIAAAIGPFGYRVFTDSAPVMEKPLAAQAGLGWVGKHSNLLARDGSWFFLGEMLIDLPLPVAAPPAAHCGRCRACIDVCPTQAIVAPYVVDARRCISYLTIELHGPIPLEFRRAIGNRVVGCDDCQLVCPWNRFAQPSTEADFLPRHGLDAATLVELFAWDEATYLARSEGMALRRLGYARWKRNLAVALGNAPGTPAVLAALAARRDDADAVVREHVAWALAEQAQRCGRL

SEQ ID NO: 79583 - protein, 362 aa, Plasticicumulans lactativorans
  misc_feature (1)..(362): tr|A0A4R2L6Q5|A0A4R2L6Q5_9GAMM Epoxyqueuosine reductase OS=Plasticicumulans lactativorans OX=1133106 GN=queG P E=3 SV=1
MPTPTPPPALPDAAALAARIKAWGRELGFQRVGIADVDLREAETRLLDWLAAGHHGQMDYMARHGTRRARPAELVPGTLRVISARMDYWPAAAAPAWDVLGDGSRAYVARYALGRDYHKVLRRRLAELARRIEAAIGPFGHRAFTDSGPVLEKPLAAKAGLGWVGKHSNLLARDAGSWFFLGEILVDVALPVDAPVSAHCGSCTACIEVCPTQAIVAPHVVDARRCIAYLTIEHHGPIPEALRPALGNRIFGCDDCQLVCPWNRYATPTPEADFIPRHGLDAASLVELFGWDEATWLARTEGMALRRVGHERWLRNLAVALGNAPRSPQVLAALHARAGHPSTLVREHVAWALARLADGTTT

SEQ ID NO: 79584 - protein, 180 aa, Plautia stali
  misc_feature (1)..(180): tr|U3TV72|U3TV72_9ENTR Putative iron-sulfur cluster bin ding protein OS=Plautia stali symbiont OX=891974 GN=E05 _29690 PE=4 SV=1
MTICPTGAIVEPYVVDARRCISYLTIELEGAIPEALRPLIGNRIYGCDDCQLICQWNRYGQLTDEEDFSPRAVLHAPQLVELFGWDEARFLRVTEGSAIRHIGHLRWLRNVAVAQGNAPWAPANLTALEQRRGEHPLLDEHIDWAIAQQRQKRAAQAVEVQSAQQQRLVRAVEKGLPRDA

SEQ ID NO: 79585 - protein, 225 aa, Plautia stali
  misc_feature (1)..(225): tr|U3U0I9|U3U0I9_9ENTR Iron-sulfur cluster binding prot ein OS=Plautia stali symbiont OX=891974 GN=E05_29700 PE =4 SV=1
MACAGQTECGKLRAFASIAWSLMSYPLDLQQLAQQIKQWGRELGFQQVGICDTDLSAEEPKLQQWLEKQYHGEMDWMARHGMMRARPHELLPGTLPGTLRVISVHMNYLPAKAAFASTLKNPQLGYVSRYALGRDYHKLLRNRLKKLGEKIQAHCGELNFCPFVDSAPILERPIAVKAGLGWTGKHSLVLNREAGSWFFLGELLIDLPLPWMSRSKSSAAAASPA

SEQ ID NO: 79586 - protein, 381 aa, Pleionea mediterranea
  misc_feature (1)..(381): tr|A0A316FMG6|A0A316FMG6_9GAMM Epoxyqueuosine reductase OS=Pleionea mediterranea OX=523701 GN=queG PE=3 SV=1
MTSLSSPKQLKAYIKQQATSLGFQQCGVAQADIPSHVEKYKEWLKQGYHGDMGYMADREALRSDPTSLVPGTLSVISVRLNYVPTPAKFAETLEDSSKAIVSRYALGRDYHKLMRKKLAKLAKQLEQLSENLSYRVFVDSAPVLERAYGEEAGLGWIGKNTMLINESEGSFFFLGEILTNLPLEADEKPENLCGKCTSCISICPTQAIVAPYTVDARKCISYLTIEHFGSIPESLRPLMGNRIYGCDDCQLVCPWNRYAKATDIDDFSPRHGLDNIELLELFLWSEETFLKNFEGSPIRRIGFERWQRNISIALGNAEYSPRILEALNQCLNTTDSDLIKEHVTWAIKQQQNKKQTIAISEPDNNQKKLIRTTRKIVKHLE

SEQ ID NO: 79587 - protein, 338 aa, Pleomorphomonas carboxyditropha
  misc_feature (1)..(338): tr|A0A2G9WT31|A0A2G9WT31_9RHIZ Epoxyqueuosine reductase OS=Pleomorphomonas carboxyditropha OX=2023338 GN=queG PE=3 SV=1
MNWRARARDLGFSAIGVAPVDRLGEAARRLRTFVDLGRHGSMAWMEETLERRADPRVLWPEARSAVVLAMNYGPDSDPLANLARPAVGNISVYARHRDYHDVLKGRLKEVAGLIARDTGADVKVFVDTAPLMEKPLAALAGVGWQGKHTNLVSRDFGSWLLLGVILSAADLPPDEPANDRCGACRRCLDACPTGALPAPYQIDARLCISYLTIEHAGPIPEDLRPLIGNRIYGCDDCLAVCPWNKFASEAAEMKLRPRPELTAPSLTALAALDDAAFRALFSGSPVKRIGRNRFVRNVAIAIGNSGDPALAPALTPLLDDPDPVVAEAARWAIDRLPP

SEQ ID NO: 79588 - protein, 352 aa, Pleomorphomonas diazotrophica
  misc_feature (1)..(352): tr|A0A1I4SQC4|A0A1I4SQC4_9RHIZ Epoxyqueuosine reductase OS=Pleomorphomonas diazotrophica OX=1166257 GN=queG PE =3 SV=1
MSWQARAHDLGFSAIGIAPVDRLGEAARRLRAFVDLGRHGSMAWMEETLDRRADPRVLWPEARSAVVLALNYGPDRDPLENLAKPDIGNISVYARHRDYHEVIKGRLKEVASLLARETGADVKVFVDTAPLMEKPLAALAGVGWQGKHTNLVSRDFGSWLFLGVILSAADLPPDESAADRCGACRRCLDACPTGAFPAPYQIDARRCISYLTIEHAGPIPEALRPLMGNRIYGCDDCLAVCPWNKFASAAAEMKLQARPDLTAPSLAALAALDDAAFRVLFAGSPVKRIGRNRFVRNVAIAIGNSDDPTLAPALAPLLGDPDPVVADAARWAADRLVPPERESFGVSISPHP

SEQ ID NO: 79589 - protein, 346 aa, Pleomorphomonas sp.
  misc_feature (1)..(346): tr|A0A4R8FJ78|A0A4R8FJ78_9RHIZ Epoxyqueuosine reductase OS=Pleomorphomonas sp. CF100 OX=2135722 GN=queG PE=3 S V=1
MSWRGRARDLGFSAVGIAPVDGLGEAAFRLRAFVELGRHGSMAWMEETLDRRADPRVLWPEARSAVVVAMNYGPDGDPLDNLSKRSVGNISVYARHRDYHDVLKGRLKEVAGLVARETGADVKVFVDTAPLMEKPLAALAGVGWQGKHTNVVSRDFGSWLFLGVILSAADLPASEPAGDHCGACRRCLDACPTGAFPAPYQIDARRCVSYLTIEHAGPIPEEMRPMIGNRIYGCDDCLAVCPWNKFASQAAEMKLRPRPELMEPSLAALAALDDASFRTLFSGSPVKRIGRNRFVRNVAIAIGNSGDQALVLALMPLIDDPDPVVAEAAEWALGCLAPQGNPRKCS

SEQ ID NO: 79590 - protein, 339 aa, Pleomorphomonas sp.; identical to SEQ ID NO: 78888
  misc_feature (1)..(339): tr|A0A2Z6I4K9|A0A2Z6I4K9_9RHIZ Epoxyqueuosine reductase OS=Pleomorphomonas sp. SM30 OX=1885025 GN=queG PE=3 SV =1

SEQ ID NO: 79591 - protein, 363 aa, Plesiocystis pacifica
  misc_feature (1)..(363): tr|A6GE52|A6GE52_9DELT 4Fe-4S ferredoxin, iron-sulfur c luster binding protein OS=Plesiocystis pacifica SIR-1 O X=391625 GN=PPSIR1_33541 PE=4 SV=1
MSARLLDEDLAILRDSARALGFAALGAVRLDHPGFEPARAALEAYLDAGWAGEMAFMERTRDLRGDPGQMLDLDARRGTALVGLVPYAGEPGPVARYAQWADYHTEVHRRLEGLGRALVERVGPCETLVCVDTKPVLERSAAVLAGLGFIGKSGCLIAPGLGSYVLIGVLLTDADWAGTDLGARWAEPAGDALPWDACGSCRACLDACPTDAFAAPGSLDPRRCVAYLTIEHRAPIPEDLAKDMGQRVAGCDVCQEVCPYNRSTTRGSRLPPGAELPRPLGRPREPDLPRLATIGSNQYRQFVKGTALNRIPKRSMQRNALIALGNGEGPLDPREREAIEAVLDGDNEALRTLAERALRRRGS

SEQ ID NO: 79592 - protein, 398 aa, Plesiomonas shigelloides
  misc_feature (1)..(398): tr|A0A2P1VS41|A0A2P1VS41_PLESH Epoxyqueuosine reductase OS=Plesiomonas shigelloides OX=703 GN=queG PE=3 SV=1
MTSSSATPAAPDLVQLAQSIKQWGKSLGFQQVGICLPDLREHEPRLQAWLDNHYHGEMGWMASHGMMRARPSELHPGTLRVISVRMNYLPPDARFAKVLRDPLSGYISRYALGRDYHKLLRQRLKQLGEKIQAEVGALGFRPFVDSAPILERPLAANAGLGWVGKHSLLLNREAGSWFFLGELLVDLPLPVDAPVEQECGRCVACMTTCPTGAIVAPYVVDARRCISYLTIESDSAIPLELRRALGNRIYGCDDCQLICPWSRVAPLTEEADFSPRAPLHTPQLLTLWQWDEATFLRLTEGSPIRRIGHRRWLRNLAVALGNAPYQADIVLALQSRLGADELVDEHILWALDEQWQKRSALTISVQPATEQNINTSSVQTTQQRRLVRAIEKGLPRDA

SEQ ID NO: 79593 - protein, 398 aa, Plesiomonas shigelloides
  misc_feature (1)..(398): tr|R8AM24|R8AM24_PLESH Epoxyqueuosine reductase OS=Ples iomonas shigelloides 302-73 OX=1315976 GN=queG PE=3 SV= 1
MTSSSATPAAPDLVQLAQSIKQWGKSLGFQQVGICLPDLREHEPRLQAWLDNHYHGEMGWMASHGMMRARPSELHPGTLRVISVRMNYLPPDARFAKVLRDPLSGYISRYALGRDYHKLLRQRLKQLGEKIQAEVGALGFRPFVDSAPILERPLAANAGLGWVGKHSLLLNREAGSWFFLGELLVDLPLPVDTPVEQECGRCVACMTTCPTGAIVAPYVVDARRCISYLTIESDSAIPLELRRALGNRIYGCDDCQLICPWSRVAPLTEEADFSPRAHLHTPQLLTLWQWDEATFLRLTEGSPIRRIGHRRWLRNLAVALGNAPYQADIVLALQSRLGADELVDEHIQWALDEQWQKRSALAISVQPATEQNINASSVQTPQQRRLVRAIEKGLPRDA

SEQ ID NO: 79594 - protein, 184 aa, Pleurocapsa sp.
  misc_feature (1)..(184): tr|A0A2T1CC58|A0A2T1CC58_9CYAN tRNA epoxyqueuosine(34) reductase QueG (Fragment) OS=Pleurocapsa sp. CCALA 161 OX=2107688 GN=queG PE=4 SV=1
AVDTAPVQDKVWAQRAGLGWIAKNGNVITRKYGSWVFLGEVLTNLSLSADHVHTSHCGSCTRCLEACPTGAITQPYVVDANRCIAYHTIENRDPELPPNIAAHLSGWVAGCDICQDVCPWNQRFAQETDVDDFRPYPGNLQPQLSKLAQLDRIEWDRQFPASALRRIKPDMWRRNARANLNEDK

SEQ ID NO: 79595 - protein, 309 aa, Pleurocapsa sp.
  misc_feature (1)..(309): tr|K9TB05|K9TB05_9CYAN Epoxyqueuosine reductase OS=Pleu rocapsa sp. PCC 7327 OX=118163 GN=queG PE=3 SV=1
MTLDSLQIKEKALSLGFHQVGIAAIANDPDDSAVARLQAWLALGYHADMAWMANSKRFDIRACMSEVQSVICVALNYYTPHQRPEGKEYGKISRYGWGRDYHKVMHKKLKAFSQWLEAQAEGIQTRYYADTGPVQDKVWAQRAGIGWIAKNGNVITREYGSWVFLGEILTNIALKPDTPHAEHCGTCTRCLEACPTGAIAKPFVVDANRCIAYHTIENRAEELPASIASHLSNWIAGCDICQDVCPWNQRFAKETNIADFQPYPWNIGPKLRELAEMSDEEWERRFPASALRRIKPAMLRRNARANLNK

SEQ ID NO: 79596 - protein, 379 aa, Pluralibacter gergoviae
  misc_feature (1)..(379): tr|A0A251ZKP2|A0A251ZKP2_PLUGE Epoxyqueuosine reductase OS=Pluralibacter gergoviae OX=61647 GN=queG PE=3 SV=1
MSQLLDLNQLAQQIKQWGAGLGFQQVGITDTDLSASEPKLQAWLDKQYHGEMTWMARHGMMRARPHELQPGTLRVISVRMNYLPANAAFARTLKNPDLGYVSRYALGRDYHKLLRNRLKKLGEKIQAHCSPLNFRPFVDSAPILERPIAEKAGLGWTGKHSLILSRDAGSFFFLGELLIDLPLPVDKPQAENCGRCVACMTICPTGAIVEPYTVDARRCISYLTIELEGAIPEAFRPLIGNRIYGCDDCQLICPWNRYSQLTDEEDFSPRQALHAPALTELFAWSEAHFLKVTEGSAIRRIGHLRWLRNIAVALGNAPWREENLAALTSRRGEHPLLDEHIEWAIAQQIDKRNACAVEVQLPQKQRLVRVIEKGLPRDA

SEQ ID NO: 79597 - protein, 379 aa, Pluralibacter gergoviae
  misc_feature (1)..(379): tr|A0A0J5L8T1|A0A0J5L8T1_PLUGE Epoxyqueuosine reductase OS=Pluralibacter gergoviae OX=61647 GN=queG PE=3 SV=1
MSQLLDLNQLAQQIKQWGAGLGFQQVGITDTDLSASEPKLQAWLDKQYHGEMAWMARHGMMRARPHELQPGTLRVISVRMNYLPANAAFARTLKNPDLGYVSRYALGRDYHKLLRNRLKKLGEKIQEHCSPLNFRPFVDSAPILERPIAEKAGLGWTGKHSLILSRDAGSFFFLGELLIDLPLPVDKPQAESCGRCVACMTICPTGAIVEPYTVDARRCISYLTIELEGAIPEAFRPLIGNRIYGCDDCQLICPWNRYSQLTDEEDFSPRQALHAPALTELFAWSEAHFLKVTEGSAIRRIGHLRWLRNIAVALGNAPWREENLAALTGRRGEHPLLDEHIEWAIAQQIDKRNACAVEVQLPQKQRLVRVIEKGLPRDA

SEQ ID NO: 79598 - protein, 358 aa, Pokkaliibacter plantistimulans
  misc_feature (1)..(358): tr|A0A318C1P0|A0A318C1P0_9GAMM Epoxyqueuosine reductase OS=Pokkaliibacter plantistimulans OX=1635171 GN=queG P E=3 SV=1
MTTLSTQQLVDLTEKIRLWARDLGFQDMGISSLDLGDHPEHMRQWVEKGLHGEMSYLENNQELRRNPALLHEGTLSIISVRMDYLPPETQALKILNSPAKAYVSRYALGRDYHKVIRKRLTQLAKQIEQDVSALGYRAFVDSAPVMEKPIAEQAGLGWMGKNSLIMNRKAGSWFFLGELFTNLPLISTAQPVKEHCGRCSACMDLCPTNAFIGPKQLDARRCISYLTIEYRGSIPTELRPLMGNRIYGCDDCQLVCPWNRFASSTPEQDFHPRHSLDSADLLTLFEWDEATFLTNTEGSPIRRTGYEGWQRNIAIALGNAPFSTSILGALQSRLTSCSTLVGEHIEWAISQQLCKAEA

SEQ ID NO: 79599 - protein, 306 aa, Polaribacter gangjinensis
  misc_feature (1)..(306): tr|A0A2S7WE17|A0A2S7WE17_9FLAO Epoxyqueuosine reductase OS=Polaribacter gangjinensis OX=574710 GN=queG PE=3 SV =1
MKAKYSQFIKQEAKRLGFLACGIAKAEFLEAEAPRLENWLQKGFQGEMKYMENHFDKRLDPRLLVDDAKSVISLSYNYYPEKQQTNDSYKIAKYAYGEDYHFVIKEKLRELLASIQQEIGEVSGRCFVDSAPILERAWAEKAGLGWNGKHSLLIQKQQGSFFFLAELIVDLELEYDQPTNTNHCGSCTKCIDACPTEAILPNNTIDGSKCISYFTIELKDNIPTDFKNKMDDWMFGCDICQDVCPWNRFSTPHQEPLFHPKEEILQFTKRDWEEITEETFQKVFQKSAVKRTKFSGLQRNIQFLKD

SEQ ID NO: 79600 - protein, 307 aa, Polaribacter porphyrae
  misc_feature (1)..(307): tr|A0A2S7WPE5|A0A2S7WPE5_9FLAO Epoxyqueuosine reductase OS=Polaribacter porphyrae OX=1137780 GN=queG PE=3 SV=1
MPKAKYSQFIKQEAKRLGFLDCGIAKADFLEDEAPKLEKWLKNGFQGKMQYLENHFDKRLDPRLLVDDAKSVISLSYNYYPEKEQNKNSYHISKYAYGEDYHHVIKQKLRELLQAINDKIGEISGRCFVDSAPVLERAWAEKAGLGWNGKHSLLIQKQKGSFFFLAELIIDLELEYDHQTTTNHCGTCTKCIDACPTEAILPNNTVDGSKCISYLTIELKENIPNQFKDKMENWIFGCDICQDVCPWNRFSKPHNEPLFAPKEELLKMNKKDWEEITEDIFKKVFKKSAVKRTKFAGLQRNIRFLKD

SEQ ID NO: 79601 - protein, 313 aa, Polaribacter sp.; identical to SEQ ID NO: 76769
  misc_feature (1)..(313): tr|A0A0R2T1F7|A0A0R2T1F7_9FLAO Epoxyqueuosine reductase OS=Polaribacter sp. BACL8 MAG-120531-bin13 OX=1655554 GN=queG PE=3 SV=1

SEQ ID NO: 79602 - protein, 332 aa, Polaromonas naphthalenivorans
  misc_feature (1)..(332): tr|A1VLG0|A1VLG0_POLNA Putative iron-sulfur cluster bin ding protein OS=Polaromonas naphthalenivorans (strain C J2) OX=365044 GN=Pnap_1172 PE=4 SV=1
MDLSSAEPGLSAWLAAGFHGGMHYMEAHGLKRARPAELVPGTVSVITARMDYLPAATPTQPGQWQAMEFSRLQRPGEGIVSSYARGRDYHKVMRARLQKLAERIGEHVGPFGHRAFTDSAPVLEAELASRSGQGWRGKHTLVLNREAGSMFFLGEIYVDIALPPSAPVTAHCGSCRACIDICPTQAIIAPYQLDARRCISYLTIEHAGPIPLELRRLMGNRIYGCDDCQLACPWNKFAQRSSLPDFDERQGLSGQQLATLFGWTEEAFLRFTEGSPIRRIGHERWLRNIAVAMGNALRAGVADEAGLRASLRGRAGHPSEVVREHVAWALGQ

SEQ ID NO: 79603 - protein, 371 aa, Polaromonas sp.
  misc_feature (1)..(371): tr|A0A389MHH8|A0A389MHH8_9BURK Epoxyqueuosine reductase OS=Polaromonas sp. OX=1869339 GN=queG PE=3 SV=1
MAISNHLNGHLLVSQIQTWARELGFSQIGIAGVDLSSAEAGLSAWLAAGFHGDMHYMAAHGLKRARPAELIPGTVSVITARMNYLPRATSTLPGEWQGMELSRLVRPGEGIVSVYARGRDYHKVMRSRLQKLSERIGEHVAQLGHRAFTDSAPVLEAELAARSGQGWRGKHTLVLNREAGSMFFLGEIYVDIALPPSAAVTAHCGSCNSCISICPTQAIIAPQTLDARRCISYLTIEHAGPIPLELRPLIGNRIYGCDDCQLICPWNKFAQRSALPDFDERQGLSGQQLLTLFAWTEAEFLRFTEGGPIRRIGHARWLRNIAVAMGNALRSADDAALRASLQACASHPDEVVREHVLWALAQSADVLQGAA

SEQ ID NO: 79604 - protein, 312 aa, Polaromonas sp.
  misc_feature (1)..(312): tr|A0A1I7FM68|A0A1I7FM68_9BURK Epoxyqueuosine reductase OS=Polaromonas sp. YR568 OX=1855301 GN=SAMN05216350_10 1581 PE=4 SV=1
MHYMAAHGLKRARPAELIPGTVSVITARMDYLPASTAAVPGEWQALEFSRLERPAEGIVSVYARGRDYHKILRSRLQKLSERISGHVGQLGHRAFTDSAPVLEAELAARSGQGWRGKHTLLLNREAGSMFFLGEIYVDIALPHSEPVTPHCGTCQACIDVCPTRAIIAPHKLDARRCISYLTIEHAGAIPLELRPLMGNRIYGCDDCQLICPWNKFAQRSALPDFDERRGLTGQQLVTLFGWTEEGFLRFTEGSPIRRIGHERWLRNIAVAMGNALRVLDAAQAQPLREALLARASGCGELVTEHVEWALAQ

SEQ ID NO: 79605 - protein, 388 aa, [Polyangium] brachysporum
  misc_feature (1)..(388): tr|A0A0G3BPS4|A0A0G3BPS4_9BURK Epoxyqueuosine reductase OS=[Polyangium] brachysporum OX=413882 GN=queG PE=3 SV =1
MHQSELVVDHAALLADIRQWARELGFSQIGVSGVDLSSAEPGLMAWLGEGFHGSMAYMAAHGLKRARPAELVPGTVSVVTARMDYLPRSTEPGWQAVEFERLAQPEAATVSLYARGRDYHKVMRQRLQKLADRMADRLGPFGHRVFTDSAPVLEAELAGRSGQGWRGKHTLVLNRDAGSMFFLGEIYLDLPLPASEPTSGHCGSCQACLDVCPTRAIVAPHRLDARRCISYLTIEHDGPIPVELRALMGNRIYGCDDCQLICPWNKYAQRAELPDFDVRPVLAEPTLLALWAWTEAEFLRHTEGSAIRRIGHERWRRNLAVAMGNALRAAPSADLERALREALPHATPLVAEHIVWALGDQASAVATASQTGIEAMPSSVDNVTRPAT

SEQ ID NO: 79606 - protein, 385 aa, Polyangium fumosum
  misc_feature (1)..(385): tr|A0A4U1JAE2|A0A4U1JAE2_9DELT tRNA epoxyqueuosine(34) reductase QueG OS=Polyangium fumosum OX=889272 GN=queG PE=4 SV=1
MSASDVDQRVRERAFELGFDVVGVARADEPLDVEHDRYRAFIEAGMHGTMRYLEEHVEERRRLDTEAILPGARSVVCVGRRYARSAEAEAYDPEVARGIARYARGQDYHLFLRKKLRRLAEFIRGLGPGIDARPLCDIEPLMERAWAARAGLGFVGKNGLLIVPGQGSFVMLGEVVTTLVLTPGVPMHERCGACTRCLDACPTGAFPKPFVLDARKCISYLTIEQYEAPPEELRAAIGEHLFGCDVCQEVCPYNRTAPPSEARTQQFHPLPRWSEMRLSDLASLEEEAFPETTQGTPLRRARRGGLARNAAIVAANRLARDPAGPSAEDDVRTLEQAAAHDDAAAREVGVWGLLRIGKPVLREPGSSGPDEDIVDPDAPPFAPRR

SEQ ID NO: 79607 - protein, 411 aa, Polyangium sp.
  misc_feature (1)..(411): tr|A0A4U1HW11|A0A4U1HW11_9DELT tRNA epoxyqueuosine(34) reductase QueG OS=Polyangium sp. SDU3-1 OX=2567896 GN=q ueG PE=4 SV=1
MRDHARPAVRLSAIRQPGANAWGGGALVDDRPDVDRQVRQRAIELGFDVVAVARADEPLGVEHERYRAFIEAGMHGAMGYLAQHAEARRRLNGPEILEGARSVVCVGRRYARTSAEEAGDPPLARTVARYARGQDYHVHLRKKLQKLAAFIRGLGPGIEARALCDIEPVMERVWAMRSGLGFVGKHGLVITPGQGSYLLLGEVVTTLSLVPDVPMHERCGSCTRCLDACPTSAFVKPFVLDPRKCIAYLTIEQHEPPAEELREGIGEHLFGCDVCQEVCPYNRTAPPPAERTKQFHPLPRWEGMDLPDLVALDEESFPEATTGTPLRRARREGLARNAVIVAANRLARAPAGPHAEADRAVLERASTHDDPSVREMAAWGRARVEAGSEAHEEAENGGEDRGEGGSVAPSS

SEQ ID NO: 79608 - protein, 354 aa, Polycyclovorans sp.
  misc_feature (1)..(354): tr|A0A2E2J6C1|A0A2E2J6C1_9GAMM Epoxyqueuosine reductase OS=Polycyclovorans sp. OX=2024852 GN=queG PE=3 SV=1
MALDDIRRHARTLGFADVGVAHLDLGEDLAHLDAYLEAGFHGEMDYLARNIALRASPAALQPGTLSVLSLRMPYLSDTVERAMDTLRDPERAYVSRYALGRDYHKRMRKQLAALAEWMAEALAPHGYRVFCDSAPSLEKALARNAGLGWIGKNTLLLNRDAGSFFFLGEIYTDLVLPPADTDPVPAECGRCQACLKICPTNAFVGPYRLDARRCISYLTIEQRGSIPEPLRRAIGNRIFGCDDCQLVCPWNRYAQRSQAPDFAPRHGLDRPALLDLWAWTQADWHARTEGMALRRAGWSGWRRNLAVALGNAPFSEQVLSALEQGREGADALVAEHIDWAMDEQRQKGQSRAAT

SEQ ID NO: 79609 - protein, 349 aa, Polymorphobacter sp.
  misc_feature (1)..(349): tr|A0A4Y9EN95|A0A4Y9EN95_9SPHN Epoxyqueuosine reductase OS=Polymorphobacter sp. DJ1R-1 OX=2511025 GN=queG PE=3 SV=1
MTDLPAKLAAEAARIGFAAIGIAPATAAPQAGERLRAWLADGRHGDMLWMADTVDRRASPQGLWPEVRSVIMLGTSYAPALDPLRHAGHPDTGVISVYALGSDYHDSIKKRLKALAGWLVTAAGGNVKVFVDTAPVMEKPLAAAAGLGWQGKHTNLVSRDYGSWLLLGAIYTTLDLNADTPARDRCGSCTACQTACPTNAFPAPYQLDARRCISYLTIEHKGPIPAEFRTAIGNRIYGCDDCLAVCPWNKFAQAAHDLTYRPRAELVAPALADLLALDDAGFRAIFAGSPVKRIGRNRMVRNAAIAAGNSGDQSLMPALQTLAADADVVVAEAAGWALEKLSAVPFRVP

SEQ ID NO: 79610 - protein, 373 aa, Polymorphum gilvum
  misc_feature (1)..(373): tr|F2J6U4|F2J6U4_POLGS Epoxyqueuosine reductase OS=Poly morphum gilvum (strain LMG 25793 / CGMCC 1.9160 / SL003 B-26A1) OX=991905 GN=queG PE=3 SV=1
MAALRARAAALGFDALGVAPSDAIPQAPARLRRFLADGHHATMAWMAETEARRADPRVLWPQVRSVIMLAMTYGPDTDPLAHLADPSSAGISVYARNRDYHDIVKGRLKELASLLVARAGGDVKVFVDTAPVMEKPLAEAAGLGWQGRHTNLVSRRLGSWFFLGSIFTTLDLPADGPEADHCGSCRACLDACPTDAFPAPYRLDARRCISYLTIEHDGPIPVEFRKAMANRIYGCDDCLAACPWNKFAQAAREAKLVARSDLVAPRLADLIELDDAAFRQKFAGSPIKRIGRDRFVRNVLVAAGNSGDVGLIPAIRRRLSADSSQVRGAAVWALAQLAPKALFEQEKSTHLAAEDDPAVRAEWLAGAAQPHCQ

SEQ ID NO: 79611 - protein, 364 aa, Polynucleobacter aenigmaticus
  misc_feature (1)..(364): tr|A0A254Q3R9|A0A254Q3R9_9BURK Epoxyqueuosine reductase OS=Polynucleobacter aenigmaticus OX=1743164 GN=queG PE =3 SV=1
MTSSKTPNSFDQANLREWLGEQSKKLGFDGLRITDTHLGVATERLNTWLAEGRHGQMEYMARHAQLRSDPGLLVPGTVRVICVTMNYLSPAIDFDVEWQRLAEPTQAVVSMYARGRDYHKVLRNRLQEFAQIIEKHIGSFGYRVFTDSAPLMEVELARKAGLGWRGKHTLLLNRESGSTFFLGEILVDVPLPVDQEEESHCGTCQSCIEICPTQAITAPYELDARRCISYLTIENPDAIPVEFRKAMGNRVYGCDDCQLICPWNKFAQRTALPDFAERHGLGKASLLQLWSWTEDQFEKRHEGSAIRRIGYSRWRRNLAVALGNAITDEQVATADKVLIREALSSALPMADVLVAEHIEWALSS

SEQ ID NO: 79612 - protein, 364 aa, Polynucleobacter asymbioticus
  misc_feature (1)..(364): tr|A0A1J0D4E2|A0A1J0D4E2_9BURK Epoxyqueuosine reductase OS=Polynucleobacter asymbioticus OX=576611 GN=queG PE= 3 SV=1
MPLSANLTSLDEAKLRNWLGEQSHELGFDALRITDTHLGPASDRLQTWLSEGRHGHMEYMQRHADLRSDPQLLVPGTLRVICVSMNYLPPETSFEREWERMADPSQAVVSLYARGRDYHKVLRNRLQEFAKRIEEKIGAFGYRVFTDSAPLMEVELARKAGLGWRGKHTLLLNRESGSTFFLGEILVDIPLPIDTEVEEHCGTCTSCIDICPTQAITAPYQLDARRCISYLTIENPEAIPLEFRRAMGNRVYGCDDCQLICPWNKFAKRTQMPDFVQRHGLGQATLLQLWSWTEAEFEQRHEGSAIRRIGYLRWRRNLAVAMGNALSNPTVPASQKDDIRLALQHGLEGADPLLVEHIDWALSA

SEQ ID NO: 79613 - protein, 364 aa, Polynucleobacter asymbioticus
  misc_feature (1)..(364): tr|A4SWF1|A4SWF1_POLAQ Epoxyqueuosine reductase OS=Poly nucleobacter asymbioticus (strain DSM 18221 / CIP 10984 1 / QLW-P1DMWA-1) OX=312153 GN=queG PE=3 SV=1
MPLSANLTSLDEAKLRNWLGGQSHELGFDALRITDTHLGPASDRLQTWLSEGRHGHMEYMQRHADLRSDPQLLVPGTLRVICVSMNYLPPETSFEREWERMADPSQAVVSLYARGRDYHKVLRNRLQEFAKRIEEKIGAFGYRVFTDSAPLMEVELARKAGLGWRGKHTLLLNRESGSTFFLGEILVDIPLPIDTEVEEHCGTCTSCIDICPTQAITAPYQLDARRCISYLTIENPEAIPIEFRRAMGNRVYGCDDCQLICPWNKFAKRSQMPDFVQRHGLGQATLLQLWSWTEAEFEQRHEGSAIRRIGYLRWRRNLAVAMGNALSNSTVPASQKDDIRLALQHSLEGADPLLVEHINWALST

SEQ ID NO: 79614 - protein, 366 aa, Polynucleobacter campilacus
  misc_feature (1)..(366): tr|A0A254Q876|A0A254Q876_9BURK Epoxyqueuosine reductase OS=Polynucleobacter campilacus OX=1743163 GN=queG PE=3 SV=1
MSLSTNPSTLDQPKLRAWLGEQAESFGFDDLRITDTHLGIASERLQEWLAEGRHGHMEYMQRHADLRSDPQLLVPGTVRVICVSMNYLPPESDFDAEWQRLEDPSQAVVSMYARGRDYHKVLRNRLQDFAKAIEEKIGAFGYRVFTDSAPLMEVELARKAGLGWRGKHTLLLNRESGSTFFLGEILVDVPLPLDEEQDEHCGTCQSCIDICPTKAITAPYQLDARRCISYLTIENPEAIPVEFRIAMGNRIYGCDDCQLICPWNKFAKRSQLPDFAQRHGLGQASLLHLWSWTEAEFEQRHEGSAIRRIGYSRWRRNLAVAMGNALASPKVTATDKDLIQKALSESLSSADALVAEHIEWALKAYN

SEQ ID NO: 79615 - protein, 393 aa, Polynucleobacter cosmopolitanus
  misc_feature (1)..(393): tr|A0A229FW98|A0A229FW98_9BURK Epoxyqueuosine reductase OS=Polynucleobacter cosmopolitanus OX=351345 GN=queG P E=3 SV=1
MSIFCHWDLQSHHGAKIVTQTQTTKDHFIQDISWLRREAIDLGFGDIRVSDTDLSVAGPRLKEWLDAGRHGDMNYMRERAHLRLNPQELQPGTVRVLTVRMDYLPDTSEMRQAVDWRNKEIARWDEPSQAVVAMYARGRDYHKVLRQRLQSLADVIEKKIGPFGYRVFVDSGPVMEVEMANKSGLGWRGKHTLLLNREAGSMFFLGEILVDVPFPVDEPITSHCGECSACINICPTQAITAPYQLDARRCISYLTIEHQGSIPEELRPLMGNRVYGCDDCQLVCPWNKFAQLSSVPDFLPRHGLEHADLLNLWSWSEEDFLSKHEGSPIRRIGYEAWRRNLAVGMGNALRSETLDDGVREKIIGGLKQVLPNASDMLKEHIEWALMQTSKVSK

SEQ ID NO: 79616 - protein, 364 aa, Polynucleobacter duraquae
  misc_feature (1)..(364): tr|A0A0E3ZKW4|A0A0E3ZKW4_9BURK Epoxyqueuosine reductase OS=Polynucleobacter duraquae OX=1835254 GN=queG PE=3 S V=1
MTSSQIPNSVDQANLREWLGEQSRKLGFDDLCITDTHLGVATERLNDWLAQGRHGQMEYMAKHAQLRSDPTLLVPGTVRVICVTMNYLSPAIDFHHEWDRLKDSAQAVVSMYARGRDYHKVMRNRLQEFAQLIEERIGAFGYRVFTDSAPLMEVELARKAGLGWRGKHTLLLNRESGSTFFLGEILIDVPLPVDQEQESHCGTCQSCIDICPTQAITAPYQLDARRCISYLTIENPDAIPTEFRKAMGNRVYGCDDCQLICPWNKFAQRTALPDFAERHGLGKASLLQLWSWTEDEFEKRHEGSAIRRIGYSRWRRNLAVAMGNALAANDLPESDKDLLRQALQGALPLADALVAEHINWALSC

SEQ ID NO: 79617 - protein, 365 aa, Polynucleobacter hirudinilacicola
  misc_feature (1)..(365): tr|A0A210RZQ8|A0A210RZQ8_9BURK Epoxyqueuosine reductase OS=Polynucleobacter hirudinilacicola OX=1743166 GN=que G PE=3 SV=1
MSLSTNSKSLDQPKLRAWLGERAESLGFDGLRITDTHLGPASQRLQEWLAEGRHGNMEYMQRHADLRSNPQLLVPGTVRVICVSMNYLPPESDFDSEWQQLDNPSQAVVSMYARGRDYHKVLRNRLQDFAKAIEEKIGTFGYRVFTDSAPLMEVELARKAGLGWRGKHTLLLNRESGSTFFLGEILVDVPLLIDQEQEEHCGTCQSCIDICPTQAITAPYQLDARRCISYLTIENPEAIPVEFRSAMGNRVYGCDDCQLICPWNKFAKRSQLPDFAQRHGLGQASLLHLWSWTEAEFEQRHEGSAIRRIGYSRWRRNLAVAMGNALSSPKTDAADKILIHKALSEALSSADSLVAEHIEWAIRAS

SEQ ID NO: 79618 - protein, 368 aa, Polynucleobacter meluiroseus
  misc_feature (1)..(368): tr|A0A240E1R8|A0A240E1R8_9BURK Epoxyqueuosine reductase OS=Polynucleobacter meluiroseus OX=1938814 GN=queG PE= 3 SV=1
MTTDPFPKSSEVQLDKLRNWLQDQAHGFGFDDLRITDTHLGEATEHLQQWLAEGRHGQMDYMERHAALRSDPGLLVPGTVRVICVTMNYLPPTFSLEGEWQRIADPSAAVVSMYARGRDYHKVLRQRLQDFAKAVEAHLGSFGYRVFTDSAPLMEVELARKAGLGWRGKHTLLLNRESGSTFFLGEILVDVPLPMDQAQEPHCGSCTACIDVCPTQAITAPYQMDARRCISYLTIENHAAIPVEFRKAMGNRVYGCDDCQLICPWNKFAKRTALPDFAERHGLGKASLLHLWSWTEGEFEKRHEGSAIRRIGYSRWRRNLAVAMGNALTAADLPETEKEPIRIALQTALPQADALVAEHIEWALNTER

SEQ ID NO: 79619 - protein, 375 aa, Polynucleobacter paneuropaeus
  misc_feature (1)..(375): tr|A0A2Z4JKS0|A0A2Z4JKS0_9BURK Epoxyqueuosine reductase OS=Polynucleobacter paneuropaeus OX=2527775 GN=queG PE =3 SV=1
MSSPSSSPSTLDSAQLGSLRQWLDGEARAIGFDDVRVTDTHLGEATNKLREWLAAGRHGHMEYMQRHAALRSDPQLLLPGTTRVICVRMNYVPPEVDFEQEWQRLAQPDQAVVSIYARGRDYHKILRQRLQDFAKSIEAKIGSFGYRVFTDSAPLMEVELARKAGLGWRGKHTLLLNREAGSTFFLGEILVDIPLPLDTEIEEHCGSCSACIDICPTQAITAPYALDARRCISYLTIENPDLIPIEFRKAMGNRVYGCDDCQLICPWNKFAQRSTLPDFAARNGLGSASLLELWSWTEVQFERNHEGSAIRRIGYAKWRRNLAVALGNALGSDTPEEEKKGIREALIAALDIAADTPPLVVEHIEWALAQSNHSV

SEQ ID NO: 79620 - protein, 375 aa, Polynucleobacter paneuropaeus
  misc_feature (1)..(375): tr|A0A2Z4JTY7|A0A2Z4JTY7_9BURK Epoxyqueuosine reductase OS=Polynucleobacter paneuropaeus OX=2527775 GN=queG PE =3 SV=1
MSSPSSSPSTLDSAQLGSLRQWLDGEARAIGFDDVRVTDTHLGEATNKLREWLAAGRHGHMEYMQRHAALRSDPQLLLPGTTRVICVRMNYVPPEVDFEQEWQRLAQPDQAVVSIYARGRDYHKILRQRLQDFAKSIEARIGSFGYRVFTDSAPLMEVELARKAGLGWRGKHTLLLNREAGSTFFLGEILVDIPLPLDTEIEDHCGSCSACIDICPTQAITAPYALDARRCISYLTIENPDLIPIEFRKAMGNRVYGCDDCQLICPWNKFAQRSTLPDFAVRNGLGSASLLELWSWTEVQFERNHEGSAIRRIGYAKWRRNLAVALGNALGSDTPEEEKKGIREALIAALDIAADTPPLVVEHIEWALAQSNHSV

SEQ ID NO: 79621 - protein, 374 aa, Polynucleobacter sp.
  misc_feature (1)..(374): tr|A0A5C7U8Q3|A0A5C7U8Q3_9BURK Epoxyqueuosine reductase OS=Polynucleobacter sp. OX=2029855 GN=queG PE=3 SV=1
MSQFHPSNSIDWINQIDWLRDEARALDFGDIRVSDTDLSQAGPKLREWLAAGCHGDMNYMSQHAHLREDPQQLHPGTIRVLTVRMDYLPNTPEMRSALDWRQNEMQKWEGGDQAIVAMYARGRDYHKVLRHRLQTLAEKIQNKIGSYGYRVFVDSGPVMEVELAHKSGLGWRGKHTLLLNREAGSMFFLGEIYVDIPFPVDPPITSHCGECTACMDVCPTKAITAPYQLDSRRCISYLTIEHRGSIPVELRPLMANRIYGCDDCQLICPWNKFAQLSAVPDFLPRHGLDQSSLLDLWSWGEKDFLSRHEGSPIRRIGYKAWRRNLAVGMGNALRSTSVLEQDKDAIEQALQKVLPFESDMVKEHILWALEQKSI

SEQ ID NO: 79622 - protein, 373 aa, Polynucleobacter sp.
  misc_feature (1)..(373): tr|A0A1W1ZMA8|A0A1W1ZMA8_9BURK Epoxyqueuosine reductase OS=Polynucleobacter sp. VK13 OX=1938817 GN=queG PE=3 S V=1
MTSENENYTEILHWLRTQAKELGFSDVRISDLDLSQELPFFQDWLKKGRHGQMHYMSRHANLRANPEELLPGVVRSICFRMDYLPREQIQNPTAENFRKKELEQLQDPSHATISVYARGRDYHKVLRKNLLTIAKLLEEKLAHLNYRVLVDSAPVLEVALATKSGIGWRGKHTLSLNRQAGSMYFLGEIFVDIPLPIDQPISNHCGTCQDCIDLCPTKAILAPFQIDANRCISYLTIEHPGAIPLELRTLMGNHVYGCDDCQLVCHWNKFAKKSNLSDFDVRNQLDRSTLEDLFGWEKADFEKKMQGSAIYRIGYERWMRNIAVALGNYLRSDAIDSIQKLNIAELLSKRIGQISELVDEHITWALNFEKSIK

SEQ ID NO: 79623 - protein, 365 aa, Polynucleobacter sphagniphilus
  misc_feature (1)..(365): tr|A0A1R0HAT4|A0A1R0HAT4_9BURK Epoxyqueuosine reductase OS=Polynucleobacter sphagniphilus OX=1743169 GN=queG P E=3 SV=1
MDSSVNSSSIDAHALRDWLREKAGVFGFDGLRITDTHLGVAKERLQEWLAQGRHGAMEYMSRQAQLRANPELLLPGTVRVICLSMSYLSPSVHFEGEWERLNDPSQAVVSMYARGRDYHKVLRQRMQDFAQVIEEKIGCLGYRVFTDSAPLMEVELARKAGLGWRGKHTLLLNRESGSSFFLGEILVDVPLPLDDEQVEHCGTCTSCMDICPTQAITAPYQLDARRCISYLTIENPAAIPIEFRRAMGNRVYGCDDCQLICPWNKFSKRTELPDFAERHGLGSATLLQLWSWTKEEFEKRHEGSAIRRIGYARWLRNLAVAIGNALASKEVAFSEKEKMRHELRVRLPNVDALVAEHIEWALEQL

SEQ ID NO: 79624 - protein, 375 aa, Polynucleobacter victoriensis
  misc_feature (1)..(375): tr|A0A212T6N0|A0A212T6N0_9BURK Epoxyqueuosine reductase OS=Polynucleobacter victoriensis OX=2049319 GN=queG PE =3 SV=1
MTQEKITTAISVDWIQDISWIRDAARSLGFGDIRVSDTDLSQASERLKEWLKAGRHGDMNYMSERAHLRANPAELQPGTIRVITARMDYLPDNTEIRQSVDWRDMEMAKVENPTQAVVAMYARGRDYHKVLRQRLQTLAEEIQKKVGSLGYRVFVDSGPVMEVELAQKSGLGWRGKHTLLLNREAGSMFFLGEILVDVPFPVDEPITSHCGECSACINICPTGAITAPYQLDARRCISYLTIEHKGSIPLELRSLMGNRIYGCDDCQLACPWNKFAQMTALPDFLPRHGLDQASLLDLWSWSEEDFLSRHEGSPIRRIGYQAWLRNLAVGIGNALQATSLSKSQKEQIRVALINKRVSVSPMVQEHIDWALNAGL

SEQ ID NO: 79625 - protein, 366 aa, Polynucleobacter wuianus
  misc_feature (1)..(366): tr|A0A191UFX4|A0A191UFX4_9BURK Epoxyqueuosine reductase OS=Polynucleobacter wuianus OX=1743168 GN=queG PE=3 SV =1
MPLSSNLSTLDESELQTWLGEKAVKLGFNGLRITNTHLGSASERLQEWLAEGRHGHMEYMQRHANLRSDPGLLVPGTVRVICVTMNYLPVDCDFDREWKRLEDPAQAIVSMYARGRDYHKVLRNRLQDFAKAIEEKIGTFGYRVFTDSAPLMEVELARKAGLGWRGKHTLLLNRESGSTFFLGEILVDVPLPIDQESEEHCGTCTSCIDVCPTQAITAPYQLDARRCISYLTIENPESIPMEFRRAMGNRVYGCDDCQLICPWNKFAKRTQLPDFAQRHGLGQASLLHLWSWTEAEFEQRHEGSAIRRIGYSRWRRNLAVAMGNALRGPRIADHEKEEIRKALSMGMATADSLVTEHIQWALNPSS

SEQ ID NO: 79626 - protein, 359 aa, Pontibaca methylaminivorans
  misc_feature (1)..(359): tr|A0A1R3WZ50|A0A1R3WZ50_9RHOB Epoxyqueuosine reductase OS=Pontibaca methylaminivorans OX=515897 GN=queG PE=3 SV=1
MAAGRKKKAPLDGATLKTRLVEQARAEGFVSCRICRPGDIPQVPGRLRAYLDAGWHGQMEWMERRSDWRGNPESLWPEARSVIMLAESYTPEHDPTAVLSLPDRGAISVYAQNRDYHDLVKKRLKRLARWLIAESGEGTELKVFVDTAPVAEKPLGQAAGLGWQGKHTVLISRDWGNWAFLGAIFTTLDLPPDTPGREHCGTCRACLDACPTDAFPAPWKLDARRCISYLTIEYKGPVAEDLRPLLGNRIYGCDDCLAACPWNKFAVTASDMRYAARADLVAPKLADLAVLDDAGFRAMFSGSPIKRIGRDRFVRNVLYAIGNSGDPGLLGVARSLVDDPDPMVADAARWAVGRLEALE

SEQ ID NO: 79627 - protein, 375 aa, Pontibacillus chungwhensis
  misc_feature (1)..(375): tr|A0A0A2UQ41|A0A0A2UQ41_9BACI Epoxyqueuosine reductase OS=Pontibacillus chungwhensis BH030062 OX=1385513 GN=q ueG PE=3 SV=1
MDIHELKEDVKAYAKEIGIDKIGFTTPDVFTELKERLRTQQDLGYQSGFEKGSIEERTEPNRLVPEAKSIISIALAYPSKLKDAPRSTKDDRRGLFCRASWGQDYHDVLRDRLNKLGEYLQGRVSDFYGRSMVDTGELSDRAVAERAGIGFTGKNTNLITEEYGSYVYLGEMLTNIAFPPDEPVEDSCGDCNICVDACPTGALIEGGQLNAQKCIAFLTQTKGFLPDEYRGVIGNRLYGCDTCQTVCPKNKKKHNLIHAEFQPDPEKVKPSLKPLLSVSNREFKETYGQMSGSWRGKKPIQRNAILALAHYKDETAVDELIRLMTQDPRPVIRGTAAWALGKIGNPSAYTAIHEAKAKETDDEVVGEMDKGLALL

SEQ ID NO: 79628 - protein, 379 aa, Pontibacillus halophilus
  misc_feature (1)..(379): tr|A0A0A5GHT6|A0A0A5GHT6_9BACI Epoxyqueuosine reductase OS=Pontibacillus halophilus JSM 076056 = DSM 19796 OX= 1385510 GN=queG PE=3 SV=1
MDLAQFKEDVIQYSKQIGIDKIGFASPDVFTEMKERLRTQQELGYQSGFEKGSIEERTEPKLHVPESKSIISIALAYPSKLKDAPRSTREERRGLFCRASWGEDYHDVLNERLYRLASYLKERYPDLQFRSMVDTGELPDRAVAERAGIGFTGKNTNLITSEFGSYVYLGEMITNIPFAPDEPVEDSCGDCNICVDACPTGALIQGGQLNAQKCIAFLTQTKDFLPDEYRGVIGNRLYGCDTCQTVCPKNKKKDFHNHPEMEPDPEKVKPKLKPLLSISNREFKETYGKMSGSWRGKKPIQRNAILALAHFKDVTAVDELVRLMKEDPRPVIRGTAAWALGKIGDWQGKEAIESAQMKETDEQVLDEMRKGLEFFTENV

SEQ ID NO: 79629 - protein, 380 aa, Pontibacillus litoralis
  misc_feature (1)..(380): tr|A0A0A5G879|A0A0A5G879_9BACI Iron-sulfur cluster-bind ing protein OS=Pontibacillus litoralis JSM 072002 OX=13 85512 GN=N784_15495 PE=4 SV=1
MDIQQLKEDVMQYSKTIGIDKIGFTSPDVFTQLKERLRVQQALGYQSGFEKGTIEERTEPKLHVPEAKSIISIALAYPSKLKGAPRSKKGERRGIFCRASWGEDYHNVLNDRLNKLASYLQERYPELRWRSMVDTGELSDRAVAERAGIGFVGKHTNLITEEFGSYVYLGEMITNIPFPSDELVEDSCGDCTICVDACPTGALVQGNQLNAQKCIAFLTQTKGFLPDQYRSVIGNRLYGCDTCQTVCPKNKKKDFHLHQEMEPEPEKVKPLLTPLLSISNRQFKETYGQMSGSWRGKKPIQRNAILALAHFKEESAVDELTRLMFEDPRPVIRGTAAWALGKIGVASSEEVIRKARATERDEDVRAEMEKGLALLNESSH

SEQ ID NO: 79630 - protein, 383 aa, Pontibacillus marinus
  misc_feature (1)..(383): tr|A0A0A5FU35|A0A0A5FU35_9BACI Epoxyqueuosine reductase OS=Pontibacillus marinus BH030004 = DSM 16465 OX=13855 11 GN=queG PE=3 SV=1
MDIHELKADMIEYSQSIGIDKIGIASPDVFTELKERLRAQQENGYQSGFEKGTVDERTQPQNLVPEAKSIISIALAYPSKLQDAPQSVKGDRRGLFCRASWGQDYHDVLRDRLNKLAEYLEEKYPGFVFRSMVDTGELSDRAVAERAGIGFTGKNTNLITEEFGSYVYLGEMITNIPFSPDDPVEDSCGDCNICVDACPTGALIQGGQLNAQKCIAFLTQTKGFLPDEYRGVIGNRLYGCDTCQTVCPKNKRKRNLIHEEFQPDPEKVKPKLKPLLSISNREFKETYGEMAGSWRGKKPIQRNAILALAHFKDDSANDDLVRLMKEDPRPVIRGTAAWALGKIGNPDAYDSIMLAKQKENDAEVIAEMEKGIKLLEKEPKQLS

SEQ ID NO: 79631 - protein, 380 aa, Pontibacillus yanchengensis
  misc_feature (1)..(380): tr|A0A0A2T6X4|A0A0A2T6X4_9BACI Epoxyqueuosine reductase OS=Pontibacillus yanchengensis Y32 OX=1385514 GN=queG PE=3 SV=1
MDIHAFKEDMIAYSKEIGIDKIGIASPDVFTELKERLRTQQELGYQSGFEKGSLEERTEPKRHVTEAKSIISIALAYPSKLKNAPRSTKEERRGIFCRASWGQDYHDVLNDRLEKLAAYLKEKYPGFTWRSMVDTGELSDRAVAERAGIGFTGKNTNLITPEYGSYVYLGEMITNIPFTPDDPVDDSCGDCNICVDACPTGALVQGNQLNAQKCIAFLTQTKGFLPDEYRGVIGNRIYGCDTCQTVCPKNKKKDFHLHPEMEPDPEVVKPKLKPLLSISNREFKETFGHISGSWRGKKPLQRNAILALAHYKDETAVEELVRVMKQDPRPVIRGTAAWALGKIGVPSSYDEILLARDKEEDEDVLEEMEKGLRYFHPLNK

SEQ ID NO: 79632 - protein, 313 aa, Pontibacter actiniarum
  misc_feature (1)..(313): tr|A0A1X9YX15|A0A1X9YX15_9BACT Epoxyqueuosine reductase OS=Pontibacter actiniarum OX=323450 GN=queG PE=3 SV=1
MSKEKYTYLIKQKAKELGFMYCGVSKAEFLEEEAPRLERWLNQNMHGQMRYMENHFDKRLDPRLLVDGAKSVVSLLLNYYPAKDDQQQEEDTYKVSKYAYGTDYHFVIKDKLKTLLSYINEEIGEVGGRCFVDSAPVMDKAWAKKSGLGWVGKSSNLITPQVGSFYFIAELIIDLDLEYDGPIKDYCGSCTRCLDACPTGAITEPYVVDGSKCISYFTIELKDQLPSEMNGKFGNWVFGCDICQDVCPWNRFSKPHSEPAFAPHPELKTLKTSDWQELTHEVFSQLFKKSAVKRTGYNGLVRNIRFVQEDSDK

SEQ ID NO: 79633 - protein, 314 aa, Pontibacter akesuensis
  misc_feature (1)..(314): tr|A0A1I7JF93|A0A1I7JF93_9BACT Epoxyqueuosine reductase OS=Pontibacter akesuensis OX=388950 GN=queG PE=3 SV=1
MSKEKYTYLIKQKAQELGFMYCGISKADFLEEEAPRLERWLNQNMHGQMHYMENHFDKRLDPRLLVDGAKSVVSLLLNYYPEKENQQQEEDTYKISKYAYGTDYHFVIKDKLKTLLAYINEEIGEVGGRCFVDSAPVLDKAWAKKSGLGWVGKNSNLITPQVGSFYFIAELIINLELEYDGPIKDYCGSCTRCLDACPTGAITEPYVVDGSKCISYFTIELKDQLPQEMNGKFGNWVFGCDICQDVCPWNRFSKPHQEPAFAPHPDLKHLKTSDWQELTHEVFSQLFRKSAVKRTGYNGLLRNILFVQDSPEKD

SEQ ID NO: 79634 - protein, 314 aa, Pontibacter chinhatensis
  misc_feature (1)..(314): tr|A0A1I2VJ16|A0A1I2VJ16_9BACT Epoxyqueuosine reductase OS=Pontibacter chinhatensis OX=1436961 GN=queG PE=3 SV =1
MSKEKYTYLIKQKASELGFMYCGISKADFLEEEAPRLERWLNQHMHGQMHYMENHFDKRLDPRLLVEGAKSVVSLLLNYYPSQEDQQPEEDTYKISKYAYGTDYHFVIKDKLKTLLSYINEEIGEVGGRCFVDSAPVLDKAWAKKSGLGWVGKNSNLITPQVGSFYFIAELIIDLELEYDGPIKDYCGSCTRCLDACPTNAIVEPYVVDGSKCISYFTIELKDQLPQEMNGKFGNWVFGCDICQDVCPWNRFSKPHSEPAFAPHPQLKELKASDWQELTHEVFSQLFKKSAVKRTGYNGLVRNIRFVHGNPEEE

SEQ ID NO: 79635 - protein, 310 aa, Pontibacter diazotrophicus
  misc_feature (1)..(310): tr|A0A3D8LCR3|A0A3D8LCR3_9BACT Epoxyqueuosine reductase OS=Pontibacter diazotrophicus OX=1400979 GN=queG PE=3 SV=1
MNKEKYTHLIKQKAKELGFMYCGVSKAEFLEEEAPRLERWLNQNMHGQMHYMESHFDKRLDPRLLVEGAKSVVSLLLNYFPEETQPEEDTYKISKYAYGTDYHFVIKDKLKELLHYINEEIGEVGGRCFVDSAPVLDKAWAKKSGLGWVGKNSNLITPQVGSFYFIAELIIDLELEPDGPIKDYCGSCTRCLDACPTGAITEPYVVDGSKCISYFTIELKDQLPQEMHGKFGNWVFGCDICQDVCPWNRFSKPHSEPAFAPHPHLKEMKVNDWQELTQEVFSQLFKKSAVKRTGYSGLLRNIHFVEQQPD

SEQ ID NO: 79636 - protein, 313 aa, Pontibacter indicus
  misc_feature (1)..(313): tr|A0A1R3XIF1|A0A1R3XIF1_9BACT Epoxyqueuosine reductase OS=Pontibacter indicus OX=1317125 GN=queG PE=3 SV=1
MNKAQHTYLIKQKAQELGFMYCGVSKADFLEEEAPRLENWLKQNMHGQMHYMENHFDKRLDPRLLVEGAKSVVSLLLNYYPEKENQQTGEDTYKVSKYAYGTDYHFVIKDKLKTLLQYINEEIGEVGGRCFVDSAPVLDKAWAKKSGLGWVGKNSNLIAPQVGSFFFIAELIIDLELEHDGPIKDYCGSCTRCLDACPTDAIVAPYVVDGSKCISYFTIELKDQLPQEMHGKFGNWIFGCDICQDVCPWNRFSKPHQEPAFEAHPQLKEMKKSDWEEITQEVFSQLFKKSAVKRTGYNGLLRNIRFVEQSPGS

SEQ ID NO: 79637 - protein, 314 aa, Pontibacter korlensis
  misc_feature (1)..(314): tr|A0A0E3UZ13|A0A0E3UZ13_9BACT Epoxyqueuosine reductase OS=Pontibacter korlensis OX=400092 GN=queG PE=3 SV=1
MSKEKYTYLIKKKAKELGFMFCGISKAEFLEEEAPRLERWLNQNMHGQMRYMENHFDKRLDPRLLVDGAKSVVSLLLNYYPDKENQQQEEDTYKISKYAYGTDYHFVIKDKLKTLLNYINEEIGEVGGRCFVDSAPVMDKAWAKKGGLGWVGKNSNLITPQVGSFYFIAELIIDLELEYDGPIKDYCGSCTRCLDACPTGAITEPYVVDGSKCISYFTIELKDQLPQEMNGKFGNWVFGCDICQDVCPWNRFSKPHNEPAFSAHPQLKELKTRDWQELTHEVFSQLFKKSAVKRTGYNGLMRNISFVQDNPEEE

SEQ ID NO: 79638 - protein, 315 aa, Pontibacter lucknowensis
  misc_feature (1)..(315): tr|A0A1N6TNZ8|A0A1N6TNZ8_9BACT Epoxyqueuosine reductase OS=Pontibacter lucknowensis OX=1077936 GN=queG PE=3 SV =1
MNKAQYTYLIKQKAQELGFMYCGVSKADFLEEEAPRLENWLKQNMHGQMHYMENHFDKRLDPRLLVEGAKSVVSLLLNYYPEQEKQQTGEDTYKVSKYAYGTDYHFVIKDKLKTLLSFINDEIGEVGGRCFVDSAPVLDKAWAKKSGLGWVGKNSNLITPQVGSFYFIAELIIDLELEYDGPIKDYCGSCTRCLDACPTDAIVAPYVVDGSKCISYFTIELKDQLPQEMNGKFGNWIFGCDICQDVCPWNRFSKPHQEPAFEPHPQLKEMKKSDWEEITQEVFAQLFKKSAVKRTGYNGLLRNIRFVEQGPGSQT

SEQ ID NO: 79639 - protein, 314 aa, Pontibacter mucosus
  misc_feature (1)..(314): tr|A0A2T5YK21|A0A2T5YK21_9BACT Epoxyqueuosine reductase OS=Pontibacter mucosus OX=1649266 GN=queG PE=3 SV=1
MSKEKYTYLIKQKASELGFMYCGISKADFLEEEAPRLERWLNQHMHGQMHYMENHFDKRLDPRLLVEGAKSVVSLLLNYYPSQEDQQPEEDTYKISKYAYGTDYHFVIKDKLKTLLNYINEEIGEVGGRCFVDSAPVLDKAWAKKSGLGWVGKNSNLITPQVGSFYFIAELIIDLELEYDGPIKDYCGSCTRCLDACPTNAIVEPYVVDGSKCISYFTIELKDQLPQEMNGKFGNWVFGCDICQDVCPWNRFSKPHHEPAFAPHPQLKELKERDWQELTHEVFSQLFKKSAVKRTGYNGLVRNIRFVHGNPEEE

SEQ ID NO: 79640 - protein, 315 aa, Pontibacter ramchanderi
  misc_feature (1)..(315): tr|A0A2N3UBB0|A0A2N3UBB0_9BACT Epoxyqueuosine reductase OS=Pontibacter ramchanderi OX=1179743 GN=queG PE=3 SV= 1
MNKAHYTYLIKQKAQELGFMYCGISKADFLEEEAPRLENWLKQNMHGQMHYMENHFDKRLDPRLLVEGAKSVVSLLLNYYPEKEAQQPEAGTYKVSKYAYGTDYHFVIKDKLKTLLNYINGEVGEVGGRCFVDSAPVLDKAWAKKGGLGWVGKNSNLITPQVGSFYFIAELIIDLDLEYDGPIKDYCGSCTRCLDACPTDAIVAPYVVDGSKCISYFTIELKDQLPQEMNGRFGNWIFGCDICQDVCPWNRFSKPHQEPAFAPHPQLKEMKKNDWEEITQEVFAQLFKKSAVKRTGYNGLLRNIRFVEQSPDTQT

SEQ ID NO: 79641 - protein, 313 aa, Pontibacter sp.
  misc_feature (1)..(313): tr|A0A364RHN6|A0A364RHN6_9BACT Epoxyqueuosine reductase OS=Pontibacter sp. 2b14 OX=2080288 GN=queG PE=3 SV=1
MLNKAQYTHFIKQKAQELGFMYCGISKADFLEEEAPRLESWLNQHMHGQMHYMENHFDKRLDPRLLVDGAKSVVSLLLNYYPEEKQPETDTLKISKYAYGTDYHFVIKDKLKTLLDLINEEIGEVGGRCFVDSAPVLDKAWAKKSGLGWIGKNSNLITPQVGSFYFIAELIIDLELEYDGPIKDYCGSCTRCLDACPTDAIVAPYVVDGSKCISYFTIELKDQLPQEMNGKFGNWVFGCDICQDVCPWNRFSKPHQEPAFNAHPELKNMKTNDWQELTQEVFSQLFKKSAVKRTGYKGLLRNIQFLQQPPEND

SEQ ID NO: 79642 - protein, 312 aa, Pontibacter sp.
  misc_feature (1)..(312): tr|A0A4P8RRN5|A0A4P8RRN5_9BACT Epoxyqueuosine reductase OS=Pontibacter sp. SGAir0037 OX=2571030 GN=queG PE=3 S V=1
MTKAQHTQLIKKRAQELGFMYCGISKAEFLEEEAPRLERWLNQQMHGKMQYMENHFDKRLDPRLLVDGAKSVVSLLLNYFPEEKQPEENTYKISKYAYGTDYHFVIKDKLKELLASIHEEIGEVGGRCFVDSAPVLDKAWAKKSGLGWIGKNSNLITPQVGSFYFIAELIIDLELEYDGPIKDYCGSCTRCLDACPTGAIVEPYVVDGSKCISYFTIELKDQLPNEMNGKFGNWVFGCDICQDVCPWNRFSKPHQEPAFAPHPHLLNMKTSDWQELTHEVFTQLFKKSAVKRTGYNGLVRNICFMEDTGELH

SEQ ID NO: 79643 - protein, 326 aa, Pontibacter ummariensis
  misc_feature (1)..(326): tr|A0A239B414|A0A239B414_9BACT Epoxyqueuosine reductase OS=Pontibacter ummariensis OX=1610492 GN=queG PE=3 SV= 1
MFIRVALADFILFVLSKEKYTHLVKQKAKELGFMYCGVSQAEFLEEEAPRLERWLNQHMHGQMHYMENHFDKRLDPRLLVDGAKSVVSLLLNYYPEEKQEEDDTYRISKYAYGTDYHFVIKDKLKTLLAYINEVIGEVGGRCFVDSAPVLDKAWAKKSGLGWVGKNSNLITPQVGSFYFIAELIIDLELEPDGPLKDYCGSCTRCLDACPTGAIVEPYVVDGSKCISYFTIELKDQLPQEMQGKFGNWVFGCDVCQDVCPWNRFSKPHKEPAFAPHPQLKEMKTADWQELTHEVFSQLFKKSAVKRTGYNGLMRNIRFVQENPEKD

SEQ ID NO: 79644 - protein, 315 aa, Pontibacter virosus
  misc_feature (1)..(315): tr|A0A2U1B571|A0A2U1B571_9BACT Epoxyqueuosine reductase OS=Pontibacter virosus OX=1765052 GN=queG PE=3 SV=1
MNKSDYTYLIKQKAQELGFMYCGISKAEFLEEEAPRLENWLKQNMHGQMHYMENHFDKRLDPRLLVEGAKSVVSLLLNYYPEKENQQAGEDTYKVSKYAYGTDYHFVIKDKLKTLLNYINEEIGEVGGRCFVDSAPVLDKAWASKSGLGWVGKHTLLITPQAGSFHFVAELIIDLELEYDGPIKDYCGSCTRCLDACPTDAIVAPYVVDGSKCISYFTIELKDQLPQEMNGKFGNWIFGCDICQDVCPWNRFSKPHQEPTFEPQPQLKEMKKSDWEEITQEVFAQLFKKSAVKRTGYNGLLRNIRFVEQSPDPQT

SEQ ID NO: 79645 - protein, 372 aa, Ponticaulis sp.
  misc_feature (1)..(372): tr|A0A2D7Y0L5|A0A2D7Y0L5_9RHOB Epoxyqueuosine reductase OS=Ponticaulis sp. OX=2020902 GN=queG PE=3 SV=1
MTIWTSDTLKTKAREIGFDVCRVTTVVDAWAASDRLKQFVSAGYHGQMGWMEETLERRSHPQAMWPDARSAVVLGVNYGPDHDPLQVLDQADKAVISVYAKGKDYHDLLKKRLKRLAREFAAAHDCQVKVFVDTAPLMEKPLAAKSGLGWQGKHTNLVSREFGSWLFLGVMLTELELVSDAPETDHCGSCRACLDVCPTDAFPAPYKLDARRCISYLTIEHDGAIPVEFRTAMGNRIYGCDDCLAVCPWNKFAETTSELKFAASEVTDAPDLGTLSRLSDEAFREAYSGSPIKRIKRHRFIRNVLIAMGNSGEERFVPDIVRLLDDKAPIVRGMAAWALRQLDPNRFETEKNQRVLNETDAEVRAEWQGNAD

SEQ ID NO: 79646 - protein, 371 aa, Ponticaulis sp.
  misc_feature (1)..(371): tr|A0A2D6GSH0|A0A2D6GSH0_9RHOB Epoxyqueuosine reductase OS=Ponticaulis sp. OX=2020902 GN=queG PE=3 SV=1
MPTWTSEDVKAHALSIGFDVCRITSVEEGWAAGARLKAFVDAGYHGEMGWMAETLERRSHPQAMWPHARSAIVVGVNYGPDHDPLAVLDSKDRAAISVYAKGKDYHDVLKKRLKQLARDFVAANECEVKVFVDTAPLMEKPLAQQAGLGWQGKHTNLVSREFGSWLFLGVMLTEADLAPDEAASDHCGQCRACLDICPTKAFVGPYQIDARKCISYLTIEHGAPIPHELRKPMGNRIYGCDDCLAVCPWNKFASETKETKFQLTEATDAPSLATLLALDDQAFRAMFSGSPVKRIKRRRFLRNVLIATGNSGDAALVPAVKELLGDEEPLIRGAAIWALYQLAPDDARAEKLSRAPDETSEDVLSEWHLVE

SEQ ID NO: 79647 - protein, 361 aa, Ponticoccus marisrubri
  misc_feature (1)..(361): tr|A0A0W7WIX0|A0A0W7WIX0_9RHOB Epoxyqueuosine reductase OS=Ponticoccus marisrubri OX=1685382 GN=queG PE=3 SV=1
MPISTSETAPDPLSLKSRLLAEARQVGFAGARLCRPGDVPQVMDRLRAFLARGYHGQMGWLAERAHWRGDPTALWPEARSVLMLAENYGPDHDPLDVLGQRDRAAISVYAQNRDYHDVVKKRLKRLGRWLIAEAEAKTGEAPQIKVFVDTAPVPEKALAQAAGLGWQGKHTNLVSRELGSWLFLGAIFTTLELPPDAAETDHCGSCRKCLDICPTDAFPAPYQLDARRCISYLTIEHRGPVDAALRPGLGNRIYGCDDCLAVCPWNKFARRAEEVKYHARDDLRAPALAELAKLDDAGFRAHFSGSPIKRIGRDRFVRNVAYAIGNSTDPSLTGAVQPLCEDDDAAVADAARWAVGRLKAL

SEQ ID NO: 79648 - protein, 354 aa, Pontivivens insulae
  misc_feature (1)..(354): tr|A0A2R8A8K0|A0A2R8A8K0_9RHOB Epoxyqueuosine reductase OS=Pontivivens insulae OX=1639689 GN=queG PE=3 SV=1
MIGRAEVEAEAKALGFAAMGVCTPDAIPQAMGRLQDFLDKDYHGTMNWMADRAHWRGDPTALWPDARSVIMLAEPYTPDVDPLTLLDARDRGAISVYARNKDYHDLVKKRLKRLGRWMIDQAGGEIKVFVDTAPVMEKPLGAAAGLGWQGKHTNLLSRELGNWFFLGAIFTTLNLDPDAPGVERCGSCTACLDACPTNAFPAPFQLDARRCISYLTIEHKGPVPLDLREKMGNRIYGCDDCLAVCPWNKFAQEARDAGYWARVELKAPKLAELAQLDDGTFREIFAGSPIKRIGRGRFVRNVLYAIGNSEDATLSKVAATLCRDDDVVVADAARWAVERLAGGATGSHAQEESK

SEQ ID NO: 79649 - protein, 353 aa, Porphyrobacter dokdonensis
  misc_feature (1)..(353): tr|A0A1A7BIV3|A0A1A7BIV3_9SPHN Epoxyqueuosine reductase OS=Porphyrobacter dokdonensis DSW-74 OX=1300349 GN=que G PE=3 SV=1
MVNDLATPDLAVRIAAEARALGFAACGIASARNDPLRSARLEEWLGEGYHGSMEWMAARAEHRRSPEGLWPAARSVIALGMSYAPAQDPLALEASDEHARISVYAQGRDYHDVVKKRLKALARWLVAEEPQAEVKVFVDTAPVMEKPLGEAAGIGWQGKHTNLVSPTHGSWLFLGAIYTTLELAPAEGHRDQCGTCRACLDACPTNAFPAPYRLDARRCISYLTIEHKGPVPEEFRATLGNRVYGCDDCLAVCPWNKFASEAQAIREFLPRAELVAPRLAELLALDDAGFRALFSGSPIKRIGRDRFVRNCLYAAGNSGNTALGAQVEALTEDPDPVVAEAARWALARLKSDP

SEQ ID NO: 79650 - protein, 351 aa, Porphyrobacter neustonensis
  misc_feature (1)..(351): tr|A0A192D2P9|A0A192D2P9_9SPHN Epoxyqueuosine reductase OS=Porphyrobacter neustonensis OX=1112 GN=queG PE=3 SV =1
MVNTAASLADRIGAQALAEGFAVCGFTGARENPLRAARLEQWLGEGHHGSMEWMATRLEHRRSPQGLWDEARSVIALGMSYAPAHDPLALEGSDSHARISVYAQGKDYHDVVKKRLKALARWLVAEVPGAGVKVFVDTAPVMEKPLGEAAGIGWQGKHTNMVSPTHGSWLFLGAIYTTLDLAPATPHRDQCGSCRACLDACPTNAFPAPYRLDARRCISYLTIEHKGPVDEDLRAGLGNRIYGCDDCLAVCPWNKFASQAQAMREFLPRAELVAPRLGELLALDDAGFRALFSGSPIKRIGRDRFVRNCLYAAGNSGNAGLAVQVQALTADPDPVVADAARWALARLTSGL

SEQ ID NO: 79651 - protein, 353 aa, Porphyrobacter sanguineus
  misc_feature (1)..(353): tr|A0A1M7T0F7|A0A1M7T0F7_9SPHN Epoxyqueuosine reductase OS=Porphyrobacter sanguineus OX=198312 GN=queG PE=3 SV =1
MVNVRERPGFAQRIAAEARTLGFAACGIAGAGEDPLRSARLEEWLGEGRHGSMEWMATRLEHRRSPQGLWPEARSVIALGMSYAPAHDPLALESAPGRGRISVYSQGRDYHDVVKKRLKALARWLVAEAPDAQVKVFVDTAPVMEKPLGEAAGIGWQGKHTNLVSPTHGSWLFLGAIYTTLDLAPAEPHHDQCGSCRACLDACPTDAFPAPYRLDARRCISYLTIEHKGPVPEEFREGLGNRIYGCDDCLAVCPWNKFASEAQAIREFLPRAELAAPRLSELLALDDAGFRALFSGSPIKRIGRDRFVRNCLYAAGNSGDGALVPQVDALTADPDPVVGEAARWALARLRSGL

SEQ ID NO: 79652 - protein, 353 aa, Porphyrobacter sp.
  misc_feature (1)..(353): tr|A0A0N1AZG6|A0A0N1AZG6_9SPHN Epoxyqueuosine reductase OS=Porphyrobacter sp. AAP60 OX=1523423 GN=queG PE=3 SV =1
MVKAPATSGLAARIADEAAALGFAACGFASAAEDPVRAARLEQWLGEGHHGSMEWMAARAEHRRSPQGLWPEARSVIALGMSYAPAHDPLALEGSDTHARISVYAQGKDYHDVVKKRLKALARWLVAEAPEAQVKVFVDTAPVMEKPLGEAAGIGWQGKHTNMVSAVQGSWLFLGAIYTTLDLAPAEPHRDQCGSCRACLDACPTNAFPAPYQLDARRCISYLTIEHKGPVAEDLRAGLGNRIYGCDDCLAVCPWNKFASQAQTIREFLPRAELVAPRLGELLALDDAGFRALFSGSPIKRIGRDRFVRNCLYAAGNSGNQALVPQVETLIADPDPVVAEAAQWALVRLTANP

SEQ ID NO: 79653 - protein, 351 aa, Porphyrobacter sp.
  misc_feature (1)..(351): tr|A0A4Y6VXY8|A0A4Y6VXY8_9SPHN Epoxyqueuosine reductase OS=Porphyrobacter sp. YT40 OX=2547601 GN=queG PE=3 SV= 1
MVNAPANLAERIAERALGEGFAACGFASAGEDPLRAGRLEQWLGEGHHGSMEWMAARAAERRSPQGLWPAAKSVIALGMSYAPAHDPLALEGSPDHARISVYAQGRDYHDVVKKRLKALARWLVAEVPGAEVKVFVDTAPVMEKPLGEAAGIGWQGKHTNMVSPTHGSWLFLGAIYTTLELASAAPHRDQCGSCRACLDACPTDAFPAPYRLDARRCISYLTIEHKGPVDEEFRAALGNRIYGCDDCLAVCPWNKFASAAQAMKEFLPRAELVAPRLEELLALDDAGFRALFSGSPIKRIGRDRFIRNCLYAAGNSGNAALIAQVGALTADPDPVVADAARWALGRLRSDP

SEQ ID NO: 79654 - protein, 307 aa, Porphyromonadaceae bacterium
  misc_feature (1)..(307): tr|A0A353QAF1|A0A353QAF1_9PORP tRNA epoxyqueuosine(34) reductase QueG OS=Porphyromonadaceae bacterium OX=20490 46 GN=queG PE=4 SV=1
MTFSEEIKQQAFALGFDACGICRAEDSGREAEYMRWLADECHADMGYLERNIDKRLDPRLLIEGAKSVICVALNYYPQRTLPDNVPQFAYYAYGQDYHDVLRDKLKRLFDFIKQRAPEAEGRYFSDSAPVLERYWAAQSGLGFVGKNSLLIIPRKGSYFFLGELILNLELEYDAPLTRSCGKCRRCMDACPTQAIEAPYRINAKRCISYQTIENKGEIDEELAPCLHNNVYGCDICQKVCPWNRFATPHHTPEFNPSDEFLSLDADKLLEMNVEDYQRIFKKSPVKRAKFEGLKRNIRTLDGATGKK

SEQ ID NO: 79655 - protein, 306 aa, Porphyromonadaceae bacterium
  misc_feature (1)..(306): tr|A0A1I6T7E8|A0A1I6T7E8_9PORP Epoxyqueuosine reductase OS=Porphyromonadaceae bacterium NLAE-zl-C104 OX=185539 9 GN=SAMN05216365_12326 PE=4 SV=1
MTFSEEIKQYALSLGFDACGICRATDSGEKERYMQWLAENGNAGMEYMARNIDKRLDPILLVDGAKSIISVALNYYPHEKLPEEVPQFAYYAYGKDYHDVVREKLSRLFEFIKSRYPEVTGRYFSDSAPVLERFWAAQAGLGFIGKNTLLIIPGKGSYFFLGELIIDMELDYDSPVSQNCGKCRRCLDACPTGAIERPHYLNANKCISYQTIENKGEISSDIAPLLSNNVYGCDICQKVCPWNRYSRPHSTPEFMPLDEFLSLDLKKLIEMDEEDYRRIFRKSAVKRAKFSGLKRNVAAISKTPDK

SEQ ID NO: 79656 - protein, 318 aa, Porphyromonas asaccharolytica
  misc_feature (1)..(318): tr|F4KKX1|F4KKX1_PORAD Uncharacterized protein OS=Porph yromonas asaccharolytica (strain ATCC 25260 / DSM 20707 / BCRC 10618 / JCM 6326 / LMG 13178 / VPI 4198) OX=879 243 GN=Poras_0050 PE=4 SV=1
MTHQSLSPTELIVRYAHDELRLSAVGLAPAEAVPPEVWRAYQQTITGDAYAGLDYLQRYDDVRADPRKLLPEAKSIIVVAQSYYPPVKQPLEAPQVAYYAYGRDYHKVVRKKLERLLAFIQSEVDQTATGRVCCDTAPLLERYWIMQSGLAYQGRSKMMIIPRLGTFFIYGFLVVSLPLEYGAAIDRSYCGRCRRCIDSCPGGALQADGTFLADRCLSYLTIEHRGAWPEGVAERLGNRLFGCDVCQAVCPHNAHCAPHDEQDFMIRPAIAQLTYEQLASFTPQLYETLTIGSSMRRCAYEDLLRNAEAVLANHTTSL

SEQ ID NO: 79657 - protein, 310 aa, Porphyromonas cangingivalis
  misc_feature (1)..(310): tr|A0A0A2EY86|A0A0A2EY86_PORCN Uncharacterized protein OS=Porphyromonas cangingivalis OX=36874 GN=HQ35_02680 P E=4 SV=1
MNDVVLRLDDIATELGIDRVGVASLMSPVEDRYMDKYDKWIAEGKHADMSYLVEHRWLREDPRTLLPEARTMIVCAVSYYPTALQAPDAPQISKYAYGRDYHKVLKKVLTSFAERMTDAFGSHTYRVCIDTAPISERYWAQRAGIGHIGKNQNLIIPKIGSYIFLGEILTSLNLTPSDPIHRSCGSCTKCIEACPTQALSSEGLDARRCLSYLTIEHRGEIPSDLRAALGSRIYGCDTCQDVCPYNHRPIKTRLFPASSKILTLSEDDIRNFDEETYASLFFGSAATRAKYEGMKRNIEIYFENKRRKEE

SEQ ID NO: 79658 - protein, 310 aa, Porphyromonas cangingivalis
  misc_feature (1)..(310): tr|A0A1T4LP37|A0A1T4LP37_PORCN Epoxyqueuosine reductase OS=Porphyromonas cangingivalis OX=36874 GN=SAMN0274520 5_01216 PE=4 SV=1
MNDVVLRLDDIATELGIDRVGVASLMSPVEDRYMDKYDKWIAEGKHADMSYLVEHRSLREDPRTLLPEARTMIVCAVSYYPTALQAPDAPQISKYAYGRDYHKVLKKVLTSFAERMTDTFGSHTYRVCIDTAPISERYWAQRAGIGHIGKNQNLIIPKIGSYIFLGEILTSLDLTPSDPVHRSCGSCTKCIEACPTQALSSEGLDARRCLSYLTIEHRGEIPSDLRAALGSRIYGCDTCQDVCPYNHRPIKTRLFPASSKILTLSEDDIRNFDEETYASLFFGSAATRAKYEGMKRNIEIYFENKRRKEE

SEQ ID NO: 79659 - protein, 332 aa, Porphyromonas catoniae
  misc_feature (1)..(332): tr|Z4WZD0|Z4WZD0_9PORP Epoxyqueuosine reductase OS=Porp hyromonas catoniae ATCC 51270 OX=887901 GN=queG PE=3 SV =1
MGISQQLNPIPYDETQSAIVTSIKAEALRLGFSACGVARAAPVAEDALREYDSWVEAGFHGDMEYLARNRALRANPCALLPGTRSLIVVAMNYYPQQKQHPDAPQFAYYAYGRDYHKVVKKRLDQLLKYMQIELGLEVEGRAFSDSAPIMERYWAERAGLGWRGKNGLLIIPRAGSYFFLGELLVDIDLPCDEPMRSMCGRCERCLKACPTSAFLSPGRIDARRCISYLTIEQKGEIPTELRASIGKRVYGCDACQQCCPWNRYARPTTVEDYKPRERLLALSPEELEAMTEEEYLALFAGTAVKRAGLVGLQRTIRNLRPNFDRAEQDCDK

SEQ ID NO: 79660 - protein, 332 aa, Porphyromonas catoniae
  misc_feature (1)..(332): tr|L1NA61|L1NA61_9PORP Epoxyqueuosine reductase OS=Porp hyromonas catoniae F0037 OX=1127696 GN=queG PE=3 SV=1
MGISQQLNPIPYDETQRAIVTSIKAEALRLGFSACGVARAAPVAEDALREYDSWVEAGFHGDMEYLARNRALRANPCALLPGTRSLIVVAMNYYPQQKQHPDAPQFAYYAYGRDYHKVVKKRLDQLLKYMQTELGLEVEGRAFSDSAPIMERYWAERAGLGWRGKNGLLIIPRAGSYFFLGELLVDIDLPCDEPMRSMCGRCERCLKACPTSAFLSPGRIDARRCISYLTIEQKGEIPTELRASIGKRVYGCDACQQCCPWNRYARPTTVEDYKPRERLLALSPEELEAMTEEEYLALFAGTAVKRAGLVGLQRTIRNLRPNFDRTEQDCDK

SEQ ID NO: 79661 - protein, 328 aa, Porphyromonas crevioricanis
  misc_feature (1)..(328): tr|A0A2X4PG33|A0A2X4PG33_9PORP Epoxyqueuosine reductase OS=Porphyromonas crevioricanis OX=393921 GN=queG PE=4 SV=1
MKEELSPSISVQKIKAEAIRLGFSCVGIARAEAVPEEVARSYKEAVAEGKCGCMTYLDRNHPLREDPTQLLPGTQSIICVALNYYPALRQSPEAPQLAYYAYGKDYHKVVKKQLDKLLCFIRTEIDPQVQGRSFADSAPILERYWAVQAGLGWRGRSGLIVIPKRGTFFVLGELLVSTWLPADRPLAFGCGRCRRCIEACPTGALYDGGFDPLRCLSYLTIEQSDPLPEREAALLGNRLYGCDTCQQVCPHNRFASPTTVEAFAPKPELFDLSYDNLKNFDQETYTRLFSGSAVKRAGYEGLKRNANALLRKEKEGDHIENDRKDEKG

SEQ ID NO: 79662 - protein, 328 aa, Porphyromonas crevioricanis
  misc_feature (1)..(328): tr|T1CRG4|T1CRG4_9PORP Iron-sulfur cluster-binding prot ein OS=Porphyromonas crevioricanis JCM 15906 OX=1305617 GN=PORCRE_1378 PE=4 SV=1
MKEELSPSISVQKIKAEAIRLGFSCVGIARAEAVPEEVARSYKEAVAEGKCGCMTYLDRNHPLREDPTQLLPGTQSIICVALNYYPALRQSPEAPQLAYYAYGKDYHKVVKKQLDKLLCFIRTEIDPQVQGRSFADSAPILERYWAVQAGLGWRGRSGLIVIPKRGTFFVLGELLVSTWLPADRPLAFGCGRCRRCIEACPTGALYDGGFDPLRCLSYLTIEQSDPLPEREAALLGNRLYGCDTCQQVCPHNRFASPTTVEAFAPKPELFDLSYDSLKNFDQETYTRLFSGSAVKRAGYEGLKRNANALLRKEKEGDHIENDRKDEKG

SEQ ID NO: 79663 - protein, 320 aa, Porphyromonas endodontalis
  misc_feature (1)..(320): tr|C3JBI3|C3JBI3_POREA Putative iron-sulfur cluster-bin ding protein OS=Porphyromonas endodontalis (strain ATCC 35406 / BCRC 14492 / JCM 8526 / NCTC 13058 / HG 370) O X=553175 GN=POREN0001_1716 PE=4 SV=1
MPQNIIDEIKALAKSLGFVALGIARSHPIPQEVRESYISSLQEQGVGDMGYLERNLEVRFDPDKLVSGARSIIVGAFNYFPEKTQRTDAPQIAYYAYGKDYHRVVKDKLFTLLKYLQERIETPFSSRVFVDSAPLMERYWAVQSGVGKVGRNGLLIVPRFGSFCFLGEIVTTLELPADIPSEGSPCGRCMRCVEHCPAQAISKDGRFSPTRCLSYQTIEHHGSLAPKVIAQLGERIYGCDACQLVCPHNRFAYPHQEGLLKPAPDLLEMTSDDWKNLDNETFEQLFEHSAVQRVGFDGLRRNINSLLPSEDLESSTQSEK

SEQ ID NO: 79664 - protein, 335 aa, Porphyromonas gingivalis
  misc_feature (1)..(335): tr|A0A1R4DXL2|A0A1R4DXL2_PORGN tRNA epoxyqueuosine(34) reductase QueG OS=Porphyromonas gingivalis OX=837 GN=PG IN_13-1_01463 PE=4 SV=1
MLGCMPDDEKIKLRYSPEESARLIKEEARRLGFSACGFAEAQALPPSVVGTYEKFLSEGRHGEMDYLERNRELRYSPAELLPGTRTVISVALNYYPKIKQPASAPQIAYYAYGKDYHKVVKRLLDKLLDYIRREVCPSVSGRSFSDSAPIAERYWACRAGIGWVGRSGMLILPRGGTFFFLGELLVDIDLPPDAPMPSRCGACRNCIESCPTGAISEEGMDSRLCVSYLTIEHEGEIPPELVGKLGNRFYGCDSCQLCCPWNRYAHPSEVEAFVPREALFTFDRDDLVSLDEEKYLHFFAGSPMKRAGLDGLRRNARALEQGDKKEDEQPTDEDG

SEQ ID NO: 79665 - protein, 313 aa, Porphyromonas gingivalis
  misc_feature (1)..(313): tr|A0A212GAQ5|A0A212GAQ5_PORGN (Fe-S)-binding protein ( Fragment) OS=Porphyromonas gingivalis SJD12 OX=1297567 GN=SJDPG12_04340 PE=4 SV=1
LIKEEARRLGFSACGFAEAQALPPSVVGTYEKFLSEGRHGEMDYLERNRELRYSPAELLPGTRTVISVALNYYPKIKQPASAPQIAYYAYGKDYHKVVKRLLDKLLDYIRREVCPSVSGRSFSDSAPIAERYWACRAGIGWVGRSGMLILPRGGTFFFLGELLVDIDLPPDAPMPSRCGACRNCIESCPTGAISEEGMDSRLCVSYLTIEHEGEIPPELVGKLGNRFYGCDSCQLCCPWNRYAHPSEVEAFVPREALFTFDRDDLVSLDEEKYLHFFAGSPMKRAGLDGLRRNARALEQGDKKEDEQPTDEDG

SEQ ID NO: 79666 - protein, 331 aa, Porphyromonas gulae
  misc_feature (1)..(331): tr|A0A0A2F5F8|A0A0A2F5F8_9PORP Epoxyqueuosine reductase OS=Porphyromonas gulae OX=111105 GN=HR08_06780 PE=4 SV =1
MPDDEKIKLRYSPEESARLIKEEARRLGFSACGFAEAQALPPSVVGTYEKFLSEGRHGEMDYLERNRELRYSPAELLPGTRTVISVALNYYPKIKQPASAPQIAYYAYGKDYHKVVKRLLDKLLDYIRREICPSVSGRSFSDSAPIAERYWACHAGIGWVGRSGMLILPRGGTFFFLGELLVDIDLPPDAPMPSRCGACRNCIESCPTGAISEEGMDSRLCVSYLTIEHEGEIPPELIGKLGNRFYGCDSCQLCCPWNRYAHPSEVEAFVPREALFTFDKDDLASLDEEKYLHFFAGSPMKRAGLDGLRRNARALEQGDKKEDEQPTDEDG

SEQ ID NO: 79667 - protein, 331 aa, Porphyromonas gulae
  misc_feature (1)..(331): tr|A0A0A2FYK9|A0A0A2FYK9_9PORP Epoxyqueuosine reductase OS=Porphyromonas gulae OX=111105 GN=HR15_00280 PE=4 SV =1
MSDDEKIKLRYSPEESARLIKEEARRLGFSACGFAEAQALPPSVVGTYEKFLSEGRHGEMDYLERNRELRYSPAELLPGTRTVISVALNYYPRIKQPASAPQIAYYAYGKDYHKVVKRLLDKLLDYIRREICPSVSGRSFSDSAPIAERYWACRAGIGWVGRSGMLILPRGGTFFFLGELLVDIDLPPDTPMPSRCGACRNCIESCPTGAISEEGMDSRLCVSYLTIEHEGEIPPELVGKLGNRFYGCDSCQLCCPWNRYAHPSEVEAFVPREALFTFDKDDLASLDEEKYLHFFAGSPMKRAGLDGLRRNARALEQGDKKEDEQPTDEDG

SEQ ID NO: 79668 - protein, 305 aa, Porphyromonas levii
  misc_feature (1)..(305): tr|A0A4Y8WRE8|A0A4Y8WRE8_9PORP tRNA epoxyqueuosine(34) reductase QueG OS=Porphyromonas levii OX=28114 GN=queG PE=4 SV=1
MLTEQITEIAEGLGIDAIGFVPIQKVDSDALAQYDSWLASGKQAGMEYLEKYKEQREDPQLLLPEAKSVIVIAVSYYPAELQPSDAPQIAKYALGRDYHKVIKQLLLTLARCIETEVAAHRYRPLVDTAPFMERYWAKRSGIGFVGKNSNLIVPRVGSFVFLGELLTSLELSSELVCAKSCGSCRRCIESCPTGALSEDGLDARRCINYLTIEHRGDIPQDLSRRFGKRLYGCDTCQDVCPHNRAPRPTRHFPSSPQLLKLKWEDVRELDEIRYAQIFYGSATTRAKLEGMQRNAMIYTINNKQS

SEQ ID NO: 79669 - protein, 327 aa, Porphyromonas loveana
  misc_feature (1)..(327): tr|A0A2U1FL39|A0A2U1FL39_9PORP Epoxyqueuosine reductase OS=Porphyromonas loveana OX=1884669 GN=C7382_104139 PE =4 SV=1
MQADEKITLRYSPTESARLIKEEARRLGFSACGFAEAEALPPAVVGTYERFLSEGRHGEMDYLERNRELRYAPAALLPGTRTVISVALNYFPKTKQSPSAPQIAYYAYGKDYHRVVKRLLDQLLDYIRREICPEVTGRSFSDSAPIAERYWACRAGIGWVGRSGMLVLPEGGTFFFLGELLVDIPLPSDGPMMSRCGSCRRCIESCPTGAISEAGFDSRLCVSYLTIEHAGEIPKSLAEKLGNRFYGCDSCQLCCPWNRYAHPSEVEAFTPREALLSFNREDLATLDEDSYRHFFGGSAMKRAGLDGLLRNARALRHAATEDEETPS

SEQ ID NO: 79670 - protein, 323 aa, Porphyromonas macacae
  misc_feature (1)..(323): tr|A0A379EAK1|A0A379EAK1_9PORP Epoxyqueuosine reductase OS=Porphyromonas macacae OX=28115 GN=queG PE=3 SV=1
MNNEKSRNKLGSDVAAQIKQRAFELGFAACGIVQANPVDKNVADRYSNWLQDGKHGSMSYLERNMELRFDPESLFPGVKSIIVVAMNYKPQTLQSPELPQIAYYAYGRDYHKVVKKQLNTLLEYIVKEIAPECNGRAFADSAPIMERYWAQQAGLGWIGKNGLLIIPRIGSYIVLGELFVDVDIPADKPLIRNFCGNCMACLEACPTKALYAPGIIDARKCISYMTIEAKGEIPRELSSALGNRLYGCDACQQCCPHNRKTSATTVTDFLPKPELFGLSIEAILAMDEEEFDRISAGSPIRRAGLDALKKTAQIVKDNQNNKS

SEQ ID NO: 79671 - protein, 314 aa, Porphyromonas macacae
  misc_feature (1)..(314): tr|A0A0A2E8Z7|A0A0A2E8Z7_9PORP Epoxyqueuosine reductase OS=Porphyromonas macacae OX=28115 GN=queG PE=3 SV=1
MGSDVAAQIKQRAFELGFAACGIVQANPVDKNVADRYSNWLQDGKHGSMSYLERNMELRFDPESLFPGVKSIIVVAMNYKPQTLQSPELPQIAYYAYGRDYHKVVKKQLNTLLEYIVKEIAPECNGRAFADSAPIMERYWAQQAGLGWIGKNGLLIIPRIGSYIVLGELFVDVDIPADKPLIRNFCGNCMACLEACPTKALYAPGIIDARKCISYMTIEAKGEIPRELSSALGNRLYGCDACQQCCPHNRKTSATTVTDFLPKPELFGLSIEAILAMDEEEFDRISAGSPIRRAGLDALKKTAQIVKDNQNNKS

SEQ ID NO: 79672 - protein, 341 aa, Porphyromonas somerae
  misc_feature (1)..(341): tr|A0A134B0X3|A0A134B0X3_9PORP Epoxyqueuosine reductase OS=Porphyromonas somerae OX=322095 GN=queG PE=3 SV=1
MESISPHDIVTQIKAEALRLGFSACGIAQAGAVPEAILQEYDSWIETGYHGDMDYLARNRELRSDPRVLLPGTKTLIMVAMNYYPETKQAPEAPQFAYYAYGRDYHKVVKKRLDQLLAFMRSELQLPVTGRAFSDSAPIMERYWAEQAGLGWRGKNSLLIIPRAGSYFVLGELLIDIELPADSPMRNLCGRCERCQTSCPTEAFLEPGRIDARRCISYLTIEQKGEIPPELRERMGRRVYGCDACQQCCPWNRYARPTTIADYTPREALLSLSPEELEAMSEEEYLALFAGTAVKRAGLAGLQRTMRDLRDNFTLRIDTDSTSSAVRRFIRPTTGDTSSEG

SEQ ID NO: 79673 - protein, 94 aa, Porphyromonas sp.
  misc_feature (1)..(94): tr|A0A420YW27|A0A420YW27_9PORP tRNA epoxyqueuosine(34) reductase QueG (Fragment) OS=Porphyromonas sp. OX=19249 44 GN=D8B41_05985 PE=4 SV=1
SEEIPDELAPLIGNKLYGCDTCQEVCPWNKFARPTEVSDFAPRNAIMGMNAELLEEMKDSDFELHFAGSPVRRAGLKGLQRTLRAIKKNPNKEQ

SEQ ID NO: 79674 - protein, 341 aa, Porphyromonas sp.
  misc_feature (1)..(341): tr|J5VV99|J5VV99_9PORP Epoxyqueuosine reductase OS=Porp hyromonas sp. oral taxon 279 str. F0450 OX=1125723 GN=q ueG PE=3 SV=1
MESISPHDIVTQIKAEALRLGFSACGIAKAGAVPEAILQEYDSWIETGYHGDMDYLARNRELRSDPRVLLPGTKTLIMVAMNYYPETKQAPEAPQFAYYAYGRDYHKVVKKRLDQLLAFMRSELQLPVTGRAFSDSAPIMERYWAEQAGLGWRGKNSLLIIPRAGSYFVLGELLIDIELPTDSPMRNLCGRCERCQISCPTEAFLEPGRIDARRCISYLTIEQKGEIPPELRERMGRRVYGCDACQQCCPWNRYARPTTIADYTPREALLSLSPEELEAMSEEEYLALFAGTAVKRAGLAGLQRTMRDLRDNFTLPIDTASTSSAVRRFIRPTTDDTTSEG

SEQ ID NO: 79675 - protein, 297 aa, Porphyromonas uenonis
  misc_feature (1)..(297): tr|C2MD96|C2MD96_9PORP Putative iron-sulfur cluster-bin ding protein OS=Porphyromonas uenonis 60-3 OX=596327 GN =PORUE0001_0417 PE=4 SV=1
MSAVGLAAAGAVPPDVWQAYQQTITGDAYAGLDYLQRYDDVRSDPRKLLPDAQSIIVVAQSYYPPVKQPLEAPQVAYYAYGRDYHKVVRKKLERLLSFIQSEVDQSATGRVCCDTAPLLERYWIMQSGLAYQGRSKMMIIPKLGTFFIYGFLVVSLPLEYGTVIDRNYCGRCRRCIDHCPGGALQADGTFRADRCLSYLTIEHRGAWTEGVAERLGNRLFGCDVCQTVCPHNAHCTPHDEPDFMIRPAIAQLTYEQLANFTPELYETLTIGSSMRRCAYEDFLRNAEAVLTNHTTTL

SEQ ID NO: 79676 - protein, 370 aa, Porticoccaceae bacterium
  misc_feature (1)..(370): tr|A0A2A5GKW1|A0A2A5GKW1_9GAMM Epoxyqueuosine reductase OS=Porticoccaceae bacterium OX=2026782 GN=queG PE=3 SV =1
MEEIDYHHLSRQIKEWGKSLGFQQVTITGIDLPKTGERLNQWLQKGYQGDMQWMSKHGEKRYHPEQLLPGTQRVISVRMDYLPDNSNMIAVLKDEDKAYISRYALGRDYHKVIRQRLKTLSKEIENAVPGSVIQRPYVDSAPVMEKPLAEKAGLGWMGKHTLIINSEAGSWFFLGEIYTSLPLPIDQTVEKNQCGDCKACLKVCPTDAFPEPYVLDARRCISYLTIEHKGSIPEEFREPMGNRVFGCDDCQAVCPWNKEATPTQEKDFSPRHNLDNRELAELFLWTEAEFLKFTEGSPIRRIGYERWLRNLAIGLGNAPTTGTILNALKTRENYPSVLVQEHVTWAQEQHLKSTTGKKKRKRKIKRPETL

SEQ ID NO: 79677 - protein, 361 aa, Porticoccaceae bacterium
  misc_feature (1)..(361): tr|A0A2D5YGS6|A0A2D5YGS6_9GAMM Epoxyqueuosine reductase OS=Porticoccaceae bacterium OX=2026782 GN=queG PE=3 SV =1
MPDLHENINDLDLLATKIKAWGNDLGFQKVSIVKPDLKNASHKLKIWLDQKYHGSMDWMEKHGEKRYVPEKLVERTVRVISLRMNYLSDNKMIAVLKDDNKAYISRYALGSDYHKIIRKKLSTLAKQIEKEIPTKNINQRAFVDSAPVLEKPIAAQGGLGWIGKNTLLIDDSDGSWFFLGEIYTSIPLPPDNKKTQNLCGKCNACLRVCPTNAFPEPYVLDAKKCISYQTIENKREIPIEIRPLMGNRVFGCDDCQIWCPWNRQPSQASEDIFKPKHNLDNESLLSLFNWSELEFNEKTLGSPIKRIGYERWLRNLAVGLGNAPGCPEILESLKERKKGSSPLLEEHISWAIDEQIRKLSS

SEQ ID NO: 79678 - protein, 384 aa, Porticoccus sp.
  misc_feature (1)..(384): tr|A0A2G2QRE5|A0A2G2QRE5_9GAMM Epoxyqueuosine reductase OS=Porticoccus sp. OX=2024853 GN=queG PE=3 SV=1
MCSETPEIDYTQLALDIKDWGKQLGFQQVAITDTDLSEAGHRLNDWLAAGHQGEMRWMSEHGEKRYHPEQLLPSTLRVITVRMDYLTDNSNMIATLKDESKAYISRYALGRDYHKLIRNRLTTLSKEIEKAVPGTVVQRPFVDSAPVMEKPLAVKAGLGWMGKHTLVINSQAGSWFFLGEIYTNLPLPVDQSSETDQCGECQACLKVCPTDAFPAPYVLDARRCISYLTIEQKGSIPEEFREPMGNRVFGCDDCQAVCPWNKTASLSDEKDFTPRHNLDNRELAELFLWSEQEFLKKTEGSPIRRVGYEGWLRNLAVGLGNAPTSETVVSALRSRESHASPMVREHVEWALGQHQQQKRRKRKITNTLNRQSLPLNEGQSFPEG

SEQ ID NO: 79679 - protein, 370 aa, Porticoccus sp.
  misc_feature (1)..(370): tr|A0A2E5C5I6|A0A2E5C5I6_9GAMM Epoxyqueuosine reductase OS=Porticoccus sp. OX=2024853 GN=queG PE=3 SV=1
MSSETPEIDYTQLALDIKDWGRQLGFQQVAITDTDLSETGHQLNDWLAEGHQGEMRWMSEHGEKRYHPEQLLPGTLRVITVRMDYLTDNSNMIATLKDESKAYISRYALGRDYHKLIRNRLTTLTKEIEKAVPGAVVQRPFVDSAPVMEKPLAVKAGLGWMGKHTLVINSQAGSWFFLGEIYTSLPLPVDQSSETDQCGECQACLKVCPTDAFPAPYVLDARRCISYLTIEQKGSIPEEFREPMGNRVFGCDDCQAVCPWNKAASLSDEKDFTPRHNLDNRELAELFLWSEQEFLKKTEGSSIRRVGYQGWLRNLAVGLGNAPTSETVVSALRSRESHSSPMVREHVAWALGQHQQQKRRKRKIINTLNR

SEQ ID NO: 79680 - protein, 342 aa, Poseidonocella pacifica
  misc_feature (1)..(342): tr|A0A1I0WP47|A0A1I0WP47_9RHOB Epoxyqueuosine reductase OS=Poseidonocella pacifica OX=871651 GN=queG PE=3 SV=1
MDELKARLTQAAEDMGFDLCRICRPDAVPQVPDRLAEFLDAGRHGQMSWLGERAHWRGAPNVLWPEARSVIMLGESYTPAHDPLDILAEPEKAAISVYAQNRDYHDVVKKRLKRLARWLIADAGGEVKVFVDTAPVPEKPLGEAAGLGWQGKHTNLVSRDMGSWFFIGSVFTTLDLAPDAAEVDHCGSCRRCLDVCPTDAFPAPYKLDARRCISYLTIEHKGPVPHDLRERMGNRIYGCDDCLAVCPWNKFAQEAREAKYHARQELVSPDLSELAGLDDAGFRALFSGSPIKRIGRDRFVRNVLYAIGNSGRPALGPVAATLCSDPDETVAEAARWAVERLR

SEQ ID NO: 79681 - protein, 343 aa, Poseidonocella sedimentorum
  misc_feature (1)..(343): tr|A0A1I6EQX5|A0A1I6EQX5_9RHOB Epoxyqueuosine reductase OS=Poseidonocella sedimentorum OX=871652 GN=queG PE=3 SV=1
MDDLKVRLIEAAGEMGFELCRLTRPDAVPEVPERLRAFLDKGYHGQMSWLAERSHWRGAPQVLWPEARTVIMLGESYTPEHDPLEVLSHPDRAAISVYAQNRDYHDVVKKRLKRLARWLIAEAGGEVKVFVDTAPVPEKALGAAAGLGWQGKHTNLVSRDMGSWFFIGSVFTTLELAPDAAEVDHCGSCRRCLDICPTDAFPAPYQLDARRCISYLTIEHKGPVAEELRPLLGNRIYGCDDCLAVCPWNKFAQEAREVKYRARADLMAPRLAELAALDDAGFRALFSGSPIKRIGRDRFVRNVLYAIGNSGEAGLRPAADRLRGDPCETVADAASWAVDRLSN

SEQ ID NO: 79682 - protein, 380 aa, Pradoshia eiseniae
  misc_feature (1)..(380): tr|A0A2S7MWZ2|A0A2S7MWZ2_9BACI tRNA epoxyqueuosine(34) reductase QueG OS=Pradoshia eiseniae OX=2064768 GN=queG PE=4 SV=1
MNHQQLKQDLIEYSKTIGIDKIGFTTSDPFLELKNRLIEQQKRNYASGFEEPNLDKRTDPKRLMPEARSIIAIAVAYPSRLHNAPKSRKGQRRGIFSRSSWGLDYHHVVKDRLKKVEAFIQERVPDALLKSMVDTGELADRAVAERAGIGWSGKNCSVLDPEYGSYMYLGEIITNIPFLPDAPMEDLCGTCTKCLDACPTGALVAGGQINAKRCISFLTQTKELIPAEFRDKVGNRLYGCDSCQTSCPYNKRVDFHLHQELEADPEIAKPELLSLLSLSNRAFKEQYGSLSGAWRGKMPIQRNAILALAHFKDPEHIGPLAELLKKDARPVIRGTAAWALGKIGGIEAAVILKECLAMEQEELVRTEIESAIAKLEKLGE

SEQ ID NO: 79683 - protein, 379 aa, Pradoshia sp.
  misc_feature (1)..(379): tr|A0A5J6XMU7|A0A5J6XMU7_9BACI tRNA epoxyqueuosine(34) reductase QueG OS=Pradoshia sp. D12 OX=2651284 GN=queG PE=4 SV=1
MDFQILKDELIEYSKTIGIDQIGFTSADPFQVLKKRLIDQQNLNFASGFEEPDLDKRTNPRRLMPEAQSIIAIAVAYPSKLKDAPKSKVGDRRGIFSRSSWGQDYHYVVKDRLKKLEAFILERMPNSYLSSMVDTGELVDRAVAERAGIGWSGKNCSILNEEFGSYMYLGEMITSIPFPPDTPMEDLCGTCTKCLDACPTGALVQGGQINAKRCISFLTQTKDMIPYEFRDKMGNRVYGCDSCQTSCPYNRRIDFHNHPECESDPELAKPQLVSLLSLSNRQFKEKFGSVSGSWRGKMPIQRNAIIALAHFKDSESVASIKELLQKDPRPVIRGTAAWALGKIGTEEAMAVLKDCLKEETDQMVVAEINNALERLMLPE

SEQ ID NO: 79684 - protein, 320 aa, Pragia fontium
  misc_feature (1)..(320): tr|A0A379DLP1|A0A379DLP1_9GAMM Epoxyqueuosine reductase OS=Pragia fontium OX=82985 GN=queG PE=4 SV=1
MLRARPHELQPGTLRVISVRMNYLPPDAAFARTLGNPQLGYISRYALGRDYHKVLRQRLKKLGEKIQSHCHQLSFRPFVDSAPIMERPLAAKAGLGWTGKHSLTINREAGSWFFLGELLVDIPLPVDTPVEEGCGRCVACMTICPTNAIVEPYVVDARRCISYLTIELEGAIPEELRPLMGNRIYGCDDCQMTCPWNRLAPLTEESDFHPRQYLYQPPLLELYAWNEAEFLAKTEGSPIRRIGHFRWLRNISVALGNAPYQPEIMSALQQRKGINIVLDEHIDWAIARQLERRQQQEITVQQPKLQRLIRSIEKGLTRDA

SEQ ID NO: 79685 - protein, 379 aa, Pragia fontium
  misc_feature (1)..(379): tr|A0A0G3CG99|A0A0G3CG99_9GAMM Epoxyqueuosine reductase OS=Pragia fontium OX=82985 GN=queG PE=3 SV=1
MSLPLDFNQLAQHIKQWGQALGFQQVGICDTDLTSEEPKLQAWLDNQYHGDMSWMARYGMLRARPHELQPGTLRVISVRMNYLPPDAAFARTLGNPQLGYISRYALGRDYHKVLRQRLKKLGEKIQSHCHQLSFRPFVDSAPIMERPLAAKAGLGWTGKHSLTINREAGSWFFLGELLVDIPLPVDTPVEEGCGRCVACMTICPTNAIVEPYVVDARRCISYLTIELEGAIPEEFRPLMGNRIYGCDDCQMTCPWNRLAPLTEESDFHPRQYLYQPPLLELYAWDEAEFLAKTEGSPIRRIGHFRWLRNISVALGNAPYQPEIMSALQQRKGINIVLDEHIDWAIARQLERRQQQEITVQQPKLQRLIRSIEKGLTRDA

SEQ ID NO: 79686 - protein, 379 aa, Pragia sp.
  misc_feature (1)..(379): tr|A0A411WFX5|A0A411WFX5_9GAMM Epoxyqueuosine reductase OS=Pragia sp. CF-458 OX=2498113 GN=queG PE=3 SV=1
MSHPLDFNLLAQHIKQWGQALGFQQVGICDTDLTLEEPRLQAWLDKQYHGDMAWMARYGMMRARPHELEPGTLRVISVRMNYLPPHASFAKSLADPNIGYISRYALGRDYHKVLRQRLKKLGEKIQQHCENLHFRPFVDSAPIMERPLAAKAGIGWTGKHSLIINREAGSWFFLGELLVDLPLPIDQPVAEECGRCIACMTLCPTGAIVEPYTVDARRCVSYLTIELEGVIPEELRPLMGNRIYGCDDCQLGCPWNRIAPLTEEQDFLPRPTLHHSSLLELYAWDEATFLSKTEGSPVRRIGHMRWLRNISVALGNAPYQPEIIEALKQRKGLYPIVDEHIEWALARQWEKREQQGTEVLAPKQLRLIRSVEKGLPRDA

SEQ ID NO: 79687 - protein, 310 aa, Prevotella amnii
  misc_feature (1)..(310): tr|A0A134BJ24|A0A134BJ24_9BACT Putative iron-sulfur clu ster-binding protein OS=Prevotella amnii OX=419005 GN=H MPREF1860_00467 PE=4 SV=1
MLSSYVIKQEAKLLGFFACGMAKALPVEEKVAKAYRKWIDSGNEAGMLYMANNVEKRLDPRLLVPGVKTIISVALSYAPSKTIPDTEYQISVYALGQDYHTLMKERLRAFAEKILPVPLSEIGDNVVRCFCDTAPVLERYWATKAGLGWIGKNHQLIIPHAGSMFFLGEVFLPFEVDIYDEPIEGRCGKCHRCLDACPTKAISEDPVFKSDKCLSYQLIENRGELSSEAKEAMGNTIYGCDRCLTSCPWNRFSIPTTEPKLQPKPELLMMTKEDWHNLTVEEYRKLFKGSAVKRVKFEGLKRNIAAKNNK

SEQ ID NO: 79688 - protein, 310 aa, Prevotella amnii; identical to SEQ ID NO: 79687
  misc_feature (1)..(310): tr|A0A096B0P0|A0A096B0P0_9BACT (Fe-S)-binding protein O S=Prevotella amnii DNF00058 OX=1401066 GN=HMPREF9302_02 755 PE=4 SV=1

SEQ ID NO: 79689 - protein, 345 aa, Prevotella baroniae
  misc_feature (1)..(345): tr|U2P7Y9|U2P7Y9_9BACT Epoxyqueuosine reductase OS=Prev otella baroniae F0067 OX=1115809 GN=queG PE=4 SV=1
MNSRLLTDRIKAEAARLGFFACGMAKAGPVDELMAQRLKSWLQEGHHAGMAYMADHTDKRLDPRLLMPGLKSIVCVALNYAPAQHMAEEEYQLAAYALGKDYHDVVKAKLRQLAASIGAVDCLYQKVEDGAQPQADDTLKCRIFVDSGPVLERYWAEKAGLGWVGRNHQLIIPRAGSMFFLGELFLSAELEYDSPMPNRCGNCHKCVDACPTGALHRHSTTFNAEQCLSYQLIENRGTLSEEARQAMGNTIYGCDRCQTACPWNRFATPNTTPELQPSADLLGMKRANWQQLTEEQYRKLFKGSAVKRVKYAGLKRNIDAAMRGETGDRQRDDDANIALTTDNIE

SEQ ID NO: 79690 - protein, 311 aa, Prevotella bergensis
  misc_feature (1)..(311): tr|D1PSV0|D1PSV0_9BACT Epoxyqueuosine reductase OS=Prev otella bergensis DSM 17361 OX=585502 GN=queG PE=3 SV=1
MSSRFSNEIKAEAKRLGFFSCGIAKAERVSQEVENHLRQWLADGMNADMEWMGNYLDKRMDPRLLMDGLKSIVSVAMNYAPTQRLPQDQPQIAAYALGQDYHEVMKQRLHRLAAFIYGEDRLKDANYRVFVDSGPVLERYWAVRAGLGWVGKNRQLIIPHAGSMFFLGELFLDFETDYDRPIADRCGACTKCIDHCPTRALSPNHDFNSTLCLSYQTIENRKELSEEAKKAMGNVIYGCDRCQAACPWNRFATPSDIPEFQPKPELLRMTRDNWKNLSVEDYRRLFKGSAVKRVKYKGLMRNISTLFSEGE

SEQ ID NO: 79691 - protein, 293 aa, Prevotella bivia
  misc_feature (1)..(293): tr|A0A137SR78|A0A137SR78_9BACT Putative iron-sulfur clu ster-binding protein OS=Prevotella bivia OX=28125 GN=HM PREF3202_02251 PE=4 SV=1
MAKALPVDEEVARGYQRWIAKGYEAGMQYMANNMDKRLDPRLLVPGVKTIVSVALNYAPRKTLPASEYQLAAYALGLDYHELMKERLRTFAESISPIPLPPHGQTEGDNLVRCFCDTAPVLERYWAMKSGLGWIGKNHQLIIPHAGSMFFLGEVFLPFEVDVYDKPMTSRCGNCHRCLDACPTHAITEKAEFESDKCLSYQLIENRGELSSEAKAAMGNTIYGCDRCLAACPWNRFSIPTTEPSLQAKPELLAMTKEDWHNLSVDDYRKLFKGSAVKRVKFEGLKRNIAAKKE

SEQ ID NO: 79692 - protein, 313 aa, Prevotella bivia
  misc_feature (1)..(313): tr|I4ZBM9|I4ZBM9_9BACT Uncharacterized Fe-S protein OS= Prevotella bivia DSM 20514 OX=868129 GN=PrebiDRAFT_1944 PE=4 SV=1
MINSSFIKEEAKRLGFFACGMAKALPVDEEVARGYQRWIAKGYEAGMQYMANNMDKRLDPRLLVPGVKTIVSVALNYAPRKTLPASEYQLAAYALGLDYHELMKERLRTFAESISPIPLPPHGQTEGDNLVRCFCDTAPVLERYWAMKAGLGWIGKNHQLIIPHAGSMFFLGEVFLPFEVDVYDKPMTSRCGNCHRCLDACPTHAITEKAEFESDKCLSYQLIENRGELSSEAKAAMGNTIYGCDRCLAACPWNRFSIPTTEPSLQAKPELLAMTKEDWHNLSVDDYRKLFKGSAVKRVKFEGLKRNIAAKKE

SEQ ID NO: 79693 - protein, 331 aa, Prevotella bryantii
  misc_feature (1)..(331): tr|A0A255SU02|A0A255SU02_PREBR tRNA epoxyqueuosine(34) reductase QueG OS=Prevotella bryantii OX=77095 GN=queG PE=4 SV=1
MNSKLLNNTVDKKVLSQKIKAEAKSLGFFSCGIAQAKAVDHETAQHIKKWLANGDHAGMAYMNNYTDKRLDPRLLMNGVKSIVSVALNYTPNITLPQEEYQFAAYALGKDYHDIVKSKLQQLAEKIGFTPLPYHEEDRKTDGSINYYRAFCDSAPVLERYWATQAGLGWTGKNHQLIIPRAGSMFFLGELFLDIELEYDQPLSNKCGKCHQCIDACPTGALLENQELDANKCLSYQTIENRGELNKEFAKKMGNVIYGCDRCQQACPWNRYATPNTTPELQPKDELLHMTKEKWQHLTEKQYQQLFQGSAVKRAKYSGLMRNINALDNEEL

SEQ ID NO: 79694 - protein, 331 aa, Prevotella bryantii; identical to SEQ ID NO: 79693
  misc_feature (1)..(331): tr|D8DT88|D8DT88_PREBR Epoxyqueuosine reductase OS=Prev otella bryantii B14 OX=752555 GN=PBR_2841 PE=4 SV=1

SEQ ID NO: 79695 - protein, 329 aa, Prevotella buccae
  misc_feature (1)..(329): tr|E6K816|E6K816_9BACT Putative iron-sulfur cluster-bin ding protein OS=Prevotella buccae ATCC 33574 OX=873513 GN=HMPREF6485_1596 PE=4 SV=1
MSSKSLNSNDIKAEALRLGFFACGIAKAEPVDAGVAASFSHWLTEGGNADMGYMTNYLDKRLDPRLLMEGARSIISVAMNYTPAARPAEGEYQLAAYALGKDYHDVVKDRLRQLAAHLGWKDALHNEDENAHKCRIFVDSGPILERYWAERAGLGWTGRNHQLIIPKAGSMFFLGEILVDVELDYDSPMSNRCGNCHACIDACPTKALGKIFHADRCLSYQLIENRGQLTSEAQQSMGDTIYGCDRCQSACPWNRYAHPNTIPEFQPKQELLNMTRQDWQHLSEEQYRSLFKGSAVKRAKYAGLVRNITAATLQEHTVQDQLQEEEKRS

SEQ ID NO: 79696 - protein, 329 aa, Prevotella buccae
  misc_feature (1)..(329): tr|D3HVJ5|D3HVJ5_9BACT Putative iron-sulfur cluster-bin ding protein OS=Prevotella buccae D17 OX=575611 GN=HMPR EF0649_00277 PE=4 SV=1
MSSKSLNSNDIKAEALRLGFFACGIAKAEPVDAGVAASFSHWLTEGGNADMGYMTNYLDKRLDPRLLMEGARSIISVAMNYTPAARPAEGEYQLAAYALGKDYHDVVKDRLRQLAAHFGWKDALHNEDGKAHKCRIFVDSGPILERYWAERAGLGWTGHNHQLIIPKAGSMFFLGEILVDIELDYDSPMPNRCGNCHACIDACPTKALGKIFHADRCLSYQLIENRGQLTSEAQQSMGDTIYGCDRCQSACPWNRYAHPNTIPEFQPKQELLNMTRQDWQHLSEEQYRSLFKGSAVKRAKYAGLVRNITAATLQEHTVQDQLQEEEKRS

SEQ ID NO: 79697 - protein, 326 aa, Prevotella buccalis
  misc_feature (1)..(326): tr|A0A2N6QSP9|A0A2N6QSP9_9BACT tRNA epoxyqueuosine(34) reductase QueG OS=Prevotella buccalis OX=28127 GN=queG PE=4 SV=1
MNSRLSSELKAEALNLGFFACGIAHAEAVDDTNASHVRQWIEDGRLADMDYMRNHTDMRLDPRLLMKGVKSIVSVAMNYTPAQHIPSDQLQFAAYAYGEDYHDIVKKKLRQLALTFDFKELRMQDEPNKEDNDTYFRVFCDSAPVLERYWATRAGLGWIGRNHQLIIPKAGSMFFLGELFLTIELDYDEPMRSHCGNCHACIDACPTGAITKDGPLDANKCLSYQTIENRGGISKDIAEKMGNTVYGCDRCQQACPWNRFSIPNNTPELQPKPEFLSMTRDKWMQLSEDEYRQLFKKSAVKRAKYEGLMRNIQAIVDLSKEQKQDH

SEQ ID NO: 79698 - protein, 326 aa, Prevotella buccalis
  misc_feature (1)..(326): tr|A0A096BM92|A0A096BM92_9BACT (Fe-S)-binding protein O S=Prevotella buccalis DNF00853 OX=1401074 GN=HMPREF2137 _08605 PE=4 SV=1
MNSRLSNELKAEALNLGFFACGIARAEAVDATTAQHIRQWINEGRQADMDYMRNHTEMRLDPRLLMKGVKSIVSVAMNYTPAQHIPSDQLQFAAYAYGEDYHDIVKKKLRQLALKFDFKELRMQDEPNKEEEDVYFRVFCDSAPVLERYWATRAGLGWIGHNHQLIIPKAGSMFFLGELFLTIELDYDESMHSRCGNCHACIDACPTGAITKDGPLDANRCLSYQTIENRGDISKDIAEKMGNTVYGCDRCQQACPWNRFSMPNNTPELQPKPEFLSMTRDKWMQLSENEYRQLFKKSAVKRAKYEGLMRNIKAIADLSEEQKQDH

SEQ ID NO: 79699 - protein, 311 aa, Prevotella colorans
  misc_feature (1)..(311): tr|A0A2U0UM01|A0A2U0UM01_9BACT Epoxyqueuosine reductase OS=Prevotella colorans OX=1703337 GN=C7379_102167 PE=4 SV=1
MNSKLSSDIKAEAKRLGFSACGVAKAERVNQEEERHLRRWLRDGMNADMTWMGNYLEKRINPCLLMDGVRSIISVAMSYAPAKNLPKGEPQIAAYALGQDYHDVVKHKLHKLATYIYGPENVQTANYRAFVDSGPVLERYWAQRAGIGFVGKNRQLIIPKAGSMFFLGELFVDFETDYDEPMNNKCGSCTCCIDHCPTHALSMEHDFDAKLCLSYQTIENRKELSETAKKNMGNVIYGCDKCQQWCPWNRYATPNNIPEFQPKEELLSMTSEKWRSLSIDDYRRLFKGSAVKRGKYDGLMRNIKNYFNNYK

SEQ ID NO: 79700 - protein, 338 aa, Prevotella corporis
  misc_feature (1)..(338): tr|A0A133PT12|A0A133PT12_9BACT Putative iron-sulfur clu ster-binding protein OS=Prevotella corporis OX=28128 GN =HMPREF3226_02863 PE=4 SV=1
MADDNRHTTTASRQDSKSPQKAQLQLNDIKAEAQRLGFFACGAARAEAVDAKTAATVRSWLDKGSQANMAYMANYTEKRLDPRLLVPGVKTILSLAMNYAPARPMPDGEYQLAAYAYGQDYHELMKDRLRELADSLIPHPLETGEPATEGEIRIFVDTAPVLERYWAWKAGIGWIGKNHQLIIPRAGSMFFLGEIFLPFELDAYDKPMANHCGGCHRCIDACPTHALTDEIGFDAARCLSYQLIENRGELSDEARSNMGDTIYGCDRCQQACPWNRFAMPNTEPALQPKPELLRMTKDDWHALTVEQYRALFKGSAVKRAKYEGLKRNIDATKPREKH

SEQ ID NO: 79701 - protein, 324 aa, Prevotella dentalis
  misc_feature (1)..(324): tr|F9D084|F9D084_PREDD Iron-sulfur cluster-binding prot ein OS=Prevotella dentalis (strain ATCC 49559 / DSM 368 8 / JCM 13448 / NCTC 12043 / ES 2772) OX=908937 GN=Pred e_0512 PE=4 SV=1
MTSNEQLTQEIKAEAKRLGFFACGMARADRVSAAAERHLRQWLDSGMNADMDWMHNYLDKRIDPRLLMDGLQTIVCVATSYAPARTLPEGEPQIAAYALGQDYHDLLKRRLHQLAAFALRRRASDDAPTPETTGDAPRYRVFVDSGPVLERYWAVQAGLGWIGRNQQLIIPRAGSMFFLGELFLDFELCYDTPMPDRCGSCHRCIDHCPTHALLPNRDFDARRCLSYQTIENRGELSPEAREAMGDCIYGCDRCQQACPWNRFATPNATPELQPKPELLAMTREKWQHLSEEDYRRLFKGSAVKRAKYAGLMRNISNLFRNFTP

SEQ ID NO: 79702 - protein, 365 aa, Prevotella denticola
  misc_feature (1)..(365): tr|A0A347AWU9|A0A347AWU9_9BACT tRNA epoxyqueuosine(34) reductase QueG OS=Prevotella denticola OX=28129 GN=queG PE=4 SV=1
MTRQIPTSDHQPISPVPPFVIAHHRQTTSSLRGGSEEAIPSSSMSSSALNRQTATVLSASSIKSFARSLGFFSCGIAKAGPVDESTAQQYRRWLDNGEEASMAYMANYQEKRLDPRLLVPGVRSIISLALNYAPSQLLPKGEYQFAAYALGQDYHNLMKEKMRKLAEEIKNRQPLPLEEDLSIRCFCDTAPVLERYWAQKAGLGWVGRNHQLIIPHAGSMFFLGEIFIPFDVDAYDEPMPNRCGNCHRCIDACPTHAIVPGEDFHARHCLSYQLIEKRGELSEEAKAAMGDTIYGCDRCQTACPWNQFATPNTEPDLQPKPELLSMNKDKWHHLTVEDYRRLFKGSAVKRVKFEGLIRNITAKES

SEQ ID NO: 79703 - protein, 304 aa, Prevotella denticola
  misc_feature (1)..(304): tr|A0A096BIL0|A0A096BIL0_9BACT (Fe-S)-binding protein O S=Prevotella denticola DNF00960 OX=1401077 GN=HMPREF213 9_02695 PE=4 SV=1
MKSFARSLGFFSCGIAKAGPVDESTAQQYRRWLDNGEEASMAYMANYQEKRLDPRLLVPGVRSIISLALNYAPSRLLPEGEYQFAAYALGQDYHNLMKEKMRKLAEEIKNQQPLPLEEDLSIRCFCDTAPVLERYWAQKAGLGWVGRNHQLIIPHAGSMFFLGEIFLPFDVDAYDEPMPNRCGNCHRCIDACPTHAIVPGEDFHARRCLSYQLIENRGELSEEAKAAMGDTIYGCDRCQTACPWNRFATPNTEPDLQPKPELLSMNKDKWHHLTVEDYRRLFKGSAVKRVKFEGLIRNITAKES

SEQ ID NO: 79704 - protein, 354 aa, Prevotella disiens
  misc_feature (1)..(354): tr|A0A3E4QLZ6|A0A3E4QLZ6_9BACT DUF1730 domain-containin g protein OS=Prevotella disiens OX=28130 GN=DXC89_02405 PE=4 SV=1
MSLKFSRKEIKAAAKHFGFFACGVAKAERVDAETAARVCAWLEKGSQADMAYMGNYTDKRLDPRLLVPGTKTILSLAMNYAPAKTLPKGEYQLAAYAYGLDYHDIMKAKLRDLVEAKLRVKEEPNSRGESDSSDPSDLSDQSDQSELSDQSDTSDSSPKQSPQISPSEIRVFVDTAPVLERYWAWKAGLGWIGKSHQLIIPHAGSMFFLGEIFLPYEFDEYDEPMPSRCGNCRRCIDACPTHAITEAQGFDSVKCLSYQLIENRGSLSEEAVSAMHDTIYGCDRCQTACPWNKFATPNTTPEFQPKPELMAMTKDDWHNLTLEQYRKLFKGSAVKRVKFEGLSAILPLPMVIAT

SEQ ID NO: 79705 - protein, 354 aa, Prevotella disiens
  misc_feature (1)..(354): tr|U2K3J3|U2K3J3_9BACT Putative iron-sulfur cluster-bin ding protein OS=Prevotella disiens JCM 6334 = ATCC 2942 6 OX=1235811 GN=HMPREF0653_02543 PE=4 SV=1
MSLKFSRKEIKAAAKHFGFFACGVAKAERVDAETAARVCAWLEKGSQADMAYMGNYTDKRLDPRLLVPGTKTILSLAMNYAPAKTLPKGEYQLAAYAYGLDYHDIMKAKLRELVEAKLRVKEEPNSRGESDSSDQSDLSDQSNQSELSDQSDSSPKQSPQISPSEIRVFVDTAPVLERYWAWKAGLGWIGKSHQLIIPHAGSMFFLGEIFLPYEFDEYDEPMPSRCGNCRRCIDACPTHAITEAQGFDSVKCLSYQLIENRGSLSEEAVSAMHDTIYGCDRCQTACPWNKFATPNTTPEFQPKPELMAMTKDDWHNLTLEQYRKLFKGSAVKRVKFEGLKRNIAAANGNSDVIE

SEQ ID NO: 79706 - protein, 338 aa, Prevotella enoeca
  misc_feature (1)..(338): tr|A0A0S2KKA4|A0A0S2KKA4_9BACT Epoxyqueuosine reductase OS=Prevotella enoeca OX=76123 GN=AS203_06195 PE=4 SV=1
MRLKLSNEIKAEALRLGFFACGIARAEPVADEVAAHVRRWLDVGGNAGMTYMGNYIDKRLDPRLLMDGVKSIVCVALNYAPAQHIPPGELQLASYAYGADYHDVVKEKLHQLAAHFGLQPFVIQESVKHPAINDISQEDRPHYRAFCDSAPVLERYWAQRAGLGWTGRNHQLIIPKAGSMFVLGELFIDIELTYDTPMQSRCGTCHKCIEACPTCALGMPNDMQGDAPGLFDAEKCLSYQTIENRGELSADASAAMGSTIYGCDRCQTACPWNRFAPPTTVPEFQPKPELLAMTREKWRKLTEEEYRKLFKGSAIKRAKYAGLMRNIRAVEKNDTHVK

SEQ ID NO: 79707 - protein, 359 aa, Prevotella fusca
  misc_feature (1)..(359): tr|A0A0K1NI21|A0A0K1NI21_9BACT (Fe-S)-binding protein O S=Prevotella fusca JCM 17724 OX=1236517 GN=ADJ77_02590 PE=4 SV=1
MSPVEQAKLPTPRDSYGLGNSSVIKSLAHSLGFFACGIAKAEPVDEAVAQKYRKWLENGEEASMAYMANYLEKRLDPRLLVPGVRSIVSLALNYAPAQQLPEGEYQIAAYALGLDYHDLMKVKMRELAEKIAAKFHSFQETEENQPLNRETRTKDNETNIKECGKKVPLSPRGERGWGCFCDTAPVLERYWAQKAGIGWIGRNHQLIIPHAGSMFFLGEIFLPFEVDVYDEPMANRCGSCHRCIDACPTRAIIPGEDFHAERCLSYQLIENRGELSAEAKTAMGDTIYGCDRCQTACPWNRFATPNTEPALQPKPELLNMSKEKWHNLTVEDYRRLFKGSAVKRVKFEGLKRNITVKKP

SEQ ID NO: 79708 - protein, 325 aa, Prevotella histicola
  misc_feature (1)..(325): tr|G6AGB4|G6AGB4_9BACT 4Fe-4S ferredoxin-type domain-co ntaining protein OS=Prevotella histicola F0411 OX=85729 1 GN=HMPREF9138_01141 PE=4 SV=1
MKQDEKMIASKIKAEAQRLGFFACGIAKAAPVEENVAEAYRKWLENGEEASMAYMTNYLEKRLNPALLVPGVRSIVSLAMNYAPAQQLPEGEYQLAAYALGQDYHDLMKQRLRELAVNIGAPMELFQKGKKPQSADEKEETGWGVFCDTAPVLERYWAQKAGLGWVGRNHQLIIPHAGSMFFLGEVFLPFAVDVYDTPMQSRCGSCHRCIDACPTHAIIPDEDFHADRCLSYQLIENRGELSDEAKAAMGDTIYGCDRCQTACPWNRFATPNTEPALQPKPELLSMSKEAWHNLSVEDYRRLFKGSAVKRVKFDGLKRNIDATNN

SEQ ID NO: 79709 - protein, 319 aa, Prevotella histicola
  misc_feature (1)..(319): tr|A0A096AW01|A0A096AW01_9BACT (Fe-S)-binding protein O S=Prevotella histicola JCM 15637 = DNF00424 OX=1236504 GN=HMPREF2132_10385 PE=4 SV=1
MIASKIKAEAQRLGFFACGIAKAAPVEENVAEAYRKWLENGEEASMAYMTNYLEKRLNPALLVPGVRSIVSLAMNYAPAQQLPEGEYQLAAYALGQDYHDLMKQRLRELAVNIGAPMELFQKGKKPQSADEKEETGWGVFCDTAPVLERYWAQKAGLGWVGRNHQLIIPHAGSMFFLGEVFLPFAVDVYDTPMQSRCGSCHRCIDACPTHAIIPDEDFHADRCLSYQLIENRGELSDEAKAAMGDTIYGCDRCQTACPWNRFATPNTEPALQPKPELLSMSKEAWHNLSVEDYRRLFKGSAVKRVKFDGLKRNIDATNN

SEQ ID NO: 79710 - protein, 336 aa, Prevotella intermedia
  misc_feature (1)..(336): tr|A0A2G9IDE3|A0A2G9IDE3_PREIN tRNA epoxyqueuosine(34) reductase QueG OS=Prevotella intermedia OX=28131 GN=que G PE=4 SV=1
MSSRYSRKEIKVEAERLGFFACGIARAEPVDAETAAAVRGWINKGSQATMDYMANYTEKRLNPCLLVPGTKSIVSLAMNYAPAQTMPETEYQLAAYAYGQDYHDVMKAKLRQLATLIANKFEGESDSEVGENDGDSTAITTPKTNETSEEPAGEIRVFVDTAPVLERYWAQRAGLGWIGKNHQLIIPRAGSMFFLGEIFLPYEFDSYDSPMPSRCGNCRRCIEACPTCAITDEWGFDSEKCLSYQLIENRGELSEQAKQSMGTTIYGCDRCQTACPWNKFATPNTTPEFQPKSELLAMTKADWHNLTIDEYRALFKGSAVKRVKFDGLKRNISAKE

SEQ ID NO: 79711 - protein, 336 aa, Prevotella intermedia
  misc_feature (1)..(336): tr|A0A1P8JGJ7|A0A1P8JGJ7_PREIN Epoxyqueuosine reductase OS=Prevotella intermedia ATCC 25611 = DSM 20706 OX=112 2984 GN=BWX39_09055 PE=4 SV=1
MSSRYSRKEIKVEAERLGFFACGIARAEPVDAETAAAVRGWISKGSQATMDYMANYTEKRLNPCLLVPGTKSIVSLAMNYAPAQTMPETEYQLAAYAYGQDYHDVMKAKLRQLAALIANKFEGENDSEVGENDGNSTAITTPKTNKTSEEPTGEIRVFVDTAPVLERYWAQRAGLGWIGKNHQLIIPRAGSMFFLGEIFLPYEFESYDSPMPSRCGNCRRCIEACPTCAITDEWGFDSEKCLSYQLIENRGELSEQAKQSMGTTIYGCDRCQTACPWNKFATPNTTPEFQPKSELLAMTKADWHNLTIDEYRALFKGSAVKRVKFDGLKRNISAKE

SEQ ID NO: 79712 - protein, 330 aa, Prevotella jejuni
  misc_feature (1)..(330): tr|A0A2K9HG21|A0A2K9HG21_9BACT tRNA epoxyqueuosine(34) reductase QueG OS=Prevotella jejuni OX=1177574 GN=queG PE=4 SV=1
MSSIDTFNTNTHGMDSSVVQSSVIKSLAHSMGFFACGIAKAAPVDEVIALKYRQWLKKGEEASMAYMANYLEKRLNPCLLVPGVRSIISLALNYAPAQQIPEGEYQIAAYALGQDYHDLMKRKMRELATKIAEQYQIPQNKEDEKPTIRCFCDTAPVLERYWAQKAGLGWVGRNHQLIIPHAGSMFFLGEIFLPFDTDNYDEPMPNRCGRCHRCIDACPTRAIIPDEDFHAERCLSYQLIENRGELSDEAKAAMGDTIYGCDRCQTACPWNRYATPNTEPTLQPKPELLSMSKEKWHNLTVEEYQRLFKGSAVKRVKFEGLKRNITVKKF

SEQ ID NO: 79713 - protein, 352 aa, Prevotella loescheii
  misc_feature (1)..(352): tr|A0A069QLA6|A0A069QLA6_PRELO Putative iron-sulfur clu ster-binding protein OS=Prevotella loescheii DSM 19665 = JCM 12249 = ATCC 15930 OX=1122985 GN=HMPREF1991_00230 PE=4 SV=1
MSLRLSNDIKAEAKRLGFFACGIAKAAPVEPTTAAEVTRWLDKGCFAEMSYMNNYTDKRLNPQLLMPGLKSIVCVAMSYAPAKRMPKGQYQLASYAYGQDYHEIVKGKLRQLATHFGFEPYTEENVVPSPSPDYAAPKYRVFCDSAPILERYWAVKAGLGWTGRNHQLIIPKAGSMFVLGELFLDIELDYDAEMPNRCGNCHKCIDVCPTKALGSWQDTVGKKTFLFDAKRCLSYQTIEYRGDLKPEVAQAMGDTIYGCDKCQTICPWNAHPIATNIEELAPKPELMSMTREQWHSLTEDDYKRLFKGSAVKRAKYAGLMRNIKAVEEFQLRHRQQTNDGNNATTNNKEKKQ

SEQ ID NO: 79714 - protein, 339 aa, Prevotella maculosa
  misc_feature (1)..(339): tr|H1HPZ4|H1HPZ4_9BACT Putative iron-sulfur cluster-bin ding protein OS=Prevotella maculosa OT 289 OX=999422 GN =HMPREF9944_02319 PE=4 SV=1
MNSRPLNKQDLTNEIKAEALRLGFFACGIAEAAPVEKATADHVKQWLKKGNHANMDYMANHTDKRLDPRLLMTGVRSIICVALNYAPHTTFPDSEYQLAAYAIGLDYHDIMKEKLRQLAAKFGYEDALFSQNAKRKCRIFADTGPVLERYWAEKAGLGWTGKNHQLIIPHAGSMFFLGELIVDEELVYDSPMENRCGNCRRCIEACPTKAITEGHEMNAARCLSYQTIENKSALSKDIIVEMGNTIYGCDRCLKACPWNRFATPNDIPELQPKAELLEMTKQQWENLTEEEYRKLFKGSAVKRAKYAGLMRNIQAVAWHSQEKQLPLPLKMKNNEQESK

SEQ ID NO: 79715 - protein, 321 aa, Prevotella marshii
  misc_feature (1)..(321): tr|E0NV24|E0NV24_9BACT Putative iron-sulfur cluster-bin ding protein OS=Prevotella marshii DSM 16973 = JCM 1345 0 OX=862515 GN=yjeS PE=4 SV=1
MSSRRSSEVKAEALRLGFFACGIAKAVPVDKDVATRFRQWIRNGSHADMQYMANHTDARLDPRLLMEGVKSIVCVAMNYTPAHRLSDNGYELSAYVYGKDYHDVMKVRLHTLAARLGFTRYRAFCDTAPVLERYWAVKAGLGWTGKHHQLIIPGAGSMFFLGELFTDEVFDYDSPVAGRCGRCTRCIEACPTGVLGTTFNCVKCLSYQTIENRNELSPEAARHMGNTIYGCDRCLQACPWLRTASPTTIPEFAPTEKLLSMTKERWHHLTEEDYRYLFKGSAVKRAKYTGLMRNIQAVRENNQDCDIDTTPDSPNIPSQHE

SEQ ID NO: 79716 - protein, 330 aa, Prevotella melaninogenica
  misc_feature (1)..(330): tr|A0A250KH45|A0A250KH45_9BACT tRNA epoxyqueuosine(34) reductase QueG OS=Prevotella melaninogenica OX=28132 GN =PMEL1_00817 PE=4 SV=1
MSSIDTFNPIMHKENSTVVQSSTIKSLARSMGFFACGIAKAAPVDEEIAQKYRRWLENGEEASMAYMTNYLEKRLDPRLLVPGVRSIVSLALNYAPAQQMPEGEYQIAAYALGQDYHDLMKQKMRELAMQITERWQLPQQKEGEEPSIRCFCDTAPVLERYWAQKAGLGWVGRNHQLIIPHAGSMFFLGEIFLPFDVDVYDEPMSNRCGNCHRCIDACPTRAIIPNEDFHAERCLSYQLIENRGELSDEAKNHMGDTIYGCDRCQTACPWNRFATPNTEPALQPKPELLCMSKEKWHNLTIEEYQRLFKGSAVKRVKFEGLKRNITVKVK

SEQ ID NO: 79717 - protein, 330 aa, Prevotella melaninogenica
  misc_feature (1)..(330): tr|A0A096AIE0|A0A096AIE0_9BACT (Fe-S)-binding protein O S=Prevotella melaninogenica DNF00666 OX=1401073 GN=HMPR EF0661_08010 PE=4 SV=1
MSSIDALSPNINKEDSIVVQSSTIKSLAHSMGFFACGIAKAAPVDKAVAQKYRKWLENGEEATMAYMTNYLEKRLDPRLLVPGVRSIVSLALNYAPAQQLPKGEYQIAAYALGLDYHDLMKQKMRELAIKITERWQLPKQEEGEEPSVRCFCDTAPVLERYWAQKAGLGWVGRNHQLIIPHAGSMFFLGEIFLPFDVDVYDEAMSNRCGSCHRCIDACPTRAIIPDEVFHAKRCLSYQLIENRGELTDEAKSHMGDTIYGCDRCQTACPWNRFATPNTEPALQPKPELLSMSKEKWHNLTIEDYQRLFKGSAVKRVKFEGLKRNITVKEK

SEQ ID NO: 79718 - protein, 369 aa, Prevotella micans
  misc_feature (1)..(369): tr|H1Q0J1|H1Q0J1_9BACT Uncharacterized protein OS=Prevo tella micans F0438 OX=883158 GN=HMPREF9140_00429 PE=4 S V=1
MRFGNIGFILKKEEYKFNSGFMKSFSSFFILLKSFLKPVIQIFIFLTLCTVMTIQVKKIDNSYLKCEARRLGFTACGIARAEPVEKETADRLRAWLSSGGEADMHYMAAHTDKRLDPRLLVPDVKSIVSVALNYAPARTFPEEEYQLAAYAYGRDYHDLMKGRLRELALTICNALSEGTESVRVFVDTAPVLERYWAWKAGLGWTGKNHQLIIPHGGTMFFLGEIFFPFDADAYDSPMPSRCGSCRRCLDACPTGAIVETKEFCSEKCLSYQLIENRGELSAEAKSAMGNMIYGCDRCQEVCPWNRFANPTDEPLLQPSDELMSMCKTDWQRLTPEKYRTLFKGSAVKRAKFEGIKRNINAANSNNKDL

SEQ ID NO: 79719 - protein, 377 aa, Prevotella multiformis
  misc_feature (1)..(377): tr|F0F5H9|F0F5H9_9BACT Putative iron-sulfur cluster-bin ding protein OS=Prevotella multiformis DSM 16608 OX=888 743 GN=HMPREF9141_0845 PE=4 SV=1
MTAKTYPASLPGKADHIPVLRAVSIKSLARSFGFSACGIAKADAVEESIARRYRRWLENGEEASMSYMANYLEKRLDPRLLVPGVRSIVSLALNYAPSQLLPKGEYQFAAYALGKDYHDLMKERMRQLAGKIKELHPLLPFLPRKEAHATFPPSQQGILPIRRQAMPASSAEDPSQTSRPCTASSPPAPQREPGWGCFCDTAPVLERYWAQKAGLGWVGRNHQLIIPHAGSMFFLGEIFLPFEVDVYDESMPDRCGKCHRCVDACPTRAIVPGEDFHASRCLSYQLIENRGELSEEAKAAMGDTIYGCDRCQTACPWNRFATPSTEPELQPKPELLSMSKEKWHRLTVEDYRRLFKGSAVKRAKFDGLKRNIQAKEQ

SEQ ID NO: 79720 - protein, 329 aa, Prevotella multisaccharivorax
  misc_feature (1)..(329): tr|F8NC57|F8NC57_9BACT Uncharacterized protein OS=Prevo tella multisaccharivorax DSM 17128 OX=688246 GN=Premu_2 674 PE=4 SV=1
MTTASSLKEIIKAGAADLGFSSIGFARALPVTESMREHYLHWLSVGGHADMRYLENNLDKRFDPRLLMPGVKTIVVVALNYFPSCRLPEGEPQIADYALGNDYHDLVKAKLRLLAERTGFQLLQRDAVAVKEGDPPGYRAFVDSAPVLERYWAVQAGLGWIGKNHQLIIPHAGSEFFLGELFVTEELPPDKPMTSRCGKCHRCVDACPTQALCLPARQVDGYGEITGFSSYRCLSYQTIENRGELSAGAQAAMDCTFYGCDCCQRACPWNRFAIPTTEEALQPRRELLEMTRQKWDNLTVETYRRLFKGSAVKRVKYEGLMRNIRALKS

SEQ ID NO: 79721 - protein, 316 aa, Prevotella nigrescens
  misc_feature (1)..(316): tr|A0A246EK25|A0A246EK25_9BACT tRNA epoxyqueuosine(34) reductase QueG OS=Prevotella nigrescens OX=28133 GN=CBG 57_10485 PE=4 SV=1
MSLKYSRKEIKAEAESLGFFACGVVPAAPVDAETAAAVRRWISKGSQATMDYMANYTEKRLNPCLLVPGTKSIVSLAMNYAPAKTMPETEYQLAAYAYGQDYHDVMKAKLRQLAAIIINNFHTNNHEEPTGEIRVFVDTAPVLERYWAQRAGLGWIGKNHQLIIPHAGSMFFLGEIFLPFEFDSYDSPMPSRCGKCRRCIEACPTCAITDDFNFDSERCLSYQLIENRGELSEQAKQSMGSTIYGCDRCQTACPWNKFATPNTTPEFQPKSELLAMTKADWHNLTVEQYRALFKGSAVKRVKFDGLKRNISAKDKT

SEQ ID NO: 79722 - protein, 316 aa, Prevotella nigrescens; identical to SEQ ID NO: 79721
  misc_feature (1)..(316): tr|L9PY47|L9PY47_9BACT Uncharacterized protein OS=Prevo tella nigrescens F0103 OX=702439 GN=HMPREF0662_00024 PE =4 SV=1

SEQ ID NO: 79723 - protein, 318 aa, Prevotella oralis
  misc_feature (1)..(318): tr|E7RNK3|E7RNK3_9BACT Putative iron-sulfur cluster-bin ding protein OS=Prevotella oralis ATCC 33269 OX=873533 GN=HMPREF0663_10754 PE=4 SV=1
MSSELSNSIKAEAIGLGFTACGIAKAEPVDNFTAQKVMRWLAQGDYAGMAYMNNYTDKRLDPRLLMPEVKSIVCVALNYAPARTLPEGEYQFAAYALGKDYHDIVKAKLHRLAAIFGFENYRAFCDSAPVLERYWAERAGLGWTGRNHQLIIPKAGSMFFLGELFLDVELEYDRPQVSKCGRCHACIDACPTQAILPDREFDAEKCLSYQTIENRGELTDAFACKMGNTIYGCDRCQQACPWNRFATPNTTPELQPNEALLGMTKERWHNLSEEEYRQIFKGSAVKRAKYAGLMRNIQAANKHQEETGNEYTDERQHS

SEQ ID NO: 79724 - protein, 318 aa, Prevotella oralis
  misc_feature (1)..(318): tr|V8BKX7|V8BKX7_9BACT 4Fe-4S ferredoxin-type domain-co ntaining protein OS=Prevotella oralis CC98A OX=1073367 GN=HMPREF1199_02484 PE=4 SV=1
MSSELSNSIKAEAIGLGFTACGIAKAEPVDNVTARKVMRWLAQGDYAGMAYMNNYTDKRLDPRLLMPEVKSIVCVALNYAPARTLPEGEYQFAAYALGKDYHDIVKAKLHRLAAIFGFENYRAFCDSAPVLERYWAERAGLGWTGRNHQLIIPKAGSMFFLGELFLDVELEYDRPQVSKCGRCHACIDACPTQAILPDREFDAEKCLSYQTIENRGELTDAFACKMGNTIYGCDRCQQACPWNRFATPNTTPELQPNEALLGMTKERWHNLSEEEYRQIFKGSAVKRAKYAGLMRNIQAANKHQEETDNEYTDERQHS

SEQ ID NO: 79725 - protein, 340 aa, Prevotella oris
  misc_feature (1)..(340): tr|A0A448L7U2|A0A448L7U2_9BACT Epoxyqueuosine reductase OS=Prevotella oris OX=28135 GN=queG PE=4 SV=1
MNSRPLNKQDLTNEIKAEALRLGFFTCGIAKADSVEKATADHVKRWLKEGKQANMDYMANYMEKRLDPRLLMEGARSIICVALNYAPHNYCSDSEYQLAAYALGQDYHDIMKAKLRRLAAKFGYEDALISQNPEAHKCRIFVDTGPILERYWAEKAGLGWTGKNHQLIIPHAGSMFFLGEILVDEELIYDQPVKNRCGNCRKCIEACPTKAIIENCEIDAEKCLSYQTIENRSELSSEATARIGNTIYGCDACLKACPWNRFATPNDTPELQPKAELLQMTRQQWEYLSEEEYRKLFKGSAVKRAKYKGLMRNIEAAACFSREKQLPLSNKSKDYEQENK

SEQ ID NO: 79726 - protein, 340 aa, Prevotella oris
  misc_feature (1)..(340): tr|D1QPZ7|D1QPZ7_9BACT Putative iron-sulfur cluster-bin ding protein OS=Prevotella oris F0302 OX=649760 GN=HMPR EF0971_01044 PE=4 SV=1
MNSRPLNKQDLTNEIKAEALRLGFFTCGIAKADSVEKATADHVKRWLKEGKQANMDYMANYMEKRLDPRLLMEGARSIICVALNYAPRNYCSDSEYQLAAYALGQDYHDIMKAKLRRLAAKFGYEDALISQNPEAHKCRIFVDTGPILERYWAEKAGLGWTGKNHQLIIPHAGSMFFLGEILVDEELIYDQPVKNRCGNCRKCIEACPTKAIIENCEIDAEKCLSYQTIENRSELSSEATARIGNTIYGCDACLKACPWNRFATPNDTPELQPKAELLQMTRQQWENLSEEEYRKLFKGSAVKRAKYKGLMRNIEAAACFSREKQLPLSNKSKDYEQENK

SEQ ID NO: 79727 - protein, 314 aa, Prevotella oryzae
  misc_feature (1)..(314): tr|A0A010ZGG8|A0A010ZGG8_9BACT Putative Fe-S protein OS =Prevotella oryzae DSM 17970 OX=915438 GN=XylorDRAFT_01 46 PE=4 SV=1
MNSKLSNNTISERSELSQKIKAEALSLGFSACGIAKAEPVSADVADHLKKWLYNKYNADMDYMNNYTDKRLDPRLLMDRLKSIVCVALNYYPQKRIPDNELQFAAYAYGNDYHDIVKSKLKLLAKKLGVTNYRAFCDSAPVLERYWAVQSGIGWTGRNHQLIIPKAGSMFFLGELFLDIELDYDKPQINRCGKCKACIEVCPTHAITADKEIDANLCLSYQTIENRGPIPQNITTAMGDTIYGCDKCQKVCPWNRFAVPTKEPELQPKEELMAMTKDKWYSLSEDDYKRLFKGSAVKRVKYTGLMRNIQAVKDK

SEQ ID NO: 79728 - protein, 340 aa, Prevotella oulorum
  misc_feature (1)..(340): tr|A0A1T4PA40|A0A1T4PA40_9BACT Epoxyqueuosine reductase OS=Prevotella oulorum OX=28136 GN=SAMN02745202_01368 P E=4 SV=1
MNLKHSNDIETLTLHIKAEAQRLGFFACGIAQARPVDEETAAHLKRWLDDEKFAGMDYMSNNTDKRLDPRLLLKNAQSIICVALNYAPKQAFAPHEYHIANYALGQDYHDIMKHKLRQLAASCGFEDDLISQNPQAKRCRIFVDSGPILERYWAERAGLGWIGKNHQLIIPHAGSMFFLGEILVEQPLLYDEPAKNRCGKCTKCLQACPTKAITSDNEIDAFRCLSYQTIENRSDIAAPFSTALGNTIYGCDECLKACPWNRFATPNDTPELQPRPELMAMTQEQWQNLTEEEYRKLFKGSAVKRAKYQGLMRNIKAAACASQKNKLSLPPKRREHDTED

SEQ ID NO: 79729 - protein, 340 aa, Prevotella oulorum
  misc_feature (1)..(340): tr|G1W915|G1W915_9BACT Uncharacterized protein OS=Prevo tella oulorum F0390 OX=702438 GN=HMPREF9431_00316 PE=4 SV=1
MNLKHSNDIEALTLHIKAEAQRLGFFACGIAQARPVDEETAAHLKRWLDDEKFAGMDYMNNNTDKRLDPRLLLKNAQSIICVALNYAPKQAFAPHEYHIANYALGQDYHDIMKHKLRQLAASCGFEDDLISQNPQAKRCRIFVDSGPILERYWAERAGLGWIGKNHQLIIPHAGSMFFLGEILVDQPLIYDEPAKNRCGKCTKCLQACPTKAITSDNEIDAFRCLSYQTIENRSDIAAPFSAALGNTIYGCDECLKACPWNRFATPNNTPELQPRPELLAMTQEQWQNLTEEEYRKLFKGSAVKRAKYQGLMRNIKAAACASQKNKLSLPPKRREHDTED

SEQ ID NO: 79730 - protein, 314 aa, Prevotella pallens
  misc_feature (1)..(314): tr|A0A379GA32|A0A379GA32_9BACT Epoxyqueuosine reductase OS=Prevotella pallens OX=60133 GN=queG PE=4 SV=1
MSLKYSRKEIKAEAKSLGFFACGIVQAMPVDAETAAAVRQWISKGSQATMDYMANYTEKRLNPCLLVPGTKTIVSLAMNYAPAKTMAATEFQLAAYAYGQDYHDVMKTKLRQLATIIANKFDTDEVEKPTGEIRIFVDTAPVLERYWAQKAGLGWIGKNHQLIIPKAGSMFFLGEIFLPYEFDSYDVPMPNRCGRCKRCINACPTCAICEGKNFESERCLSYQLIENRGELSKQAKQTMGTTIYGCDRCQTACPWNKFATPNTTPEFQPKSELLAMTKADWHNLTIEQYRALFKGSAVKRVKFDGLKRNISATE

SEQ ID NO: 79731 - protein, 314 aa, Prevotella pallens
  misc_feature (1)..(314): tr|F9DKW8|F9DKW8_9BACT Iron-sulfur cluster-binding prot ein OS=Prevotella pallens ATCC 700821 OX=997353 GN=HMPR EF9144_2310 PE=4 SV=1
MSLKYSKKEIKAEAKSLGFFACGIVQATPVDAETAAAVRQWISKGSQATMDYMANYTEKRLNPCLLVPGTKTIVSLAMNYAPAKTMAATEFQLAAYAYGQDYHDVMKKKLRQLATIIANKFDTDEVEKPIGEIRIFVDTAPVLERYWAQKAGLGWIGKNHQLIIPKAGSMFFLGEIFLPYEFDSYDVPMPNRCGRCKRCINACPTCAICEGKNFESERCLSYQLIENRGELSKQAKQTMGTTIYGCDRCQTACPWNKFATPNTTPEFQPKSELLAMTKADWHNLTIEQYRALFKGSAVKRVKFDGLKRNISATE

SEQ ID NO: 79732 - protein, 342 aa, Prevotella pleuritidis
  misc_feature (1)..(342): tr|U2MQW4|U2MQW4_9BACT Epoxyqueuosine reductase OS=Prev otella pleuritidis F0068 OX=1081904 GN=queG PE=4 SV=1
MRLKLSNEIKAEALRLGFFACGIARAEPVADEVAAHVRRWLDVGGNAGMTYMGNYIDKRLDPRLLMDGVKSIVCVALNYAPAQHIPPGELQLASYAYGADYHDVVKEKLHQLAAHFGLQPLVMQESVKHPAINDISQEDRPHYRAFCDSAPILERYWAERAGLGWTGRNHQLIIPKAGSMFVLGELFIDIELVYDTPIPNRCGTCYKCIDACPTRALGSHSDISAGVPALFDAEKCLSYQTIENRGPLSSAVSTAMGNTIYGCDRCQSACPWNRNAPPTTVPELQPKPELLAMTRDKWRQLTEEEYRKLFKGSAVKRAKYTGLMRNINAVTENYSKDSLNKE

SEQ ID NO: 79733 - protein, 368 aa, Prevotella saccharolytica
  misc_feature (1)..(368): tr|L1NFU9|L1NFU9_9BACT Putative iron-sulfur cluster-bin ding protein OS=Prevotella saccharolytica F0055 OX=1127 699 GN=HMPREF9151_00788 PE=4 SV=1
MTSKHSEEINSILSEETKTKLSEEIKVEAQRLGFFACGIAQATAVDPDTAAEVKRWLDKGGYAEMNYMNNHTDKRLDPRLLMPGLKSIVCVALNYAPEQRIPQTEFQLAGYAYGQDYHDVVKNKLRQLATTFGFQPYTEPTGSHTPAVPTPQTTPNPSSLIPPPLPPQFRVFCDSAPILERYWAVKAGLGWTGRNHQLIIPNAGSMFVLGELFLDIPLTYDQPLPNRCSSCHRCIDACPTGALGTWNSLTTHHLHPFDAARCLSYQTIENRGTLSTDIAAAMGNTIYGCDKCQTACPWNRFASPTNIAELRPRPELLAMTREKWLHLSEEDYQKLFKGSAVKRAKYSGLMRNITAVNNQEKDKEQPSE

SEQ ID NO: 79734 - protein, 340 aa, Prevotella salivae
  misc_feature (1)..(340): tr|E6MN46|E6MN46_9BACT Putative iron-sulfur cluster-bin ding protein OS=Prevotella salivae DSM 15606 OX=888832 GN=yjeS PE=4 SV=1
MSSRPLNKQDLTNEIKAEALRLGFFACGIARAEHVDKATTDHINRWLKEGKFANMEYMANYTDKRLDPRLLMEGAKSIICVALNYAPQHKFNENEFHLASYALGLDYHDIMKNKLRQLAARFGFNDALKCLKSERKMCRIFVDTGPILERYWAEKAGLGWVGKNHQLIIPHAGSMFFLGEIIVDEELVYDQPAKNRCGNCHRCIDACPTKAIDEGREINAEKCLSYQTIENRESLSEEAFASIGNTIYGCDACLKACPWNKFAIPNDTPELQPKAELMQMTRQEWEILSEEDYQKLFKGSAVKRVKYKGLMRNIKAAACYSQGKHLPLSTKTKDNEQKNK

SEQ ID NO: 79735 - protein, 340 aa, Prevotella salivae
  misc_feature (1)..(340): tr|U2MMP2|U2MMP2_9BACT Epoxyqueuosine reductase OS=Prev otella salivae F0493 OX=1395125 GN=queG PE=4 SV=1
MSSKSLNKQDLTNEIKAEALRLGFFACGIARAEHVDKATTDHINRWLKEGKYANMEYMANYTDKRLDPRLLMEGAKSIICVALNYAPQHKFNENEFHLASYALGLDYHDIMKNKLRQLAARFDFNDALKCLKSERKMCRIFVDTGPILERYWAEKAGLGWVGKNHQLIIPHAGSMFFLGEIIVDEELVYDQPAKNRCGNCHRCIDACPTKAIDEGREINAEKCLSYQTIENRECLSEEASASIGNTIYGCDACLKACPWNKFAIPNDTPELQPKAELMQMTRQEWEILSEEDYQKLFKGSAVKRVKYKGLMRNIKAATCYSQGKHLPLSTKTKDNEQKNK

SEQ ID NO: 79736 - protein, 308 aa, Prevotella scopos
  misc_feature (1)..(308): tr|A0A1B1I976|A0A1B1I976_9BACT tRNA epoxyqueuosine(34) reductase QueG OS=Prevotella scopos JCM 17725 OX=123651 8 GN=AXF22_05395 PE=4 SV=1
MKFLARDVGFSACGIAKAAPVDEEIAQKYRRWLENGEEASMAYMSNYLEKRLDPRLLIPGVRSIVSLAFNYTPAQQMPKGEYQIAAYALGQDYHDLMKRKMRELAMKISERWQIPQNENKGEEPLIRCFCDTAPVLERYWAQKAGLGWVGRNHQLIIPHAGSMFFLGEIFLPFEVDVYDEPMSNRCGKCHRCIDACPTRAIIPDEDFHAERCLSYQLIENRGELSDEAKSSMGDTIYGCDRCQTACPWNRFSTPNTEPSLQPKPELLSMSKEMWHNLTVEDYQRLFKGSAVKRVKFDGLKRNIKAKKR

SEQ ID NO: 79737 - protein, 352 aa, Prevotella shahii
  misc_feature (1)..(352): tr|A0A318I0S9|A0A318I0S9_9BACT Epoxyqueuosine reductase OS=Prevotella shahii DSM 15611 = JCM 12083 OX=1122991 GN=EJ73_00290 PE=4 SV=1
MSLKLSNEIKAEAKRLGFFACGIAKAAPVDATTATEVKRWLDNGCFGDMAYMNNYTDKRLNPKLLMPGLKSIVCVAMSYAPAKRIPEGQYQLASYAYGQDYHEVVKGKLRQLATHFGFEPHTEDTTLACSSFVNAIPKFRVFCDSAPILERYWAVKAGLGWTGRNHQLIIPKAGSMFVLGELFLDIELNYDEEMPNRCGACYKCIDICPTKALGTPEETMGKQTFLFNAERCLSYQTIEYRGDLQPEMANAMGDTIYGCDKCQTICPWNAHPVATNIEELSPRPELMNMTREQWHNLTEDDYKRLFKGSAVKRAKYAGLMRNIKAVEQYQKLHRLQDNKGPNALNNNEENKQ

SEQ ID NO: 79738 - protein, 318 aa, Prevotella sp.
  misc_feature (1)..(318): tr|A0A3D3MWS9|A0A3D3MWS9_9BACT tRNA epoxyqueuosine(34) reductase QueG OS=Prevotella sp. OX=59823 GN=queG PE=4 SV=1
MNSELSNHIKAEAKSLGFYACGIAKADAVDNETATRFQDWLAQGKNADMAYLNNYTDKRLDPRLLMTGLKSIVCVALNYAPAERMPDDEYQLAAYAYGQDYHNIVKNKLRQLASRFGFECMDSKGTPINDGNIHYRVFCDSAPILERYWAVRAGIGWKGKSQQLIIPQAGTMFVLGELFLDIELEYDQPMKSRCGRCHRCIDACPTQALKEGEGMDARRCLSYLTIENRGDISPEVAAKMGNTIYGCDRCQQACPWNHFAQPNHTPELQPRPELMNMTKEKWQNLTEEEYRALFRGSAVKRAKYTGLMRNIHAVEKKK

SEQ ID NO: 79739 - protein, 331 aa, Prevotella sp.; identical to SEQ ID NO: 79693
  misc_feature (1)..(331): tr|W5QSM5|W5QSM5_9BACT Uncharacterized protein OS=Prevo tella sp. Sc00026 OX=1231727 PE=4 SV=1

SEQ ID NO: 79740 - protein, 311 aa, Prevotella stercorea
  misc_feature (1)..(311): tr|A0A3R6FEC4|A0A3R6FEC4_9BACT tRNA epoxyqueuosine(34) reductase QueG OS=Prevotella stercorea OX=363265 GN=que G PE=4 SV=1
MTTTITSELIKAEAASLGFFACGIAKADAVEQSVVDSYRRWIAEGCNGSMAYLENYPDKRFDPRLLVPGVRSIVSVALNYAPSRCMPSDAPQFASYALGKDYHDVVKQKLSQLAERLGLELNDQIRAFCDSAPVLERYWAVRAGLGWIGRNHQLIIPRAGSMFFLGELFLPVEVEYDEPMHSRCGTCNRCVEACPTQALQRNADGETCKFDGRLCLNYQTIENRGDIPEDLASKLAPYIYGCDRCQSACPWNRFAVPNTTPELQPSDELLAMKREDWLKLTEEEYRKLFKGSAVKRAKYAGLMRNIKDALG

SEQ ID NO: 79741 - protein, 311 aa, Prevotella stercorea
  misc_feature (1)..(311): tr|G6AXI4|G6AXI4_9BACT Putative iron-sulfur cluster-bin ding protein OS=Prevotella stercorea DSM 18206 OX=10023 67 GN=HMPREF0673_01327 PE=4 SV=1
MTTTITSEQIKAEAASLGFFACGIAKADAVEQSVVDSYRRWIAEGCNGSMAYLENYPDKRFDPRLLVPGVRSIVSVALNYAPSRCMPSDAPQFASYALGKDYHDVVKQKLSQLAERLGLELNDQIRAFCDSAPVLERYWAVRAGLGWIGRNHQLIIPRAGSMFFLGELFLPVEVEYDEPMHSRCGTCNRCVEACPTQALQRNADGETCKFDGRLCLNYQTIENRGDIPEELASKLAPYIYGCDRCQSACPWNRFAVPNTTPELQPSDELLAMKREDWLKLTEEEYRKLFKGSAVKRAKYAGLMRNIKDALG

SEQ ID NO: 79742 - protein, 325 aa, Prevotella timonensis
  misc_feature (1)..(325): tr|A0A2K0XKZ1|A0A2K0XKZ1_9BACT tRNA epoxyqueuosine(34) reductase QueG OS=Prevotella timonensis OX=386414 GN=BF S16_05620 PE=4 SV=1
MNSKLSTEIKQEALKLGFTKCGIAQAKAVDEWTATQYKQWIAEEKCASMDYMRNNIEKRLDPRMLMDGVKSIVCVALNYAPAQFMPEKEWQLAAYAYGQDYHYIVKNKLRQLAQRFGFHEIIQPNNPTNDGDAIHYRVFCDSAPILERYWAVQAGLGWMGKHHQLIVPKAGSMFFLGELFLDIELTFDTPMESHCGNCRACIEACPSGAIQLDSSLDANKCLSYQTIENRGELAEGVAKDMGDMLYGCDRCLRACPWNRFSKPNDTPELQPKTELLEMTRDKWMNLSVENYQKLFKKSAVKRAKYEGLMRNIRAIASLSKNKNKE

SEQ ID NO: 79743 - protein, 325 aa, Prevotella timonensis
  misc_feature (1)..(325): tr|A0A098YTN1|A0A098YTN1_9BACT (Fe-S)-binding protein O S=Prevotella timonensis S9-PR14 OX=1401062 GN=HMPREF930 4_06860 PE=4 SV=1
MNSKLSTEIKQEALKLGFTKCGIAQAKAVDEWTATQYKQWIAEEKCASMDYMRNNIDKRLDPRMLMEGVKSIVCVALNYAPAQFMPEKEWQLAAYAYGQDYHYIVKNKLRQLAQHFGFHEIIPPNNPTNDGDAIHYRVFCDSAPILERYWAVQAGLGWLGKHHQLIVPKAGSMFFLGELFLDIELTFDTPMESHCGNCRACIEACPSGAIQLDSSLDANKCLSYQTIENRGELAEDVAKDMGDMFYGCDRCLRACPWNRFSKPNDTPELQPKTELLEMTRDKWMNLSVENYQKLFKKSAVKRAKYEGLMRNIRAIASLSKNKNKE

SEQ ID NO: 79744 - protein, 325 aa, Prevotella veroralis
  misc_feature (1)..(325): tr|C9MLP6|C9MLP6_9BACT Putative iron-sulfur cluster-bin ding protein OS=Prevotella veroralis F0319 OX=649761 GN =HMPREF0973_00521 PE=4 SV=1
MININATWIKEEAKRLGFFTCGVAKAEPVDEEVAKGYRKWLENGEEATMAYMSNYLEKRLDPCKLVPCVRSIVSLALNYAPSQHLPKGEYQFAAYALGQDYHDLMKVKMRELANKIMESEPYPNAFQENKEGQEEELEIRCFCDTAPVLERYWAQKAGLGWVGRNHQLIIPHAGSMFFLGEIFLPFDVDKYDEPMESRCGNCHRCIDACPTKAIIPNEDFHTDRCLSYQLIENRGDLSEDAKAAMGDTIYGCDRCQTACPWNRFATPNTEPSLQPKSELLSMSKEAWHNLSIEDYRRLFKGSAVKRVKFEGLKRNIAATQHKENE

SEQ ID NO: 79745 - protein, 313 aa, Prevotellaceae bacterium
  misc_feature (1)..(313): tr|A0A316NRN5|A0A316NRN5_9BACT tRNA epoxyqueuosine(34) reductase QueG OS=Prevotellaceae bacterium OX=2049047 G N=queG PE=4 SV=1
MLSAEYIKSVSAELGFSACGICKAEKMNKSYSDYVKRFIAEGRNGEMDYLSRNMDMRFNPEKLVEGTKSIISVALNYYPARKMNAKEYTFSYYAYGKDYHTVVKQRLFELFNRLKKSCEGNEKELEGRAFCDTAPVSERYWAWRAGVGFIGKNTLLIIPHKGSFFFLGELFVNAEVDKYDEPLKNYCGNCTKCIDACPGNAIFEPYNLDARKCLSYLTIESRKELPAGTENKMDNCIYGCDRCQSACPHNNFATPTDVIEFAPSEELFEMKREDWDSLTEEEYRKLFKGSAVKRAKYSGLMRNINAVNKKKSK

SEQ ID NO: 79746 - protein, 342 aa, Prevotellaceae bacterium
  misc_feature (1)..(342): tr|A0A239RIG7|A0A239RIG7_9BACT Epoxyqueuosine reductase OS=Prevotellaceae bacterium KH2P17 OX=1945886 GN=SAMN0 6298210_101209 PE=4 SV=1
MRLGFFACGIAKAGKVDADFATYYLKQVEAHNYADMSYMYEHVEMRLDPRLLMPQAQSVICVALNYAPSSRIADGELQVASYALGQDYHDIVKRKLHQLAAFIYQGAAAPTPIHHPTPATQHPSPATQHPSPTTPRYRACCDTAPILERYWAQQAGLGWIGRNRQLIIPHAGSLFFLGELLVDIDLEYDSPMPNRCGKCRSCIDSCPTHALCPSADAAQPQFSTLDAGRCLSYQTIENRGELSAEAKAKMGNNIYGCDKCQLACPWNRFQQPTSVPEFEPKPELLNMKRADWLQLSEERYRQLFKGSAVKRAKYKGLMRNIRAALASERQPQTKPSWNEKND

SEQ ID NO: 79747 - protein, 297 aa, Pricia antarctica
  misc_feature (1)..(297): tr|A0A1G7AHH1|A0A1G7AHH1_9FLAO Epoxyqueuosine reductase OS=Pricia antarctica OX=641691 GN=queG PE=3 SV=1
MIKTEAKRLGFLSCGISKAEFLEKEAPRLEKWLNKNMNGEMGYMENHFDKRLDPRLLVDGAKSVISLLLNYYPDETQREDTYKISKYAYGHDYHHVIKSKLRQLQEFISEEIGEVSGRAFVDSAPVLDKAWAAKSGLGWIGKHSNLLTQQVGSFYFIAELIVDLDLEYDTPVTDHCGTCTACIDACPTQAITEPYVVDGSKCISYFTIELKNEIPEEFQGKFDDWAFGCDICQDVCPWNRFSKPHAEPLFNPHPELLEFSKKDWEEITEDVFRKVFQKSAVKRTKFSGLTRNIEFLK

SEQ ID NO: 79748 - protein, 345 aa, Primorskyibacter insulae
  misc_feature (1)..(345): tr|A0A2R8AYN6|A0A2R8AYN6_9RHOB Epoxyqueuosine reductase OS=Primorskyibacter insulae OX=1695997 GN=queG PE=3 SV =1
MTSLADILKAEASALGFDACQICRPWDVPQVPDRLTAFLEAGYHGQMSWMADRTHWRSNPHALWPEAKSVIVLAESYTPDHDPTEVLNHPDQGAISVYAQNKDYHDTVKKRLKRLARWLIAEAGGEVKVFVDTAPVPEKPLGQAAGLGWQGKHTNLVSRGLGNWFFIGSVFTTLDLPPDPPEVDHCGSCRACLSACPTEAFPAPYQLDARRCISYLTIEHHGPVDPDLRPLMGNRIYGCDDCLAACPWNKFAVEAREAKYHARPDLIAPDLAELASLDDTAFRAKFSGSPIKRIGRNRFVRNVLYAIGNSGRPALATVAQGLTDDPDETVADAARWALQRLKPQQ

SEQ ID NO: 79749 - protein, 350 aa, Primorskyibacter sedentarius
  misc_feature (1)..(350): tr|A0A4V2UNC0|A0A4V2UNC0_9RHOB Epoxyqueuosine reductase OS=Primorskyibacter sedentarius OX=745311 GN=queG PE=3 SV=1
MEGLKDRLVARALEEGFSACRICRPWDVPQVAGRLAGFLEAGHHGQMGWMAERTHWRGDPAALWPEARSVIMLAENYGPSHDPLEILAHRDRAAISVYAQNRDYHDVVKKRLKRLGRWLIEQAAKPPSSVEPPEIKVFVDTAPVPEKPLGAAAGLGWQGKHTNLVSRELGSWFFLGSIFTTLDLPADEAERDHCGSCRACLDICPTNAFPAPYQLDARRCISYLTIEHHGPVEEDLRSLLGNRIYGCDDCLAACPWNKFAQAASEAKYHARPELLAPKLADLAVLDDAGFRAHFSGSPIKRIGRGRFVRNVLYAIGNSGDAGLLGVAQGLCEDADTVVADAARWAVSRLA

SEQ ID NO: 79750 - protein, 346 aa, Primorskyibacter sp.
  misc_feature (1)..(346): tr|A0A4R6AJG2|A0A4R6AJG2_9RHOB Epoxyqueuosine reductase OS=Primorskyibacter sp. SS33 OX=2547833 GN=queG PE=3 S V=1
MTGSLKSDLTREALEAGFAKVGICRPDAIPEAAGRLRAFLDAGCHGEMGWMAERTHWRGDPAALWPEARSVVMLAEAYTPDHDPLEDLDHPDRAAISVYAQGRDYHDVVKKRLKRVGRWLLERAPGHGIKVFVDTAPVMEKPLAQAAGLGWQGKHTNLLGRDLGNWVFLGAIFTTVELEPDPPAAESCGSCRRCLDICPTDAFPAPFQLDARRCISYLTIEHSGPVPEDLRARMGNRIYGCDDCLAVCPWNKFAVRGRDMRLATQPGRRLPELAELAALDDAAFRARFSGSPVKRIGRDRFVRNVAYAIGNSGVPRLSQAVAPLHDDPSPVVADAARWASLRLRKD

SEQ ID NO: 79751 - protein, 318 aa, Prochlorococcus marinus
  misc_feature (1)..(318): tr|A2BND3|A2BND3_PROMS Uncharacterized Fe-S protein OS= Prochlorococcus marinus (strain AS9601) OX=146891 GN=A9 601_00061 PE=4 SV=1
MIDTIQEKKEISKKLKERAIFEGFSVAGIASLPGSSRVKLRTNALERWLSNNYHAEMKWMEAEKRKNIGSLFKDAKSVLSVGFTYINSQNSNNNFLKVAKFSQGEDYHKVIHKKLKNIGKWIDLEIPNCKWKICVDTSPLLEKAWAEEAGIGWIGKNSNLISKKNGSWFTLGFMILTKDLMPDKPHESLCGKCDICIEHCPTKAIVEPFVIQSDLCIAYHTIESRDKTIPKKIEKNLGGWVAGCDICQDVCPWNKSVPHNNNHETTPKEWIKNLTSESLKWEDKTWQENLKGTTLKRIKPWMWRRNIQANISNKKIKK

SEQ ID NO: 79752 - protein, 312 aa, Prochlorococcus marinus
  misc_feature (1)..(312): tr|A0A318R4H2|A0A318R4H2_PROMR Epoxyqueuosine reductase OS=Prochlorococcus marinus XMU1408 OX=2213228 GN=queG PE=3 SV=1
MKKSVDLTKKIKEKAFEEGFDAVGIAKVPGSSRIKLRNASLERWLQAGHQAKMEWMKSPRRKNIEYMLKGVQSVLAVGLNYYVEVEKTPKDISIARYGWGKDYHKVIENKLKRIGQFLEKERPNSKWKICVDTSALLDKAWAEEAGIGWIGKHSNIINSKIGSWMFLGHLLSTEILEADEPSKPICGECEKCIDACPTKAIEEPFIVNSNKCLAYHTLENREEQLPRNIINKMGNWVAGCDICQEVCPWNKKSIPTTSEPDLQPSEWILNLTKKDALSWSDTKWKENLNSSALKRIKPWMWRRNINSISNNL

SEQ ID NO: 79753 - protein, 78 aa, Prochlorococcus sp.
  misc_feature (1)..(78): tr|A0A1Y3K154|A0A1Y3K154_9PROC Epoxyqueuosine reductase (Fragment) OS=Prochlorococcus sp. HOT_208_60 OX=194563 7 GN=B0W81_01820 PE=4 SV=1
GWVAGCDICQDVCPWNKKVQYNNIHETTPKEWIKNLNMDSLNWDDKTWQENLKGTTLKRIKPWMWKRNIQANIKNKKI

SEQ ID NO: 79754 - protein, 324 aa, Prochlorococcus sp.
  misc_feature (1)..(324): tr|A0A3R7SRZ4|A0A3R7SRZ4_9PROC Epoxyqueuosine reductase OS=Prochlorococcus sp. TMED223 OX=1986612 GN=queG PE=3 SV=1
MVVKICANQDQLSHELKEQAKKQGFDPVGIARFPGSDRLQLRSAALQRWLKAGHQADMAWMASSQRQQADQLLEGMTSLLAVGLNYFVNVQRAPGKLLVARYAWGRDYHRVIKQRLRRVGRWLEQQRPNCRWKICVDTAPLLDKAWAEEAGLGWIGKHSNLINTQRGSWMVLGHLLCTEPLTPDQPAKSLCGKCQSCLEMCPTEAITEPFVIDSRRCLAYHTIENRNPDLPENIVRSLGDWVAGCDICQDVCPWNQQSLPHSNDPDVQPRDWLLKLTRNQALSWSDTTWSEQLRGSALKRIKPWMWRRNAASTQTNKPPTLQKN

SEQ ID NO: 79755 - protein, 329 aa, Prochlorothrix hollandica
  misc_feature (1)..(329): tr|A0A0M2PSV5|A0A0M2PSV5_PROHO Epoxyqueuosine reductase OS=Prochlorothrix hollandica PCC 9006 = CALU 1027 OX=3 17619 GN=queG PE=3 SV=1
MPQSSPPAAAAEDTLALATALKTQALALGFHKVGIAAVPDAPTPEGLGDWLDRGYQADMAWMQNPKRQDLHQVLPGVRSVIAVALNYYTPTPHSTDPQVGKISRYGWGRDYHRILHKKLKALNLWLQQQAAAQGIPQESRYYADTGPVQDKGWAQRAGLGWIAKNGNVITRDYGSWVFLGEVLTTVALPPDAPHLAHCGTCSRCLEACPTGAIVAPAVVDANRCLAYHTIENRSPQLPAAIVPHLQGWVAGCDICQDVCPWNQRFAQETDVAEFQPYPDNIAPPLAALATLTAAQWEDRFPASALRRIKPAQWRRNAQANLDALNPEDQ

SEQ ID NO: 79756 - protein, 364 aa, Prolinoborus fasciculus
  misc_feature (1)..(364): tr|A0A2U3MLZ5|A0A2U3MLZ5_9NEIS Epoxyqueuosine reductase OS=Prolinoborus fasciculus OX=1056810 GN=queG PE=3 SV= 1
MATPDSQAQIKVYQQDPAELKAWIKAQALELGFSDCVIAKPDAQAELARLQEYLDRGYHGDMKFLEENLEKRANPALLVPGTRSIICVRMDYLVDAPEPRYIPYAPNSAIIARYARGRDYHKTMRGRLKTLATKIRGKIGDFESRPFADSAPIFEKSLAESAGMGWTGKHTLLIHKTSGSFFVLGELFTSLELPFDEPATKHCGSCTACIDICPTQAIVEPYMLDARRCIAYLTIEYKGIIPEDLRRGIGNRVFGCDDCQLICPWNSFAQVTSIEDFHPRHGLDQVSLLDLWQWDEATFLSATEGSPMRRTGYQSFMRNIAIGLGNAPFDGQIIPALQQQRNQHDEIVQVHIDWAIQEQLAKSS

SEQ ID NO: 79757 - protein, 309 aa, Prolixibacter denitrificans
  misc_feature (1)..(309): tr|A0A2P8CI98|A0A2P8CI98_9BACT Epoxyqueuosine reductase OS=Prolixibacter denitrificans OX=1541063 GN=queG PE=3 SV=1
MDTEKATYSERIKEEAKRLGFTDCGIAAVEHLDEEEPRLLQWLEKGMNGQMGYMERNVEKRLDSGKLVEGARSVVSVILNYYPGETQKAEDAPVISKYAYGTDYHFVIKDKLKSLMRFIQEEIAPCSGRPFVDSAPVLDRAWARRAGLGWIGKNSHLISPKHGSFFFIGELIIDLELAYDKPADTDFCGSCTRCIDSCPTKAIVAPHTIDARKCISYLTIENREEIPEAFKGQLQDRMYGCDICQDVCPWNRTPAPHNVEAFQPKPELLEMSRAEWKELDREHFNQLFRKSAVKRAGFKGLRRNIDFLD

SEQ ID NO: 79758 - protein, 307 aa, Prolixibacteraceae bacterium
  misc_feature (1)..(307): tr|A0A3B9ZMA1|A0A3B9ZMA1_9BACT Epoxyqueuosine reductase OS=Prolixibacteraceae bacterium OX=2053594 GN=queG PE= 3 SV=1
MIRNAVEGIRTKASELGFLDCGFSKAQFLGEEKERLLNWLENEMNGEMGYMANHLEKRLDPRLLVENAKSVISVLLNYFPSEKQTDPEAPVLSKYAYGTDYHFVMKDKLGELLRYIQTTIASCEGRVFVDSAPVLDRAWAARAGLGWIGKNTNLLSTEHGSFFFIGELIIDLELPSEDKVVRDHCGNCTRCIDACPTQAIVAPYILDARKCISYQTIENHGEIDPSLKDKFENRVFGCDICQDVCPWNLKSEVHHEPAFHPDLQLMKLTKEEWNEMDKPRFNELFRNSAVKRTRFEGLKRNLKFLED

SEQ ID NO: 79759 - protein, 310 aa, Prolixibacteraceae bacterium
  misc_feature (1)..(310): tr|A0A399SYJ0|A0A399SYJ0_9BACT Epoxyqueuosine reductase OS=Prolixibacteraceae bacterium XSD2 OX=2305463 GN=que G PE=3 SV=1
MKSTQTSDLIKEKAKSLGLSDCAIVPVSFLAEEKEHFESWLSAQMHGEMGYMARNTEKRLNPQLLVENAKSIIVVLQNYFPKETQSDKEAPVLSKYAYGTDYHFVLKDKLRRLLEFIHTEITSCTGRPFVDSAPVLERAWARKAGLGWIGKNSNLISLHHGSFFFIGELIVNIELPYDNPKPVSDHCGRCTKCIDACPTKAIVANRVVDARKCISYQTIEVKGELDESLKGQFDNRVFGCDICQDVCPWNLKSEPHNEASFNPHPKLLQLNKDDWENMERPLFNELFKNSAVKRAGFNGLKRNLKFLGNA

SEQ ID NO: 79760 - protein, 325 aa, Propionibacteriaceae bacterium
  misc_feature (1)..(325): tr|A0A2E0ECC2|A0A2E0ECC2_9ACTN Epoxyqueuosine reductase OS=Propionibacteriaceae bacterium OX=2021380 GN=queG P E=3 SV=1
MTSSAGQTLLSAALKERARLEGFDPVGIACLPGSPRLQMRTEALQRWLDAGFQAEMGWMAAPRRLDASSLLEGSRSLLAVGLNYYVSESRQTKNLAIARYAWGRDYHRVISQRLRRVGRWLETQRPNSRWRVCVDAEPLMDKAWAEEAGLGWIGKHSNVIHPQRGSWMVIGHLLTTEHLVADQPAQPRCGRCRACMDACPTNAIREPFVVDSHRCIAYHTIENRDQELPEFIKAGMGPWVAGCDICQDVCPFNQRQLPLSQDPEVQPRQWVLNLSAAQVEKWDLHTWDLNLRGSALRRIKPWMWRRNAASAKPVDPPTVGSSEIR

SEQ ID NO: 79761 - protein, 337 aa, Propionispora hippei
  misc_feature (1)..(337): tr|A0A1M6DUE8|A0A1M6DUE8_9FIRM Epoxyqueuosine reductase OS=Propionispora hippei DSM 15287 OX=1123003 GN=SAMN02 745170_01004 PE=4 SV=1
MGTWEAAIKTKARELGYDGCGIIAAAPFQDFLAGVERRAGLFPHAAPFYERLKARVVSRPQSMAPWAHSIVVCLRRYDKYKLQPQLDRLVGKYYLFDGRLSYSTEYAAQAGFEQFLTDSGFRIARERLPLRWAAVKAGLGKFRNNNFVYTAQGSWHWIDAWLIDRPLTYDQPAGDSHFPCPPNCNKCIEACPTGALTAPLTMDATRCIAHLTFSEWEALPPEDVRKDMGTYLYGCDECQNACPMNKAWQGETEFTEPVALNSLLELEKLLAMDEMTYRNVLQPRFWYIAQENFWQWRCNVIRAMANKDSKAYAPYFTKALEDPDARVRQMAEWALSR

SEQ ID NO: 79762 - protein, 349 aa, Propionispora hippei
  misc_feature (1)..(349): tr|A0A1M6G0V3|A0A1M6G0V3_9FIRM Epoxyqueuosine reductase OS=Propionispora hippei DSM 15287 OX=1123003 GN=SAMN02 745170_01581 PE=4 SV=1
MNSLAFQIKSAALEAGYEKCGIIKIAAMAGYEEKLNERMEYLPQTRPFYERFRGFAHLQDVYPWAKSIVICVEQYGKYQVPDHLQGLVGKAYLFDSRIDEHAAGYQASLQFEAAMQKMGLKTETKRKFGITGVRWAAVKAGLGIVRRNNFFYTESGSWVHLEAWLIDQELELIDTPTVRACPEHCNRCVKACPTASLSKPYTMNPLACISFLTTFGGRDLPRETYNAQIGGWIYGCDACQDVCPMNKNRWEAKEEFPFLAEISEHISLGKILSMDYELLQQILPAKFFYITKDDVWKWKVNVINAMVNEYQEKYKEAIYAACNDSHAKVREMAEWAVKKLKLPCYASNR

SEQ ID NO: 79763 - protein, 299 aa, Propionispora sp.
  misc_feature (1)..(299): tr|A0A0K8JH86|A0A0K8JH86_9FIRM 4Fe-4S ferredoxin-type d omain-containing protein OS=Propionispora sp. 2/2-37 OX =1677858 GN=P22_2768 PE=4 SV=1
MKTESTEAKIKAKAKALGYDSCGIIAAVKFHEFLTQLDTRSNLFPHSGRFYNRLRRLVDPKENIDWAQSIIVCLRRYDKYRIPDGLDRLIGRTYLVDGRLPYAKEHAGYVAFEQFLQELGFRTAQNVVPARWSAVRAGLGKFRNNNFVYTDHGSWNWIDTWVIDKPLDYETPNDSTRYSCPEGCAKCVKACPTDALSAPLTMDATNCIAYLSFTPGFFPPENVLPKMGTWLYGCDICQNVCPVNRKTWQGNSGYFPDPFPLPDLLTLEAVFSMDEATYLEKIQPRFLVSWQAGYSTLEI

SEQ ID NO: 79764 - protein, 343 aa, Propionispora vibrioides
  misc_feature (1)..(343): tr|A0A1H8XFX3|A0A1H8XFX3_9FIRM Epoxyqueuosine reductase OS=Propionispora vibrioides OX=112903 GN=SAMN04490178_ 12351 PE=4 SV=1
MDSLAFQIKSAALAVGYEKCGIIKIADMAGYEDKLNERMEYLPQTKPFYERFRGFAHLQDTYSWAKSVVVCVEQYGKYQMPDHLQGLVGKAYLFDSRIDEHTAGYQASLQFEAAMQKMGLKTEAKRKFGITAVRWAAVKAGLGIVRRNNFFYTESGSWVHLEAWLIDQELELIDTPTVKACSEHCNRCVKACPTASLAKPYTMNPLSCISFLTTFGGRDLPQETYNAQMGGWIYGCDACQDVCPMNKNRWEATGEFPFLAEISEHISLEKILSMDYELLQQILTAKFFYITKDDVWKWKVNVINAMVNEYQEKYKEAIYAACNNSHAKVRKMAEWAVKKLNLS

SEQ ID NO: 79765 - protein, 342 aa, Propionispora vibrioides
  misc_feature (1)..(342): tr|A0A1H8VXA1|A0A1H8VXA1_9FIRM Epoxyqueuosine reductase OS=Propionispora vibrioides OX=112903 GN=SAMN04490178_ 11323 PE=4 SV=1
MGTWEEAIKAKARELGYDGCGIIAAAPFQEFLAGVERRARLFPHAAPFYDKLEARVASQPQAVVPWARSIVVCLRRYDKYKLQPQLDQLVGKYYLFDGRLPYSPEYAAQADFEQFLTDSGFRIARERLPLRWAAVKAGLGKFRNNNFVYTAQGSWHWIDAWLVDKPLAYDQPGGDSRFPCPPNCNKCIQACPTGALTAPLTMDATRCIAHLTFSEWDALPPEDVRKTMGTYLYGCDECQNACPMNKAWQGKEEFVEPVALDSLLELETLLAMDEVTYRNVLQPRFWYIAQEDFWQWRCNIIRAMANKDPKAYAPYFTRALEDPDARVRQMAEWALNRNRPTG

SEQ ID NO: 79766 - protein, 356 aa, Propionivibrio dicarboxylicus
  misc_feature (1)..(356): tr|A0A1G7ZPW1|A0A1G7ZPW1_9RHOO Epoxyqueuosine reductase OS=Propionivibrio dicarboxylicus OX=83767 GN=queG PE=3 SV=1
MLAALAADIRQQARALGFSACGIARADVTPDAAERLRRWLAAGRHGGMDYMAKHAALRTDPSALLPGVLSVISVRLPYWPQASSEPEQHDDAIAEVSRYARGRDYHKTVRQRLQKLAEHIQAHVRTRLGNDDFFIFRAFSDSAPVMETEFAQRAGIGWRGKHTLTLSRQGSWHFLGELFTNLPLPADASAEAHCGNCRRCLDTCPTGAIVAPYEVDARRCISYLTIELDGAIPEELRPLIGQRIYGCDDCQTCCPWNRFAQAGDPDFAVRNHLDHSPLTALFAWPADEFERRLAGSPIRRIGHERWLRNIAVALGNAAPTDAHRLALQSRRDDPSALVREHVAWALNRYDRPITTV

SEQ ID NO: 79767 - protein, 341 aa, Prosthecobacter debontii
  misc_feature (1)..(341): tr|A0A1T4WJB4|A0A1T4WJB4_9BACT Epoxyqueuosine reductase OS=Prosthecobacter debontii OX=48467 GN=queG PE=3 SV=1
MSDLKELLIAKTRELGFADCRIAPAKPAARREIFEQWVAEGKYGDMAWMAKNLDRRTDPCIVQPGAKTVIVLAMNYYQGQAPATAAGGYRIARYAWNEDYHDLIQKKLKELDAFLISHGGTQRYYVDTGPVLERDFASEAGLGWGGKSTMQIHRELGTWFFLAELISTLDFPVDTPAKDLCGKCTRCIDACPTQAITAPRRMDARRCVSYLTIESKGPIPPEFRRALGDRIYGCDDCLKACPWNKFAQVSHEATFQARESVFNQKLRDFLSLDDDGFRALFAKSPIKRIKRPAFLRNVCVALGNVGTQADVPALEAAAQDEHPLIAEHAQWALAEIRERLG

SEQ ID NO: 79768 - protein, 355 aa, Prosthecobacter fusiformis
  misc_feature (1)..(355): tr|A0A4R7STI2|A0A4R7STI2_9BACT Epoxyqueuosine reductase OS=Prosthecobacter fusiformis OX=48464 GN=queG PE=3 SV =1
MMELKTLLIAKAHELGFADCRIAPAKPAAHRELYEQWVAEGKYGDMAWMARNMDRRTDPTIVQPGAKTVIVLAMNYFQGPAPATAAGGYRIARYAWNEDYHDLIVKKLKDLDAFLIQQGGTQRYYVDTGPVLERDFASEAGLGWGGKSTMQIHRQLGTWFFLAELITTLDLPVDTPARDLCGKCTRCMVACPTQAITAPRRMDARRCVSYLTIESKGPIPLEFRRAMGDRIYGCDDCLSACPWNKFAQVSHEATFQARESVFNKKLSDFLTLTDEDFRTLFAKSPIKRIKRPAFIRNVCVALGNVGNLEDLPLLEAATHDEHPLISEHALWAVEEIHRRHAESLTASAAVGDTAF

SEQ ID NO: 79769 - protein, 318 aa, Prosthecochloris aestuarii
  misc_feature (1)..(318): tr|B4S3H8|B4S3H8_PROA2 4Fe-4S ferredoxin-type domain-co ntaining protein OS=Prosthecochloris aestuarii (strain DSM 271 / SK 413) OX=290512 GN=Paes_1699 PE=4 SV=1
MHSSSPSHELTFMIMQHAQTLGFCAAGCAPLSPMNEADEKLDSMIREQRHASMLYLERQRDTRRNAAELLPGARTILCAALPYHQPQKAQPASSISQYALIPDYHKVVRDKLQQLLEFIRTRHHGTVNAIIAVDSAPLFEKAWAATAGLGRTGKNTLCIIPGHGSYIFLGEILLDIDLDCQPKRLPDPCHECDRCIRACPTGAITAPGTIDARRCISYLTVEHKDEFTPEEEIMVGTHLFGCDICQEVCPHNQQTRPDSSQAFPILEHLLGITPEEILTLSRSQFKTLFARTPIYRTGLKRLKRNARTVLKNRVIGDW

SEQ ID NO: 79770 - protein, 314 aa, Prosthecochloris marina
  misc_feature (1)..(314): tr|A0A317T4Z7|A0A317T4Z7_9CHLB tRNA epoxyqueuosine(34) reductase QueG OS=Prosthecochloris marina OX=2017681 GN =queG PE=4 SV=1
MSKDKFLSHVLQKAKECGFCAAGFTSLSSCRQETGRLVSMIEENRHGEMHYMQKNLNARVDPTNLLPGAKTIFSAALPYNFPIGQPEKKGKISRYALCTDYHCVMRDKLEKLLDYISRNHEGEVNGKVFVDSSPVFEKAWAEKAGIGRTGKNTVLISPGTGSYLFLGEILLDIELESNTKKVPDLCGNCDICLKSCPTGALLEPGKIDARRCISYLTVELKREFTTEEATMIDDWLFGCDLCQEACPHNKQKSSTEAYPELMPREELLRITPEQILALTRSQFKMLFAATPIYRTGLKRLKRNAKAVLENLKKS

SEQ ID NO: 79771 - protein, 313 aa, Prosthecochloris sp.
  misc_feature (1)..(313): tr|A0A1B1Q460|A0A1B1Q460_9CHLB Epoxyqueuosine reductase OS=Prosthecochloris sp. CIB 2401 OX=1868325 GN=queG PE =4 SV=1
MNRTELRERILQKAGELGFCAAGIAAPGKMEQPARMLEMMVAEGRHGQMTWLATQKNERRNPSLLFPNLTSVLCVAYPAAAHKEKTNPYLARYALREDYHAVMKRKLGLLLQTIEELSDTPVKGMACVDSSPVFEKAWAERAGILRTGKHTLGIIPGWGSNIMLGELLLDMHLEPTTTDVTDPCAHCNRCLQACPTGALTVAGRIDARKCIAYLTIEHKGEFSEKEEKMIGTHLFGCDICQDACPHNGQAGSVTDQTTTSAVREPLLELTPEKVITLTRSSFKALCAGTPIYRTGLKRLKRNARAVLKNRDVL

SEQ ID NO: 79772 - protein, 322 aa, Prosthecochloris sp.
  misc_feature (1)..(322): tr|A0A3R7I000|A0A3R7I000_9CHLB tRNA epoxyqueuosine(34) reductase QueG OS=Prosthecochloris sp. ZM_2 OX=2045206 GN=queG PE=4 SV=1
MARTTDLQTLTGAIIHHALELGFAAAGCAPVTGSSLPAHRLSMMIDEKRHGTMQYLEQQQNERNDPALLLPGARTVLSVALSYNQPSNEQPSSGISRYATIPDYHRVMRDLLEQLLTYITTHCPEPVSSLICVDGAPVYEKSWARHAGIGATGNNTLCIVPGCGTACFLGEILLNIDLHCPPHKAEEPCGTCTRCLDACPTGALTAPGTLDARRCISYLTVEHKENFTPEEEEMIGTHLFGCDICQDVCPHNQNAHTPPHPLFQPRKDLLTINPEQVLQLTRSQFKKLFAGTPIYRTGLKRLKRNARAVLNNRKTQEVTSKE

SEQ ID NO: 79773 - protein, 313 aa, Prosthecochloris vibrioformis; identical to SEQ ID NO: 79771
  misc_feature (1)..(313): tr|A0A5C4S4H7|A0A5C4S4H7_PROVB tRNA epoxyqueuosine(34) reductase QueG OS=Prosthecochloris vibrioformis OX=1098 GN=queG PE=4 SV=1

SEQ ID NO: 79774 - protein, 392 aa, Prosthecomicrobium hirschii
  misc_feature (1)..(392): tr|A0A0P6VQA7|A0A0P6VQA7_9RHIZ Epoxyqueuosine reductase OS=Prosthecomicrobium hirschii OX=665126 GN=queG PE=3 SV=1
MTPGPAKPDPAQRLAAFVKAEALRLGFAEARIVRPDAIPQAPARLAACLAEGHHGSMAWLAETAERRADPRVLWPAVRSILMLGLDYGPDEDPRAALAEPRCGAISVYARNRDYHDLIKGRLKELAGRLVARARTLGLDGDVKVFVDTAPVMEKPLAAAAGLGWQGRHTNLVSRRHGSWLFLGAVFTSLDLAPDPAETDHCGSCRACLDACPTAAFPAPYRLDARRCISYLTIEHAGPIPAEFRPLIGNRIYGCDDCLAVCPWNKFAQTAREARLVARDDLRRPALAALARLDDAAFRALFAGSPIKRIGRDRFLRNVLIAIGNSAEPSLAADALRLSADPAALVRGAAVWALSRLLDTAAFRALAEARAPAETDPDVRAEWEAASPAAAAR

SEQ ID NO: 79775 - protein, 372 aa, Proteiniborus ethanoligenes
  misc_feature (1)..(372): tr|A0A1H3SD20|A0A1H3SD20_9FIRM Epoxyqueuosine reductase OS=Proteiniborus ethanoligenes OX=415015 GN=SAMN056604 62_02805 PE=4 SV=1
MDLKEYIAHKSKIVGIDIIGFTKPKKMDNLIGFLEKRKEKEYNTEFEESNILSRTNPLALMPESRTIIAIGVSYNIEYKSVPHESGKGTGLLSKSSWGEDYHKVLKNKMEDLVKEIKKEIDFKYIICVDTSSLIDREISKSAGIGWYGKNCSIINDDYGSFIFLGYILTDLDLEENERIEEKCGNCRLCIDACPTQAIEEGYIINAKRCISYMTQTKKKIPYDLREKIGMKIYGCDTCQLVCPKNDKVIKGSSKEFVPQLTKGIIPVEEIITISNKDFKEKYGSMSGAWRGKNILKRNAIIALGNIRDKSSIKLLKTALHDESPMIREYAAWSLIRIDKEEGVKLIRERLFKENDIEAFEEMRRLIHLFGHD

SEQ ID NO: 79776 - protein, 382 aa, Proteiniborus sp.
  misc_feature (1)..(382): tr|A0A1M4M5P1|A0A1M4M5P1_9FIRM Putative iron-sulfur clu ster-binding protein OS=Proteiniborus sp. DW1 OX=188988 3 GN=DW1_1396 PE=4 SV=1
MDLKEYIINKSKKLGIDIIGFTKTEKLNDMAKFLRDREEKGYDTEFEEKDVVLRTNPLILMPDSRTIIAIGLSYNVEYKMISSKDIKWQGVLSKSSWGEDYHKVLRSKMEMLVKEISKVVDFKYTVCVDTSPLIDRQIAMRAGIGWYGKNCSIINDDFGSFIFLGYILTDLELEEDNRVEEKCGDCRLCIDACPGGAIEEGYIINTKRCISYLTQTKDRVPYDLREKMGVKIYGCDTCQQVCPKNQNIQKGNSEEFIPKTTNGVVNIEEIMTISNKEFKGKYGTMSGAWRGKNVLKRNAIIALANIGDKSCMELLKDALNDESPMIREYAAWAIIKIDEERGIELVQERILKEKDIDIAEEMKRLIELQRNSNQKILVKKKT

SEQ ID NO: 79777 - protein, 333 aa, Proteiniclasticum ruminis
  misc_feature (1)..(333): tr|A0A1I4Z1X6|A0A1I4Z1X6_9CLOT Epoxyqueuosine reductase OS=Proteiniclasticum ruminis OX=398199 GN=SAMN04488695 _101897 PE=4 SV=1
MSAEGIQSKVIEKLEDLGLRHYGFMKAQALSRDSLAYFRERDERNFTTSFEENDLMRKVNLQSEMENAQTIISVAFPYFYDAYIHKEGYFSLYTLGQDYHIVVKDYLEKLAEVIRSHGYEAKVFADNNSLPERYIAYASYVGEIGKNHMLITKEYGSYVFLGEILTNLVLETRERDYQEIPLHAICGDCTNCIKACPTQILGSEFYDTKRCMSYITQSKEVPDEDLLLFKGRLFGCDTCQRSCPLNRKVNTSSIEAFRPREYMKYPNLLELLELTNQEFLKYKETSSGWRGKKLLQRNAMVELVRKGNTLDVEKLPTEYLREYYHRLEKIFNL

SEQ ID NO: 79778 - protein, 333 aa, Proteiniclasticum ruminis
  misc_feature (1)..(333): tr|A0A1G8H669|A0A1G8H669_9CLOT Epoxyqueuosine reductase OS=Proteiniclasticum ruminis OX=398199 GN=SAMN05421804 _101485 PE=4 SV=1
MSEGIIQKKIMEKLEDLGLTQYGFMKAQALSQDSLAYFKEREERNFTTSFEENDLLRKVNLRSEMENAQTIISVAFPYFYDAYIHKEGYFSLYTLGQDYHIVVKDYLEKVADVIRSHGYEAKVFADNNSLPERYIAYASYVGEIGKNHMLITKEYGSYVFLGEILTNLVLDTRERDYHEIPLHSICGECTNCIKACPTQILGSEYYDTKRCMSYITQSKEVPDEDLLLFKGRLFGCDTCQRSCPLNRKVKTSPIEAFRPREYMKYPNLRELLELSNQEFLKYKETSSGWRGKKLLQRNAMVELVRKGNTLDLERLPTEYLREYYHRLERLFNI

SEQ ID NO: 79779 - protein, 333 aa, Proteiniclasticum sp.
  misc_feature (1)..(333): tr|A0A358S8K7|A0A358S8K7_9CLOT tRNA epoxyqueuosine(34) reductase QueG OS=Proteiniclasticum sp. OX=2053595 GN=q ueG PE=4 SV=1
MSAEGIQSKVIEKLENLGLRHYGFMKAQALSRDSLAYFREREERNFTTSFEENDLMRKVNLQSEMENAQTIISVAFPYFYDAYIHKEGYFSLYTLGQDYHIVVKDYLEKVAEVIRSHGYEAKVFADNNSLPERYIAYASYVGEIGKNHMLITKEYGSYVFLGEILTNLVLETRERDYQEIPLHTICGDCTNCIKACPTQILGSELYDTKRCMSYITQSKEVPDEDLLLFKGRLFGCDTCQRSCPLNRKVNTSSIEAFRPREYMKYPNLLELLELNNQEFLKYKETSSGWRGKKLLQRNAMVELVRKGNTLDAEKLPTEYLREYYHRLEKIFNL

SEQ ID NO: 79780 - protein, 306 aa, Proteiniphilum acetatigenes
  misc_feature (1)..(306): tr|A0A117M155|A0A117M155_9BACT Uncharacterized protein OS=Proteiniphilum acetatigenes OX=294710 GN=XD92_0125 P E=4 SV=1
MSFSEEIKQQALDLGFDACGICRATDSGEEERYMEWLRDHCQGSMRYLERNIDKRLDPRRLVEGARSIISVALNYYPLEKLPGKVPQFAYYAYGKDYHDVVREKLRALYNWIRERDPVVAGRYFTDSAPVLERFWAAQAGLGFIGKNTLLILPGRGSYFFLGELIINIELEYDAPVAENCGDCTRCLRSCPTGAIEKPYRLNGARCISYQTIENRGEIAPDIVPNLRNNVYGCDICQKVCPWNRDAVPHSTPELMPTADFLSLNLEQLQEMDEERWRIVFRHSAVKRARFEGLKRNAEAISKSRRK

SEQ ID NO: 79781 - protein, 306 aa, Proteiniphilum saccharofermentans
  misc_feature (1)..(306): tr|A0A1R3T2J5|A0A1R3T2J5_9BACT Epoxyqueuosine reductase OS=Proteiniphilum saccharofermentans OX=1642647 GN=que G PE=4 SV=1
MTFSEEIKQYALSLGFDACGICRATDSGEEERYMQWLAENGNAGMEYMSRNIDKRLDPRLLVDGAKSIISVALNYYPHERLAEEVPQFAYYAYGKDYHDVVREKLSRLFEFIKSRYPEVTGRYFSDSAPVLERFWAAQAGLGFVGKNTLLIIPRKGSYFFLGELIVDMELDYDSPISINCGKCRRCLDACPTGAIERPHYLNANKCISYQTIENKGEISSGIAPLLSNNVYGCDICQKVCPWNRYSRPHSTPEFMPLDEFLSLDLKKLIEMDEEDYRRIFRKSAVKRAKFSGLKRNVAAISKTPDK

SEQ ID NO: 79782 - protein, 312 aa, Proteiniphilum sp.
  misc_feature (1)..(312): tr|A0A101J3G5|A0A101J3G5_9BACT Uncharacterized protein OS=Proteiniphilum sp. 51_7 OX=1641377 GN=XE13_0628 PE=4 SV=1
MQIEKKMSFSEEIKQQALDLGFDACGICRATDSGEEERYMEWLRDHCQGSMRYLERSIDKRLDPRRLVEGARSIISVALNYYPLEKLPGKVPQFAYYAYGKDYHDVVREKLRALYSWIRERDPAVAGRYFTDSAPVLERFWAAQAGLGFIGKNTLLILPGRGSYFFLGELIINIELEYDAPVAENCGDCTRCLRSCPTGAIEKPYRLNGARCISYQTIENRGEIAPDIVPNLRNNVYGCDICQKVCPWNRDAVPHSTPELMPTADFLSLNLEQLQEMDEERWRIVFRHSAVKRARFEGLKRNAEAISKSRRK

SEQ ID NO: 79783 - protein, 306 aa, Proteiniphilum sp.
  misc_feature (1)..(306): tr|A0A3M8EBG4|A0A3M8EBG4_9BACT tRNA epoxyqueuosine(34) reductase QueG OS=Proteiniphilum sp. X52 OX=2382159 GN= queG PE=4 SV=1
MTFSEEIKQYALSLGFDACGICRATHSGEEERYMRWLAENGNAGMEYMARNIDKRLDPGLLVDGAKSIISVALNYYPREKLPEEVPQFAYYAYGKDYHDVVRGKLSRLFEFVKSRYPEASGRYFSDSAPVLERFWAARAGLGFIGKNTLLIIPRKGSYFFLGELIVDIELDYDSPVSQNCGKCRRCLDACPTGAIERPHYLNANKCISYQTIENKGEISSAIAPFLSNNVYGCDICQKVCPWNRYSSPHGTPEFMPLDEFLSLDLKKLIGMDEEDYRRIFRKSAVKRAKFSGLKRNVAAISKTPDK

SEQ ID NO: 79784 - protein, 398 aa, Proteobacteria bacterium
  misc_feature (1)..(398): tr|A0A2W4MYG7|A0A2W4MYG7_9PROT Epoxyqueuosine reductase OS=Proteobacteria bacterium OX=1977087 GN=queG PE=3 SV =1
MGQNLKNSLIAHARELGFAVVRVTTPDRIGEAGARLRAFLAEGRHGDMNWMETTADRRADPRVLWPDVRSIVMLGFNYAPDHDPLSGLENPLLGVISRYAQSKDYHDIIKGRLKQLASWLAREAGADVKVFVDTAPLMEKPLAAAAGIGWQGKHTNLVSRTFGSWLFLGSILTTAELPTDEPEQDHCGSCRRCLDACPTRAFPAPYQLDARRCIAYLTIEHKGHIAEEFRIPMGNRVFGCDDCLAVCPWNKFARVSREIQPYLRLEASDAPLAEFLQLDDAAFRKRFAGTPVKRTGRDRFVRNALIAAGNSGQPDFVVYVEPLLSDPSPLVRAMAVWAAWRLTDQETFRRLRLRFAGNEADPVVRTEWERSPRAGNSQSHPVNARLTTADHQFIDPPR

SEQ ID NO: 79785 - protein, 365 aa, Proteobacteria bacterium
  misc_feature (1)..(365): tr|A0A3R7S879|A0A3R7S879_9PROT tRNA epoxyqueuosine(34) reductase QueG OS=Proteobacteria bacterium TMED72 OX=19 86848 GN=queG PE=4 SV=1
MSPGAELDRGPTLTTRVKALGHALGLDRIGVSSPGESAQTRFLSEWLDRGYAGGMAYMSARSAERGSPERLMPGVKSVISVALAHPAPVETSGDSASNGTGRAVASYAGGEDYHDVLLDRVRALAAGVKALAGHAVETRPYVDTGPVLERVFAARAGLGWQGKNTCLIDRELGSRILLGVVLTDLELDFDRAEPDHCGTCRACIDACPTDALVEPYVLDARRCISYTTIESRESTPPDLRAAQGDWIFGCDICQDVCPWNRKPDEKEQPDPLALRERLQPDPRWVRAELHWVLSLTEETWREATRGTALRRARFQGLMRNALVAAGNSGDGSLRPLIARFSGGEDPLLVEHAEWALDRLPEAGLG

SEQ ID NO: 79786 - protein, 384 aa, Proteus hauseri
  misc_feature (1)..(384): tr|A0A410X9V4|A0A410X9V4_PROHU Epoxyqueuosine reductase OS=Proteus hauseri OX=183417 GN=queG PE=3 SV=1
MPLLDLNLLAHNIKLWGTELGFQQTGICDTDLSLEEPRLQAWLDKQYHGEMAWMAKYGMTRARPHELVPGTLRVISVRMNYLPTDAAFARTLNNPEQGYISRYALGRDYHKVLRQRLKKLGEKITQYCQEYEYQDIVNFRPFVDSAPIMERPLAVKAGLGWVGKHSLVLNNKAGSWFFLGELLIDLPLPVDSPVEEQCGKCVACMTTCPTGAIVEPYTIDARRCISYLTIELDGAIPEEFRPLMGNRIYGCDDCQLICPWNRFSSLTDEDDFSPRRALHTPELLDLFHWTEEKFLRITEGSPIRRIGYLRWLRNISVALGNAPYQDKIILALQERFGLSEVLDEHLHWAISQQTAKRNEKEIKIQTSQQKRLVRAITKGLPRDA

SEQ ID NO: 79787 - protein, 384 aa, Proteus hauseri
  misc_feature (1)..(384): tr|V6MGI4|V6MGI4_PROHU Epoxyqueuosine reductase OS=Prot eus hauseri ZMd44 OX=1312367 GN=queG PE=3 SV=1
MSSLDLNLLAQHIKLWGSELGFQQTGICDTDLSLEEPRLQAWLDKQYHGEMAWMEKYGMTRARPHELVPGTLRVISVRMNYLPTDAAFARTLNNPEQGYISRYALGRDYHKVLRQRLKKLGEKISQYCQQFEYQGIVNFRPFVDSAPIMERPLAVKAGLGWVGKHSLVINNQAGSWFFLGELLIDLPLPTDSPVEEQCGKCVACMTTCPTGAIVEPYTIDARRCISYLTIELEGAIPEEFRPLMGNRIYGCDDCQLICPWNRFSSLTDEEDFSPRRALHTPELLDLFQWSEDKFLRITEGSPIRRIGYLRWLRNISVALGNAPYQDKIILALQERFGLSDVLDEHLNWAIAQQTAKRNEKEVKIQTSQQKRLVRAITKGLPRDA

SEQ ID NO: 79788 - protein, 83 aa, Proteus mirabilis
  misc_feature (1)..(83): tr|A0A2X2BKG9|A0A2X2BKG9_PROMI 4Fe-4S binding protein O S=Proteus mirabilis OX=584 GN=queG_2 PE=4 SV=1
MPIDSPVEEQCGKCVACMTTCPTGAIVEPYTIDARRCISYLTIELEGAIPEEFRPLMGNRIYGCDDCQLICPWNRFFFAHRGR

SEQ ID NO: 79789 - protein, 384 aa, Proteus mirabilis
  misc_feature (1)..(384): tr|B4F200|B4F200_PROMH Epoxyqueuosine reductase OS=Prot eus mirabilis (strain HI4320) OX=529507 GN=queG PE=3 SV =1
MSSLDLHHLAQNIKRWGTELGFQQTGICDTDLSLEEPRLQAWLDKQYHGEMAWMAKYGMTRARPHELVPGTLRVISVRMNYLPTDAAFARTLNNPEQGYISRYALGRDYHKVLRQRLKKLGEKITQYCQQFEYQGIVNFRPFVDSAPIMERPLAVKAGLGWVGKHSLVINNQAGSWFFLGELLINLPLPIDSPVEEQCGKCVACMTTCPTGAIVEPYTIDARRCISYLTIELEGAIPEEFRPLMGNRIYGCDDCQLICPWNRFSSLTEEDDFSPRRALHTPELLDLFQWSEEKFLRITEGSPIRRIGYLRWLRNISVALGNAPYQDKIVLALQEHFGLGEVLDEHLHWAIAQQKAKREEKTLKIQTSQQKRLVRAITKGLPRDA

SEQ ID NO: 79790 - protein, 326 aa, Proteus penneri
  misc_feature (1)..(326): tr|A0A379EHK0|A0A379EHK0_9GAMM 4Fe-4S binding protein O S=Proteus penneri OX=102862 GN=queG PE=4 SV=1
MTRARPHELVPGTLRVISVRMNYLPTDAAFARTLNNPEQGYISRYALGRDYHKVLRQRLKKLGERISQYCQQFEYQGIVNFRPFVDSAPIMERPLAVKAGLGWVGKHSLVINNQAGSWFFLGELLIDLPLPTDSPVEEQCGKCVACMTTCPTGAIVEPYTIDARRCISYLTIELDGAIPEEFRPLMGNRIYGCDDCQLICPWNRFSSLTDEDDFSPRRALHTPELLDLFQWSEDKFLRITEGSPIRRIGYLRWLRNISVALGNAPYQDKIILALQERFGLSDVLDEHLNWAIAQQTAKRNEKEVKIQTSQQKRLVRAITKGLPRDA

SEQ ID NO: 79791 - protein, 209 aa, Proteus penneri
  misc_feature (1)..(209): tr|C0ART5|C0ART5_9GAMM Putative iron-sulfur cluster-bin ding protein OS=Proteus penneri ATCC 35198 OX=471881 GN =PROPEN_00506 PE=4 SV=1
MVFLGELLIDLPLPTDSPVEEQCGKCVACMTTCPTGAIVEPYTIDARRCISYLTIELDGAIPEEFRPLMGNRIYGCDDCQLICPWNRFSSLTDEDDFSPRRALHTPELLDLFQWSEDKFLRITEGSPIRRIGYLRWLRNISVALGNAPYQDKIILALQERFGLSDVLDEHLNWAIAQQTAKRNEKEVKIQTSQQKRLVRAITKGLPRDA

SEQ ID NO: 79792 - protein, 384 aa, Proteus sp.; identical to SEQ ID NO: 79786
  misc_feature (1)..(384): tr|A0A3D2BIB5|A0A3D2BIB5_9GAMM Epoxyqueuosine reductase OS=Proteus sp. OX=229037 GN=queG PE=3 SV=1

SEQ ID NO: 79793 - protein, 379 aa, Proteus sp.; identical to SEQ ID NO: 77509
  misc_feature (1)..(379): tr|A0A1F2H937|A0A1F2H937_9GAMM Epoxyqueuosine reductase OS=Proteus sp. HMSC10D02 OX=1581079 GN=queG PE=3 SV=1

SEQ ID NO: 79794 - protein, 384 aa, Proteus vulgaris
  misc_feature (1)..(384): tr|A0A292C5X7|A0A292C5X7_PROVU Epoxyqueuosine reductase OS=Proteus vulgaris OX=585 GN=queG PE=3 SV=1
MSSLDLNLLAQNIKLWGSELGFQQTGICDTDLSLEEPRLQAWLDKQYHGEMTWMEKYGMTRARPHELVPGTLRVISVRMNYLPMDAAFARTLNNPEQGYISRYALGRDYHKVLRQRLKKLGEKISQYCQQFEYQGVVNFRPFVDSAPIMERPLAVKAGLGWVGKHSLVINNQAGSWFFLGELLIDLPLPTDSPVEEQCGKCVACITTCPTGAIVEPYTIDARRCISYLTIELDGAIPEEFRPLMGNRIYGCDDCQLICPWNRFSSLTDEEDFSPRRALHTPELLDLFQWNEDKFLRITEGSPIRRIGYLRWLRNISVALGNAPYQDKIILALQERFGLSDVLDEHLNWAIAQQTAKRNEKEVKIQTSQQKRLVRAITKGLPRDA

SEQ ID NO: 79795 - protein, 384 aa, Proteus vulgaris
  misc_feature (1)..(384): tr|A0A0G4QBM0|A0A0G4QBM0_PROVU Epoxyqueuosine reductase OS=Proteus vulgaris OX=585 GN=queG PE=3 SV=1
MSSLDLNLLAQNIKLWGFELGFQQTGICDTDLSLEEPRLQAWLDKQYHGEMAWMAKYGMTRARPHELVPGTLRVISVRMNYLPTDAAFARTLNNPEQGYISRYALGRDYHKVLRQRLKKLGEKITQYCQQYEYQGIINFRPFVDSAPIMERPLAVKAGLGWVGKHSLVINNQAGSWFFLGELLIDLPLPTDSPVEEQCGKCVACMTTCPTGAIVEPYTIDARRCISYLTIELDGAIPEEFRPLMGNRIYGCDDCQLICPWNRFSSLTGEEDFSPRRALHTPELLDLFQWSEEKFLRITEGSPIRRIGYLRWLRNISVALGNAPYQDKIILALKERFGLSDVLDEHLNWAIAQQTAKRNEKEVKIQTSQQKRLVRAITKGLPRDA

SEQ ID NO: 79796 - protein, 385 aa, Providencia alcalifaciens
  misc_feature (1)..(385): tr|A0A4R3NNU6|A0A4R3NNU6_9GAMM Epoxyqueuosine reductase OS=Providencia alcalifaciens OX=126385 GN=queG PE=3 SV =1
MSTRLDLDLLAQNIKQWGIDAGFQQVGICDTDLTLEEPKLQAWLDKQYHGEMEWMKRHGMMRARPHELHPGTLRVISVRMNYLPAKAAFASTLNNPELGYVSRYALGRDYHKLLKKRLKVLSDRILEYCSQFECSDDLNFRPFVDSAPILERPLAVKAGLGWTGKHSLVLNQHSGSWFFLGELLVNLPLPVDQPVEEQCGRCVACMTTCPTGAIVEPYTVDARRCISYLTIELDSAIPEEFRPLMGNRIYGCDDCQLICPWNRFSQLTDEEDFSPRAALHTPELLDLFSWDEEKFLRITEGSAIRRIGYIKWLRNISVALGNAPYQDNIILALQSRLGINPMLDEHFQWSIGQQLKRREENRVTIQTSQQKRLVRAITKGLPRDA

SEQ ID NO: 79797 - protein, 385 aa, Providencia alcalifaciens
  misc_feature (1)..(385): tr|X6Q6Y8|X6Q6Y8_9GAMM Epoxyqueuosine reductase OS=Prov idencia alcalifaciens F90-2004 OX=1256987 GN=queG PE=3 SV=1
MSTRLNLELLAQNIKQWGIDAGFQQVGICDTDLTLEEPKLQAWLDKQYHGDMEWMNRHGMMRARPHELHPGTLRVISVRMNYLPAKAAFASTLNNPELGYVSRYALGRDYHKLLKKRLKVLGDQILDYCQQFECSDDINFRPFVDSAPILERPLAVKAGLGWTGKHSLVLNQHAGSWFFLGELLINLPLPVDQPVEEQCGRCVACMTTCPTGAIVEPYTVDARRCISYLTIELDSAIPEEFRPLMGNRIYGCDDCQLICPWNRFSQLTDESDFSPRAALHTPELLDLFSWSEEKFLRITEGSAIRRIGYIKWLRNVSVALGNAPYQDSIVLALQNRLGMNPMLDEHFQWSIEQQLKRRAENQVTIQTSQQKRLVRAITKGLPRDA

SEQ ID NO: 79798 - protein, 385 aa, Providencia burhodogranariea
  misc_feature (1)..(385): tr|K8WY12|K8WY12_9GAMM Epoxyqueuosine reductase OS=Prov idencia burhodogranariea DSM 19968 OX=1141662 GN=queG P E=3 SV=1
MATLLDFNLLAKNIKQWGIEIGFQQVGICDTDLSLEEPKLQAWLDKQYHGDMEWMNRHGMMRARPHELHPGTLRVISVRMNYLPAKAAFASTLSNPELGYVSRYALGRDYHKLLKKRLKTLSDRILEYCHEHACSDDLNFRPFVDSAPILERPLAVKAGLGWTGKHSLILNREAGSWFFLGELLVNLPLPVDQPVEEQCGRCVACMTTCPTGAIVEPYVVDARRCISYLTIELNGPIPEEFRPLMGNRIYGCDDCQLICPWNRFSQLTDEEDFSPRRALHTPELLELFSWSEETFLRITEGSAIRRIGYLKWLRNISVALGNAPYQDTIISALRARSGMGEMLDEHIQWAVQQQLNRREENQVTIQTSQQKRLVRAISKGLPRDA

SEQ ID NO: 79799 - protein, 385 aa, Providencia heimbachae
  misc_feature (1)..(385): tr|A0A4D7J9E1|A0A4D7J9E1_9GAMM Epoxyqueuosine reductase OS=Providencia heimbachae OX=333962 GN=queG PE=3 SV=1
MTTLLDLNLLAHNIKQWGIEAGFQQVGICDTDLSLEEPKLQAWLDKQYHGDMAWMSRHGMMRARPHELHPGTLRVISVRMNYLPAKAAFASTLNNPELGYISRYALGRDYHKLLKKRLKTLSDRILKYCRELNYPDDLNFRPFVDSAPILERPLAVKAGLGWTGKHSLVLNREAGSWFFLGELLINLPLPVDHPIEEECGRCVACMTTCPTGAIVEPYTVDARRCISYLTIELDSAIPEEFRPLMGNRIYGCDDCQLICPWNRFSKLTDEEDFSPRQILHTPELLDLFAWNEEKFLRVTEGSAIRRIGYIKWLRNISVALGNAPYQDSIVIALQEKLGMNEMLDEHFHWSIAQQLTRREEHTVTIQTSQQKRLVRAITKGLPRDA

SEQ ID NO: 79800 - protein, 385 aa, Providencia heimbachae
  misc_feature (1)..(385): tr|A0A1B7JVZ8|A0A1B7JVZ8_9GAMM Epoxyqueuosine reductase OS=Providencia heimbachae ATCC 35613 OX=1354272 GN=que G PE=3 SV=1
MTTLLDLNLLAHNIKQWGIEAGFQQVGICDTDLSLEEPKLQAWLDKQYHGDMAWMSRHGMMRARPHELHPGTLRVISVRMNYLPAKAAFASTLNNPELGYISRYALGRDYHKLLKKRLKTLSDRILEYCRELNYPDDLNFRPFVDSAPILERPLAVKAGLGWTGKHSLVLNREAGSWFFLGELLINLPLPVDHPIEEECGRCVACMTTCPTGAIVEPYTVDARRCISYLTIELDSAIPEEFRPLMGNRIYGCDDCQLICPWNRFSKLTDEDDFSPRQTLHTPELLDLFAWNEEKFLRVTEGSAIRRIGYIKWLRNISVALGNAPYQDSIVIALQEKLGMNEMLDEHFHWSIAQQLTRREEHTVTIQTSQQKRLVRAITKGLPRDA

SEQ ID NO: 79801 - protein, 391 aa, Providencia rettgeri
  misc_feature (1)..(391): tr|A0A2X2DUQ0|A0A2X2DUQ0_PRORE Epoxyqueuosine reductase OS=Providencia rettgeri OX=587 GN=queG PE=3 SV=1
MPRYLDLLAQNIKQWGVEAGFQQVGICDTDLSAEEPKLQAWLDKQFHGEMEWMNRHGMMRARPHELHPGTLRVISARMNYLPAKAAFASTLNNPELGYISRYALGRDYHKLLKKRLKQLSDRILDYCREFNGVILADGTTIDDLNFRPFVDSAPILERPLAVKAGLGWTGKHSLVLNREAGSWFFLGELLINLPVSVDKPVEEDCGRCVACMTTCPTGAIVEPYTVDARRCISYLTIELDSAIPEEFRPLMGNRIYGCDDCQLICPWNRFSQLTDEDDFSPRKDLHTPKLLDLFSWDEKTFLKVTEGSAIRRIGYIKWLRNISVALGNAPYQDSIVLALQNRLGINEMLDEHFQWSIQQQLNRRNANQVTIQTSQQKRLVRAINKGLPRDA

SEQ ID NO: 79802 - protein, 393 aa, Providencia rettgeri
  misc_feature (1)..(393): tr|D4C3X0|D4C3X0_PRORE Epoxyqueuosine reductase OS=Prov idencia rettgeri DSM 1131 OX=521000 GN=queG PE=3 SV=1
MPRYLDLDLLAQNIKQWGVEAGFQQVGICDTDLSAEEPKLQAWLDKQFHGEMEWMNRHGMMRARPHELHPGTLRVISVRMNYLPAKAAFASTLNNPELGYISRYALGRDYHKLLKKRLKQLSDRILDYCREFNGVILADGTTIDDLNFRPFVDSAPILERPLAVKAGLGWTGKHSLVLNREAGSWFFLGELLINLPVSVDKPVEEDCGRCVACMTTCPTGAIVEPYTVDARRCISYLTIELDSAIPEEFRPLMGNRIYGCDDCQLICPWNRFSQLTDEDDFSPRKNLHTPELLDLFSWDEKTFLKVTEGSAIRRIGYIKWLRNISVALGNAPYQDSIVLALQNRLGINEMLDEHFQWSIQQQLNRRNANQVTIQTSQQKRLVRAINKGLPRDA

SEQ ID NO: 79803 - protein, 385 aa, Providencia rustigianii
  misc_feature (1)..(385): tr|A0A379G855|A0A379G855_9GAMM Epoxyqueuosine reductase OS=Providencia rustigianii OX=158850 GN=queG PE=3 SV=1
MSTRLDLNLLAQNIKQWGLDAGFQQVGICDTDLSLEEPKLQAWLDKQYHGDMEWMNRHGMMRARPHELHPGTLRVISVRMNYLPAKAAFASTLNNPELGYISRYALGRDYHKLLKKRLKILGDRILDYCRQFECSDDLNFRPFVDSAPILERPLAVKAGLGWTGKHSLVINQQAGSWFFLGELLINLPLPVDQPIEEQCGRCVACITTCPTGAIVEPYTIDARRCISYLTIELDSAIPEEFRPLMGNRIYGCDDCQLICPWNRFSQLTDEDDFSPRVALHTPELLDLFAWSEDKFLRATEGSAIRRIGYIKWLRNISVALGNAPYQDQIVLALQNRLGINPMLDEHFQWSIHQQLQRREENQVTIQTSQQKRLVRAITKGLPRDA

SEQ ID NO: 79804 - protein, 385 aa, Providencia rustigianii
  misc_feature (1)..(385): tr|D1P2U5|D1P2U5_9GAMM Epoxyqueuosine reductase OS=Prov idencia rustigianii DSM 4541 OX=500637 GN=queG PE=3 SV= 1
MSTRLDLNLLAQNIKQWGLDAGFQQVGICDTDLSLEEPKLQAWLDKQYHGDMEWMNRHGMMRARPHELHPGTLRVISVRMNYLPAKAAFASTLNNPELGYISRYALGRDYHKLLKKRLKILGDRILDYCRQFECSDDLNFRPFVDSAPILERPLAVKAGLGWTGKHSLVINQQAGSWFFLGELLINLPLPVDQPIEEQCGRCVACITTCPTGAIVEPYTIDARRCISYLTIELDGAIPEEFRPLMGNRIYGCDDCQLICPWNRFSQLTDEDDFSPRAALHTPELLDLFAWSEDKFLRATEGSAIRRIGYIKWLRNISVALGNAPYQDQIVLALQNRLGINPMLDEHFQWSIRQQLQRREENQVTIQTSQQKRLVRAITKGLPRDA

SEQ ID NO: 79805 - protein, 385 aa, Providencia sneebia
  misc_feature (1)..(385): tr|K8WM12|K8WM12_9GAMM Epoxyqueuosine reductase OS=Prov idencia sneebia DSM 19967 OX=1141660 GN=queG PE=3 SV=1
MAILLDLDLLAQNIKQWGLEVGFQQVGICDTDLSLEEPKLQAWLDKQYHGDMAWMERHGMMRARPHELHPGTLRVISVRMNYLPAKAAFASTLNNPELGYISRYALGRDYHKLLKQRLKKLSDRILEYCREHTCSDELNFRPFVDSAPILERPIAVKAGLGWTGKHSLILNREAGSWFFLGELLVNLPLPVDQPIEEQCGRCVACMTTCPTGAIVEPYVVDARRCISYLTIELDGPIPEEFRPLMGNRIYGCDDCQLICPWNRFSQLTDEEDFSPRRALHTPELLELFSWTEEKFLRITEGSAIRRIGYMKWLRNISVALGNAPYQDGIVVALRERLGMGEMLDEHFNWAIQQQLYRREENQVAIQTSQQKRLVRAISKGLPRDA

SEQ ID NO: 79806 - protein, 385 aa, Providencia sp.
  misc_feature (1)..(385): tr|A0A356D3R3|A0A356D3R3_PROSP Epoxyqueuosine reductase OS=Providencia sp. OX=589 GN=queG PE=3 SV=1
MAKLLDLNTLVQNIKQWGIEAGFQQVGICDTDLSLEEPKLQAWLDKQYHGDMEWMKRHGMMRARPHELHPGTLRVISVRMNYLPAKAAFASTLNNPDLGYVSRYALGRDYHKLLKKRLKILADKILAYCLEFDYPDALNFRPFVDSAPILERPLAVKAGLGWTGKHSLVLNQEAGSWFFLGELLVNLPLPVDQPVEEQCGRCVACMTTCPTGAIVEPYTIDARRCISYLTIELDTAIPEEFRSLMGNRIYGCDDCQLICPWNRFSQLTDEEDFSPRQALHTPELLDLFSWNEEKFLRVTEGSAIRRIGYIKWLRNISVALGNAAYQDRIVLALQEKLGINEMLDEHFHWAILQQLNRREENQVTIQTSQQKRLVRVITKGLPRDA

SEQ ID NO: 79807 - protein, 393 aa, Providencia sp.
  misc_feature (1)..(393): tr|A0A345M041|A0A345M041_9GAMM Epoxyqueuosine reductase OS=Providencia sp. WCHPHu000369 OX=2027290 GN=queG PE= 3 SV=1
MARYLDLDLLAQNIKQWGVDAGFQQVGICDTDLSAEEPKLQAWLDKQFHGEMEWMSRHGMMRARPHELHPGTLRVISVRMNYLPAKAAFASTLNNPELGYISRYALGRDYHKLLKKRLKQLSDRILDYCREFNGMILPDGTTIDDLNFRPFVDSAPILERPLAVKAGLGWTGKHSLVLNREAGSWFFLGELLINLPVPVDKPIEEDCGRCVACMTTCPTGAIVEPYTVDARRCISYLTIELDSAIPEEFRPLMGNRIYGCDDCQLICPWNRFSQLTDEDDFSPRKELHTPELLDLFSWDEKTFLKVTEGSAIRRIGYIKWLRNISVALGNAPYQDSIVVALQNRLGINAMLDEHFQWSIQQQLKQRNTNQVTIQTSQQKRLVRVINKGLPRDA

SEQ ID NO: 79808 - protein, 385 aa, Providencia stuartii
  misc_feature (1)..(385): tr|A0A379GSQ3|A0A379GSQ3_PROST Epoxyqueuosine reductase OS=Providencia stuartii OX=588 GN=queG PE=3 SV=1
MATHLDLNLLAQNIKQWGSEVGFQQVGICDTDLSLEEPKLQAWLDKQYHGEMAWMARHGMMRARPHELHPGTLRVISVRMNYLPAKAAFASTLSNPELGYISRYALGRDYHKLLKKRLKMLSDRILAYCREHICSDDLNFRPFVDSAPILERPLAVKAGLGWTGKHSLILNREAGSWFFLGELLVNLPLPIDQPVEEQCGRCVACMTTCPTGAIVEPYVVDARRCISYLTIELDGPIPEEFRPLMGNRIYGCDDCQLICPWNRFSQLTDEEDFSPRRVLHTPELLELFSWDEETFLKVTEGSAIRRIGYLKWLRNISVALGNAPYQDTIVNALHSRLGMGEMLDEHIQWAIQQQLQRREENQVTIQTSQQKRLVRAISKGLPRDA

SEQ ID NO: 79809 - protein, 385 aa, Providencia stuartii
  misc_feature (1)..(385): tr|B2Q4Q6|B2Q4Q6_PROST Epoxyqueuosine reductase OS=Prov idencia stuartii ATCC 25827 OX=471874 GN=queG PE=3 SV=1
MATHLDLNLLAQNIKQWGSEVGFQQVGICDTDLSLEEPKLQAWLDKQYHGEMAWMARHGMMRARPHELHPGTLRVISVRMNYLPAKAAFASTLSNPELGYISRYALGRDYHKLLKKRLKMLSDRILAYCREHICSDDLNFRPFVDSAPILERPLAVKAGLGWTGKHSLILNREAGSWFFLGELLVNLPLPIDQPVEEQCGRCVACMTTCPTGAIVEPYVVDARRCISYLTIELDGPIPEEFRPLMGNRIYGCDDCQLICPWNRFSQLTDEQDFSPRRVLHTPELLELFSWDEETFLKVTEGSAIRRIGYLKWLRNISVALGNAPYQDTIVNALRSRLGMGEMLDEHIQWAIQQQLQRREENQVTIQTSQQKRLVRAISKGLPRDA

SEQ ID NO: 79810 - protein, 400 aa, Unknown
  misc_feature (1)..(400): tr|A0A368DZZ5|A0A368DZZ5_9PROT Epoxyqueuosine reductase OS=PS1 clade bacterium OX=2175152 GN=queG PE=3 SV=1
MTSNLENHQHDDAPEDLKSLFRDIAHAEGFDAVGFVSPDALPEAASRLSEFISAGRHGDMDWMETHQTRREAPLNLWSEVKTVIMLGMNYGPDTNPLDALEVKDKGVISVYARGHDYHDIIKKKLKKLARRLVEESGGAVKVFVDTAPIMEKPLAEAAGLGWQGKHTNLVSRSYGSWLFLGSIFTTSDLPKDAPEIDHCGSCSSCLDICPTEAFPEPYKLDARRCISYLTIEAKSQVPLEFRSKMGNHIYGCDDCLAVCPWNKYAAISREAKLQARAELIAPDLLELVSLDDTNFRALFRASPVKRTGRDRFVRNVLIAIGNAAGSINARQRLKFLTAIENRLADTAPLVRGMAVWALGQYLSAEEMKSRATEKLSEALSETVSGKEKDETVRAEWEVWL

SEQ ID NO: 79811 - protein, 400 aa, Unknown
  misc_feature (1)..(400): tr|A0A368EIM7|A0A368EIM7_9PROT Epoxyqueuosine reductase OS=PS1 clade bacterium OX=2175152 GN=queG PE=3 SV=1
MTSNLENHEHVDAPEDLTSLFRDIAHAEGFDAVGFVSPDAIPEAASRLNEFISAGRHGDMDWMETHQTRREAPLNLWSEVKTVIMLGMNYGPDTNPLDALEVKDKGVISVYARGHDYHDIIKKKLKKLARRLVEETGGAVKVFVDTAPIMEKPLAEAAGLGWQGKHTNLVSRSYGSWLFLGSIFTTSDLPKDAPEIDHCGSCSSCLDICPTEAFPAPYKLDARRCISYLTIEAKSQVPLEFRSKMGNHIYGCDDCLAVCPWNKYAAISREAKLQARAELTAPDLLELVDLDDTDFRALFRTSPVKRTGRDRFVRNVLIAIGNAAESAKKSQKLKLLKAIENRLADTAPLVRGMAVWALGQYLSVEEMKSRAKEKLSEALSESISGREMDETVRAEWEIWL

SEQ ID NO: 79812 - protein, 353 aa, Pseudacidovorax intermedius
  misc_feature (1)..(353): tr|A0A370FKA0|A0A370FKA0_9BURK Epoxyqueuosine reductase OS=Pseudacidovorax intermedius OX=433924 GN=queG PE=3 SV=1
MARIRAWAGELGFSQIGIAGIDLSDAEPGLAEWLAQGFHGEMGYMAAHGMRRARPAELVPGTLSVITARMDYLPRQTPEDWQAVEWSRLERPGEAIVSLYARGRDYHKVLRARLQKLADRLAAEIGPFGHRVFTDSAPVLEAELASRSGQGWRGKHTLVLSREAGSMFFLGEIYVDLALPPTEPVAAHCGRCTACIDACPTGAILGPHRLDARRCISYLTIEHAGVIPEALRPAMANRIYGCDDCQLACPWNKFAQRSALPDFDPREGLTGVTLAQLFTWTEDEFLRRTEGSPIRRIGHERWLRNIAVALGNALRRGDASAAVALTSRRDTATPLLREHIDWALAQARTAESA

SEQ ID NO: 79813 - protein, 350 aa, Pseudacidovorax intermedius
  misc_feature (1)..(350): tr|A0A147GMD9|A0A147GMD9_9BURK Epoxyqueuosine reductase OS=Pseudacidovorax intermedius OX=433924 GN=queG PE=3 SV=1
MRAWAGELGFSQIGVAGIDLSAAEPGLREWLAQGFHGEMGYMAVHGMRRARPAELVPGTLSVITARMDYLPRGTPEDWQAVEWSRLARPHEGIVSLYARGRDYHKVLRTRLQKLADRLAAEVGPLGHRVFTDSAPVLEAELASRSGQGWRGKHTLVLSREAGSMFFLGEIYVDLALPPTEPVAPHCGRCTACIDACPTGAIVAPQRLDARRCISYLTIEHAGPIPEALRPALANRIYGCDDCQLACPWNKFAQRSALPDFDPREGLAGATLAQLFAWTEEEFLRRTEGSPIRRIGHERWLRNIAVALGNAWRSGDASAARALAARRDSASPLVREHIDWALAQAPAGAPA

SEQ ID NO: 79814 - protein, 309 aa, Pseudacidovorax sp.
  misc_feature (1)..(309): tr|A0A1N6NRB6|A0A1N6NRB6_9BURK Epoxyqueuosine reductase OS=Pseudacidovorax sp. RU35E OX=1907403 GN=SAMN0588055 7_101238 PE=4 SV=1
MAAHGMRRARPAELVPGTLSVITARMDYLPRETPDDWQAVEWSRLERPGEAIVSLYARGRDYHKVLRARLQKLADRLAAEIGPFGHRVFTDSAPVLEAELAGRSGQGWRGKHTLVLSREAGSMFFLGEIYVDLALPPTEPVAAHCGRCTACIDACPTGAILGPHRLDARRCISYLTIEHAGAIPEALRPAIGNRIYGCDDCQLACPWNKFAQRSALPDFDPREGLTGVTLAQLFAWTEDEFLRRTEGSPIRRIGHERWLRNIAVALGNALRQGDASAAVALTARRDTATSLLREHIDWALAQAPTVAPT

SEQ ID NO: 79815 - protein, 342 aa, Pseudaestuariivita atlantica
  misc_feature (1)..(342): tr|A0A0L1JQ73|A0A0L1JQ73_9RHOB Epoxyqueuosine reductase OS=Pseudaestuariivita atlantica OX=1317121 GN=ATO11_10 320 PE=4 SV=1
MTARVKAEALSAGFTLCRVCAPGAVDISEGLRGYLDAGYHGSMGWMEERVAWRSSPAALWPEARSVIVLGEAYTPDHDPLEVLDHPDRAAISVYAQNRDYHDVVKKRLKRLARWLVAEAGGEVKVFVDTAPVPEKALGQAAGLGWQGKHTNLVSREMGSWFFIGSVFATVALEPDAAEVDHCGSCRACLDVCPTDAFPAPYQLDARRCISYLTIEHAGPVDAALRPLMGNRIYGCDDCLAVCPWNKFAQAATEVKYHARDDLRAPALAELAVLDDAAFRAKFSGSPIKRIRRGRFVRNVLYAIGNSGVPALREVARGLCEDADPVVADAARWAVSQTGAKRG

SEQ ID NO: 79816 - protein, 390 aa, Pseudaminobacter manganicus
  misc_feature (1)..(390): tr|A0A1V8RT10|A0A1V8RT10_9RHIZ Epoxyqueuosine reductase OS=Pseudaminobacter manganicus OX=1873176 GN=queG PE=3 SV=1
MRISISEKADPAAKLRALIDVEAARAGFDVVAVTRPDAIPLAPARLVDFVAAGFHGSMAWMEETLARRADPTTLWPDVRSIIVLAMNYGPDHDPRAVLERRDRGAISVYAQNRDYHDVMKGRLKEIAGKIVARAGGDVKVFVDTAPVMEKPLAEAAGVGWQGKHTNLVSRAHGSWLFLGSIFTTAELAPDALEKDHCGSCRACLDACPTNAFPAPYQLDARRCISYLTIENKGPIPHEFREAIGNHIYGCDDCLAACPWNKFARAASELKLVARPELHEPPLAGLLVLDDAGFRAFFSGSPVKRIGRDRFIRNVLIAAGNSNDAALVPQVAALLNDLSPLVRGAAVWAFSRLAANGDFTRKARDALVGEGEETVRSEWRQALARHPGGAG

SEQ ID NO: 79817 - protein, 391 aa, Pseudaminobacter salicylatoxidans
  misc_feature (1)..(391): tr|A0A316BVY6|A0A316BVY6_PSESE Epoxyqueuosine reductase OS=Pseudaminobacter salicylatoxidans OX=93369 GN=queG PE=3 SV=1
MRTSTSDIAARAKPEPGQRLRQMIEREARNAGFAAIAVTSPEAIPQAPARLAQFLTEGLHGSMGWMAETFERRSAPKTLWPEVRSIVVLAMNYGPDHDPRALQQQAGRGAISVYARNRDYHDVIKGRLKELAGKIVARAGGDVKVFVDTAPVMEKPLAQAAGIGWQGKHTNLVSREFGSWLFLGTIFTTAEIAPDQPDIDHCGSCRACLDACPTHAFPAPYRIDARRCISYLTIENKGPIPHEFRAALGNRIYGCDDCLAACPWNKFAQAAAEAKLAARDDLLAPKLADFLAMDDPAFRTFFSGSPVKRIGRDRFVRNVLIAAGNSGDDALAAPCESLLDDPSPLVRGAAVWALSRLMRSPDFARLAAARQNTESDAEVRREWALATGQPD

SEQ ID NO: 79818 - protein, 389 aa, Pseudaminobacter sp.
  misc_feature (1)..(389): tr|A0A432V8J4|A0A432V8J4_9RHIZ Epoxyqueuosine reductase OS=Pseudaminobacter sp. CB3 OX=1851146 GN=queG PE=3 SV =1
MRTSTSERPDKAAALRQLIDREAQRAGFDAVAVTTPEAIPQAPERLAQFVAAGFHGSMEWISETLARRSAPSTLWPDVRSIIVLAMNYGPDHDPRELARMPDRGAISVYARNRDYHDVMKGRLKEIAGKLVARAGGDVKVFVDTAPIMEKPLAQAAGIGWQGKHTNLVSREFGSWLFLGTIFCTAELVPDEPLADHCGSCRACLDACPTQAFPAPYRLDARRCISYLTIENKGPIPHEFREAIGNRIYGCDDCLAACPWNKFAQTASEAKLAAREDLRAPALADFLALDDAGFRSFFSGSPVKRIGRDRFLRNVLIAAGNSGDARLVPACERLLCDPSPLVRGAAVWALSHLASPSTVLALRPEGEEDEDVRHEWAVAMSQPEIARSIA

SEQ ID NO: 79819 - protein, 329 aa, Pseudanabaena biceps
  misc_feature (1)..(329): tr|L8N5Z0|L8N5Z0_9CYAN Epoxyqueuosine reductase OS=Pseu danabaena biceps PCC 7429 OX=927668 GN=queG PE=3 SV=1
MENLSQAEIKQAIQQKAIALGFSKVGIARAESGIEAERLQEWLKLGYQADMDWMANPKRQDITAVMPGVKSVICVALNYYTPNQHSSDRQIGKISRYGWGRDYHKVLTKKLKALAAWLTTQGEDIQTRYYVDTGPIAEKALAQRAGIGWVGKHSNVITRDYGSWLFLGELLTNLEIEPDRPHTDHCGTCTRCIEACPTGAIAQPFVVDANRCIAFHTIENKSEQIPQAIGANLQNWVAGCDICQDVCPWNQRFAQETLETDFQPFPHNLNPQLTDLATMTDEQWNQYFTGSALRRIKRDRWQRNAQTVIHNVVNNLDSNLDSNLDSNPT

SEQ ID NO: 79820 - protein, 318 aa, Pseudanabaena frigida
  misc_feature (1)..(318): tr|A0A2W4W9R4|A0A2W4W9R4_9CYAN Epoxyqueuosine reductase OS=Pseudanabaena frigida OX=945775 GN=queG PE=3 SV=1
MKDNNLTKEEIKSAIAQKALELGFSKVGFAKAESGIEADRLREWLSLGYQADMDWMTNPKRQDISQIMAGVKTVICVALNYYTPHQHSRDRDVGKISRYGWGRDYHKVLTKKLKALATWLESLGNHPSEKIQARYYVDTGPIAEKAFAQRAGIGWIGKHSNVITRDYGSWLFLGEILTNLELEPDRPHTDHCGTCTRCIDACPTGAIAQPFVVDANRCIAYHTIENKAEQIPEAIAKNLQNWVAGCDICQDICPWNQRFAQETLESDFQPFPHNVDPKLDNLAKMTEETWDRNFTGSALRRIKRDRWHRNAKTARPNL

SEQ ID NO: 79821 - protein, 325 aa, Pseudanabaena sp.
  misc_feature (1)..(325): tr|A0A2W6YW35|A0A2W6YW35_9CYAN Epoxyqueuosine reductase OS=Pseudanabaena sp. OX=1153 GN=queG PE=3 SV=1
MTISKQALKQAIAEKATELGFSKIGIAKAESGIEVARLQSWLDLGYQADMDWMTNPKRQDITQVMAGVKSLICVALNYYTPHQHSSDPQIGKISRYGWGRDYHKVLSKKLKALSNWLIELGKQNGIEIQARYYVDTGPIAEKAFAQRAGIGWIGKHSNVISREYGSWLFLGEILTNLDLEPDQPHTDHCGTCTRCLEACPTGAIASPYVVDANRCIAFHTIENKAEQIPDAIATNLQNWVAGCDICQDVCPWNQRFAHETTESDFQPFDQNIDPKLSDLENMSDTEWDRRFIGSALRRIKRDRWQRNARTITLTRSKKNTPPLVT

SEQ ID NO: 79822 - protein, 313 aa, Pseudanabaena sp.
  misc_feature (1)..(313): tr|A0A256BGG3|A0A256BGG3_9CYAN Epoxyqueuosine reductase OS=Pseudanabaena sp. SR411 OX=1980935 GN=queG PE=3 SV= 1
MENLSQAAIKLAIQQKAIALGFSKVGIAKAESGIEAERLQQWLELGYQADMDWMTNPKRQDITQVMTGVKSVICVALNYYTPHQHSIDRTVGKISRYGWGRDYHKVLTKKLKALVTWLNTQGENIQTRYYVDTGPIAEKAFAQRAGIGWIGKHSNVITRDYGSWLFLGEVLTNLELEPDHPHTDHCGTCTRCIDACPTGAIAQPFVVDANRCIAFHTIENKAAQIPEAIATNLQNWVAGCDICQDVCPWNQRFAQETLESDFQPFPHNVDPRLEDLANMTEEEWDQNFTGSALRRIKHDRWQRNAKTAIDSAI

SEQ ID NO: 79823 - protein, 310 aa, Pseudarcicella hirudinis
  misc_feature (1)..(310): tr|A0A1I5RPV5|A0A1I5RPV5_9BACT Epoxyqueuosine reductase OS=Pseudarcicella hirudinis OX=1079859 GN=queG PE=3 SV =1
MTALHKQNNTRLIKQKAQELGFLFCGISQAEFLEDEAPLLEKWLKNNMQGQMAYMENHFDKRLDPRLLVEDAKSVVSLLYNYFPEKRLPEDGSTLKISKYAYGVDYHFVIKEKLKELLNFIREEIGEVGGRAFVDSAPVLEKAWAKRSGLGWQGKHSNLLNRQAGSFFFIAELIIDLDLEHDGPVKDYCGTCTRCIDACPTDAIVEPYVVDGSKCISYFTIELKEAIPAEMKGKFEDWAFGCDICQDVCPWNRFSKPHNEPQFEFHPDLALYTRKDWDEITEDVFQVLFRKSPVKRTRLSGLKRNIEFLK

SEQ ID NO: 79824 - protein, 313 aa, Pseudarcicella sp.
  misc_feature (1)..(313): tr|A0A2S2DUI9|A0A2S2DUI9_9BACT Epoxyqueuosine reductase OS=Pseudarcicella sp. HME7025 OX=2183547 GN=queG PE=3 SV=1
MTLDSKQVSSLIKKRAFEAGFSFCGISKADFLDEEAPRLEAWLNQGLQGEMAYMANHFDKRLDPRKLVEGCQTVVSLVFNYYPSPSLTPLNHHFKVSKYAFGEDYHRVVKDKMQVLWDAMQEDLGEISGRMFVDSAPVLEKAWAKKSGLGWIGKNGNLIIPKQGSFYFIAELLIDIPAEPDGPIKDFCGTCTRCIDACPTEALTPYWVDGSKCISYFTIELKEGIPASMKSDFQDWIFGCDICQDVCPWNRFSTPHQEPRLEAKLTFLEMERGDWEDLSEEVFKELFHYSAIKRTKITGLQRNIQYINKKNES

SEQ ID NO: 79825 - protein, 379 aa, Pseudescherichia vulneris
  misc_feature (1)..(379): tr|A0A090UWN4|A0A090UWN4_PSEVU Epoxyqueuosine reductase OS=Pseudescherichia vulneris NBRC 102420 OX=1115515 GN =queG PE=3 SV=1
MSQPLDLNQLAQNIKQWGTELGFQQVGITDTDLSASEPKLQAWLDKQYHGEMAWMARHGMMRARPHELLPGTLRVISVRMNYLPANAAFASTLKNPALGYVSRYALGRDYHKLLRNRLKKLGETIQQHCVSLNFRPFVDSAPLLERPLAEKAGLGWTGKHSLILNQEAGSFFFLGELLIDLPLPIDQPVEEKCGKCVACMTICPTGAIVEPYTVDARRCISYLTIELEGSIPPEFRPLIGNRIYGCDDCQLICPWNRFSQLTDEEDFSPRKALHAPELIALFGWSEAHFLKVTEGSAIRRIGHLRWLRNVAVALGNAPWDEANIQALEQRRGEHPLLEEHIEWAIAQQIEKRNACVVEVQLPQKLRLVRVVEKGLPRDA

SEQ ID NO: 79826 - protein, 371 aa, Pseudidiomarina sp.
  misc_feature (1)..(371): tr|A0A451GE62|A0A451GE62_9GAMM Epoxyqueuosine reductase OS=Pseudidiomarina sp. R04H25 OX=2487740 GN=queG PE=3 SV=1
MDYHQLAEDIKRWGTELGFQKVGITDVDLSTEREHLQRWLDQGMHGDMEWMARHGDLRTRPDQLHPGAVRAISVRMNYLPAEAGFAKTLKNPRLGYISRYALGRDYHKLMRKRLKQLGDKIQSACAELDFRPFVDSAPIMEKPLAIKAGLGWRGKHTLVLDEGSGSWFFLGELLVNLPLPMDTEVEEKCGTCSACITICPTQAIVEPYVLDARRCISYLTIELRDSIPEQYRPLMGNRIYGCDDCQLICPWNRYAQLTGEDDFAPRKDLHAPELLELWQWDEEQFLKRTEGSPIRRIGYECWQRNLAVAFGNAPTDTDIIAALEQRYPSSTPMVQEHIEWALARQRSGAVKVEKQVIRLVRAVEKGLKRDA

SEQ ID NO: 79827 - protein, 377 aa, Pseudoalteromonadaceae bacterium
  misc_feature (1)..(377): tr|A0A2D7N2T9|A0A2D7N2T9_9GAMM Epoxyqueuosine reductase OS=Pseudoalteromonadaceae bacterium OX=2026783 GN=queG PE=3 SV=1
  misc_feature (8)..(8): Xaa can be any naturally occurring amino acid
  misc_feature (42)..(42): Xaa can be any naturally occurring amino acid
  misc_feature (50)..(50): Xaa can be any naturally occurring amino acid
  misc_feature (61)..(61): Xaa can be any naturally occurring amino acid
  misc_feature (155)..(155): Xaa can be any naturally occurring amino acid
MSNSTPNXQQLAKNIKAWGQELGFSEVGITDIDLSKHEAQLXRWLDAGYXGSMDYMAAHGXKRARPAELVPGTQRVISVKMNYLPPDASFAETLKNTEKAYISRYALGRDYHKLMRNRLKKLGQKIEQEIGDYGFRPFVDSAPVLERQLAEKAGXGWRGKHSLLINQEAGSWFFLGELFVDLPLPIDNENTFEGCGKCVACITLCPTGAIVEPYVVDARKCISYLTIEHQGPIPEQYRALLGNRVYGCDDCQLVCPWNRYGQITDEQDFHPRTQLKNKDLLELFAWDEPTFLKNTEGSPIRRIGHERWLRNLAVGLGNADFSPSIINALESKHESSSQLVKEHIEWALEQQNNKQREQLRKTQRLIRIVEKGLPRDA

SEQ ID NO: 79828 - protein, 377 aa, Pseudoalteromonadaceae bacterium
  misc_feature (1)..(377): tr|A0A2E9T093|A0A2E9T093_9GAMM Epoxyqueuosine reductase OS=Pseudoalteromonadaceae bacterium OX=2026783 GN=queG PE=3 SV=1
MTTPATDYEQLALQIKQWGKDLGFAEVGITDIDLTKHEAQLQRWLDLGYHGEMEYMAAHGMKRARPAELVPGTQRVISVKMNYLPPDASFAKNLKQTDKAYISRYALGRDYHKLIRNRLKKLGQQIEQHVGQLGFRPFVDSAPVLERQLAEKAGLGWRGKHSLLINKEAGSWFFLGELFVDIPLPIDQENSFEGCGKCVACMTLCPTGAIVEPYVVDARKCISYLTIELQGAIPEEYRPLLGNRVYGCDDCQLVCPWNRYGQITDEADFHPRQQLKDQDLLTLFAWDEATFLKNTEGSPIRRIGHERWQRNLAVGLGNADYNDNIIQALSDTLVNASPLVAEHIEWALEQQQNKRQIKLRKTARLIRIVEKGLPRDA

SEQ ID NO: 79829 - protein, 379 aa, Pseudoalteromonas agarivorans
  misc_feature (1)..(379): tr|A0A290RRR1|A0A290RRR1_9GAMM Epoxyqueuosine reductase OS=Pseudoalteromonas agarivorans DSM 14585 OX=1312369 GN=queG PE=3 SV=1
MCVSNSTPNYQQLAKNIKAWGQELGFSEVGITDIDLSKHEAQLQRWLDAGYHGSMDYMAAHGMKRARPAELVPGTQRVISVKMNYLPPDASFAKTLKNTEKAYISRYALGRDYHKLMRNRLKKLGQKIEQEIGDYGFRPFVDSAPVLERQLAEKAGLGWRGKHSLLINQEAGSWFFLGELFVDLPLPIDNENTFEGCGKCVACITLCPTGAIVEPYVVDARKCISYLTIEHQGPIPEQYRALLGNRVYGCDDCQLVCPWNRYGQITDEQDFHPRTQLKNKDLLELFDWDEPTFLKNTEGSPIRRIGHERWLRNLAVGLGNADFSPSIINALESKHESSSQLVKEHIEWALEQQNNKQREQLRKTQRLIRIVEKGLPRDA

SEQ ID NO: 79830 - protein, 379 aa, Pseudoalteromonas agarivorans
  misc_feature (1)..(379): tr|N6VTI0|N6VTI0_9GAMM Epoxyqueuosine reductase OS=Pseu doalteromonas agarivorans S816 OX=1307437 GN=queG PE=3 SV=1
MCVSNSTPNYQQLAKNIKAWGQELGFSEVGITDIDLSKHEAQLQRWLDAGYHGSMDYMAAHGMKRARPAELVPGTQRVISVKMNYLPPDASFAKTLKNTEKAYISRYALGRDYHKLMRNRLKKLGQKIEQEIGDYGFRPFVDSAPVLERQLAEKAGLGWRGKHSLLINQEAGSWFFLGELFVDLPLPIDNENTFEGCGKCVACITLCPTGAIVEPYVVDARKCISYLTIEHQGPIPEQYRAFLGNRVYGCDDCQLVCPWNRYGQITDEQDFHPRTQLKNKDLLELFTWDEPTFLKNTEGSPIRRIGHERWLRNLAVGLGNADFSPSIINALESKHESSSQLVKEHIEWALEQQNNKQREQLRKTQRLIRIVEKGLPRDA

SEQ ID NO: 79831 - protein, 377 aa, Pseudoalteromonas aliena
  misc_feature (1)..(377): tr|A0A1Q2H3R2|A0A1Q2H3R2_9GAMM Epoxyqueuosine reductase OS=Pseudoalteromonas aliena OX=247523 GN=queG PE=3 SV= 1
MSNPTPDYKKIALQIKAWGLELGFSEVGITDIDLSQHEAQLQRWLDAGFHGSMDYMAAHGMKRARPAELVLGTQRVISVKMNYLPPDAGFAKTLKSKEKAYISRYALGRDYHKLMRNRLKKLGQKIEQEIGEYGFRPFVDSAPVLERQLAEKAGLGWRGKNSLLINQKAGSWFFLGELFIDLPLPIDAENTFEGCGKCVACITLCPTGAIVEPYVVDARKCISYLTIELQGPIPEQYRALLGNRVYGCDDCQLVCPWNRYGQITDENDFHPRTQLKDKDLLELFAWDEPTFLKNTEGSPIRRIGHERWLRNIAVGLGNAEFSPAIIHALEDKGQHCSALVLEHIEWALAQQNDKQRVALRKTARLIRIVEKGLPRDA

SEQ ID NO: 79832 - protein, 377 aa, Pseudoalteromonas amylolytica
  misc_feature (1)..(377): tr|A0A1S1MXP0|A0A1S1MXP0_9GAMM Epoxyqueuosine reductase OS=Pseudoalteromonas amylolytica OX=1859457 GN=queG PE =3 SV=1
MTTDSINYIELAEKIKQWGKALGFADVGITDIDLSAHEEQLQRWLDHSYHGDMEYMAAHGMKRARPDELVPGTQRVISVRMNYLPPDASFAKALANKSTAYISRYALGRDYHKVMRNRLKQLGQKISSEVEPLGYRPFVDSAPVLERQLAEKAGLGWRGKNSLLIQKQAGSWFFLGELFVDIPLPVDQKDPFEGCGKCNACITLCPTGAIIEPYVVDARKCISYLTIELQGAIPEQYRSLIGNRIYGCDDCQLVCPWNRYGQLTKEQDFMARTQLKDRSLIELFMWDEATFLKVTEGNPIRRIGHQRWLRNLAVGLGNADYDESIVEALEKRLEDASDLVKEHINWALKQQSHKQQQTQRKQARLIRIIEKGLPRDA

SEQ ID NO: 79833 - protein, 377 aa, Pseudoalteromonas arctica
  misc_feature (1)..(377): tr|A0A290S383|A0A290S383_9GAMM Epoxyqueuosine reductase OS=Pseudoalteromonas arctica A 37-1-2 OX=1117313 GN=qu eG PE=3 SV=1
MSNPTPDYEKLALQIKTWGQELGFSEVGITDIDLSKHEAQLQRWLDAGYHGSMDYMAAHGMKRARPAELVPGTQRVISVKMNYLPPDAGFAKTLKNKEKAYISRYALGRDYHKLMRNRLKKLGQKIEQEIGEYGFRPFVDSAPVLERQLAEKAGLGWRGKHSLLINQEAGSWFFLGELFIDLPLPIDVENTFEGCGKCVACITLCPTGAIVEPYVVDARKCISYLTIEHQGPIPEQYRTLLGNRIYGCDDCQLVCPWNRYGQITDENDFHPRTQLKNKDLLELFAWDEPTFLKNTEGSPIRRIGHERWLRNIAVGLGNAEFSPAIIHALQDKSQICSELVLEHIEWALAQQNDKQRLQIRKTARLIRIVEKGLPRDA

SEQ ID NO: 79834 - protein, 379 aa, Pseudoalteromonas atlantica
  misc_feature (1)..(379): tr|A0A510ZIK0|A0A510ZIK0_PSEAF Epoxyqueuosine reductase OS=Pseudoalteromonas atlantica OX=288 GN=queG PE=3 SV= 1
MCVNNSTPNYQQLAKNIKAWGQELGFSEVGITDIDLSKHEAQLQRWLDAGYHGSMDYMAAHGMKRARPAELVPGTQRVISVKMNYLPPDASFAKTLKNTEKAYISRYALGRDYHKLMRNRLKKLGQKIEQEIGDYGFRPFVDSAPVLERQLAEKAGLGWRGKHSLLINQEAGSWFFLGELFVDLPLPIDNENTFEGCGKCVACITLCPTGAIVEPYVVDARKCISYLTIEHQGPIPEQYRALLGNRVYGCDDCQLVCPWNRYGQITDEQDFHPRTQLKNKDLLELFAWDEPTFLKNTEGSPIRRIGHERWLRNLAVGLGNADFSPSIINALESKHESSSQLVKEHIEWALEQQNNKQREQLRKTQRLIRIVEKGLPRDA

SEQ ID NO: 79835 - protein, 397 aa, Pseudoalteromonas atlantica
  misc_feature (1)..(397): tr|Q15NR6|Q15NR6_PSEA6 Epoxyqueuosine reductase OS=Pseu doalteromonas atlantica (strain T6c / ATCC BAA-1087) OX =342610 GN=queG PE=3 SV=1
MSFAQYDLHQLAQNIKAWGEALGFQQVGIADIDLSTHEDKLQSWLDSGYHGQMNFMAEHGMKRARPAELLPGTLRVISVRMDYLPPDAKFAHTLKNKESAYISRYALGRDYHKLLRNRLKKLGEKIRTECTTANFRPFVDSAPVLEHALAEKAGIGWTGKHSLTLNQQGGSWFFLGELFIDIPLPVDAPVEEQCGSCNACITICPTQAIVAPYVVDAKRCISYLTIELKGAIPEAFRRALGNRIYGCDDCQLICPWNRYAKITNETDFHPRDVLQGRTLAELAMWDESTFLKNTEGSAIRRIGHERWQRNISIALGNAPYSTHTYEAITALAAHGTDLVKEHARWALNEQDLKKAQSISVVAVDDITPRDDSLLAPQEKRLNQRLIRSIEKGLARDA

SEQ ID NO: 79836 - protein, 377 aa, Pseudoalteromonas byunsanensis
  misc_feature (1)..(377): tr|A0A1S1NDT7|A0A1S1NDT7_9GAMM Epoxyqueuosine reductase OS=Pseudoalteromonas byunsanensis OX=327939 GN=queG PE =3 SV=1
MTTDSINYIELAEKIKQWGKELGFADVGITDIDLSAHESQLQRWLDHGYHGEMEYMAAHGMKRARPNELVPGTQRVISVRMHYLPPDASFAKALANKETAYISRYALGRDYHKVMRNRLKQLGQKISVEVEQLGYRPFVDSAPILERQLAEKAGLGWRGKNSLLLQKQAGSWFFLGELFVDIPLPIDQKDEFEGCGKCNACITLCPTGAIVEPYVVDARKCISYLTIELQGAIPVQYRSLIGNRVYGCDDCQLVCPWNRYGQLTKEQDFMARPQLKDRTLLELFSWNEETFLKATEGSPIRRIGHQRWLRNLAVGLGNADYDECIIDALEKRLEGASDLVKEHILWALEQQNNKQQQAERKQARLIRIIEKGMPRDA

SEQ ID NO: 79837 - protein, 379 aa, Pseudoalteromonas carrageenovora
  misc_feature (1)..(379): tr|A0A2K4X6F8|A0A2K4X6F8_PSEVC Epoxyqueuosine reductase OS=Pseudoalteromonas carrageenovora IAM 12662 OX=13148 68 GN=yjeS PE=3 SV=1
MCVSNPTPNYEQLAHQIKVWGQELGFSEVGITDIDLSKHEAQLQRWLDAGYHGSMDYMAAHGMKRARPAELVPGTQRVISVKMNYLPPDASFAKTLKNTEKAYISRYALGRDYHKLMRNRLKKLGQKIEQEIGAYGFRPFVDSAPVLERQLAEKAGLGWRGKHSLLINQEAGSWFFLGELFVDLPLPIDDENTFEGCGKCVACITLCPTGAIVEPYVVDARKCISYLTIEHQGAIPQQYRALLGNRIYGCDDCQLVCPWNRYGKITDEQDFHPRTQLKDKDLLELFAWDEATFLKNTEGSPIRRIGHERWLRNLAVGLGNADFSPKIVFALEDKALKCSELVLEHINWALTQQNDKQRVQLRKTLRLIRIVEKGLPRDA

SEQ ID NO: 79838 - protein, 377 aa, Pseudoalteromonas citrea
  misc_feature (1)..(377): tr|U1KTV1|U1KTV1_9GAMM Epoxyqueuosine reductase OS=Pseu doalteromonas citrea DSM 8771 OX=1117314 GN=queG PE=3 S V=1
MTITHIDYTELAKKIKQWGHELGFAEVGITDIDLSEHEAQLQRWLDKGYHGEMDYMAAHGMKRARPAELVPGTQRVISVKMNYLPPDASFARALGNKQTAYISRYALGRDYHKVLRNRLKKLGQRIELEVEQLGYRPFVDSAPVLERQLAEKAGLGWRGKNSLLIHKQAGSWFFLGELFVSIPLPIDAPNEEEGCGKCNACITLCPTGAIVEPYVVDARKCISYLTIELQGAIPEQYRPLLGNRIYGCDDCQLVCPWNRFGQLTDELDFHPRQQIKDQDLMTLFAWDERTFLKNTEGSPIRRIGHERWLRNIAVGLGNAHYDPSIIEALKARLNSASPLVKEHIEWALTQQHDKQVNTERKKARLIRIIEKGLPRDA

SEQ ID NO: 79839 - protein, 380 aa, Pseudoalteromonas denitrificans
  misc_feature (1)..(380): tr|A0A1I1JZ72|A0A1I1JZ72_9GAMM Epoxyqueuosine reductase OS=Pseudoalteromonas denitrificans DSM 6059 OX=1123010 GN=queG PE=3 SV=1
MKSRITDYSLLSDKIKQWGLELGFAQVGIADIDLSQHEAQFQRWLDNNYHGEMEYMATHGMMRARPDELVPGTKRVISVRMNYLPPDASFAKNLKSNQKAYISRYALGRDYHKMMRNKLKKLGQKIEQELDIDYQEKLSFRPFVDSAPVLERQLADKAGLGWTGKHSLIINKEAGSWFFLGELFVDIPLPVDKPVEEQCGSCVACIKLCPTNAIVEPYVVDAKRCISYLTIELKGAIPEEFRPLLGNRIYGCDDCQLICPWNRYGQITDEKDFHPRTQLKDKNLIELFLWDEATFLKNTEGSPIRRIGHERWLRNISVALGNAAWSQAIIDVLQQRLAGVSELVEVHILWALEQQQKKKLTNKKTQRLIKAIEKGLPRDA

SEQ ID NO: 79840 - protein, 377 aa, Pseudoalteromonas distincta
  misc_feature (1)..(377): tr|F3BEP6|F3BEP6_9GAMM Epoxyqueuosine reductase OS=Pseu doalteromonas distincta OX=77608 GN=queG PE=3 SV=1
MSNPTPDYEKLALQIKTWGQELGFSEVGITDIDLSKHEAQLQRWLDAGYHGSMDYMAAHGMKRARPAELVPGTQRVISVKMNYLPPDAGFAKTLKNKEKAYISRYALGRDYHKLMRNRLKKLGQKIEQEVGEYGFRPFVDSAPVLERQLAEKAGLGWRGKHSLLINQEAGSWFFLGELFIDLPLPIDAENTFEGCGKCVACITLCPTGAIVEPYVVDARKCISYLTIEHQGPIPEQYRTLLGNRVYGCDDCQLVCPWNRYGQITDENDFHPRTQLKDKDLLELFAWDEPTFLKNTEGSPIRRIGHERWLRNLAVGLGNAEFSPAIINALQGKSQICSELVLEHIEWALAQQNDKQRLQIRKTARLIRIVEKGLPRDA

SEQ ID NO: 79841 - protein, 377 aa, Pseudoalteromonas distincta
  misc_feature (1)..(377): tr|A0A5B0UN68|A0A5B0UN68_9GAMM Epoxyqueuosine reductase OS=Pseudoalteromonas distincta OX=77608 GN=queG PE=3 S V=1
MSNPTPDYEKLALQIKTWGQELGFSEVGITDIDLSKHEAQLQRWLDAGYHGSMDYMAAHGMKRARPAELVPGTQRVISVKMNYLPPDAGFAKTLKNKEKAYISRYALGRDYHKLMRNRLKKLGQKIEQEIGEYGFRPFVDSAPVLERQLAEKAGLGWRGKHSLLINQEAGSWFFLGELFIDLPLPIDAENTFEGCGKCVACITLCPTGAIVEPYVVDARKCISYLTIEHQGPIPEQYRTLLGNRVYGCDDCQLVCPWNRYGQITDENDFHPRTQLKDKDLLELFAWDEPTFLKNTEGSPIRRIGHERWLRNLAVGLGNAEFSPAIINALQDKSQICSELVLEHIEWALAQQKDKQRLQIRKTARLIRIVEKGLPRDA

SEQ ID NO: 79842 - protein, 377 aa, Pseudoalteromonas elyakovii
  misc_feature (1)..(377): tr|A0A558HSX4|A0A558HSX4_9GAMM Epoxyqueuosine reductase OS=Pseudoalteromonas elyakovii OX=81037 GN=queG PE=3 S V=1
MSNPTPDYEKLALQIKTWGQELGFSEVGITDIDLSKHEAQLQRWLDAGYHGSMDYMAAHGMKRARPAELVPGTQRVISVKMNYLPPDAGFAKTLKNKEKAYISRYALGRDYHKLMRNRLKKLGQKIEQEIGEYGFRPFVDSAPVLERQLAEKAGLGWRGKHSLLINQEAGSWFFLGELFIDLPLPIDAENTFEGCGKCVACITLCPTGAIVEPYVVDARKCISYLTIEHQGPIPEQYRTLLGNRVYGCDDCQLVCPWNRYGQITDENDFHPRTQLKDKDLLELFAWDEPKFLKNTEGSPIRRIGHERWLRNLAVGLGNAEFSPAIINALQDKSQICSELVLEHIEWALAQQNDKQRLQIRKTARLIRIVEKGLPRDA

SEQ ID NO: 79843 - protein, 377 aa, Pseudoalteromonas espejiana
  misc_feature (1)..(377): tr|A0A510XS65|A0A510XS65_9GAMM Epoxyqueuosine reductase OS=Pseudoalteromonas espejiana OX=28107 GN=queG PE=3 S V=1
MSNPTPNYKQLAQQIKTWGQELGFSEVGITDIDLSKHEAQLQRWLDAGYHGSMDYMAAHGMKRARPAELVPGTQRVISVKMNYLPPDASFAKTLKNTEQAYISRYALGRDYHKLMRNRLKKLGQKIEQEIGNYGFRPFVDSAPVLERQLAEKAGLGWRGKHSLLINQEAGSWFFLGELFVDLPLPIDNENTFEGCGKCVACITLCPTGAIVEPYVVDARKCISYLTIEHQGPIPEQYRTLLGNRIYGCDDCQLVCPWNRYGQITDEQDFHPRTQLKNKDLLELFAWDEATFLKNTEGSPIRRIGHERWLRNIAIGLGNADFSPNIISALEDKRSNSSELVIEHIDWALEQQNDKQRKQLRKTQRLIRIVEKGLPRDA

SEQ ID NO: 79844 - protein, 377 aa, Pseudoalteromonas fuliginea
  misc_feature (1)..(377): tr|A0A063KN27|A0A063KN27_9GAMM Epoxyqueuosine reductase OS=Pseudoalteromonas fuliginea OX=1872678 GN=queG PE=3 SV=1
MSNPTPDYEKLALQIKTWGQELGFSEVGITDIDLSKHEAQLQRWLDAGFHGSMDYMASHGMKRARPAELVPGTQRVISVKMNYLPPDAGFAKTLKNKEKAYISRYALGRDYHKLMRNRLKKLGQKIEQEIGEYGFRPFVDSAPVLERQLAEKAGLGWRGKHSLLINQEAGSWFFLGELFIDLPLPIDAENTFEGCGKCVACITLCPTGAIVEPYVVDARKCISYLTIEHQGPIPEQYRTLLGNRIYGCDDCQLVCPWNRYGQITDENDFHPRTQLKDKDLLELFAWDEATFLKNTEGSPIRRIGHERWLRNLAIGLGNAQFSPAIIYALEDKSQICSELVLEHIEWALSQQNDKQRVALRKTARLIRIVEKGLPRDA

SEQ ID NO: 79845 - protein, 377 aa, Pseudoalteromonas fuliginea
  misc_feature (1)..(377): tr|A0A5B0UBW7|A0A5B0UBW7_9GAMM Epoxyqueuosine reductase OS=Pseudoalteromonas fuliginea OX=1872678 GN=queG PE=3 SV=1
MSNPTPDYEKLALQIKTWGQELGFSEVGITDIDLSKHEAQLQRWLDAGFHGSMDYMASHGMKRARPAELVPGTQRVISVKMNYLPPDAGFAKTLKNKEKAYISRYALGRDYHKLMRNRLKKLGQKIEQEIGEYGFRPFVDSAPVLERQLAEKAGLGWRGKHSLLINQEAGSWFFLGELFIDLPLPIDAENTFEGCGKCVACITLCPTGAIVEPYVVDARKCISYLTIEHQGPIPEQYRTLLGNRIYGCDDCQLVCPWNRYGQITDENDFHPRTQLKDKDLLELFAWDEATFLKNTEGSPIRRIGHERWLRNLAIGLGNAQFSPAIIYALEDKSQICSELVLEHIKWALSQQNDKQRVTLRKTARLIRIVEKGLPRDA

SEQ ID NO: 79846 - protein, 377 aa, Pseudoalteromonas haloplanktis
  misc_feature (1)..(377): tr|Q3IFX3|Q3IFX3_PSEHT Epoxyqueuosine reductase OS=Pseu doalteromonas haloplanktis (strain TAC 125) OX=326442 G N=queG PE=3 SV=1
MSDAVPDYKNLAQQIKAWGQELGFSEVGITDIDLSKHETQLQRWLDAGYHGNMDYMAAHGMKRARPAELVPGTQRVISVKMNYLPPDAGFAKTLKNSEKAYISRYALGRDYHKLMRNRLKKLGQKIELEIGEYGFRPFVDSAPVLERQLAEKAGLGWRGKHSLLINKEAGSWFFLGELFVDLPLPIDAENTFEGCGKCVACITLCPTGAIVEPYVVDARKCISYLTIELQGPIPEQYRTLLGNRIYGCDDCQLVCPWNRYGQLTDENDFHPRTQLKDKDLLELFAWDEATFLKNTEGSPIRRIGHERWLRNLAVGLGNAEFSPSIIHALEDKSLACSELVLEHINWALQQQRNKQGTILRKTARLIRIVEKGLPRDA

SEQ ID NO: 79847 - protein, 377 aa, Pseudoalteromonas issachenkonii
  misc_feature (1)..(377): tr|A0A290SBP1|A0A290SBP1_9GAMM Epoxyqueuosine reductase OS=Pseudoalteromonas issachenkonii OX=152297 GN=queG P E=3 SV=1
MSNPTPDYEKLALQIKTWGQELGFSEVGITDIDLSKHEAQLQRWLDAGYHGSMDYMAAHGMKRARPAELVPGTQRVISVKMNYLPPDAGFAKTLKNKEKAYISRYALGRDYHKLMRNRLKKLGQKIEQEVGEYGFRPFVDSAPVLERQLAEKAGLGWRGKHSLLINQEAGSWFFLGELFIDLPLPIDAENTFEGCGKCVACITLCPTGAIVEPYVVDARKCISYLTIEHQGPIPEQYRSLLGNRVYGCDDCQLVCPWNRYGQITDENDFHPRTQLKDKDLLELFAWDEPTFLKNTEGSPIRRIGHERWLRNLAVGLGNAEFSPAIINALQDKSQICSELVLEHIEWALAQQNDKQRLQIRKTARLIRIVEKGLPRDA

SEQ ID NO: 79848 - protein, 377 aa, Pseudoalteromonas lipolytica
  misc_feature (1)..(377): tr|A0A0P7DS41|A0A0P7DS41_9GAMM Epoxyqueuosine reductase OS=Pseudoalteromonas lipolytica OX=570156 GN=queG PE=3 SV=1
MTTPAIDYEHLALQIKQWGKDLGFAEVGITDIDLTKHEAQLQRWLDLGYHGEMEYMAAHGMKRARPAELVLGTQRVISVKMNYLPPDASFAKNLKQTDKAYISRYALGRDYHKLIRNRLKKLGQQIEQHIGQLGFRPFVDSAPVLERQLAEKAGLGWRGKNSLLINKEAGSWFFLGELFVDIPLPIDEENSFEGCGKCVACMTLCPTGAIVEPYVVDARKCISYLTIELQGAIPEEYRPLLGNRVYGCDDCQLVCPWNRYGQLTDEADFHPRKQLKDQDLLTLFAWDEATFLKNTEGSPIRRIGHERWLRNLAVGLGNADYNEQIIEALEQRLTTATALVAEHIEWALDQQKNKRQLKLRKTARLIRIVEKGLPRDA

SEQ ID NO: 79849 - protein, 383 aa, Pseudoalteromonas lipolytica
  misc_feature (1)..(383): tr|Z5XPH3|Z5XPH3_9GAMM Epoxyqueuosine reductase OS=Pseu doalteromonas lipolytica SCSIO 04301 OX=1452721 GN=queG PE=3 SV=1
MATFLFTVTTPIDYQQLAQQIKQWGKDLGFAEVGITDIDLTQHEAQLQRWLDLGYHGDMEYMAAHGMKRARPAELVPGTQRVISVKMNYLPPDASFAKNLKQTEKAYISRYALGRDYHKLIRNRLKKLGQKIEQQVGQLGFRPFVDSAPVLERQLAEKAGLGWRGKHSLLINKEAGSWFFLGELFVDIPLPIDNENTFEGCGKCVACMTLCPTGAIVEPYVVDARKCISYLTIELQGPIPEEYRSLLGNRVYGCDDCQLVCPWNRYGQITDEADFHPRTQLKDQDLLTLFAWDEATFLKNTEGSPIRRIGHERWQRNLAVGLGNADYSDTIIIALKKALQSATPLVAEHIEWALSQQQNKRQLKLRKTARLIRIVEKGLPRDA

SEQ ID NO: 79850 - protein, 389 aa, Pseudoalteromonas luteoviolacea
  misc_feature (1)..(389): tr|A0A1C0TQ58|A0A1C0TQ58_9GAMM Epoxyqueuosine reductase OS=Pseudoalteromonas luteoviolacea OX=43657 GN=queG PE =3 SV=1
MCVLTLQNRHSVDKARPTINYTELAEKIKYWGKELGFAEVGISDIDLSEHENQLQRWLDLGYHGEMEYMAAHGMKRARPAELVPGTKSIVSVKMNYLPPDASFARALKNNSTAYISRYALGRDYHKVLRNRLKKLGQRIEQEVGQYGFRPFVDSAPVLERQIAEKAGLGWRGKNSLLIHKQAGSWFFLGELFVDLPLPADSNKVEEGCGKCNACISLCPTGAIVEPYVVDARRCISYLTIELQGPIPEEFRSLLGNRIYGCDDCQLVCPWNRFGQLTDEADFHPRKTIKDREMLELFAWDESTFLKNTEGSPIRRIGHERWLRNLAVGLGNADFDENIVLALSQKLRSATPLVAEHIQWALAQQKQKQQDERKKARLIRIIEKGLPRDA

SEQ ID NO: 79851 - protein, 378 aa, Pseudoalteromonas luteoviolacea
  misc_feature (1)..(378): tr|A0A167NXT5|A0A167NXT5_9GAMM Epoxyqueuosine reductase OS=Pseudoalteromonas luteoviolacea S4060-1 OX=1365257 GN=queG PE=3 SV=1
MDKARPTINYTELAEKIKYWGKELGFAEVGISDIDLSEHENQLQRWLDLGYHGEMEYMAAHGMKRARPAELVPGTKSIVSVKMNYLPPDASFARALKNSTTAYISRYALGRDYHKVLRNRLKKLGQRIEQEVGQYGFRPFVDSAPVLERQIAEKAGLGWRGKNSLLIHKQAGSWFFLGELFVDLPLPADDIKVEEGCGKCNACISLCPTGAIVEPYVVDARRCISYLTIELQGAIPEEFRPLLGNRIYGCDDCQLVCPWNRFGQLTEEADFHPRKTIKDREMLELFAWDESTFLKNTEGSPIRRIGHERWLRNLAVGLGNADFNDNIIRALSDKLQSASPLVAEHIQWAITQQKQKQQDQRKKARLIRIVEKGLPRDA

SEQ ID NO: 79852 - protein, 376 aa, Pseudoalteromonas marina
  misc_feature (1)..(376): tr|U1K4A2|U1K4A2_9GAMM Epoxyqueuosine reductase OS=Pseu doalteromonas marina DSM 17587 OX=1117316 GN=queG PE=3 SV=1
MSNLTPDYPKLAQQIKAWGKELGFSEVGITDIDLSKHEQQLQRWLDAGFHGSMDYMAAHGMKRARPDELIPGTQRVISVKMNYLPPDAGFAKTLKNKQKAYISRYALGRDYHKLIRNRLKKLGQKIEQEVGEYGFRPFVDSAPVLERQLAEKAGLGWRGKHSLLINKEAGSWFFLGELFIDLPLPIDNENTFEGCGKCVACITLCPTGAIVEPYVVDARKCISYLTIEHQGPIPEQYRALLGNRVYGCDDCQLVCPWNRYGQITDERDFHPRTQLKDKDLLELFSWDETTFLKNTEGSPIRRIGHERWLRNLAVGLGNANFDPGIVSALEQKIDGCSDLVKEHIQWALEQQNNKQPSLRKTQRLIRIVEKGLPRDA

SEQ ID NO: 79853 - protein, 377 aa, Pseudoalteromonas neustonica
  misc_feature (1)..(377): tr|A0A558IRC9|A0A558IRC9_9GAMM Epoxyqueuosine reductase OS=Pseudoalteromonas neustonica OX=1840331 GN=queG PE= 3 SV=1
MSSSISDHTQLALDIKQWGKELGFAEVGITDIDLSKHEAQLQRWLDLGYHGDMEYMAAHGMKRARPAELVPGTVRVISVKMNYLPPDASFAKTLKNTDKAYISRYALGRDYHKLMRNRLKKLGQKIELQIGQLGYRPFVDSAPVLERQLAEKAGLGWRGKHSLLINKEAGSWFFLGELFVDIPLPIDKPNEFEGCGKCVACITLCPTGAIVEPYVVDARKCISYLTIELQGPIPEQYRSLLGNRVYGCDDCQLVCPWNRYGQITDEADFHPRTQLKDKDLLDLFSWDEATFLKNTEGSPIRRIGHQRWLRNIAVGLGNAQFSQSIVDALSASYDQSTELVKEHIEWALKQQHSKQDKLLRKTSRLIRIVEKGLPRDA

SEQ ID NO: 79854 - protein, 379 aa, Pseudoalteromonas nigrifaciens
  misc_feature (1)..(379): tr|A0A379H7M3|A0A379H7M3_9GAMM Epoxyqueuosine reductase OS=Pseudoalteromonas nigrifaciens OX=28109 GN=queG PE= 3 SV=1
MHVSDAVPDYKNLAQQIKAWGQELGFSEVGITDIDLSKHETQLQRWLDAGYHGNMDYMAAHGMKRARPAELVPGTQRVISVKMNYLPPDAGFAKTLKNSEKAYISRYALGRDYHKLMRNRLKKLGQKIELEIGEYGFRPFVDSAPVLERQLAEKAGLGWRGKHSLLINKEAGSWFFLGELFVDLPLPIDAENTFEGCGKCVACITLCPTGAIVEPYVVDARKCISYLTIELQGPIPEQYRTLLGNRIYGCDDCQLVCPWNRYGQLTDENDFHPRTQLKDKDLLELFAWDEATFLKNTEGSPIRRIGHERWLRNLAVGLGNAEFSPSIIHALEDKSLACSELVLEHINWALQQQRNKQGTILRKTARLIRIVEKGLPRDA

SEQ ID NO: 79855 - protein, 377 aa, Pseudoalteromonas peptidolytica
  misc_feature (1)..(377): tr|A0A510U8C3|A0A510U8C3_9GAMM Epoxyqueuosine reductase OS=Pseudoalteromonas peptidolytica OX=61150 GN=yjeS PE =3 SV=1
MTTNNINYSELAEQIKQWGQALGFAEVGITDIDLSQHEAQLQRWLDAGYHGEMAYMAAHGMKRARPQELVPGTQRIISVKMNYLPPDASFAKALGNKTTAYISRYALGRDYHKVMRNKLKQLGKMIEQQVGSLGFRPFVDSAPVLERQIAQKAGLGWQGKNSLVINKQAGSWFFLGELFVDIPLPIDKPHEDEGCGRCTACLTLCPTGAIVAPYVVDARRCISYLTIELQGAIPEQFRAKIGNRVYGCDDCQLVCPWNRYGQLTQEDDFLPRQHLKDKDLLTLFAWSEETFLKNTEGSPIRRIGHERWLRNLAVGLGNAPYNEEIIRALEDKRQSTTALVIEHIDWALQQQRDKCAQSTRKNERLIRIIEKGLPRDA

SEQ ID NO: 79856 - protein, 377 aa, Pseudoalteromonas phenolica
  misc_feature (1)..(377): tr|A0A4Q7IS28|A0A4Q7IS28_9GAMM Epoxyqueuosine reductase OS=Pseudoalteromonas phenolica OX=161398 GN=queG PE=3 SV=1
MTATYIDYIELAAKIKQWGKEFGFAEVGITDIDLSEHEAQLQRWLDNGYHGEMSYMAAHGMKRARPAELVPGTQRIISVKMNYLPPEASFAKALANKTTAYISRYALGRDYHKVIRNKLKKLGQKIEQEVGQFGFRPFVDSAPVLERQLAEKAGLGWRGKNSLLIHKQAGSWFFLGELFVDLPLPTDEPNNEEGCGKCTACLTLCPTGAIVEPYVVDARKCISYLTIELQGPIPKQYRPLLGNRVYGCDDCQLVCPWNRFGQLTQEDDFTPRKNLKDQELLTLFNWTEETFLKNTEGSPIRRIGFERWQRNLAVGLGNAPFNQDIIDKLVLALPNSSELVQEHIEWALTQQRSKKEELDRKQARLIRIIEKGLPRDA

SEQ ID NO: 79857 - protein, 377 aa, Pseudoalteromonas phenolica
  misc_feature (1)..(377): tr|A0A0S2K5A9|A0A0S2K5A9_9GAMM Epoxyqueuosine reductase OS=Pseudoalteromonas phenolica OX=161398 GN=queG PE=3 SV=1
MTATKIDYIELAAKIKQWGKEFGFAEVGITDIDLSEHEAQLQRWLDNGYHGEMSYMAAHGMKRARPAELVPGTQRIISVKMNYLPPEASFAKALGNKETAYISRYALGRDYHKVIRNKLKKLGQKIEQEVGQFGFRPFVDSAPVLERQLAEKAGLGWRGKNSLLINKQAGSWFFLGELFVDLPLPIDESNKEEGCGKCTACLTLCPTGAIVEPYVVDARKCISYLTIELQGPIPEQYRPLLGNRVYGCDDCQLVCPWNRFGQLTQEDDFAPRKNLKDQELLTLFSWTEDTFLKNTEGSPIRRIGFERWQRNLAVGLGNAPFNQTIVDALESAFHQSSDLVKEHIEWALEQQRQKQCDEDRKQLRLIRIIEKGLPRDA

SEQ ID NO: 79858 - protein, 379 aa, Pseudoalteromonas piratica
  misc_feature (1)..(379): tr|A0A0A7EI19|A0A0A7EI19_9GAMM Epoxyqueuosine reductase OS=Pseudoalteromonas piratica OX=1348114 GN=queG PE=3 SV=1
MSTLNYPNLVAKIKLWAQELGFDQVSITDIDLSQHEAQLQRWLDAGYHGEMEYMAAHGMKRARPAELVPGTQRVISVRMNYLPPDASFAKDLKNKETAYISRYALGRDYHKLMRNRLKQLGKKLEQELEQYQLTLGFRPFVDSAPVLERQLAEKAGLGWTGKHTLILNQEAGSWFFLGELFVDLPLPVNEEIVEDKCGNCVACITSCPTGAIVEPYVVDARRCISYLTIEKQGVIPEEFRSLLGNRIYGCDDCQLVCPWNRYGQLTKEDDFHIRNQLKSQDLLTLFAWDEATFLKSTEGSAIRRIGIERWRRNIAVALGNAPYSEEVITSLEAAKHDASAMLLEHIEWALSQQQQKITVKDNKTQRLIRIVEKGLPRDA

SEQ ID NO: 79859 - protein, 377 aa, Pseudoalteromonas piscicida
  misc_feature (1)..(377): tr|A0A0F4PAT2|A0A0F4PAT2_PSEO7 Epoxyqueuosine reductase OS=Pseudoalteromonas piscicida OX=43662 GN=queG PE=3 S V=1
MTTDNINYSELAAQIKQWGQELGFAEVGITDIDLRDHEAQLQRWLDAGYHGEMAYMAAHGMKRARPAELVPGTQRIISVKMNYLPPDASFARALGNKTTAYISRYALGRDYHKVMRNKLKQLGQKIEQEVGMLGFRPFVDSAPVLERQIAEKAGLGWRGKNSLVINKQAGSWFFLGELFVDIPLPIDKPNQEEGCGRCTACLTLCPTGAIVEPYVVDARRCISYLTIELQGAIPEEFRAKMGNRIYGCDDCQLVCPWNRYGQITEEADFLPRTQLKDQQLLSLFAWDEATFLKNTEGSPIRRIGHERWLRNLAVGLGNAQYDEAIVIALEEKRQSATPLVIEHIDWALEQQRQKSDQHERKKARLIRIIEKGLPRDA

SEQ ID NO: 79860 - protein, 377 aa, Pseudoalteromonas piscicida
  misc_feature (1)..(377): tr|A0A290TWW0|A0A290TWW0_PSEO7 Epoxyqueuosine reductase OS=Pseudoalteromonas piscicida OX=43662 GN=queG PE=3 S V=1
MTTDNINYSELAAQIKQWGQELGFAEVGITDIDLREHEAQLQRWLDAGYHGEMAYMAAHGMKRARPAELVPGTQRIISVKMNYLPPDASFARALGNKTTAYISRYALGRDYHKVMRNKLKQLGQKIEQEVGTLGFRPFVDSAPVLERQIAEKAGLGWRGKNSLVINKQAGSWFFLGELFVDIPLPIDKPNQEEGCGRCTACLTLCPTGAIVEPYVVDARRCISYLTIELQGAIPEEFRAKMGNRIYGCDDCQLVCPWNRYGQITEEADFLPRTQLKDQQLLSLFAWDEATFLKNTEGSPIRRIGHERWLRNLAVGLGNAQYDEAIVIALEDKRQSATPLVIEHIDWALEQQRQKSDQHERKKARLIRIIEKGLPRDA

SEQ ID NO: 79861 - protein, 377 aa, Pseudoalteromonas porphyrae
  misc_feature (1)..(377): tr|A0A0N1ERI0|A0A0N1ERI0_9GAMM Epoxyqueuosine reductase OS=Pseudoalteromonas porphyrae OX=187330 GN=queG PE=3 SV=1
MTSQSPDYNELAQQIKLWGQELGFSEVGITDVDLSKHEAQLQRWLDLGYHGDMEYMAAHGMKRARPAELVPGTQRVISVKMNYLPPDASFAKNLKNTDKAYISRYALGRDYHKLMRNRIKKLGQKIEQHIGQFGYRPFVDSAPVLERQLAEKAGLGWQGKHSLLINKEAGSWFFLGELFVDIPLPIDKPNEIEGCGKCVACITLCPTGAIVEPYVVDARKCISYLTIELQGPIPEQYRPLLGNRIYGCDDCQLVCPWNRYGQITDEADFHPRTQLKDQDLVSLFSWDEVTFLKNTEGSPIRRIGHERWRRNIAVGLGNAQFNQAIIDILLITRETSSDLVKEHIDWALTQQKSKQDKLLRKTARLIRIVEKGLPRDA

SEQ ID NO: 79862 - protein, 377 aa, Pseudoalteromonas profundi
  misc_feature (1)..(377): tr|A0A3A3ER95|A0A3A3ER95_9GAMM Epoxyqueuosine reductase OS=Pseudoalteromonas profundi OX=1774956 GN=queG PE=3 SV=1
MTTPAIDYEQLALQIKQWGKDLGFAEVGITDIDLTKHEAQLQRWLDLGYHGEMEYMAAHGMKRARPAELVPGTQRVISVKMNYLPPDASFAKNLKQTDKAYISRYALGRDYHKLIRNRLKKLGQQIEQHIGQLGFRPFVDSAPVLERQLAEKAGLGWRGKHSLLINKEAGSWFFLGELFVDIPLPIDEENSFEGCGKCVACMTLCPTGAIVEPYVVDARKCISYLTIELQGAIPEEYRPLLGNRVYGCDDCQLVCPWNRYGQITDEADFHPRTQLKDQDLLALFVWDEATFLKNTEGSPIRRIGHERWLRNLAVGLGNADYNEQIIDALEQRLTTASALVAEHIEWALDQQKNKRQLKLRKTARLIRIVEKGLPRDA

SEQ ID NO: 79863 - protein, 382 aa, Pseudoalteromonas rubra
  misc_feature (1)..(382): tr|A0A4Q7EB65|A0A4Q7EB65_9GAMM Epoxyqueuosine reductase OS=Pseudoalteromonas rubra OX=43658 GN=queG PE=3 SV=1
MTTTTHSSVDINYTELAQKIKLWGKELGFAEVGITDIDLSEHEAQLQRWLDNGYHGEMEYMAAHGMKRARPAELVPGTQRVISVKMNYLPPDASFARALKSKQTAYISRYALGRDYHKVIRNRLKKLGQRIEQEVGQFGFRPFVDSAPVLERQLAEKAGLGWRGKNSLLIHKQAGSWFFLGELFVDLPLPVDNNPQEEGCGKCNACMTLCPTGAIVEPYVVDARKCISYLTIELQGPIPEQYRPLLGNRVYGCDDCQLVCPWNRYGQLTDEQDFHPRKQLKDQELLTLFLWDEETFLKHTEGSPIRRIGHERWLRNLAVGLGNAQPDAQIIEALEARLASASELVREHINWALTQQRSKQAQQQRKQARLIRIIEKGLPRDA

SEQ ID NO: 79864 - protein, 382 aa, Pseudoalteromonas rubra
  misc_feature (1)..(382): tr|U1KLJ1|U1KLJ1_9GAMM Epoxyqueuosine reductase OS=Pseu doalteromonas rubra DSM 6842 OX=1117318 GN=queG PE=3 SV =1
MTTTTHSSVDINYTELAQKIKLWGKELGFAEVGITDIDLSEHEAQLQRWLDNGYHGEMEYMAAHGMKRARPAELVPGTQRVISVKMNYLPPDASFARALSNKQTAYISRYALGRDYHKVIRNRLKKLGQRIEQDVGQFGFRPFVDSAPVLERQLAEKAGLGWRGKNSLLIHKQAGSWFFLGELFVDLPLPVDSNPQEEGCGKCNACITLCPTGAIVEPYVVDARKCISYLTIELQGPIPEQYRPLLGNRVYGCDDCQLVCPWNRYGQLTDEEDFHPRQQLKDQELLTLFQWDEATFLKNTEGSPIRRIGHERWLRNLAVGLGNAEPDEQIIQVLEARLESASDLVKEHIIWALAQQRAKHTEQQRKNARLIRIIEKGLPRDA

SEQ ID NO: 79865 - protein, 389 aa, Pseudoalteromonas ruthenica
  misc_feature (1)..(389): tr|A0A0F4Q231|A0A0F4Q231_9GAMM Epoxyqueuosine reductase OS=Pseudoalteromonas ruthenica OX=151081 GN=queG PE=3 SV=1
MPNNTINYPELAQQIKQWASELGFADAAICDIDLSAHEAQLQRWLELGYHGEMNFMAEHGTKRSRPDELVPGTQRVIALKMHYLPPDAGFARTLKNPQLAYISRYALGRDYHKLMRNRIKKLGQRIAQVAEGLGFRPFVDSAPVLERQLAAKAGLGFTGKHSLLIDKQAGSWFFLGELFVDIPLPVDDPDIRQATQGECGSCVACMTMCPTGAIVEPYVIDARKCISYLTIELKGAIPEQYRTAMGNRIYGCDDCQLICPWNRYGEITAESDFHARAQLKDQPLLTLFSWDEETFLTNTEGSPIRRIGHQRWLRNIAIALGNAPYDSAIVEALMARLNGASDLVAEHIHWALAQQQQKREALSVTVTAHTKKTQRLIRAVQKGLPRDAE

SEQ ID NO: 79866 - protein, 377 aa, Pseudoalteromonas sp.
  misc_feature (1)..(377): tr|A0A2D5T4X3|A0A2D5T4X3_PSEAS Epoxyqueuosine reductase OS=Pseudoalteromonas sp. OX=53249 GN=queG PE=3 SV=1
MTATKIDYIELAAKIKQWGKEFGFAEVGITDIDLSEHEAQLQRWLDKGYHGEMSYMAAHGMKRARPAELVPGTQRIISVKMNYLPPEASFAKALANKDTAYISRYALGRDYHKVIRNKLKKLGQKIEQEVGQLGFRPFVDSAPVLERQLAEKAGLGWRGKNSLLINKQAGSWFFLGELFVDLPLPVDEPNNEEGCGKCTACLTLCPTGAIVEPYVVDARKCISYLTIELQGPIPEQYRPLLGNRVYGCDDCQLVCPWNRFGQLTSEDDFAPRKNLKDQELITLFNWNEETFLKNTEGSPIRRIGFERWQRNLAVGLGNAPFSAVIIETLEKAKSDSSELVKEHIEWALKQQRQKQNEIDRKQARLIRIIEKGLPRDA

SEQ ID NO: 79867 - protein, 377 aa, Pseudoalteromonas sp.
  misc_feature (1)..(377): tr|A0A3Q8X1H3|A0A3Q8X1H3_9GAMM Epoxyqueuosine reductase OS=Pseudoalteromonas sp. Xi13 OX=2490635 GN=queG PE=3 SV=1
MSNSTPNYQQLAKNIKAWGQELGFSEVGITDIDLSKHEAQLQRWLDAGYHGSMDYMAAHGMKRARPAELVPGTQRVISVKMNYLPPDASFAKTLKNTEKAYISRYALGRDYHKLMRNRLKKLGQKIEQEIGDYGFRPFVDSAPVLERQLAEKAGLGWRGKHSLLINQEAGSWFFLGELFVDLPLPIDNENTFEGCGKCVACITLCPTGAIVEPYVVDARKCISYLTIEHQGPIPEQYRALLGNRVYGCDDCQLVCPWNRYGQITDEQDFHPRTQLKNKDLLELFAWDEPTFLKNTEGSPIRRIGHERWLRNLAVGLGNADFSPSIINALESKHESSSQLVKEHIEWALEQQNNKQREQLRKTQRLIRIVEKGLPRDA

SEQ ID NO: 79868 - protein, 371 aa, Pseudoalteromonas spongiae
  misc_feature (1)..(371): tr|A0A290T0F7|A0A290T0F7_9GAMM Epoxyqueuosine reductase OS=Pseudoalteromonas spongiae UST010723-006 OX=1117319 GN=queG PE=3 SV=1
MVEKIKLWAKELGFDQVSITDIDLSQHEAQLQRWLDAGYHGEMEYMAAHGMKRARPAELVPGTQRVISVRMNYLPPDASFAKDLKNKQTAYISRYALGRDYHKLMRNRLKQLGKKLEQELEQHQITLGFRPFVDSAPVLERQLAEKAGLGWTGKHTLILNQEAGSWFFLGELFVDLPLPVNEETVENKCGSCVACITSCPTGAIVEPYVVDARRCISYLTIEKQGAIPEEFRSLLGNRIYGCDDCQLVCPWNRYGQLTAENDFHIRKHLKSQDLLTLFAWDEATFLKNTEGSAIRRIGIERWRRNIAVALGNADANNDIINALERAKSDASEMLLEHIHWALAQQHNKTAQRDNKTKRLIRIIEKGLPRDA

SEQ ID NO: 79869 - protein, 377 aa, Pseudoalteromonas tetraodonis
  misc_feature (1)..(377): tr|A0A1E3WTY4|A0A1E3WTY4_9GAMM Epoxyqueuosine reductase OS=Pseudoalteromonas tetraodonis OX=43659 GN=queG PE=3 SV=1
MSDVKPNYEQLAQQIKLWGQQLGFSEVGITDIDLTKHEAQLQRWLDAGYHGSMDYMAAHGMKRARPSELVPGTQRVISVKMNYLPPDSGFAKNLKNTEKAYISRYALGRDYHKLMRNRLKQLGKKIEQQVGDYGFRPFVDSAPVLERQLAEKAGLGWRGKHSLLINKEAGSWFFLGELFVDLPLPIDDENTFEGCGKCVACITLCPTGAIVEPYVVDARKCISYLTIEHQGAIPEQYRTLMGNRIYGCDDCQLVCPWNRYGQITDEQDFHPRTQLKNKDLLALFAWDETTFLTNTEGSPIRRIGHERWLRNIAVGLGNADFSPAIIHALEDKRKTVSDMVNEHIEWALTQQHDKQRQKLRKTARLIRIVEKGLPRDA

SEQ ID NO: 79870 - protein, 379 aa, Pseudoalteromonas translucida
  misc_feature (1)..(379): tr|A0A0U2X254|A0A0U2X254_9GAMM Epoxyqueuosine reductase OS=Pseudoalteromonas translucida KMM 520 OX=1315283 GN =queG PE=3 SV=1
MHVSDAVPDYKNLAQQIKVWGQELGFSEVGITDIDLSKHETQLQRWLDAGYHGNMDYMAAHGMKRARPAELVPGTQRVISVKMNYLPPDAGFAKTLKNSDKAYISRYALGRDYHKLMRNRLKKLGQKIELEIGEYGFRPFVDSAPVLERQLAEKAGLGWRGKHSLLINKEAGSWFFLGELFVDLPLPIDAENTFEGCGKCVACITLCPTGAIVEPYVVDARKCISYLTIELQGPIPEQYRTLLGNRVYGCDDCQLVCPWNRYGQLTDENDFHPRTQLKDKDLLELFAWDEATFLKNTEGSPIRRIGHERWLRNLAVGLGNAEFSPSIIHALEDKSLACSELVLEHINWALQQQRNKQGTILRKTARLIRIVEKGLPRDA

SEQ ID NO: 79871 - protein, 375 aa, Pseudoalteromonas tunicata
  misc_feature (1)..(375): tr|A4C8M0|A4C8M0_9GAMM Epoxyqueuosine reductase OS=Pseu doalteromonas tunicata D2 OX=87626 GN=queG PE=3 SV=1
MTTATINYPELAIKIKQWGQELGFAEVAISDIDLTEHEAQLQRWLDLGFHGEMEYIAAHGMKRARPAELVPGTQRVICVRMDYLPPDASFAKTLQDPKKAYISRYALGRDYHKLIRTRLKKLGEKIELEVGQFGFRPFVDSAPVLERQLAQKAGLGWTGKHTLILNQHAGSWFFLGELFVDLPLPIDKPVIEQCGKCVACIKICPTNAIVEPYVVDARRCISYLTIELQGAIPIEFRPLIGNRVYGCDDCQLICPWNRYGQITAEDDFHARTQLKDKDLIELFLWDEATFLKNTEGSAIRRIGHERWLRNMAVGLGNASYDPSILAVLEDMKSKVSSLVLEHIEWAITQQLQKNSLDRKTQRLIIAIEKGLPRDA

SEQ ID NO: 79872 - protein, 408 aa, Pseudoalteromonas ulvae
  misc_feature (1)..(408): tr|A0A244CR47|A0A244CR47_9GAMM Epoxyqueuosine reductase OS=Pseudoalteromonas ulvae OX=107327 GN=queG PE=3 SV=1
MYRQLELHAAELVPLHRRFVVNYQCTFFSYGSSVTAPNINYPELALQIKQWGTELGFDQVAISDIDLSEHESQLKRWLALGYHGEMEYMAAHGMKRARPAELVPGTQRVICVRMNYLPPDASFAKNLKNTDKAYISRYALGRDYHKLMRNRLKKLGERIEQQVGQFGFRPFVDSAPVLERQLAEKSGLGWTGKHSLILNQEAGSWFFLGELFIDLPLPIDGPVEEKCGSCVACIKLCPTNAIVEPYVVDARRCISYLTIELQGAIPIEFRPLIGNRVYGCDDCQLICPWNRYGQLTAEDDFHARKQLKDKDLIELFSWDETTFLKNTEGSAIRRIGHQRWLRNLAVGLGNASFNEHIISTLKEANLNASPLVSEHIEWAISEQLRKREQNKKTQRLIKAIEKGLPRDA

SEQ ID NO: 79873 - protein, 316 aa, Pseudobacter ginsenosidimutans
  misc_feature (1)..(316): tr|A0A4Q7MFE0|A0A4Q7MFE0_9BACT Epoxyqueuosine reductase OS=Pseudobacter ginsenosidimutans OX=661488 GN=queG PE =3 SV=1
MQVPRSPMSPIEKNTLLIKQAASRLGFSYCGIAKAVPLDEDARRLEAWLNQGMQGNMKYMENHFELRVDPSRLVPGARSVITLLMNYYPAQAQQEETPKVSKYAFGKDYHEVIRAKLNQLLATMNQEIGAVTGRGFVDSAPVMERSWAQRSGLGWIGRNGNLINKQQGSFFFIATLIVDIPLLYDDPIAKDYCGTCRKCIDACPTGAIHENKVIDGSKCISYFTIELKEMMIPESMQGKFDNWMFGCDTCQDVCPWNRFSVSNTEPEFTPLPELLEFSLQDWQELTEESFKKIFRHSPLKRAKFEGIRRNLRFLQQ

SEQ ID NO: 79874 - protein, 353 aa, Pseudobacteriovorax antillogorgiicola
  misc_feature (1)..(353): tr|A0A1Y6B5S4|A0A1Y6B5S4_9PROT Epoxyqueuosine reductase OS=Pseudobacteriovorax antillogorgiicola OX=1513793 GN =SAMN06296036_101245 PE=4 SV=1
MAKLKDRNYFSELFAEQGLLLIGHVPLVGDDRHFSRFEQWLSRGHHAGMSFMENHRAIRRDPRLLQEGLQSSLVFGLNYYQGDRLHSSNTRVAQYARFQDYHKLLRKKAQKLLGQLSESIPQLEGRVTIDSAPLLERALASRSQSGFIGKNTCFILPREGSFYLLGELHLNQQLFPFDKPAVVDPQQRSEEGGCGTCKRCQVNCPTGALDEDYTLDAKLCLSYWTIEHRGLVPTKFWPWFAKYWYGCDICQLACPYNRKASINIQLPLKSQLADLDLFQVATMDQGFYEATFGGSPMTRAKRVGLQRNALIALFVTQDERLDSAIGMIERDNEQNGVLRDTIKQIRAELSCDR

SEQ ID NO: 79875 - protein, 399 aa, Pseudochrobactrum asaccharolyticum
  misc_feature (1)..(399): tr|A0A366DVB0|A0A366DVB0_9RHIZ Epoxyqueuosine reductase OS=Pseudochrobactrum asaccharolyticum OX=354351 GN=que G PE=3 SV=1
MATSISDRTPKKPLPKSDEPPAVRLKRFLTEEAAAVGFDVVAITTPDAIPEAPQRLRYFLDHGRHGSMEWLEETADRRSNPSELWHEVRSIVMLAMNYGPDHDPRTLQDKKDCGAISVYAQNRDYHDIIKGKLKHMASRFAARTGHEVKVFVDTAPVMEKPLAVSAGMGWQGKHTNMVSREYGSWLFLGSIFTTADLEPDHAGKDSCGRCRACLDACPTNAFPAPYQIDARRCISYLTIENKGPIPHEFRSMMGNRIYGCDDCLSACPWNKFAQVSREAKLQAREELKEPSLEQLLQLDDPAFRTLFSGSPVKRIGRDRFIRNVLIAAGNSDNPAYIPIIEQLLDDPVPVTRGAAVWALSRLASEAEFLRHKNQHLPLEQEAEVIEEWLHAATQSEKDQ

SEQ ID NO: 79876 - protein, 379 aa, Pseudocitrobacter faecalis
  misc_feature (1)..(379): tr|A0A366F7V2|A0A366F7V2_9ENTR Epoxyqueuosine reductase OS=Pseudocitrobacter faecalis OX=1398493 GN=queG PE=3 SV=1
MSQPLDLNQLAQQIKQWGTELGFQQVGITDTDLSASEPKLQAWLDKQYHGEMEWMARHGMMRARPHELLPGTLRVISVRMNYLPANAAFASTLKNPELGYISRYALGRDYHKLLRNRLKKLGELIQEQCVSLNFRPFVDSAPILERPLAEKAGIGWTGKHSLILSRDAGSFFFLGELLIDLPLPIDKPVVEECGRCVACMTICPTGAIVEPYTVDARRCISYLTIELEGAIPEEFRPLMGNRIYGCDDCQLICPWNRFSQLTDEADFSPRKALHAPELIELFAWDEARFLKLTEGSPIRRIGHLRWLRNIAVALGNAPWNKAVIEALETRRGEHPLLDEHIEWAIAQQIEKRNACVVEVQLPKKQRLVRVVEKGLPRDA

SEQ ID NO: 79877 - protein, 379 aa, Pseudocitrobacter sp.
  misc_feature (1)..(379): tr|A0A5B0K1I7|A0A5B0K1I7_9ENTR Epoxyqueuosine reductase OS=Pseudocitrobacter sp. 73 OX=2605731 GN=queG PE=3 SV =1
MSQPLDLNQLAQQIKQWGTELGFQQVGITDTDLSASEPKLQAWLDKQYHGEMEWMARHGMMRARPHELHPGTLRVISVRMNYLPANAAFASTLKNPDLGYISRYALGRDYHKLLRNRLKKLGEMIQEQCVSLNFRPFVDSAPILERPLAEKAGIGWTGKHSLILNRDAGSFFFLGELLIDLPLPIDEPVEEACGRCVACMTICPTGAIVEPYTVDARRCISYLTIELEGAIPEEFRPLMGNRIYGCDDCQLICPWNRFSQLTDEADFSPRKALHAPELIELFAWDEAWFLKVTEGSPIRRIGHLRWLRNIAVALGNAPWSEAVIQALETRRGEHPLLDEHIEWAIAQQIEKRNACVVEVQLPKKQRLVRVIEKGLPRDA

SEQ ID NO: 79878 - protein, 318 aa, Pseudoclostridium thermosuccinogenes
  misc_feature (1)..(318): tr|A0A2K2F9S3|A0A2K2F9S3_9FIRM tRNA epoxyqueuosine(34) reductase QueG OS=Pseudoclostridium thermosuccinogenes OX=84032 GN=queG PE=4 SV=1
MKDELMDFCRSLGIEYAGIAHPGPYHELEKIWSKRLAEGHYTGFEEMDISKRIDPRLTLEDAQSVIVCLFPYFTGLSAHANLSKSAFSIDYHIIIKKKLEQIGEFLSSRIDGFKYKAFVDNGPLVDRYMAYLAGLGYYGINGHIINDKFGSYVFIGYIINNHPFSQDQPMDRTCIKCGLCVKSCPGCAILGNFDINPLRCRSYITQKKDELTELEKDILTKHHLIYGCDICQDVCPHNRKVQHTGIEEFKDNLKYSIDYDELREISNREFMRRYRDRAFSWRGKKLLLRNFELIRNAKKDAAPQNPDGCQENMQRLLS

SEQ ID NO: 79879 - protein, 323 aa, Pseudoclostridium thermosuccinogenes
  misc_feature (1)..(323): tr|A0A2K2F3H4|A0A2K2F3H4_9FIRM 4Fe-4S ferredoxin-type d omain-containing protein OS=Pseudoclostridium thermosuc cinogenes OX=84032 GN=CDQ84_07475 PE=4 SV=1
MGGMHLFSFKSNNGGKKKVESVCNSIKEEAMRYGYRLQLIDIRHLDDLEREIKTFQQIEELNGFQKWIVNELYDFHVPKLEFQVKSIIIMAVYHPMSTDVTFCYAGRNYEAKALVRAGLDRAREYLKEGLSRWGYHAKESYNLPMKRLAVHGGLAVYGRNNITYVEGLGSNVSYLAFFSDMPCEEDVWLELKVADLCAQCKCCIESCPTGAIREDRFLIDNQKCLSFFNESEGEFPDWLSKEVHHTLYDCLRCQEHCPLNASVVEDNIDGITFTEEETRMLLQGKGPEDFPKEFLNKVEKIDLFKWKNTLSRNMRAIMESKRM

SEQ ID NO: 79880 - protein, 236 aa, Pseudodesulfovibrio hydrargyri
  misc_feature (1)..(236): tr|A0A1J5NL37|A0A1J5NL37_9DELT Epoxyqueuosine reductase OS=Pseudodesulfovibrio hydrargyri OX=2125990 GN=queG_1 PE=4 SV=1
MNSEELKKFAVEAGATRARIADLDRLRGIETMPPDLLDGFRCAVSMAIALSDSIIETITDRPTPIYASHYSRVNALLDEAALRVSRYIEERGARAMPLPASQVLDAERNLSFLSHKAVAVAAGIGWQGKSLLTVSPDFGPRIRLVTVLTDADLVPDEPLRNRCGGCTKCTDACPAGAIKNVNTDSHYASRDEALHFERCLHHVRDVCASMENIKSSICGVCIKVCPWGAKKRAKAA

SEQ ID NO: 79881 - protein, 277 aa, Pseudodesulfovibrio hydrargyri
  misc_feature (1)..(277): tr|A0A1J5N5Q6|A0A1J5N5Q6_9DELT Epoxyqueuosine reductase OS=Pseudodesulfovibrio hydrargyri OX=2125990 GN=queG_2 PE=4 SV=1
MADWMADPGNNSLGPDLMLPAFDAPLLGCAAGDDPLFDFLRQDIGPDFYWTPARAFAQAFPENAPSGADLSVVSWVLPQTEHTRKAHGQNKEMPSVEWSRARHYGEKVNEALRRFVVGLFAEQGVDACAPALLPKWTRAESPRYGFASTWSERHTAHVCGLGTFGLSDGLITPRGKAIRVGSVVVRAHLTPTPRPYTRHNEWCLFHAGGKCRACMKRCPAGAITENGHDKVKCKTYIRSVTAPHVEANQLGFRVNSCGLCQVRVPCESRNPTVKRGG

SEQ ID NO: 79882 - protein, 318 aa, Pseudoflavitalea sp.
  misc_feature (1)..(318): tr|A0A3B7MY61|A0A3B7MY61_9BACT Epoxyqueuosine reductase OS=Pseudoflavitalea sp. 5GH32-13 OX=2315862 GN=queG PE =3 SV=1
MRTIEQHTTLIKTYAAQLGFDYCGIARAQRLDEDARRLESWLQQGMHGSMGYMENHFELRIDPTKLVPGAQSVITLLLNYYPAEQQDPDSLQVAKYAYGKDYHEVIREKLNRLLALIKLHIGEVQGRGFVDSAPVLERTWAQRSGLGWIGKNGNLLTKQGGSFFFIATLITDLPLRYDDPYAKDFCGTCTKCIDACPTDAILDNKVVDGSKCISYFTIELKDKLIPGEMKNKFDNWFFGCDTCQDVCPWNRFAQATQETEFSPIPELLHFTTAEWQSLTEDAFKKIFRHSPLKRSKFSGIQRNLTFVQNTFDGEGPGQ

SEQ ID NO: 79883 - protein, 278 aa, Pseudoflavonifractor capillosus
  misc_feature (1)..(278): tr|A6NR36|A6NR36_9FIRM Putative iron-sulfur cluster-bin ding protein OS=Pseudoflavonifractor capillosus ATCC 29 799 OX=411467 GN=BACCAP_00660 PE=4 SV=1
MTPELDAAFAACGAAAWGGLTWSDALPHLTPQAVEKTLTLCPTPGAVLVAAFPYYAGDTPGNLSLYARGRDYHLVLTEKLNTVCDVLRQKYLSYSFLPGADNSPLPERQLAWACGMGLRGQNGLLILPPWGSYVFLGTILTDCPLEFSTSEPSNVCISCGKCAAACPGGALDGAGFQLSRCLSDISQKKGELSPEENALLSAQECLWGCDLCQRVCPYNAHPAITPISDFREDLISSLIPADLEGLTNRTFREKYGDRAFAWRGPAVLRRNLALKENT

SEQ ID NO: 79884 - protein, 356 aa, Pseudofulvimonas gallinarii
  misc_feature (1)..(356): tr|A0A4S3KUA5|A0A4S3KUA5_9GAMM Epoxyqueuosine reductase OS=Pseudofulvimonas gallinarii OX=634155 GN=queG PE=3 SV=1
MSAIDPATLKPAILQWGRELGFQAVGIAHIDLREDEAALQRWLDLYRHGDMEWMARHGLKRARPAELVPGTMSVVCARMDYLPADAAPMQETLDDPQRAYVSRYALGRDYHKLLRGRLQKLADRIADHIGPFGYRVFTDSAPVLEKPLARNAGLGWLGKHTNLLDSKTGSWFFLGELYTDLPLASDERATDHCGTCSRCIGACPTGAIVAPYELDARLCISYLTIELQGAIPESLRPLLGNRIYGCDDCQLVCPWNKFAQPTREADFAVRNGLDQATLVELFAWDEAEFLRRTEGSPIRRIGHERWLRNIAVALGNAKGTPEVIAALQARSTHPSALVREHVTWALARHAVTNAGY

SEQ ID NO: 79885 - protein, 377 aa, Pseudogracilibacillus auburnensis
  misc_feature (1)..(377): tr|A0A2V3W3Z5|A0A2V3W3Z5_9BACI Epoxyqueuosine reductase OS=Pseudogracilibacillus auburnensis OX=1494959 GN=DFR 56_10643 PE=4 SV=1
MDVVALKKDIIAYSKEIGIDKIGFASADVFTELKERLIIQEKLNFASGFEKGTAEERTEPERLLSGAKSIISIALAYPSKIMDPPKSIKGARRGIFCRASWGIDYHHVLRDRLEKLAQYMQTNIPQFSYKSMVDTGELSDRAVAERAGIGFSGKNTTIITKEFGSFVYLGEMITNIPFIPDSPVEDSCGDCRICLDACPTGALVQGGQLNAKKCLAFQTQTKDFLPDEFRTKIGTRLYGCDTCQAVCPRNKGIDFHLHEEFEAEPEVAKPLLRPMLKISNREFREKFGHISGFWRGKNPLQRNAMIALAHFKDETAVNDLIDVMNNDVRPIIRGTAAWALGKIGTTEALIAIEEAIHKETDDRVREEMKKGLHFQEI

SEQ ID NO: 79886 - protein, 367 aa, Pseudogulbenkiania ferrooxidans
  misc_feature (1)..(367): tr|B9YZC8|B9YZC8_9NEIS Epoxyqueuosine reductase OS=Pseu dogulbenkiania ferrooxidans 2002 OX=279714 GN=queG PE=3 SV=1
MTEKSLQKPNYPELARQIKAWARELGFADARITRPQLPPEAEHTLLAWLAEGCHGEMEYMARHGVLRLRPAELVPGTLSVVSLRMHYWPGASRGADEVLADGERAYLSRYALGRDYHKVLRNRLQRLAERVQAEVGEFGHRVFTDSAPVAEVALAAQAGLGWRGKHTLLLNRRHGSLFFLGELFTDLPLPPDAAEEGHCGRCTRCLDVCPTGAIVEPYKVDARRCISYLTIELAGAIPPALRPLIGNRVYGCDDCQLACPWNRFAVPTEETDFAVRHGLDDVTLAELFGWSAADFASRMAGSPIYRIGYERWSRNLAVGLGNAPSSPAVLAALTARADDPSELVREHVQWALAQHAGRAAGGTVAAC

SEQ ID NO: 79887 - protein, 358 aa, Pseudogulbenkiania ferrooxidans
  misc_feature (1)..(358): tr|U1A847|U1A847_9NEIS Epoxyqueuosine reductase OS=Pseu dogulbenkiania ferrooxidans EGD-HP2 OX=1388764 GN=queG PE=3 SV=1
MTENPPQKPDYPELSRQIKAWAREAGFADARVTRAALPPEAEQRLEAWLAAGHHGEMDYMARHGAMRVRPAELVPGTLSVISLRMNYWPGGESAEQVLADPSRAYLSRYALGRDYHKVLRNRLQKLAERIEGAVGSFGYRVFTDSAPLAEVALASQAGLGWRGKHTLLLTKRQGSLFFLGEILTDLPLPPDEAEDGHCGRCTRCLDVCPTGAIIEPYTVDARRCISYLTIELKGPIPEPLRPLIGNRVYGCDDCQLFCPWNRFGALTAEADFAVRHGLDGASLVELFDWSADEFRERMAGSPIYRIGYHKWLSNLAVGLGNAPTTPEVVAALRRRLDFPDELVAEPVRWALARHGQSC

SEQ ID NO: 79888 - protein, 367 aa, Pseudogulbenkiania sp.
  misc_feature (1)..(367): tr|G2IZE8|G2IZE8_PSEUL Epoxyqueuosine reductase OS=Pseu dogulbenkiania sp. (strain NH8B) OX=748280 GN=queG PE=3 SV=1
MTEKSLQKPNYPELARQIKAWARELGFADARITRPQLPPEAEHTLLAWLAEGCHGEMEYMARHGVLRLRPAELVPGTLSVVSLRMHYWPGASRGADEVLADGERAYLSRYALGRDYHKVLRNRLQRLAERVQAEVGEFGHRVFTDSAPVAEVALAAQAGLGWRGKHTLLLNRRHGSLFFLGELFTDLPLPPDAAEEGHCGRCTRCLDVCPTGAIVEPYKVDARRCISYLTIELAGAIPPALRPLIGNRVYGCDDCQLACPWNRFAVPTEEADFAVRHGLDDVTLAELFGWSAADFASRMAGSPIYRIGYERWSRNLAVGLGNAPSSPAVLAALTARADDPSELVREHVQWALAQHAGRGAGGTVAAC

SEQ ID NO: 79889 - protein, 361 aa, Pseudogulbenkiania subflava
  misc_feature (1)..(361): tr|A0A1Y6BZK8|A0A1Y6BZK8_9NEIS Epoxyqueuosine reductase OS=Pseudogulbenkiania subflava DSM 22618 OX=1123014 GN =queG PE=3 SV=1
MTEKSLQNPNYPELARQIKAWACELGFADARITRPQLPPEAEHTLLAWLAEGCHGEMEYMARHGVLRLRPAELVPGTLSVVSLRMHYWPGASRGADEVLADGERAYLSRYALGRDYHKVLRNRLQRLAERVQAEVGEFGHRVFTDSAPVAEVALASQAGLGWRGKHTLLLNRRHGSLFFLGELFTDLPLPADAAEEGHCGRCTRCLEVCPTGAIVEPYKVDARRCISYLTIELAGAIPPALRPLIGNRVYGCDDCQLACPWNRFAVPTEEADFNVRHGLDDVSLAELFGWSAADFASRMAGSPIYRIGYERWSRNLAVGLGNAPSSPAVLAALTARANDPSELVREHVQWALAQHASRAAQ

SEQ ID NO: 79890 - protein, 356 aa, Pseudohaliea rubra
  misc_feature (1)..(356): tr|A0A095XVM9|A0A095XVM9_9GAMM Epoxyqueuosine reductase OS=Pseudohaliea rubra DSM 19751 OX=1265313 GN=queG PE= 3 SV=1
MTTTIASDNPAALAKRIRGWARELGFQQLGISDVDLAEHEGYLQKWLDAGYHGSMDFMAAHGTRRSRPEELVPGTCRVLSVRMDYLPPGDDPAATLDDGERAYIARYALGRDYHKVLRRRLARLARRIEAETGGGRYRAFVDSAPVLERAIAERAGLGWIAKNTMLINEQAGSWFFLGEIYTDLPLPADPPRTQKHCGSCRACLDICPTDAFPGPFELDARRCISYLTIEHKGSIDEALRPLMGNRVFGCDDCQLVCPWNKFAEATAEDDFRPRHGLDAPALAELFAWDEATFLERTAGSPIRRIGYERWLRNLAVGLGNAPGTAAVLAALEARREHPSALVREHVAWALRQHGAR

SEQ ID NO: 79891 - protein, 383 aa, Pseudohoeflea suaedae
  misc_feature (1)..(383): tr|A0A4V3A7M8|A0A4V3A7M8_9RHIZ Epoxyqueuosine reductase OS=Pseudohoeflea suaedae OX=877384 GN=queG PE=3 SV=1
MPRTIDPARLNRFLAAEAARLGFSAHGVADPSRLTKTDSRLREFLALGRHGSMEWLADRADERANPRNLWPEVRSVVMLGMNYGPQGDPLELLGRKDRAAISVYARNRDYHDLIKGRLKEFAGRLVARFGGDVKVFVDTAPVMEKPLAELAGLGWQGKHTNLVSRDCGSWLFLGAIFSTLELPADMPEKDHCGSCRACLDICPTNAFPAAYQLDARRCISYLTIEAKEQVPHEFRRAMGNRIYGCDDCLAACPWNKFAGQTNEAKLAARHDLEAPPLAELLALDDASFRSFFSGSPIKRIGRDRFIRNVLIAAGNSGQHALVEPVRAHLSDPSPLVRGMAVWALSRLLPHHEFATLAEAAVNETEPEIAAEWRAGLEPTGRPQ

SEQ ID NO: 79892 - protein, 364 aa, Pseudohongiella acticola
  misc_feature (1)..(364): tr|A0A1E8CLM3|A0A1E8CLM3_9GAMM Epoxyqueuosine reductase OS=Pseudohongiella acticola OX=1524254 GN=queG PE=3 SV =1
MTADTHTLPPDQASALLPRIRELALALGFQQLAVTDIDLSAYRPHLDAWLARNFHGDMDYMSHHRDLRLHPESLHPGTIRVLSVRMDYSLSAEQSLTPLKNRERAYISRYARGRDYHKLIRKRLQKLADGITELAGPMGYRAFVDSAPVLERALAEKAGLGWIGKNTMLLNKKAGSWFFLGELFTDLPLPIDAPVTGHCGSCTACLDICPTQAFVGPNQLDARRCISYLTIELKGSIPEPLRAAIGNRVFGCDDCQLICPWNKFSQLTSETDFAPRHGLDNTDLSDLFMWSEETFLRNTEGSAIRRTGYEGWLRNLAVGLGNAPSTIPVLNALQSRQHHPSALVREHVAWALRQHALRADATKA

SEQ ID NO: 79893 - protein, 353 aa, Pseudohongiella sp.
  misc_feature (1)..(353): tr|A0A2D9DX27|A0A2D9DX27_9GAMM Epoxyqueuosine reductase OS=Pseudohongiella sp. OX=1979412 GN=queG PE=3 SV=1
MISSEQSRLLLSQIRQWAAELGFQQLAVSDIDLTAYRPHLEAWLARNFHGEMDYMERHKDLRLAPDQLHPNTIRVLSVRMDYSFDREQTLTPMRDGRMAYISRYARGRDYHKLLRKRLQQLAEKISGEVGEFGYRAFVDSAPVLERALAEKGGLGWIGKNTMLLNRQAGSFFFLGELFTDLPLPKDEPVSAHCGSCTACLDLCPTKAFVGPYQLDARRCISYLTIELKGAIPEELRPLMGNRVFGCDDCQIVCPWNKFSRLSEESDFRPRHGLDSSELSELFLWTEAEFLARTAGSAIRRTGYEGWLRNLAVGLGNAPTSQKIIDALQSRAQYPSALVREHVEWALRRHGVTA

SEQ ID NO: 79894 - protein, 353 aa, Pseudohongiella sp.
  misc_feature (1)..(353): tr|A0A355V4B2|A0A355V4B2_9GAMM Epoxyqueuosine reductase OS=Pseudohongiella sp. OX=1979412 GN=queG PE=3 SV=1
MISSEQSRLLLSQIRQWAAELGFQQLAVSDIDLTAYRPHLEAWLARNFHGEMDYMERHKDLRLAPDQLHPNTIRVLSVRMDYSFDKEQTLTPMRDGRMAYISRYARGRDYHKLLRKRLQQLAEKISGEVGEFGYRAFVDSAPVLERALAEKGGLGWIGKNTMLLNRQAGSFFFHGELFTDLPLPVDEPVSAHCGSCTACLDLCPTRAFVGPYQLDARRCISYLTIELKGAIPEELRPLMGNRVFGCDDCQIVCPWNKFSRLSEESDFSPRHGLDSSELSELFLWSEAEFLERTVGSAIRRTGYEGWLRNLAVGLGNAPTSPEIIDALQSRAQHPSALVRDHVEWALRQHGVTA

SEQ ID NO: 79895 - protein, 367 aa, Pseudohongiella spirulinae
  misc_feature (1)..(367): tr|A0A0S2K9Q9|A0A0S2K9Q9_9GAMM Epoxyqueuosine reductase OS=Pseudohongiella spirulinae OX=1249552 GN=queG PE=3 SV=1
MTPEQASTLLEQIRSWARELGFQQLAVADVDLSAYQPHLDAWLARNFHGEMDYMLRHRDLRLDPQSLHPGTIRVLSVRMDYSLDKDQSLAPLKNREQAYISRYARGRDYHKLIRKRLQQLAEKISEAAGPVGYRAFVDSAPVLERALAEKAGLGWIGKNTMLINRQAGSWFFLGELFTDLPLPLDEPVSAHCGSCTACLDLCPTGAFTGPNQLDGRRCISYLTIELKSSIPEELRPLIGNRVFGCDDCQLVCPWNKFSKLSGEGDFAPRHGLDNSLLSELFMWTEQEFMERTAGSAIRRTGYEGWLRNLAVGLGNAPSTIPVLQALRARVDHPSELVREHVSWALQQHGEGGEQGKANAAIPANKDN

SEQ ID NO: 79896 - protein, 398 aa, Pseudolabrys sp.
  misc_feature (1)..(398): tr|A0A371BDQ4|A0A371BDQ4_9RHIZ Epoxyqueuosine reductase OS=Pseudolabrys sp. GY_H OX=2292256 GN=queG PE=3 SV=1
MAPVLPSAAERDAGRNSTGQALRRPGLLTRPAEIKAALIARAKERGFDIAGITRPDAVPEAKARLERFLADGAHGDMVWLETTAERRGSPLALWPDVRSVIMLGMNYGPDENPLGILQQRDRAGISVYAKGDDYHELIKARLKEIARWLVANAGGDVKVFVDTAAVMEKPLAAKAGLGWQGKHTNLVSRDYGSWLFLGAIFTTLELPADDAVNDSCGSCRACLDACPTAAFPEPYRLDARRCVSYLTIEHKGPIPRDLRALMGNRIYGCDDCLAVCPWNKFAQAGREAKLAARETLRAPKLADLARLDDAQFRVLFSKTSIKRTGRDRFVRNVLYAIGNSGDATLAIEAECLLGDASPLVRGAAVWALSRLKGREELKALKRDDEDAGVQEEWSAALS

SEQ ID NO: 79897 - protein, 365 aa, Pseudolabrys sp.
  misc_feature (1)..(365): tr|A0A0Q7TE52|A0A0Q7TE52_9RHIZ Epoxyqueuosine reductase OS=Pseudolabrys sp. Root1462 OX=1736466 GN=queG PE=3 S V=1
MKAALVARARERGFDVAGITRPDAVPEAKARLERFLADGAHGDMTWLETTAERRGSPLALWPDVRSVIMLGMNYGPDEDPRDILSSRDRAAISVYAKGDDYHDLIKARLKEIARWLVANAGGDVKVFVDTAAVMEKPLAAKAGLGWQGKHTNLVSRQFGSWLFLGAIFTTLDLPADDEVGDSCGSCRACLDACPTAAFPAPYRLDARRCISYLTIEHKGPIPRELRPALGNRIYGCDDCLAACPWNKFAQAGREAKLAARDVLRAPQLAELSRLDDAQFRALFSKTSIKRTGRDRFIRNVLYAIGNSGDVTLAPETARLLDDPSPLVRGAAVWSLSRLRTREALATMKRDDEDGLVRDEWDAALS

SEQ ID NO: 79898 - protein, 404 aa, Pseudolabrys taiwanensis
  misc_feature (1)..(404): tr|A0A346A4K0|A0A346A4K0_9RHIZ Epoxyqueuosine reductase OS=Pseudolabrys taiwanensis OX=331696 GN=queG PE=3 SV= 1
MVRAGEVPPVVPSAAGRDPGRHSGVGDLRRSRLLTDPEAIRLALTGEARLLGFDCIGITRPDAVPEAKVRLERFIADGAYGDMTWMAETAARRASPLALWPEVRSVIMLGMNYGPDEDPLAVLKERTRAAISVYAQGDDYHDIIKKRLKEIARWLVRQAGGDVKVFVDTAAVMEKPLAASAGLGWQGKHTNLVSRQYGSWLFLGSIFTTLELPADGPMDGTCGSCRACLDVCPTAAFPAPYRLDARRCISYLTIEHKGPIPRDLRPLMGNRIYGCDDCLAVCPWNKFAQVGREAKLAARDALRAPGLAELSRLDDAQFRALFSKSPVKRIGRDRFVRNVLIAIGNSGDASLAVEAERLLGDESPLVRGAAVWALSQLVTREELEKLSRHDNDDDVKGEWAAAGL

SEQ ID NO: 79899 - protein, 359 aa, Pseudomonadaceae bacterium
  misc_feature (1)..(359): tr|A0A2D5CGV9|A0A2D5CGV9_9GAMM Epoxyqueuosine reductase OS=Pseudomonadaceae bacterium OX=1914538 GN=queG PE=3 SV=1
MNSSALDPVTLAQSIKDWGRELGFQQVGIASVDLGEHEAHLQRWLDAGYQGEMDYMAAHGSKRSHPEQLVPGTLRVITLRMDYLPGDTRMAEQLANPEKAYVSRYALGRDYHKLIRKRLQQLAERIQKEIGPFGFRAFVDSAPVLEKAIAENAGLGWIGKNTLVLNRKAGSYFFLGELFIDFELPIDPPHASEHCGRCTACLDICPTAAFVDPYVLDARKCISYLTIELKGAIPVELRAPIGNRVFGCDDCQMVCPWNRFAKATDKGDFKPRHDLDNAELAGLFMWTEDEFLSRTEGSPLRRTGYLNWLRNLAVGLGNAPSTIPVLEALKARREHPSELVREHVEWALEQHHQRAAITP

SEQ ID NO: 79900 - protein, 363 aa, Pseudomonadaceae bacterium
  misc_feature (1)..(363): tr|A0A3T0SN13|A0A3T0SN13_9GAMM Epoxyqueuosine reductase OS=Pseudomonadaceae bacterium SI-3 OX=2079806 GN=queG PE=3 SV=1
MSSTTLDPAALADSIKEWGRELGFQQVGITGVDLGEHEAHLERWLAAGYQGEMDYMAAHGSKRSHPEQLVPGTLRVISLRMDYLPGDTRMAEQLAQPEKAYVSRYALGRDYHKLIRKRLQQLAERIQHVIGPFGFRAFVDSAPVLEKAVAQQAGLGWIGKNTLVLNRKAGSWFFLGELFVDIALPVDEPTDRDHCGSCHACLDVCPTDAFVGERVLDARKCISYLTIELKGPIPVELRSKIGNRVFGCDDCQIVCPWNRFAKPTQQTDFQPRHSLDNAELATLFRWTEEEFLSRTEGSPLRRTGYQSWLRNLAVGLGNAPSSIPVLEALQARRDDPSELVREHVQWALAQHEQRPPALPHTKD

SEQ ID NO: 79901 - protein, 380 aa, Pseudomonadales bacterium
  misc_feature (1)..(380): tr|A0A2D6QM89|A0A2D6QM89_9GAMM Epoxyqueuosine reductase OS=Pseudomonadales bacterium OX=1891229 GN=queG PE=3 S V=1
MMRAWLGSLEVWHNYREACQPTPAAMTSQTPDYQQLAEQIRQLARELGFQQLGIGATELGEHEQHLQHWLDAGYHGEMEWMASHGSKRTRPNELVPGTQRVLSVRMDYLPTETEMAKRLANPDAAYISRYALGRDYHKLIRRRLQQLAERIEQLIGPFGYRAFVDSAPVMERALATRSGLGWIGKNTMLINRKAGSYFFLGELYTDLPLPIDAPQQTEHCGKCTACLTACPTGAFVGPHLLDARRCISYLTIELKGAIPEALRKPVGNRVFGCDDCQLVCPWNRFAKATEEADFTPRHNLDQASLVELFLWDEATFLKRTEGSPVRRIGHERWLRNLAIGLGNATSSINVIEALKLRQAHPSALVREHVDWALAQHGINT

SEQ ID NO: 79902 - protein, 354 aa, Pseudomonadales bacterium
  misc_feature (1)..(354): tr|A0A1G3F149|A0A1G3F149_9GAMM Epoxyqueuosine reductase OS=Pseudomonadales bacterium RIFCSPLOWO2_12_FULL_59_45 0 OX=1802008 GN=queG PE=3 SV=1
MPAITSDLPALAQSIKDWGRELGFQQVGISGLDLAEHEQHLQRWLDAGYHGEMEYMGAHGSKRSHPDELVPGTLRVVSLRMDYLPGDTQMAQLLAQPEKAYISRYALGRDYHKLIRKRVQQLADRIQAQIGPFGFRAFVDSAPVLEKAIAEQAGLGWIGKNTLVLNRKAGSYFFLSELFVDLPLPVDPPHATEHCGRCTACLDICPTNAFVGPYVLDARRCISYLTIELKSAIPEDLRPLIGNRVFGCDDCQIVCPWNRFARPTAESDFKPRHNLDNAELAELFMWDEDKFLSSTEGSPLRRAGYERWLRNLAVGLGNAPSSIPVLEALKARRDYPSELVREHVEWALEQHAAR

SEQ ID NO: 79903 - protein, 356 aa, Pseudomonas abietaniphila
  misc_feature (1)..(356): tr|A0A1G7XA81|A0A1G7XA81_9PSED Epoxyqueuosine reductase OS=Pseudomonas abietaniphila OX=89065 GN=queG PE=3 SV= 1
MTAAGLNELAQSIKDWGRELGFQQVGISGLDLAEHEQHLERWLEAGYHGEMDYMAAHGSKRSHPDELVPGTLRVVSLRMDYLPGDTHMAQRLAEPEKAYVSRYALGRDYHKLIRKRVQQLAERIQQAIGPFGFRAFVDSAPVLEKAIAEQAGLGWIGKNTLVLNRKAGSYFFLSELFVDLPLPVDERHATEHCGRCTACLEICPTNAFAGPYVLDARKCISYLTIELKTAIPEALRSMIGNRVFGCDDCQIVCPWNRFARPTDQNDFKPRHGLDNAELATLFLWDETTFLSNTEGSPLRRAGYERWLRNLAVGLGNAPSSIPVIEALKARLDHPSEMVREHVEWALLQHERRGAII

SEQ ID NO: 79904 - protein, 355 aa, Pseudomonas abyssi
  misc_feature (1)..(355): tr|A0A2A3MLQ1|A0A2A3MLQ1_9PSED Epoxyqueuosine reductase OS=Pseudomonas abyssi OX=170540 GN=queG PE=3 SV=1
MTSQTPDYQQLAEQIRQLARELGFQQLGIGAAELGEHEQHLQHWLDAGYHGEMEWMASHGSKRTRPNELVPGTQRVLSVRMDYLPTETEMAKRLANPDAAYISRYALGRDYHKLIRRRLQQLAERIEQLIGPFGYRAFVDSAPVMERALATRSGLGWIGKNTMLINRKAGSYFFLGELYTDLPLPIDAPQQTEHCGKCTACLTACPTDAFVGPHLLDARRCISYLTIELKGAIPEALRKPMGNRVFGCDDCQLVCPWNRFAKATEEADFTPRHNLDQASLVELFRWDEATFLKRTEGSPVRRIGHERWLRNLAIGLGNATSSINVIEALKLRQTHPSALVREHVDWALAQHGINT

SEQ ID NO: 79905 - protein, 416 aa, Pseudomonas acidophila
  misc_feature (1)..(416): tr|A0A2A4F727|A0A2A4F727_9PSED Epoxyqueuosine reductase OS=Pseudomonas acidophila OX=1912599 GN=queG PE=3 SV=1
MNRSPQYPVADTPASDDDARAMRRFDEAALTALALRIKTWGRELGFGALGISDAELPDAESGLAAWLEAGYHGEMDYMAKHGMKRARPAELVAGTRRVITARIAYLPALTLTGAHAGKEAESDPLVASDAPDWRADEMARLADPSAAVVSIYARGRDYHKVMRQRLQQLAERIEAEIGAYGYRVFTDSAPVLEVAFAQNAGIGWRGKHTLLLQRDAGSLFFLGEIYVDLPLPTDASIDPDSAPETAGAHCGSCTRCIDACPTGAIVEPYKVDARRCISYLTIELKGSIPEDLRPLIGNRVYGCDDCQLVCPWNKFAQAAPVADFDVRHGLDRASLVDLFDWSASDFDTRMQGSAIRRIGYECWLRNLAVGMGNALRADAATLAGAARSAIVDALRRRADDPSPLVREHVQWALEAA

SEQ ID NO: 79906 - protein, 493 aa, Pseudomonas aeruginosa
  misc_feature (1)..(493): tr|A0A0A8RIV1|A0A0A8RIV1_PSEAI Epoxyqueuosine reductase OS=Pseudomonas aeruginosa OX=287 GN=queG PE=3 SV=1
MRLRRVAGKPLRRRDRQHPHSPTRTLRQRRDQVAVAGIVAVPGEHRQRRGLRPTAAQGTPGGVGGALHEFEARRAGGDQARIEVAHLGGGIEGEWQVVVLEGHGHRIDSASGAQSGRIIPIPFRFPSSSLPPMTPQPLADNLSPPDPARLAQSIKDWGRELGFQQVGISDVELGEHEAHLQRWLEAGYHGEMDYMAAHGSKRSRPAELVPGTLRVISLRMDYLPGDTRMAQVLATPEKAYVSRYALGRDYHKLIRKRLQQLAERIQAEVGPFGFRAFVDSAPVLEKAIAEQAGLGWIGKNTLVLNRKAGSYFFLGELFVDMPLPVDPAMDSEHCGRCSACLDICPTAAFVGPYRLDARRCISYLTIEYKGAIPLELRPLIGNRVFGCDDCQIVCPWNRFARPTGQGDFQPRHSLDNAELAELFLWSEEEFLGRTEGSPLRRAGYERWLRNLAVGLGNAPSTIPVLEALKARRGFPSELVREHVEWALRRHGET

SEQ ID NO: 79907 - protein, 361 aa, Pseudomonas aeruginosa
  misc_feature (1)..(361): tr|A0A086BTM6|A0A086BTM6_PSEAI Epoxyqueuosine reductase OS=Pseudomonas aeruginosa VRFPA01 OX=1262663 GN=queG P E=3 SV=1
MTPQPLADRLSPPDPLRLAQSIKDWGRELGFQQVGIGDVDLGEHEGHLQRWLEAGYHGEMDYMAAHGSKRSRPAELVPGTLRVISLRMDYLPGDTRMAQVLAAPEKAYVSRYALGRDYHKLIRKRLQQLAERIQGEIGPFGFRAFVDSAPVLEKAIAEQAGLGWIGKNTLVLNRKAGSYFFLGELFVDVPLPVDPAMASEHCGRCSACLDICPTAAFVGPYRLDARRCISYLTIEYKGAIPLELRPLIGNRVFGCDDCQIVCPWNRFARPTGQGDFQPRHSLDNAGLAELFLWSEEEFLGRTEGSPLRRAGYERWLRNLAVGLGNAPSTIPVLEALKARREHPSELVREHVEWALRRHGET

SEQ ID NO: 79908 - protein, 353 aa, Pseudomonas aestusnigri
  misc_feature (1)..(353): tr|A0A1H5STZ1|A0A1H5STZ1_9PSED Epoxyqueuosine reductase OS=Pseudomonas aestusnigri OX=857252 GN=queG PE=3 SV=1
MPEDPDYQALANQIRVFAQDLGFQQLGISAPDIGEHEQWLQRWLDAGYQGEMDWMASHGSKRTRPPELVPGTQRVISVRMDYLPADAAMARRLASPDTAYISRYALGRDYHKLIRRRLQQLADRIQELIGPFGYRAFVDSAPVMERALASRSGLGWIGKNTMLINRKAGSYFFLGELYTDLPLPTDSPQQTEHCGKCTACLERCPTDAFVGPHVLDARRCISYLTIELKGAIPENLRRAMGNRVFGCDDCQLVCPWNRFAKPTGEPDFSPRHQLDQADLVELFSWDEATFLQRTEGSPIRRIGYERWLRNLAVGLGNATTSIPVVEALKRRRADTSELVREHVRWALEQHGAS

SEQ ID NO: 79909 - protein, 362 aa, Pseudomonas agarici
  misc_feature (1)..(362): tr|A0A0X1T5Q8|A0A0X1T5Q8_PSEAA Epoxyqueuosine reductase OS=Pseudomonas agarici OX=46677 GN=queG PE=3 SV=1
MPVNSVDLPALAQSIKQWGRELGFQQVGIAGVELGEHEQHLQRWLAAGYQGDMDYMGAHGSKRSHPDELVPGTLRVVSLRMDYLPGDTQMAQRLGQPETAYVSRYALGRDYHKLIRKRLQQLAERIQQVIGPFGYRAFVDSAPVLEKAIAEQAGLGWIGKNTLVLNRKAGSYFFLGELFLDLPLPVDAPHVTEHCGRCTACLDICPTAAFVGPYVLDARRCISYLTIELKTAIPEDLRPLIGNRVFGCDDCQIVCPWNRFARTSDEGDFKPRHSLDNAGLAELFLWDEETFLKNTEGSPLRRAGYERWLRNLAVGLGNAPSTIVVLEALNSRRDYPSELVREHVQWALHQHTERGTPSGVRR

SEQ ID NO: 79910 - protein, 357 aa, Pseudomonas alcaligenes
  misc_feature (1)..(357): tr|A0A1N6PB26|A0A1N6PB26_PSEAC Epoxyqueuosine reductase OS=Pseudomonas alcaligenes OX=43263 GN=queG PE=3 SV=1
MSDSPPDLAQLAQSIKDWGRELGFQQVGITDVDLGEHEAHLQRWLDAGYQGEMDYMAAHGSKRSHPDELVPGTLRVVSLRMDYLPGDTRMAERLAQPEQAYVSRYALGRDYHKLVRKRLQQLAERIQAVIGPFGHRAFVDSAPVLEKAIAEKAGLGWIGKNTLVLNRKAGSWFFLGELFVDIPLPIDAPHASEHCGRCTACMDICPTAAFAGPYVLDARRCISYLTIELKGSIPEELRAPIGNRVFGCDDCQIVCPWNRFARPTEQGDFQPRHGLDSGGLVELFLWTEAEFLSRTEGSPLRRAGYERWLRNLAVGLGNAPSTIPVLEALRARREHPSELVREHVAWALARHHEKGPH

SEQ ID NO: 79911 - protein, 357 aa, Pseudomonas alcaligenes
  misc_feature (1)..(357): tr|U2Z7J4|U2Z7J4_PSEA4 Epoxyqueuosine reductase OS=Pseu domonas alcaligenes (strain ATCC 14909 / DSM 50342 / JC M 20561 / NBRC 14159 / NCIMB 9945 / NCTC 10367 / 1577) OX=1215092 GN=queG PE=3 SV=1
MSDSPPDLAQLAQSIKDWGRELGFQQVGITDVDLGEHEAHLQRWLDAGYQGEMDYMAAHGSKRSHPDELVPGTLRVVSLRIDYLPGDTRMAERLAQPEQAYVSRYALGRDYHKLVRKRLQQLAERIQAVIGPFGHRAFVDSAPVLEKAIAEKAGLGWIGKNTLVLNRKAGSWFFLGELFVDIALPIDAPHASEHCGRCTACMDICPTAAFAGPYVLDARRCISYLTIELKGSIPEELRAPIGNRVFGCDDCQIVCPWNRFARPTEQADFQPRHGLDSGGLVELFLWTEAEFLSRTEGSPLRRAGYERWLRNLAVGLGNAPSTIPVLEALRARREHPSELVREHVAWALARHHEKGPH

SEQ ID NO: 79912 - protein, 354 aa, Pseudomonas alcaliphila
  misc_feature (1)..(354): tr|A0A1G6Y3B9|A0A1G6Y3B9_9PSED Epoxyqueuosine reductase OS=Pseudomonas alcaliphila OX=101564 GN=queG PE=3 SV=1
MSDQTLDLDALALSIKDWGRELGFQQVGITDVELGEHEAHLQRWLEAGYQGEMDYMAAHGSKRSHPDELVPGTLRVVSLRMDYLPGDTQMAQRLKEPQQAYVSRYALGRDYHKLIRKRLQQLAERIQQQIGPFGYRAFVDSAPVLEKAIAEKAGLGWIGKNTLVLNRKAGSYFFLGELFVDLPLPVDAPHGSEHCGRCSACMDICPTAAFAGPYVLDARRCISYLTIELKGSIPVELRAPIGNRVFGCDDCQIVCPWNRFARPTEQGDFQPRHGLDNSGLAELFLWTEEEFLSRTEGSPLRRAGYERWLRNLAVGLGNAPSTIPVLQALIARREHPSPLVREHVEWALERHSAL

SEQ ID NO: 79913 - protein, 354 aa, Pseudomonas alcaliphila
  misc_feature (1)..(354): tr|A0A1L7G6U0|A0A1L7G6U0_9PSED Epoxyqueuosine reductase OS=Pseudomonas alcaliphila JAB1 OX=741155 GN=queG PE=3 SV=1
MSDQTLDLNALALSIKDWGRELGFQQVGITDVELGEHEAHLQRWLAAGYQGEMEYMAAHGSKRSHPDELVPGTLRVVSLRMDYLPGNTQMAQRLKESEQAYVSRYALGRDYHKLIRKRLQQLAERIQQQIGPFGYRAFVDSAPVLEKAIAEKAGLGWIGKNTLVLNRKAGSYFFLGELFVDLPLPVDAPHASEHCGRCSACMDICPTAAFAGPYVLDARRCISYLTIELKGSIPEELRAPIGNRVFGCDDCQIVCPWNRFARPTEQGDFQPRHGLDNSGLAELFMWTEEEFLSRTEGSPLRRAGYERWLRNLAVGLGNAPSTIPVLQALQARREHPSELVREHVAWALERHGAL

SEQ ID NO: 79914 - protein, 356 aa, Pseudomonas alkylphenolica
  misc_feature (1)..(356): tr|A0A443ZYC0|A0A443ZYC0_9PSED Epoxyqueuosine reductase OS=Pseudomonas alkylphenolica OX=237609 GN=queG PE=3 S V=1
MPAIPDLPALAHSIKEWGNELGFAHVGIAGVDLAEHEQHLERWLQAGYHGEMDYMGAHGSKRSHPEQLVPGTLRVVSLRMDYLPGDTRMAQQLAQPEKAYISRYALGRDYHKLVRKRVQHLAERIQKEIGPFGFRAFVDSAPVLEKAIAEQAGLGWIGKNTLLLNRKAGSYFFLAELFVDLPLPVDPPQVSEHCGRCSACLDICPTQAFVGPYVLDARRCISYLTIELKSAIPEELRALIGNRVFGCDDCQIVCPWNRFAKPTAENDFKPRHALDSAGLAELFMWDEKTFLDSTEGSPLRRAGYERWLRNLAVGLGNAPSTIPVLEALKARVDYPSELVREHVEWALKQHAQRDSH

SEQ ID NO: 79915 - protein, 361 aa, Pseudomonas alkylphenolica
  misc_feature (1)..(361): tr|A0A077FFA7|A0A077FFA7_9PSED Epoxyqueuosine reductase OS=Pseudomonas alkylphenolica OX=237609 GN=queG PE=3 S V=1
MSAATPDIPALAQSIKDWGKELGFAHVGIAGVELGEHEQHLERWLQAGYHGEMDYMGAHGSKRSHPEQLVPGTLRVVSLRMDYLPGDTHMAQQLAQPEKAYISRYALGRDYHKLIRKRVQHLAERIQKEIGPFGFRAFVDSAPVLEKAIAEQAGLGWIGKNTLLLNRKAGSYFFLAELFVDLPLPVDPPQVSEHCGRCTACLDICPTQAFVGPYLLDARRCISYLTIELKSAIPEELRALIGNRVFGCDDCQIVCPWNRFARPTGESDFKPRHNLDSAGLAELFMWDEQTFLDSTEGSPLRRAGYERWLRNLAVGLGNAPSTIQVLEALKARQDHPSELVREHVEWALGQHSSRGKPAPTR

SEQ ID NO: 79916 - protein, 392 aa, Pseudomonas amygdali
  misc_feature (1)..(392): tr|A0A0P9IY84|A0A0P9IY84_PSEA0 Epoxyqueuosine reductase OS=Pseudomonas amygdali OX=47877 GN=queG PE=3 SV=1
MRFRVEHASIGSDVWQNYTHLGPGFSLRMSAITAVLPTSDDLAALAVSIKAWGRELGFQEVGISGLDLAEHEQHLQRWLDAGYHGEMDYMAAHGSKRSHPDELVPGTLRVVSLRMDYLPGDTEMAQRLTEPEKAYVSRYALGRDYHKLIRKRLQQLAERIQQAIGPFGFRAFVDSAPVLEKAIAEQAGLGWIGKNTLVLNRKAGSFFFLGELFVDIPLPVDAPHATEHCGRCTACLDICPTAAFVGPYVLDARRCISYLTIELKTAIPEELRPLIGNRVFGCDDCQIVCPWNRFARPTDQSDFQPRHNLDNAGLAELFLWDEDKFLSSTEGSPLRRAGYERWLRNLAVGLGNAPSTIPVIEALHARRDYPSELVREHVEWALQRHGVADAGG

SEQ ID NO: 79917 - protein, 392 aa, Pseudomonas amygdali
  misc_feature (1)..(392): tr|A0A0Q0CGM3|A0A0Q0CGM3_PSEA0 Epoxyqueuosine reductase OS=Pseudomonas amygdali pv. ulmi OX=251720 GN=queG PE= 3 SV=1
MRFRVEHASIGSDVWQNYTHLGPGFSLRMSAITAALPTRDDLAALSLSIKAWGRELGFQEVGISGLDLAEHEQHLQRWLDAGYHGEMDYMAAHGSKRSHPDELVPGTLRVVSLRMDYLPGDTKMAQRLTEPEKAYVSRYALGRDYHKLIRKRLQQLAERIQQAIGPFGFRAFVDSAPVLEKAIAEQAGLGWIGKNTLVLNRKAGSFFFLGELFVDIPLPVDAPHATEHCGRCTACLDICPTAAFVGPYVLDARRCISYLTIELKTAIPEELRPLIGNRVFGCDDCQIVCPWNRFARPTDQSDFQPRHNLDNAGLAELFLWDEDKFLSSTEGSPLRRAGYERWLRNLAVGLGNAPSTIPVIEALQARRDYPSELVREHVEWALQRHGVADAGG

SEQ ID NO: 79918 - protein, 353 aa, Pseudomonas anguilliseptica
  misc_feature (1)..(353): tr|A0A1H4RXM0|A0A1H4RXM0_PSEAG Epoxyqueuosine reductase OS=Pseudomonas anguilliseptica OX=53406 GN=queG PE=3 S V=1
MNTDTLDLIALAQSIKDWGRELGFQQVGIVDVQLGEHEAHLQRWLDAGYQGEMDYMAAHGSKRSHPDELVPGTLRVVSLRMDYLPGDTQMAQRLAQPEKAYVSRYALGRDYHKLIRKRLQQLAERIQQQIGPLGFRAFVDSAPVLEKAIAEQAGLGWIGKNTLVLNRKAGSYFFLGELFVDLPLPVDPPHASGHCGRCTACMDICPTAAFVGPYVLDARRCISYLTIELKGSIPEELRAPIGNRVFGCDDCQMVCPWNRFAKPTEQSDFQPRHSLDNAELAELFGWSEEEFLSRTEGSPLRRAGYERWLRNLAVGLGNAPSSIPVLEALKARREHPSELVREHVEWALARHGL

SEQ ID NO: 79919 - protein, 354 aa, Pseudomonas antarctica
  misc_feature (1)..(354): tr|A0A1G9UT18|A0A1G9UT18_9PSED Epoxyqueuosine reductase OS=Pseudomonas antarctica OX=219572 GN=queG PE=3 SV=1
MPAITTDLPALAQSIKDWGRELGFQQVGISGLDLAEHEQHLQRWLDAGYHGEMDYMAAHGSKRSHPDELVPGTLRVVSLRMDYLPGDTQMAQLLAKPEKAYISRYALGRDYHKLIRKRVQQLADRIQAQIGPFGFRAFVDSAPVLEKAIAEQAGLGWIGKNTLVLNRKAGSYFFLSELFVDLPLPVDAPHSTEHCGRCTACLDICPTNAFVGPYVLDARRCISYLTIELKTAIPEDLRPLIGNRVFGCDDCQIVCPWNRFARTTHEGDFKPRHNLDNAELAELFMWDEDKFLSSTEGSPLRRAGYERWLRNLAVGLGNAPSSIPVLEALKARRDYPSELVREHVEWALNQHAAR

SEQ ID NO: 79920 - protein, 354 aa, Pseudomonas antarctica
  misc_feature (1)..(354): tr|A0A172YUX5|A0A172YUX5_9PSED Epoxyqueuosine reductase OS=Pseudomonas antarctica OX=219572 GN=queG PE=3 SV=1
MPAITTDLPALAQSIKDWGRELGFQQVGISGLDLAEHEQHLQRWLDAGYHGEMEYMGAHGSKRSHPDELVPGTLRVVSLRMDYLPGDTQMAQLLAKPEKAYISRYALGRDYHKLIRKRVQQLADRIQAQIGPFGFRAFVDSAPVLEKAIAEQAGLGWIGKNTLVLNRKAGSYFFLSELFVDLPLPVDAPHTTEHCGRCTACLDICPTNAFVGPYVLDARRCISYLTIELKSAIPEDLRPLIGNRVFGCDDCQIVCPWNRFARATDEGDFKPRHNLDNAELAELFMWDEDKFLSSTEGSPLRRAGYERWLRNLAVGLGNAPSSIPVLEALKARRDYPSDLVREHVEWALNQHATR

SEQ ID NO: 79921 - protein, 356 aa, Pseudomonas argentinensis
  misc_feature (1)..(356): tr|A0A1I3IDB7|A0A1I3IDB7_9PSED Epoxyqueuosine reductase OS=Pseudomonas argentinensis OX=289370 GN=queG PE=3 SV =1
MTDATLDLASLAQSIKDWGRELGFQQVGISGLELGEHEAHLQRWLDAGYQGEMDYMAAHGRKRSHPDELVPGTLRVVSLRMDYLPGETQMARRLQEPEKAYVSRYALGRDYHKLIRKRLQQLAERIQQAIGPFGYRAFVDSAPVLEKAIAEQSGLGWIGKNTLVLNRKAGSYFFLGELFVDIPLPEDAPHASEHCGRCSACLDICPTTAFVGPYVLDARRCISYLTIELKGPIPEELRAPIGNRVFGCDDCQMVCPWNRFAKATEQSDFQPRHGLDNAELAELFRWSEEDFLSRTEGSPLRRAGYERWLRNLAVGLGNAPSSIPVLEALQARREYPSALVREHVEWALAQHAQRQG

SEQ ID NO: 79922 - protein, 353 aa, Pseudomonas arsenicoxydans
  misc_feature (1)..(353): tr|A0A4P6G0Z5|A0A4P6G0Z5_9PSED Epoxyqueuosine reductase OS=Pseudomonas arsenicoxydans OX=702115 GN=queG PE=3 S V=1
MPAINTDLPALAQSIKDWGRELGFQQVGISGLDLAEHEQHLERWLAAGYHGEMDYMGAHGSKRSHPEELVPGTLRVVSLRMDYLPGDTEMAKRLTQPEKAYVSRYALGRDYHKLIRKRVQQLAEKIQAVIGPFGYRAFVDSAPVLEKAIAEQAGLGWIGKNTLVLNRKAGSYFFLAELFVDLPLPVDPPHGTEHCGRCTACLDICPTNAFVGPYVLDARRCISYLTIELKSAIPEDLRPLIGNRVFGCDDCQIVCPWNRFARPSGESDFKPRHNLDNAELAELFMWDEEKFLSSTEGSPLRRAGYERWLRNLAVGLGNAPSSIPVLEALKARRDHPSELVREHVEWALKQHGL

SEQ ID NO: 79923 - protein, 354 aa, Pseudomonas arsenicoxydans
  misc_feature (1)..(354): tr|A0A1H0BVK3|A0A1H0BVK3_9PSED Epoxyqueuosine reductase OS=Pseudomonas arsenicoxydans OX=702115 GN=queG PE=3 S V=1
MPAINTDLPALAQSIKDWGRELGFQQVGISGLDLAEHEQHLERWLAAGYHGEMDYMGAHGSKRSHPEELVPGTLRVVSLRMDYLPGDTEMAKRLTQPAKAYVSRYALGRDYHKLIRKRVQQLAEKIQAVIGPFGYRAFVDSAPVLEKAIAEQAGLGWIGKNTLVLNRKAGSYFFLAELFVDLPLPVDPPHGTEHCGRCTACLDICPTNAFVGPYVLDARRCISYLTIELKSAIPEDLRPLIGNRVFGCDDCQIVCPWNRFARPSGESDFKPRHNLDNAELAELFMWDEDKFLSSTEGSPLRRAGYERWLRNLAVGLGNAPSSIPVLEALKARRDYPSELVREHVEWALKQHGLL

SEQ ID NO: 79924 - protein, 362 aa, Pseudomonas asplenii
  misc_feature (1)..(362): tr|A0A438LAF1|A0A438LAF1_9PSED Epoxyqueuosine reductase OS=Pseudomonas asplenii OX=53407 GN=queG PE=3 SV=1
MPVISVDLPALAQSIKEWGRELGFQQVGIAGLELGEHEQHLQRWLDAGYHGDMEYMGAHGSKRSHPDELVPGTLRVVSLRMDYLPGDTQMAQRLGQPEKAYVSRYALGRDYHKLIRKRLQQLAERIQQVIGPFGYRAFVDSAPVLEKAIAEQAGLGWIGKNTLVLNRKAGSYFFLGELFVDLPLPVDAPHATEHCGRCTACMDICPTAAFVGPYVLDARRCISYLTIELKTAIPEELRPLIGNRVFGCDDCQMVCPWNRFARPSDEGDFKPRHSLDNAGLAELFLWDEETFLKNTEGSPLRRAGYERWLRNLAVGLGNAPSTIPVLEALNTRLDYPSELVQEHVQWALRQHAERSALRPAPL

SEQ ID NO: 79925 - protein, 359 aa, Pseudomonas asplenii
  misc_feature (1)..(359): tr|A0A2J7V0V7|A0A2J7V0V7_9PSED Epoxyqueuosine reductase OS=Pseudomonas asplenii OX=53407 GN=queG PE=3 SV=1
MSAITTDLPALAQSIKDWGRELGFQQVGISGLDLAEHEQHLARWLEAGYHGEMDYMGAHGSKRSHPEELVPGTLRVVSLRMDYLPGDTQMAQMLAQPEKAYVSRYALGRDYHKLIRKRVQQLADKIQAQIGPFGFRAFVDSAPVLEKAIAEQAGLGWIGKNTLVLNRKAGSYFFLSELFVDLPLPVDEPHSSEHCGRCTACLDICPTNAFVGPYVLDARRCISYLTIELKNAIPEDLRPLIGNRVFGCDDCQIVCPWNRFAKPSGESDFKPRHNLDNAELAELFMWDEDKFLSSTEGSPLRRAGYERWLRNLAVGLGNAPSSIPVLEALKARRDYPSALVQEHVEWALKQHAQRQGASL

SEQ ID NO: 79926 - protein, 359 aa, Pseudomonas asturiensis
  misc_feature (1)..(359): tr|A0A1M7NYB0|A0A1M7NYB0_9PSED Epoxyqueuosine reductase OS=Pseudomonas asturiensis OX=1190415 GN=queG PE=3 SV= 1
MSAITAERLTCDDLVTLAQSIKAWGRELGFQEVGIAGLDLAEHEQHLQRWLDAGYHGEMDYMAAHGSKRSHPDELVPGTLRVVSLRMDYLPGDTHMAQRLSEPEQAYVSRYALGRDYHKLIRKRLQQLAERIQKAIGPFGFRAFVDSAPVLEKAIAEQAGLGWIGKNTLVLNRKAGSFFFLGELFVDIPLPVDPPHATEHCGRCTACLDICPTAAFVGPYVLDARRCISYLTIELKTAIPEELRPLIGNRVFGCDDCQIVCPWNRFARPTDQSDFQPRHNLDNAGLAELFLWDEATFLSNTEGSPLRRAGYERWLRNLAVGLGNAPSTIAVIEALEARREYPSDMVREHVEWALGRHGR

SEQ ID NO: 79927 - protein, 364 aa, Pseudomonas avellanae
  misc_feature (1)..(364): tr|A0A2S3TIA0|A0A2S3TIA0_9PSED Epoxyqueuosine reductase OS=Pseudomonas avellanae OX=46257 GN=queG PE=3 SV=1
MSAITAALPTLDDLAALTLSIKAWGRELGFQEVGISGLDLAEHEQHLQRWLDAGYHGEMDYMAAHGSKRSHPDELVPGTLRVVSLRMDYLPGDTEMAQRLTEPEKAYVSRYALGRDYHKLIRKRLQQLAERIQQAIGPFGFRAFVDSAPVLEKAIAEQAGLGWIGKNTLVLNRKAGSFFFLGELFVDIPLPVDASHATEHCGRCTACLDICPTAAFVGPYVLDARRCISYLTIELKTAIPEELRPLIGNRVFGCDDCQIVCPWNRFARPTDQSDFQPRHNLDNAGLAELFLWDEDKFLSSTEGSPLRRAGYERWLRNLAVGLGNAPSTIPVIEALQARRDYPSELVREHVEWALGRHGVAGAEG

SEQ ID NO: 79928 - protein, 362 aa, Pseudomonas avellanae
  misc_feature (1)..(362): tr|A0A3M5SU74|A0A3M5SU74_9PSED Epoxyqueuosine reductase OS=Pseudomonas avellanae OX=46257 GN=queG PE=3 SV=1
MSAITAALPTLDDLAALTLSIKAWGRELGFQEVGISGLDLAEHEQHLQRWLDAGYHGEMDYMAAHGSKRSHPDELVPGTLRVVSLRMDYLPGDTEMAQRLTEPEKAYVSRYALGRDYHKLIRKRLQQLAERIQQAIGPFGFRAFVDSAPVLEKAIAEQAGLGWIGKNTLVLNRKAGSFFFLGELFVDIPLPVDAPHATEHCGRCTACLDICPTAAFVGPYVLDARRCISYLTIELKTAIPEELRPLIGNRVFGCDDCQIVCPWNRFARPTDQSDFQPRHNLDNAGLAELFLWDEDKFLSSTEGSPLRRAGYERWLRNLAVGLGNAPSTIPVIEALQARRDYPSELVREHVEWALQRHGVATF

SEQ ID NO: 79929 - protein, 354 aa, Pseudomonas azotoformans
  misc_feature (1)..(354): tr|A0A4Q0HZX6|A0A4Q0HZX6_PSEAZ Epoxyqueuosine reductase OS=Pseudomonas azotoformans OX=47878 GN=queG PE=3 SV=1
MPAITSDLPALAQSIKDWGRELGFQQVGISGLDLAEHEQHLQRWLDAGYHGEMEYMGAHGSKRSHPEELVPGTLRVVSLRMDYLPGDTQMAQLLAQPEKAYISRYALGRDYHKLIRKRVQQLADRIQAQIGPFGFRAFVDSAPVLEKAIAEQAGLGWIGKNTLVLNRKAGSYFFLSELFVDLPLPVDPPHTTEHCGRCTACLDICPTNAFVGPYVLDARRCISYLTIELKSAIPEDLRPLIGNRVFGCDDCQIVCPWNRFARPTAESDFKPRHNLDNAELAELFMWDEDKFLSSTEGSPLRRAGYERWLRNLAVGLGNAPSSIPVLEALKARRDYPSELVREHVEWALEQHAAR

SEQ ID NO: 79930 - protein, 354 aa, Pseudomonas azotoformans
  misc_feature (1)..(354): tr|A0A1V2JEZ8|A0A1V2JEZ8_PSEAZ Epoxyqueuosine reductase OS=Pseudomonas azotoformans OX=47878 GN=queG PE=3 SV=1
MPAITTDLPALAQSIKDWGRELGFQQVGISGLDLAEHEQHLQRWLDAGYHGEMDYMGAHGSKRSHPEELVPGTLRVVSLRMDYLPGDTQMAQLLAKPEKAYISRYALGRDYHKLIRKRVQQLADRIQAQIGPFGFRAFVDSAPVLEKAIAEKAGLGWIGKNTLVLNRKAGSYFFLSELFVDLPLPVDEPHSTEHCGRCTACLDICPTNAFVGPYVLDARRCISYLTIELKNAIPEDLRPLIGNRVFGCDDCQIVCPWNRFARATTESDFKPRHNLDNAELAELFMWDEDKFLSSTEGSPLRRAGYERWLRNLAVGLGNAPSSIPVLEALKARREYPSELVREHVEWALNQHANR

SEQ ID NO: 79931 - protein, 359 aa, Pseudomonas baetica
  misc_feature (1)..(359): tr|A0A2N0DPA7|A0A2N0DPA7_9PSED Epoxyqueuosine reductase OS=Pseudomonas baetica OX=674054 GN=queG PE=3 SV=1
MSAITTDLPALAQSIKDWGRELGFQQVGISGLDLAEHEQHLERWLAAGYHGEMDYMGAHGSKRSHPDELVPGTLRVVSLRMDYLPGDTEMAKRLAEPEKAYVSRYALGRDYHKLIRKRVQQLADRIQAEIGPFGFRAFVDSAPVLEKAIAEQAGLGWIGKNTLVLNRKAGSYFFLSELFVDLPLPVDEPHSTEHCGRCTACLDICPTNAFVGPYVLDARRCISYLTIELKNAIPEDLRPLIGNRVFGCDDCQIVCPWNRFARPTGESDFKPRHNLDNAELAELFLWDEDKFLSSTEGSPLRRAGYERWLRNLAVGLGNAPSSIPVLEALKARRDYPSELVREHVEWALKQHAERQGASL

SEQ ID NO: 79932 - protein, 356 aa, Pseudomonas balearica
  misc_feature (1)..(356): tr|A0A1G9WUL5|A0A1G9WUL5_9PSED Epoxyqueuosine reductase OS=Pseudomonas balearica DSM 6083 OX=1123016 GN=queG P E=3 SV=1
MSSSALDPIALADSIKEWGCELGFQQVGITGIDLGEHERHLQAWLAAGYQGEMDYMAAHGSKRSRPDELVPGTLRVISLRMDYLPGDTRMSQQLADPEKAYVSRYALGRDYHKLIRKRIQQLAERIQQVVGPFGFRAFVDSAPVLEKAAGQQAGLGWIGKNTLLLNRKAGSWFFLGELFVDIALPVDEPVTRDHCGSCHACLDICPTEAFVGERLLDARRCISYLTIELKGPIPLELRGKIGNRVFGCDDCQIVCPWNRFARPTEQGDFQPRHSLDNAELATLFRWTEEEFLSRTEGSPLRRAGYERWLRNLAVGLGNAPSSIPVLEALEARRDDPSELVREHVEWALTQHAKRAG

SEQ ID NO: 79933 - protein, 365 aa, Pseudomonas batumici
  misc_feature (1)..(365): tr|A0A0C2EHL0|A0A0C2EHL0_9PSED Epoxyqueuosine reductase OS=Pseudomonas batumici OX=226910 GN=queG PE=3 SV=1
MPVNSVDLPALARSIKEWGRELGFQQVGIAGLELGEHERHLQRWLDAGYHGDMDYMGAHGSKRSHPDELVPGTLRVVSLRMDYLPGDTQMAQRLGQPEKAYVSRYALGRDYHKLIRKRLQQLAERIQQVIGPFGYRAFVDSAPVLEKAIAEQAGLGWIGKNTLVLNRKAGSYFFLGELFVDLPLPVDAPHATEHCGRCTACMDICPTAAFVGPYVLDARRCISYLTIELKTAIPEELRPLIGNRVFGCDDCQIVCPWNRFARPSDEGDFKPRHSLDNAGLAELFLWDEETFLKNTEGSPLRRAGYERWLRNLAVGLGNAPSTIPVLEALNIRRDHPSELVREHVLWALRQHAERGARTACVEPPR

SEQ ID NO: 79934 - protein, 357 aa, Pseudomonas bauzanensis
  misc_feature (1)..(357): tr|A0A031MDG2|A0A031MDG2_9PSED Epoxyqueuosine reductase OS=Pseudomonas bauzanensis OX=653930 GN=queG PE=3 SV=1
MPDTAPDYVQLAAQIREIAAELGFQQLGISDPDIGAHEQRLQQWLDAGYHGEMEWMASHGSKRTRPEELVPGTRRVISVRMDYLPTDTGMAKRLADRDAAYISRYALGRDYHKLIRRRLQQLAERIQNLIGPFGFRAFVDSAPVMERALATRSGLGWIGKNTMLLNRKAGSFFFLGELYTDLPLPTDEPYEQDHCGSCSACLSKCPTDAFVGAHVLDARRCISYLTIELKGAIPEELRPQMGNRVFGCDDCQLVCPWNKFAKPTNEQDFSPRHQLDQADLISLFRWDEEQFLKNTEGSPLRRIGHERWLRNLAVGLGNAHTSIPVVEALRSRLDHPSELVREHVRWALTRHGTSPES

SEQ ID NO: 79935 - protein, 356 aa, Pseudomonas benzenivorans
  misc_feature (1)..(356): tr|A0A1G7VCE5|A0A1G7VCE5_9PSED Epoxyqueuosine reductase OS=Pseudomonas benzenivorans OX=556533 GN=queG PE=3 SV =1
MTPNLDLVALAQSIKDWGRELGFQQVGIAGLALTEHEAHLQRWLEAGYQGEMDYMAAHGSKRSHPEQLVPGTLRVVSLRMDYLPGDTQMARRLGQPEKAYVSRYALGRDYHKLIRKRLQQLAERIQQAIGPFGYRAFVDSAPVLEKAIAEQAGLGWIGKNTLVLNRKAGSYFFLGELFVDLPLPVDAAHASEHCGRCTACLEICPTAAFVGPYVLDARRCISYLTIELKGPIPEELRAPIGNRVFGCDDCQMVCPWNRFARPTTQGDFQPRHQLDNAELAELFRWSEEEFLSRTEGSPLRRAGYERWLRNLAVGLGNAPSSIPVLEALEARREHPSALVREHVEWALAQHHSRRPE

SEQ ID NO: 79936 - protein, 357 aa, Pseudomonas borbori
  misc_feature (1)..(357): tr|A0A1I5S774|A0A1I5S774_9PSED Epoxyqueuosine reductase OS=Pseudomonas borbori OX=289003 GN=queG PE=3 SV=1
MTTVALDLAALAQSIKEWGRELGFQQVGIAGLDLSEHEAHLQRWLDAGYQGEMDYMAAHGSKRSHPEQLVPGTLRVVSLRMDYLPGDTQMAQRLGEPEKAYVSRYALGRDYHKLIRKRLQQLAERIQQQIGPFGYRAFVDSAPVLEKAIAKQAGLGWIGKHTLVLNRGAGSYFFLGELFVDLPLPVDAPHASEHCGRCSACLDICPTGAFVGPYVLDARRCISYLTIELKGAIPEELRAPIGNRVFGCDDCQLVCPWNRFARPTEQGDFQPRHQLDNAELAALFRWSEEEFLSRTEGSPLRRAGYERWLRNLAVGLGNAPSSIPVLEALQARREHPSALVREHVEWALARHAERGAS

SEQ ID NO: 79937 - protein, 354 aa, Pseudomonas brassicacearum
  misc_feature (1)..(354): tr|A0A423GUH3|A0A423GUH3_9PSED Epoxyqueuosine reductase OS=Pseudomonas brassicacearum OX=930166 GN=queG PE=3 S V=1
MPAITTDLPALAQSIKDWGRELGFQQVGISGLNLAEHEQHLERWLEAGYHGEMDYMGAHGSKRSHPEELVPGTLRVVSLRMDYLPGDTEMAKRLGQPEKAYVSRYALGRDYHKLIRKRVQQLAEKIQQVIGPFGYRAFVDSAPVLEKAIAEQAGLGWIGKNTLVLNRKAGSYFFLSELFVDLPLPVDPPHSTEHCGRCTACLDICPTKAFVGPYVLDARRCISYLTIELKTAIPEDLRPLIGNRVFGCDDCQIVCPWNRFARPSGESDFKPRHNLDNAELAELFMWDEDKFLSSTEGSPLRRAGYERWLRNLAVGLGNAPSTIPVLEALKARADYPSELVREHVQWALKQHGLS

SEQ ID NO: 79938 - protein, 359 aa, Pseudomonas brassicacearum
  misc_feature (1)..(359): tr|F2KBI1|F2KBI1_PSEBN Epoxyqueuosine reductase OS=Pseu domonas brassicacearum (strain NFM421) OX=994484 GN=que G PE=3 SV=1
MPAIPTDLPALAQSIKEWGRELGFQQVGISGLDLAEHEQHLQRWLDAGYHGEMDYMGAHGSKRSHPEELVPGTLRVVSLRMDYLSGDTHMAQMLGQPEKAYVSRYALGRDYHKLIRKRVQQLAEKIQAVIGPFGYRAFVDSAPVLEKAIAEQAGLGWIGKNTLVLNRKAGSYFFLSELFVDLPLPVDPPHASEHCGKCTACLDICPTNAFVGPYVLDARRCISYLTIELKSAIPEELRPLIGNRVFGCDDCQIVCPWNRFARPSGESDFKPRHNLDNAGLAELFMWDETTFLSSTEGSPLRRAGYERWLRNLAVGLGNAPSTIPVLQALEARRDYPSELVREHVEWALRQHAERQASSL

SEQ ID NO: 79939 - protein, 359 aa, Pseudomonas brenneri
  misc_feature (1)..(359): tr|A0A4R6ZCL4|A0A4R6ZCL4_9PSED Epoxyqueuosine reductase OS=Pseudomonas brenneri OX=129817 GN=queG PE=3 SV=1
MPAITTDLPALAQSIKDWGRELGFQQVGISGLDLAEHEQHLQRWLDAGYHGEMDYMGAHGSKRSHPDELVPGTLRVVSLRMDYLPGDTQMAQLLAQPEKAYISRYALGRDYHKLIRKRVQQLADRIQAQIGPFGFRAFVDSAPVLEKAIAEKAGLGWIGKNTLVLNRKAGSYFFLSELFVDLPLPIDPPHSTEHCGRCTACLDICPTNAFVGPYVLDARRCISYLTIELKSAIPEDLRPLIGNRVFGCDDCQIVCPWNRFARPSGESDFKPRHNLDNAELAELFMWDEDKFLSSTEGSPLRRAGYERWLRNLAVGLGNAPSSIPVLEALKARRDYPSELVREHVEWALNQHAIRQCSSL

SEQ ID NO: 79940 - protein, 359 aa, Pseudomonas brenneri
  misc_feature (1)..(359): tr|A0A5B2UTR9|A0A5B2UTR9_9PSED Epoxyqueuosine reductase OS=Pseudomonas brenneri OX=129817 GN=queG PE=3 SV=1
MPAITTDLPALAQSIKDWGRELGFQQVGISGLDLAEHEQHLQRWLDAGYHGEMDYMGAHGSKRSHPDELVPGTLRVVSLRMDYLPGDTQMAQLLAQPEKAYISRYALGRDYHKLIRKRVQQLADRIQAQIGPFGFRAFVDSAPVLEKAIAEQAGLGWIGKNTLVLNRKAGSYFFLSELFVDLPLPVDPPHTTEHCGRCTACLDICPTNAFVGPYVLDARRCISYLTIELKSAIPEDLRPLIGNRVFGCDDCQIVCPWNRFARPSGESDFKPRHNLDNAELAALFMWDEDKFLSSTEGSPLRRAGYERWLRNLAVGLGNAPSSIPVLEALKARRDYPSELVREHVEWALNQHATRQCSSL

SEQ ID NO: 79941 - protein, 354 aa, Pseudomonas canadensis
  misc_feature (1)..(354): tr|A0A423FKG1|A0A423FKG1_9PSED Epoxyqueuosine reductase OS=Pseudomonas canadensis OX=915099 GN=queG PE=3 SV=1
MPAITSDLPALAQSIKDWGRELGFQQVGISGLDLAEHEQHLQRWLDAGYHGEMDYMGAHGSKRSHPDELVPGTLRVVSLRMDYLPGDTQMAQLLAKPEKAYISRYALGRDYHKLIRKRVQQLADRIQAQIGPFGFRAFVDSAPVLEKAIAEKAGLGWIGKNTLVLNRKAGSYFFLSELFVDLPLPIDAPHSTEHCGRCTACLDICPTNAFVGPYVLDARRCISYLTIELKNAIPEELRPLIGNRVFGCDDCQIVCPWNRFARPTAESDFKPRHNLDNAELAELFMWDEDKFLSSTEGSPLRRAGYERWLRNLAVGLGNAPSSIPVLEALKARRDYPSELVREHVEWALNQHATR

SEQ ID NO: 79942 - protein, 381 aa, Pseudomonas cannabina
  misc_feature (1)..(381): tr|A0A3M3LYC7|A0A3M3LYC7_PSECA Epoxyqueuosine reductase OS=Pseudomonas cannabina OX=86840 GN=queG PE=3 SV=1
MGSDVWQNYTHLGPGFSLRMSAITVERPTSDDLATLALSIKAWGRELGFQDVGISGLDLAEHEQHLQRWLDSGYHGEMDYMAAHGSKRSHPDELVPGTLRVVSLRMDYLPGDSEMAQRLTESEKAYVSRYALGRDYHKLIRKRLQQLAERIQQAIGPFGFRAFVDSAPVLEKAIAEQAGLGWIGKNTLVLNRKAGSFFFLGELFVDIPLPVDAPHATEHCGRCTACLDICPTAAFVGPYVLDARRCISYLTIELKTAIPEELRPLIGNRVFGCDDCQIVCPWNRFARPTDQRDFQPRHNLDNAGLAELFLWDEDTFLGNTEGSPLRRAGYERWLRNLAVGLGNAPSTIPVIEALQARRDYPSELVKEHVEWALRRHGVATL

SEQ ID NO: 79943 - protein, 392 aa, Pseudomonas cannabina
  misc_feature (1)..(392): tr|A0A3M3R303|A0A3M3R303_PSECA Epoxyqueuosine reductase OS=Pseudomonas cannabina OX=86840 GN=queG PE=3 SV=1
MRFSVEHASMGSDVWQNYTHLGPGFSLRMSAITAERPTSDDLATLALSIKAWGRELGFQDVGISGLDLAEHEQHLQRWLDAGYHGEMDYMAAHGSKRSHPDELVPGTLRVVSLRMDYLPGDSEMAQRLTESEKAYVSRYALGRDYHKLIRKRLQQLAERIQQAIGPFGFRAFVDSAPVLEKAIAEQAGLGWIGKNTLVLNRKAGSFFFLGELFVDIPLPVDAPHATEHCGRCTACLDICPTAAFVGPYVLDARRCISYLTIELKTAIPEELRPLIGNRVFGCDDCQIVCPWNRFARPTDQRDFQPRHNLDNAGLAELFLWDEDTFLGNTEGSPLRRAGYERWLRNLAVGLGNAPSTIPVIEALQARRDYPSELVKEHVEWALRRHGVADVER

SEQ ID NO: 79944 - protein, 354 aa, Pseudomonas capeferrum
  misc_feature (1)..(354): tr|A0A084C7W4|A0A084C7W4_9PSED Epoxyqueuosine reductase OS=Pseudomonas capeferrum OX=1495066 GN=queG PE=3 SV=1
MSACTLDLAALAQSIKNWGRELGFAHVGIAGVDLGEHEQHLQRWLDAGYQGEMEYLAAHDGKRAHPDQLIPGTVRVVSLRMDYLPGDTQMAQRLAQPEKAYVSRYALGRDYHKLVRKRVQHLADRIQEDIGPFGYRAFVDSAPVLEKAIAEQAGLGWIGKNTLLLNRKAGSYFFLAELFVDLPLPVDEAHTSEHCGRCQACLDICPTQAFVGPYVLDARRCISYLTIELKGAIPVELRSMMGNRVFGCDDCQIVCPWNRFARPTQESDFQPRHGLENAELAEMFLWDEKTFLRKTEGGPLRRAGYERWLRNLAVGLGNAPSTIPVLEALKARRDDPSALVREHVEWALARHGQV

SEQ ID NO: 79945 - protein, 381 aa, Pseudomonas caricapapayae
  misc_feature (1)..(381): tr|A0A3M6F334|A0A3M6F334_9PSED Epoxyqueuosine reductase OS=Pseudomonas caricapapayae OX=46678 GN=queG PE=3 SV= 1
MGSDVWQNYTHLGPGFSLRMSAITAVLPTSDDLAALALSIKAWGRELGFQEVGISGLDLTEHEQHLQRWLEAGYHGEMDYMAAHGSKRSHPDELVPGTLRVVSLRMDYLPGDTKMAERLTEPEKAYVSRYALGRDYHKLIRKRLQQLAERIQQAIGPFGFRAFVDSAPVLEKAIAEQAGLGWIGKNTLVLNRKAGSFFFLGELFVDIPLPVDAPHATEHCGRCTACLDICPTAAFVGPYVLDARRCISYLTIELKTAIPEELRPLIGNRVFGCDDCQIVCPWNRFARPTEQSDFQPRHNLDNAGLAELFLWDEEKFLGSTEGSPLRRAGYERWLRNLAVGLGNAPSTIPVIEALQTRRDYPSELVREHVEWALRRHGVAPL

SEQ ID NO: 79946 - protein, 381 aa, Pseudomonas caricapapayae
  misc_feature (1)..(381): tr|A0A0P9MDY5|A0A0P9MDY5_9PSED Epoxyqueuosine reductase OS=Pseudomonas caricapapayae OX=46678 GN=queG PE=3 SV= 1
MGSDVWQNYTHLGPGFSLRMSAITAVLPTSDDLAALALSIKAWGRELGFQEVGISGLDLAEHEQHLQRWLEAGYHGEMDYMAAHGSKRSHPDELVPGTLRVVSLRMDYLPGDTKMAERLTEPEKAYVSRYALGRDYHKLIRKRLQQLAERIQQAIGPFGFRAFVDSAPVLEKAIAEQAGLGWIGKNTLVLNRKAGSFFFLGELFVDIPLPVDAPHATEHCGRCTACLDICPTAAFVGPYVLDARRCISYLTIELKTAIPEELRPLIGNRVFGCDDCQIVCPWNRFARPTEQSDFQPRHNLDNAGLAELFLWDEEKFLGSTEGSPLRRAGYERWLRNLAVGLGNAPSTIPVIEALQTRRDYPSELVREHVEWALRRHGVAPL

SEQ ID NO: 79947 - protein, 361 aa, Pseudomonas caspiana
  misc_feature (1)..(361): tr|A0A1Y3P7I1|A0A1Y3P7I1_9PSED Epoxyqueuosine reductase OS=Pseudomonas caspiana OX=1451454 GN=queG PE=3 SV=1
MPVITVDSPNTVDLVTLAQSIKEWGRELGFQQVGIAGLDLAEHEQHLERWLEAGYHGEMDYMAAHGSKRSHPEELVPGTLRVVSLRMDYLPGDTEMTQRLTEPEKAYVSRYALGRDYHKLIRKRVQQLAERIQQAIGPFGYRAFVDSAPVLEKAIAEKAGIGWIGKNTLVLNRKAGSFFFLSELFVDLPLPVDAPHATEHCGRCTACLDICPTAAFVGPYVLDARRCISYLTIELKTAIPEELRPLIGNRVFGCDDCQIVCPWNRFARPTDQSDFQPRHNLDNAGLAELFMWDEDKFLSNTEGSPLRRAGYERWLRNLAVGLGNAPSTIPVLEALEARREYPSELVREHVEWALRQHQHRG

SEQ ID NO: 79948 - protein, 354 aa, Pseudomonas caspiana
  misc_feature (1)..(354): tr|A0A502IYY0|A0A502IYY0_9PSED Epoxyqueuosine reductase OS=Pseudomonas caspiana OX=1451454 GN=queG PE=3 SV=1
MPAITTDLPALAQSIKDWGRELGFQQVGISGLDLAEHEQHLERWLAAGYHGEMDYMGAHGSKRSHPEELVPGTLRVVSLRMDYLPGDTEMAKRLAQPAKAYVSRYALGRDYHKLIRKRVQQLADKIQAEIGPFGFRAFVDSAPVLEKAIAEQAGLGWIGKNTLVLNRKAGSYFFLSELFVDLPLPVDPPHATEHCGRCTACLDICPTNAFVGPYVLDARRCISYLTIELKSAIPEDLRPLIGNRVFGCDDCQIVCPWNRFARPSGESDFKPRHNLDNAELAELFMWDEEKFLSSTEGSPLRRAGYERWLRNLAVGLGNAPSSIPVLEALKARRDYPSELVREHVQWALKQHGLL

SEQ ID NO: 79949 - protein, 354 aa, Pseudomonas cedrina
  misc_feature (1)..(354): tr|A0A2S9E5H5|A0A2S9E5H5_PSECE Epoxyqueuosine reductase OS=Pseudomonas cedrina OX=651740 GN=queG PE=3 SV=1
MPAITSDLPALAQSIKDWGRELGFQQVGISGLDLAEHEQHLQRWLDAGYHGEMEYMGAHGSKRSHPEELVPGTLRVVSLRMDYLPGDTQMAQLLAQPEKAYISRYALGRDYHKLIRKRVQQLADRIQAQIGPFGFRAFVDSAPVLEKAIAEQAGLGWIGKNTLVLNRKAGSYFFLSELFVDLPLPVDPPHATEHCGRCTACLDICPTNAFVGPYVLDARRCISYLTIELKSAIPEDLRPLIGNRVFGCDDCQIVCPWNRFARPTAESDFKPRHNLDNAELAELFMWDEDKFLSSTEGSPLRRAGYERWLRNLAVGLGNAPSSIPVLEALKARRDYPSELVREHVEWALEQHAVR

SEQ ID NO: 79950 - protein, 355 aa, Pseudomonas cedrina
  misc_feature (1)..(355): tr|A0A1V2KAN7|A0A1V2KAN7_PSECE Epoxyqueuosine reductase OS=Pseudomonas cedrina subsp. cedrina OX=76762 GN=queG PE=3 SV=1
MPAITTDLPALAQSIKDWGRELGFQQVGISGLDLAEHEQHLQRWLDAGYHGEMDYMGAHGSKRSHPDELVPGTLRVVSLRMDYLPGDTHMAQRLAQPEKAYISRYALGRDYHKLIRKRVQQLADRIQAQIGPFGFRAFVDSAPVLEKAIAEQAGLGWIGKNTLVLNRKAGSYFFLSELFVDLPLPVDPPHGTEHCGRCTACLDICPTNAFVGPYVLDARRCISYLTIELKSAIPEDLRPLIGNRVFGCDDCQIVCPWNRFARSTAEGDFKPRHNLDNAQLAELFMWDEDKFLSSTEGSPLRRAGFERWLRNLAVGLGNAPSSIPVLEALKARRDYPSELVREHVEWALKQHAERQ

SEQ ID NO: 79951 - protein, 381 aa, Pseudomonas cerasi
  misc_feature (1)..(381): tr|A0A193SV66|A0A193SV66_9PSED Epoxyqueuosine reductase OS=Pseudomonas cerasi OX=1583341 GN=queG PE=3 SV=1
MGSDVWQNYTHLGPGFSLRMSAITAVLPSSDDLAALAVSIKAWGRELGFQEVGISGLDLAEHEQHLQRWLDAGYHGEMDYMAAHGSKRSHPAELVPGTLRVVSLRMDYLPGDTEMAQRLTEPEKAYVSRYALGRDYHKLIRKRLQQLAERIQQAVGPFGFRAFVDSAPVLEKAIAEQAGLGWIGKNTLVLNRKAGSFFFLGELFVDIPLPVDAPHATEHCGRCTACLDICPTAAFIGPYVLDARRCISYLTIELKTAIPEELRPLIGNRVFGCDDCQIVCPWNRFARPTEQSDFQPRHNLDNAGLAELFLWDEEKFLGSTEGSPLRRAGYERWLRNLAVGLGNAPSTIPVIEALHARRDYPSELVREHVEWALQRHGVAPL

SEQ ID NO: 79952 - protein, 376 aa, Pseudomonas chengduensis
  misc_feature (1)..(376): tr|A0A1G6JUV2|A0A1G6JUV2_9PSED Epoxyqueuosine reductase OS=Pseudomonas chengduensis OX=489632 GN=queG PE=3 SV= 1
MHGSLTTDVWQNYTYVHRLRPPMSDQTLDLNALALSIKDWGRELGFQQVGITDVELGEHEAHLQRWLAAGYQGEMEYMAAHGSKRSHPDELVPGTLRVVSLRMDYLPGDTQMAQRLKESEQAYVSRYALGRDYHKLIRKRLQQLAERIQQQIGPFGYRAFVDSAPVLEKAIAEKAGLGWIGKNTLVLNRKAGSYFFLGELFVDLPLPVDAPHASEHCGRCTACMDICPTAAFAGPYVLDARRCISYLTIELKGSIPEELRAPIGNRVFGCDDCQIVCPWNRFARPTEQGDFQPRHGLDNSGLAELFMWTEEEFLSRTEGSPLRRAGYERWLRNLAVGLGNAPSTIPVLQALQARREHPSELVREHVEWALARHGAL

SEQ ID NO: 79953 - protein, 357 aa, Pseudomonas chloritidismutans
  misc_feature (1)..(357): tr|V4QI89|V4QI89_PSECO Epoxyqueuosine reductase OS=Pseu domonas chloritidismutans AW-1 OX=1263865 GN=queG PE=3 SV=1
MSSLSLDPAALAQSIKEWGRELGFQQVGITDVDLGEHEAHLEAWLAAGYQGEMDYMAAHGSKRSRPDELVPGTLRVISLRMDYLPGDTRMTQQLASPEKAYVSRYALGRDYHKLIRKRIQQLAERIQQMVGPFGFRAFVDSAPVLEKAAGQQAGLGWIGKNTLLLNRKAGSWFFLGELFVDIALPVDEPTTRDHCGSCHACLDVCPTDAFVGERLLDARRCISYLTIELKGAIPVELRDKIGNRVFGCDDCQIVCPWNRFARPTEQSDFQPRHSLDNAELATLFRWTEEEFLSRTEGSPLRRAGYQRWLRNLAVGLGNAPSSIPVLEALQARRDDPSELVREHVEWALAQHAQRQPD

SEQ ID NO: 79954 - protein, 359 aa, Pseudomonas chlororaphis
  misc_feature (1)..(359): tr|A0A423DIH5|A0A423DIH5_9PSED Epoxyqueuosine reductase OS=Pseudomonas chlororaphis OX=587753 GN=queG PE=3 SV= 1
MPAITTDLPALAQSIKDWGRELGFQQVGISGLDLAEHEQHLERWLAAGYHGEMEYMGAHGSKRSHPDQLVPGTLRVVSLRMDYLPGDTQMAQRLAQPEKAYVSRYALGRDYHKLIRKRVQQLAERIQQAIGPFGYRAFVDSAPVLEKAIAEQAGLGWIGKNTLVLNRKAGSYFFLSELFVDLPLPVDAPHATEHCGRCTACLDICPTNAFVGPYVLDARRCISYLTIELKSAIPEDLRSLIGNRVFGCDDCQIVCPWNRFARPSGESDFKPRHNLDNAELAELFLWDEDTFLSSTEGSPLRRAGYERWLRNLAVGLGNAPSSIPVLEALKARQDHPSELVREHVQWALAQHASRQCSSL

SEQ ID NO: 79955 - protein, 359 aa, Pseudomonas chlororaphis
  misc_feature (1)..(359): tr|A0A3G7BC24|A0A3G7BC24_9PSED Epoxyqueuosine reductase OS=Pseudomonas chlororaphis subsp. piscium OX=1513890 GN=queG PE=3 SV=1
MPAITTDLPALAQSIKDWGRELGFQQVGISGLDLAEHEQHLERWLEAGYHGEMDYMGAHGSKRSHPDELVPGTLRVVSLRMDYLPGDTQMAQRLAQPEKAYVSRYALGRDYHKLIRKRVQQLAERIQKEIGPFGYRAFVDSAPVLEKAIAEQAGLGWIGKNTLVLNRKAGSYFFLSELFVDLPLPVDEPHASEHCGRCTACLDICPTNAFVGPYVLDARRCISYLTIELKNAIPEDLRPLIGNRVFGCDDCQIVCPWNRFARPSGEGDFKPRHNLDNAELAELFMWDEDKFLSSTEGSPLRRAGYERWLRNLAVGLGNAPSSIPVLEALKARRDYPSELVREHVEWALKQHANRHCSSL

SEQ ID NO: 79956 - protein, 359 aa, Pseudomonas cichorii
  misc_feature (1)..(359): tr|A0A3M4WA68|A0A3M4WA68_PSECI Epoxyqueuosine reductase OS=Pseudomonas cichorii OX=36746 GN=queG PE=3 SV=1
MPAITAELPTSDDLISLAQSIKEWGRELGFQQVGISGLDLAEHEQHLERWLEAGYHGEMDYMAAHGSKRSHPDELVPGTLRVVSLRMDYLPGDTEMAQRLTEPEKAYVSRYALGRDYHKLVRKRVQQLAERIQQSIGPFGFRAFVDSAPVLEKAIAEQAGLGWIGKNTLVLNRKAGSFFFLGELFVDLPLPVDAPHATEHCGRCTACLDICPTAAFVGPYVLDARRCISYLTIELKTSIPEELRSLIGNRVFGCDDCQIVCPWNRFARPTSQSDFQPRHNLDNAGLAELFMWNEEKFLSSTEGSPLRRAGYERWLRNLAVGLGNAPSTIPVLQALEARRDHPSEMVREHVEWALKQHAL

SEQ ID NO: 79957 - protein, 364 aa, Pseudomonas cichorii
  misc_feature (1)..(364): tr|A0A3M3T5A6|A0A3M3T5A6_PSECI Epoxyqueuosine reductase OS=Pseudomonas cichorii OX=36746 GN=queG PE=3 SV=1
MPAITAELPTSDDLTSLAQSIKEWGRELGFQQVGISGLDLAEHEQHLERWLKAGYHGEMDYMAAHGSKRSHPDELVPGTLRVVSLRMDYLPGDTEMAQRLTEPEKAYVSRYALGRDYHKLVRKRVQQLAERIQQAIGPFGFRAFVDSAPVLEKAIAEQAGLGWIGKNTLVLNRKAGSFFFLGELFVDLPLPVDAPHATEHCGRCTACLDICPTAAFVGPYVLDARRCISYLTIELKTAIPEELRPLIGNRVFGCDDCQIVCPWNRFARPTEQNDFQPRHNLDNAGLAELFMWDEEKFLSSTEGSPLRRAGYERWLRNLAVGLGNAPSTIPVLQALEARRDYPSEMVREHVEWAIGRHQAASGKL

SEQ ID NO: 79958 - protein, 362 aa, Pseudomonas citronellolis
  misc_feature (1)..(362): tr|A0A1A9KJU6|A0A1A9KJU6_9PSED Epoxyqueuosine reductase OS=Pseudomonas citronellolis OX=53408 GN=queG PE=3 SV= 1
MHDSTPDYSAIAERIKAWGRELGFQQVGIGGLDLASHGEHLQRWLAAGYHGEMDYMGAHGSKRWRPDELVPGTLRVVSLRMDYLPGDTRMAQRLAEPEKAYVSRYALGRDYHKLVRKRLQQLAERIQQEVGPFGYRAFVDSAPVLEKAIGEQAGLGWIGKNTLLLNRKAGSYFFLGELFTDLPLPLDEPHGSEHCGRCSACLDICPTNAFVGPYVLDARRCISYLTIELKGPIPEELRAPMGNRVFGCDDCQIVCPWNRFARPSEQGDFQPRHGLDNAELAELFLWSEEEFLSRTEGSPLRRAGYERWLRNLAVGLGNAPSSIPVIEALKARREFPSELVREHVEWALRRHGIAPTPSGNAP

SEQ ID NO: 79959 - protein, 355 aa, Pseudomonas citronellolis
  misc_feature (1)..(355): tr|A0A4Z0IUA9|A0A4Z0IUA9_9PSED Epoxyqueuosine reductase OS=Pseudomonas citronellolis OX=53408 GN=queG PE=3 SV= 1
MHDSTSDYSAIAERIKAWGRELGFQQVGIGGLDLASHGEHLQRWLAAGYHGEMDYMGAHGSKRWRPDELVPGTLRVVSLRMDYLPGDTRMAQRLAEPEKAYVSRYALGRDYHKLVRKRLQQLAERIQQEVGPFGYRAFVDSAPVLEKAIGEQAGLGWIGKNTLLLNRKAGSYFFLGELFTDLPLPLDDPHGSEHCGRCSACLDICPTNAFVGPYVLDARRCISYLTIELKGPIPEELRAPMGNRVFGCDDCQIVCPWNRFARPSEQGDFQPRHGLDNAELAELFLWSEEEFLSRTEGSPLRRAGYERWLRNLAVGLGNAPSSIPVIEALKARREFPSELVREHVAWALRRHGVER

SEQ ID NO: 79960 - protein, 356 aa, Pseudomonas coleopterorum
  misc_feature (1)..(356): tr|A0A1H5DJP8|A0A1H5DJP8_9PSED Epoxyqueuosine reductase OS=Pseudomonas coleopterorum OX=1605838 GN=queG PE=3 S V=1
MSAPTIDLPALALSIKQWGRELGFQQVGIAGLDLAEHEQHLQRWLEAGYHGEMDYMAAHGSKRSHPEQLVPGTLRVVSLRMDYLPGDTHMAQRLAEPEKAYVSRYALGRDYHKLIRKRVQHLAERIQQDIGPFGFRAFVDSAPVLEKAIAQEAGLGWIGKNTLVLNRKAGSYFFLAELFVDLPLPVDEAHASEHCGRCTACLEICPTAAFVGPYVLDARRCISYLTIELKGPIPTELRPLIGNRVFGCDDCQIVCPWNRFARPSGEGDFQPRHQLDNAELAQLFLWDEEHFLSSTEGSPLRRAGYERFLRNLAVGLGNAPSSIPVLEALKTRREDPSELVREHVEWALAAHAQRSS

SEQ ID NO: 79961 - protein, 376 aa, Pseudomonas composti
  misc_feature (1)..(376): tr|A0A1I5JI47|A0A1I5JI47_9PSED Epoxyqueuosine reductase OS=Pseudomonas composti OX=658457 GN=queG PE=3 SV=1
MHDSLTTDVWQNYTHVHRLRPPMSDQTLDLNALALSIKDWGRELGFQQVGITDVELGEHEAHLQRWLDAGYQGEMDYMAAHGSKRSHPDELVPGTLRVVSLRMDYLPGDTQMAQRLKEPEQAYVSRYALGRDYHKLIRKRLQQLAERIQQQIGPFGYRAFVDSAPVLEKAIAEKAGLGWIGKNTLVLNRKAGSYFFLGELFVDLPLPVDAAHASEHCGRCSACMDICPTAAFAGPYVLDARRCISYLTIELKGSIPVELRAPIGNRVFGCDDCQIVCPWNRFARPTEQGDFQPRHGLDNSGLAELFLWTEEEFLSRTEGSPLRRAGYERWLRNLAVGLGNAPSTIPVLLALQARREHPSELVREHVEWALERHGAL

SEQ ID NO: 79962 - protein, 390 aa, Pseudomonas congelans
  misc_feature (1)..(390): tr|A0A0P9LVP6|A0A0P9LVP6_9PSED Epoxyqueuosine reductase OS=Pseudomonas congelans OX=200452 GN=queG PE=3 SV=1
MRFSVEHASMGSDVWQNYTHLGPGFSLRMSAITAVLPTSDDLAALAVSIKAWGRELGFQEVGISGLDLAEHEQHLQRWLDAGYHGEMDYMAAHGSKRSHPDELVPGTLRVVSLRMDYLPGDTEMAQRLTEPEKAYVSRYALGRDYHKLIRKRLQQLAERIQQAIGPFGFRAFVDSAPVLEKAIAEQAGLGWIGKNTLVLNRKAGSFFFLGELFVDIPLPVDAPHATEHCGRCTACLDICPTAAFIGPYVLDARRCISYLTIELKTAIPEELRPLIGNRVFGCDDCQIVCPWNRFARPTEQSDFQPRHNLDNAGLAELFLWDEEKFLGSTEGSPLRRAGYERWLRNLAVGLGNAPSTIPVIEALQARRDYPSELVREHVEWALQRHGVAPL

SEQ ID NO: 79963 - protein, 362 aa, Pseudomonas coronafaciens
  misc_feature (1)..(362): tr|A0A3M4BPZ9|A0A3M4BPZ9_9PSED Epoxyqueuosine reductase OS=Pseudomonas coronafaciens pv. atropurpurea OX=12913 5 GN=queG PE=3 SV=1
MSAITAVLPTSDDLAALALSIKAWGRELGFQEVGISGLDLAEHEQHLQRWLDEGYHGEMDYMAAHGSKRSHPDELVPGTLRVVSLRMDYLPGDSEMAQRLAEPEKAYVSRYALGRDYHKLIRKRLQQLAERIQQAIGPFGFRAFVDSAPVLEKAIAQQAGLGWIGKNTLVLNRKAGSFFFLGELFVDIPLPVDAPHATEHCGRCTACLDICPTAAFVGPYVLDARRCISYLTIELKTAIPEELRPLIGNRVFGCDDCQIACPWNRFARPTDQRDFQPRHNLDNAGLAELFLWDEETFLANTEGSPLRRAGYERWLRNLAVGLGNAPSTIPVIEALQAKRDYPSELVREHVEWALQRHGLAPL

SEQ ID NO: 79964 - protein, 390 aa, Pseudomonas coronafaciens
  misc_feature (1)..(390): tr|A0A0Q0FX31|A0A0Q0FX31_9PSED Epoxyqueuosine reductase OS=Pseudomonas coronafaciens pv. zizaniae OX=251700 GN =queG PE=3 SV=1
MRFSVEHASIGSDVWQNYTHLGPGFSLRMSAITAVLPTSDDLAALALSIKAWGRELGFQEVGISGLDLAEHEQHLQRWLDEGYHGEMDYMAAHGSKRSHPDELVPGTLRVVSLRMDYLPGDSEMAQRLAEPEKAYVSRYALGRDYHKLIRKRLQQLAERIQQAIGPFGFRAFVDSAPVLEKAIAQQAGLGWIGKNTLVLNRKAGSFFFLGELFVDIPLPVDAPHATEHCGRCTACLDICPTAAFVGPYVLDARRCISYLTIELKTAIPEELRPLIGNRVFGCDDCQIACPWNRFARPTDQRDFQPRHNLDNAGLAELFLWDEETFLANTEGSPLRRAGYERWLRNLAVGLGNAPSTIPVIEALQAKRDYPSELVREHVEWALQRHGLAPL

SEQ ID NO: 79965 - protein, 359 aa, Pseudomonas corrugata
  misc_feature (1)..(359): tr|A0A3M3F199|A0A3M3F199_9PSED Epoxyqueuosine reductase OS=Pseudomonas corrugata OX=47879 GN=queG PE=3 SV=1
MPAIPTDLPALAQSIKDWGRELGFQQVGISGLDLGEHEQHLQRWLDAGYHGEMEYMGAHGSKRSHPEELVPGTLRVVSLRMDYLPGDTHMAQMLGQPEKAYISRYALGRDYHKLIRKRVQQLAEKIQAVIGPFGYRAFVDSAPVLEKAIAEQAGLGWIGKNTLVLNRKAGSYFFLSELFVDLPLPVDPPHTSEHCGKCTACLDICPTNAFIGPYVLDARRCISYLTIELKSAIPEELRPLIGNRVFGCDDCQIVCPWNRFARPSGENDFKPRHNLDNAGLAELFLWDEETFLKSTEGSPLRRAGYERWLRNLAVGLGNAPSTIPVIQALEARRDYPSELVREHVEWALRQHAQRQTSSL

SEQ ID NO: 79966 - protein, 354 aa, Pseudomonas costantinii
  misc_feature (1)..(354): tr|A0A1S2V9M0|A0A1S2V9M0_9PSED Epoxyqueuosine reductase OS=Pseudomonas costantinii OX=168469 GN=queG PE=3 SV=1
MPAITTDLPALAQSIKDWGRELGFQQVGISGLDLAEHEQHLQRWLDAGYHGEMEYMGAHGSKRSHPDELVPGTLRVVSLRMDYLPGDTHMAQLLAKPEKAYISRYALGRDYHKLIRKRVQQLADRIQAQIGPFGFRAFVDSAPVLEKAIAEQAGLGWIGKNTLVLNRKAGSYFFLSELFVDLPLPVDAPHSTEHCGRCTACLDICPTNAFVGPYVLDARRCISYLTIELKSAIPEDLRPLIGNRVFGCDDCQIVCPWNRFARATDEGDFKPRHNLDNAELAELFMWDEDKFLSSTEGSPLRRAGYERWLRNLAVGLGNAPSSIPVLEALKARRDYPSELVREHVEWALNQHATR

SEQ ID NO: 79967 - protein, 364 aa, Pseudomonas cremoricolorata
  misc_feature (1)..(364): tr|A0A089WG79|A0A089WG79_9PSED Epoxyqueuosine reductase OS=Pseudomonas cremoricolorata OX=157783 GN=queG PE=3 SV=1
MSACLPDLPTLTQSIKDWGRELGFAHVGIAGIELGEHEQHLQRWLDAGYHGELEYMAAHGSKRSRPAELIPGTLRVISLRMDYLPGDTQMAKRLAQPEKAYISRYALGRDYHKLVRKRVQHLAERIQQAIGPFGYRAFVDSAPVLEKAIAQQAGLGWIGKNTLLLNRKAGSYFFLAELFVDLPLPVDEAQASEHCGRCQACLDVCPTQAFVGPYLMDARRCISYLTIELKNAIPVELRGLIGNRVFGCDDCQIVCPWNRFAKPTEEADFMPRHGLDNAELAELFLWDEARFLSLSEGSPLRRAGYERWLRNLAVGLGNAPSTIPVLEALKARREHPSELVREHVEWALAEHQRRSGGESPGTCS

SEQ ID NO: 79968 - protein, 363 aa, Pseudomonas cuatrocienegasensis
  misc_feature (1)..(363): tr|A0A1H9J8S3|A0A1H9J8S3_9PSED Epoxyqueuosine reductase OS=Pseudomonas cuatrocienegasensis OX=543360 GN=queG P E=3 SV=1
MPTPIPDLAHLAQSIKDWGRELGFQQVGIADVSLGEHEAHLQRWLDAGYQGEMDYMGAHGSKRSHPDELVPGTLRVVSLRMDYLPGDTQMAERLAAPEQAYVSRYALGRDYHKLIRKRLQQLAERIQAAIGPFGYRAFVDSAPVLEKAIAEQAGLGWIGKNTLVLNRKAGSYFFLGELFVDLALPVDPPHATEHCGRCTACLDICPTAAFVSPYVLDARRCISYLTIELKGPIPLELRAPIGNRVFGCDDCQMVCPWNRFARPTEQADFQPRHGLDNSSLAELFLWSETEFLARTEGSPLRRAGYERWLRNLAVGLGNAPSTIPVLEALNARRLHPSELVREHVSWALAQHAQRGAQTAALTP

SEQ ID NO: 79969 - protein, 355 aa, Pseudomonas daroniae
  misc_feature (1)..(355): tr|A0A4V6MX55|A0A4V6MX55_9PSED Epoxyqueuosine reductase OS=Pseudomonas daroniae OX=2487519 GN=queG PE=3 SV=1
MTDATLDLTSLAQSIKDWGRELGFQQVGISGLELGEHEAHLQRWLDAGYQGEMDYMAAHGRKRSHPDELVPGTLRVVSLRMDYLPGDTQMAQRLQEPEKAYVSRYALGRDYHKLIRKRLQQLAERIQQAIGPFGYRAFVDSAPVLEKAIAEQSGLGWIGKNTLVLNRKAGSYFFLGELFVDIPLPEDAPHASEHCGRCSACLDVCPTAAFVGPYVLDARRCISYLTIELKGPIPEELRAPIGNRVFGCDDCQMVCPWNRFAKATEQSDFQPRHSLDNAELAELFRWSEEEFLSRTEGSPLRRAGYERWLRNLAVGLGNAPSSIPVLEALEARREHPSELVREHVQWALEQHARRA

SEQ ID NO: 79970 - protein, 367 aa, Pseudomonas deceptionensis
  misc_feature (1)..(367): tr|A0A0J6GC68|A0A0J6GC68_PSEDM Epoxyqueuosine reductase OS=Pseudomonas deceptionensis OX=882211 GN=queG PE=3 S V=1
MPAITADLPALAQSIKEWGRELGFQQVAIAGLDLGEHEHHLQRWLDAGYHGDMEYMGAHGSKRSHPEELVPGTLRVVSLRMDYLPGDTHMAQLLAQPEKAYISRYALGRDYHKLIRKRVQQLADRIQADIGPFGFRAFVDSAPVLEKAIAQQAGLGWIGKNTLVLNRKAGSYFFLSELFVDIPLPVDPPHETEHCGRCTACLDICPTNAFVGPYVLDARRCISYLTIELKTAIPEELRSMIGNRVFGCDDCQIVCPWNRFARTTTEGDFKPRHNLDNAGLAELFMWDEDKFLSSTEGSPLRRAGYERWLRNLAVGLGNAPSTIPVLEALKARREYPSELVQEHVEWALEQHANRLPSPQPSPGGSGS

SEQ ID NO: 79971 - protein, 355 aa, Pseudomonas delhiensis
  misc_feature (1)..(355): tr|A0A239EXW1|A0A239EXW1_9PSED Epoxyqueuosine reductase OS=Pseudomonas delhiensis OX=366289 GN=queG PE=3 SV=1
MHDSTSDYSTIAERIKAWGRELGFQQVGIGGLDLESHGEHLQRWLAAGYQGEMDYMGAHGSKRWRPDELVPGTLRVVSLRMDYLPGDTRMAQRLAEPEKAYVSRYALGRDYHKLVRKRLQQLAERIQAEVGPFGYRAFVDSAPVLEKAIGEQAGLGWIGKNTLLLNRKAGSYFFLGELFTDLPLPLDEPHGSEHCGRCSACLDICPTNAFVGPYVLDARRCISYLTIELKGPIPEELRAPMGNRVFGCDDCQIVCPWNRFARPTEQGDFQPRHGLDNAGLAELFLWSEEEFLSRTEGSPLRRAGYERWLRNLAVGLGNAPTSIPVVEALKARREFPSELVREHVEWALRRHGVER

SEQ ID NO: 79972 - protein, 353 aa, Pseudomonas denitrificans
  misc_feature (1)..(353): tr|A0A5J6R7G7|A0A5J6R7G7_PSEDE tRNA epoxyqueuosine(34) reductase QueG OS=Pseudomonas denitrificans OX=43306 GN =queG PE=4 SV=1
MHDSTLDYADLALSIKDWGRELGFQQVGISGLDLEAHGEHLQRWLEAGYHGEMDYMGAHGSKRWRPDELVPGTLRVVSLRMDYLPGDTRMAQVLGDPQKAYVSRYALGRDYHKLIRKRLQQLAERIQQRVGPFGFRAFVDSAPVLEKAIAEQSGLGWIGKNTLVLNRKAGSYFFLGELFTDLPLPVDQPHGTEHCGRCSACMDICPTAAFVAPYVLDARRCISYLTIELKGPIPEDLRPLIGNRVFGCDDCQMVCPWNRFARATDQGDFQPRHSLDNAALAELFLWTEEEFLSRTEGSPLRRAGYERWLRNLAVGLGNAPSTIPVIEALRARREFPSELVREHVEWALRRHGL

SEQ ID NO: 79973 - protein, 357 aa, Pseudomonas donghuensis
  misc_feature (1)..(357): tr|A0A2M9VI59|A0A2M9VI59_9PSED Epoxyqueuosine reductase OS=Pseudomonas donghuensis OX=1163398 GN=queG PE=3 SV= 1
MSASAPDLPTLAQSIKDWGRELGFAHVGIAGVDLGEHEKHLERWLEAGYHGEMDYMGAHGSKRSHPDELVPGTLRVVSLRMDYLPGDTRMAQQLAQPEKAYISRYALGRDYHKLVRKRVQHLAERIQKEIGPFGFRAFVDSAPVLEKAIAEQAGLGWIGKNTLLLNRKAGSYFFLAELFVDMPLPVDPPHASEHCGRCSACLDICPTQAFVGPYVLDARRCISYLTIELKSAIPEELRPLIGNRVFGCDDCQIVCPWNRFARPSGESDFKPRHNLDSAGLAELFMWDEQTFLDSTEGSPLRRAGYERWLRNLAVGLGNAPSTIQVLEALKARREYPSELVREHVEWALGQHAERQAG

SEQ ID NO: 79974 - protein, 355 aa, Pseudomonas dryadis
  misc_feature (1)..(355): tr|A0A4Q9QWC0|A0A4Q9QWC0_9PSED Epoxyqueuosine reductase OS=Pseudomonas dryadis OX=2487520 GN=queG PE=3 SV=1
MSHVALDLASLAQSIKDWGRELGFQQVGIAGLELGEHEAHLQRWLDAGYQGEMDYMAAHGRKRSHPDELVPGTLRVVSLRMDYLPGDTQMAQRLGEPEKAYVSRYALGRDYHKLIRKRLQQLAERIQQVIGPFGYRAFVDSAPVLEKAIAEQAGLGWIGKNTLVLNRKAGSYFFLGELFVDIPLPEDPPHGSEHCGRCSACLDICPTAAFVGPYVLDARRCISYLTIELKGSIPEELRAPIGNRVFGCDDCQMVCPWNRFARPSEQHDFQPRHSLDNAELAQLFRWSEDEFLSRTEGSPLRRAGYERWLRNLAVGLGNAPSSIPVLEALNARRDHPSALVREHVEWALGRHGVVS

SEQ ID NO: 79975 - protein, 358 aa, Pseudomonas duriflava
  misc_feature (1)..(358): tr|A0A562Q6Q5|A0A562Q6Q5_9PSED Epoxyqueuosine reductase OS=Pseudomonas duriflava OX=459528 GN=queG PE=3 SV=1
MSLPTLDLDTLAQTIKDWGRELGFQQTGITGVDLADHEAYLERWLAAGYHGEMDYMAAHGRKRSRPDELVPGTLRIVSLRMDYLPGDTEMARRLAEPTGAYVSRYALGRDYHKLIRKRLQQLAERIQATIGPFGYRAFVDSAPVLEKALAEKAGLGWIGKNTLVLNRKAGSYFFLGELFTDLPLPVDAPHAGNHCGRCSACMDICPTAAFVAPYVLDARRCISYLTIELKGSIPEELRPLIGNRVFGCDDCQIVCPWNRFAKPTTQPDFQPRHNLDNSDLVSLFRWTEAEFLSRTEGSPLRRAGYERWLRNLAVALGNAPTSIPVVEALKLHRAHPSPLVREHVEWALGRHGETASIA

SEQ ID NO: 79976 - protein, 354 aa, Pseudomonas entomophila
  misc_feature (1)..(354): tr|A0A3S8UR76|A0A3S8UR76_9PSED Epoxyqueuosine reductase OS=Pseudomonas entomophila OX=312306 GN=queG PE=3 SV=1
MPATLPDINTLAQSIKDWGQELGFAHVGIAGVDLGEHEQHLQRWLAAGYQGEMEYMGEHGTKRSRPAELIPGTLRVISLRMDYLPGDTQMAQRLAQPEKAYIARYALGRDYHKLVRKRVQHFADRIQEAIGPFGYRAFVDSAPVLEKALAQEAGLGWIGKNTLLLNRKAGSYFFLAELFVDLPLPIDGVQGSDHCGRCQACLDICPTQAFVGPYQLDARRCISYLTIELRHAIPVELRPLIGNRVFGCDDCQLVCPWNRFAKTTTEDDFMPRRGLDNVELAELFLWDEKRFLGSTEGSPLRRAGYERFSRNLAVGLGNAPTTIPVVEALKARRNDPSALVREHVEWALGRHGVL

SEQ ID NO: 79977 - protein, 354 aa, Pseudomonas entomophila
  misc_feature (1)..(354): tr|Q1I443|Q1I443_PSEE4 Epoxyqueuosine reductase OS=Pseu domonas entomophila (strain L48) OX=384676 GN=queG PE=3 SV=1
MPANTPDIATLAQSIKDWGLELGFAHVGIAGVDLGEHEQHLQRWLAAGYNGEMEYMGDHGHKRSRPAELIPGTLRVISLRMDYLPGDTQMAKRLAEPEKAYISRYALGRDYHKLVRKRVQHFADRIQEAIGPFGYRAFVDSAPVLEKALAQEAGLGWIGKNTLLLNRKAGSYFFLAELFVDLPLPIDGIQGSDHCGRCQACLDICPTQAFVGPYQLDARRCISYLTIELRHAIPVELRPLIGNRVFGCDDCQIVCPWNRFAKTTTEDDFMPRRGLDNIELAELFLWDEPRFLARTEGSPLRRAGYERFLRNLAVGLGNAPSTIPVLEALNARRDDPSDLVREHVEWALARHGAL

SEQ ID NO: 79978 - protein, 360 aa, Pseudomonas extremaustralis
  misc_feature (1)..(360): tr|A0A5C5QMV2|A0A5C5QMV2_9PSED Epoxyqueuosine reductase OS=Pseudomonas extremaustralis OX=359110 GN=queG PE=3 SV=1
MPAITSDLPALAQSIKDWGRELGFQQVGISGLDLAEHEQHLQRWLDAGYHGEMDYMGAHGSKRSHPDELVPGTLRVVSLRMDYLPGDTQMAQLLAKPEKAYISRYALGRDYHKLIRKRVQQLADRIQAQIGPFGFRAFVDSAPVLEKAIAEQAGLGWIGKNTLVLNRKAGSYFFLSELFVDLPLPVDPPHSTEHCGRCTACLDICPTNAFVGPYILDARRCISYLTIELKSAIPEDLRPLIGNRVFGCDDCQIVCPWNRFARPSGEGDFQPRHNLDNAELAELFMWDEDKFLSSTEGSPLRRAGYERWLRNLAVGLGNAPSSIVVLEALKARRDYPSELVREHVEWALEQHAARQCTSSL

SEQ ID NO: 79979 - protein, 354 aa, Pseudomonas extremorientalis
  misc_feature (1)..(354): tr|A0A1H0U6R8|A0A1H0U6R8_9PSED Epoxyqueuosine reductase OS=Pseudomonas extremorientalis OX=169669 GN=queG PE=3 SV=1
MPAITTDLPALAQSIKDWGRELGFQQVGISGLDLAEHEQHLQRWLDAGYHGEMDYMGAHGSKRSHPDELVPGTLRVVSLRMDYLPGDTQMAQLLAKPEKAYISRYALGRDYHKLIRKRVQQLADRIQAQIGPFGFRAFVDSAPVLEKAIAEKAGLGWIGKNTLVLNRKAGSYFFLSELFVDLPLPIDAPHSTEHCGRCTACLDICPTNAFVGPYVLDARRCISYLTIELKTAIPEDLRPLIGNRVFGCDDCQIVCPWNRFARATAEVDFKPRHNLDNAELAELFMWDEDKFLSSTEGSPLRRAGYERWLRNLAVGLGNAPSSIPVLEALKARREYPSELVREHVEWALNQHANR

SEQ ID NO: 79980 - protein, 392 aa, Pseudomonas ficuserectae
  misc_feature (1)..(392): tr|A0A3M5CKS5|A0A3M5CKS5_9PSED Epoxyqueuosine reductase OS=Pseudomonas ficuserectae OX=53410 GN=queG PE=3 SV=1
MRFRVEHASIGSDVWQNYTHLGPGFSLRMSAITAVLPTSDDLATLAVSIKAWGRELGFQEVGISGLDLAEHEQHLQRWLDAGYHGEMDYMAAHGSKRSHPDELVPGTLRVVSLRMDYLPGDTEMAQRLTEPEKAYVSRYALGRDYHKLIRKRLQQLAERIQQVIGPFGFRAFVDSAPVLEKAIAEQAGLGWIGKNTLVLNRKAGSFFFLGELFVDIPLPVDAPHATEHCGRCTACLDICPTAAFVGPYVLDARRCISYLTIELKTAIPEELRPLIGNRVFGCDDCQIVCPWNRFARPTDQSDFQPRHNLDNAGLAELFLWDEDKFLSSTEGSPLRRAGYERWLRNLAVGLGNAPSTIPVIEALHARRDYPSELVREHVEWALQRHGVADAEG

SEQ ID NO: 79981 - protein, 364 aa, Pseudomonas ficuserectae
  misc_feature (1)..(364): tr|A0A0N8RGW1|A0A0N8RGW1_9PSED Epoxyqueuosine reductase OS=Pseudomonas ficuserectae OX=53410 GN=queG PE=3 SV=1
MSAITAVLPTSDDLATLAVSIKAWGRELGFQEVGISGLDLAEHEQHLQRWLDAGYHGEMDYMAAHGSKRSHPDELVPGTLRVVSLRMDYLPGDTEMAQRLTEPEKAYVSRYALGRDYHKLIRKRLQQLAERIQQVIGPFGFRAFVDSAPVLEKAIAEQAGLGWIGKNTLVLNRKAGSFFFLGELFVDIPLPVDAPHATEHCGRCTACLDICPTAAFVGPYVLDARRCISYLTIELKTAIPEELRPLIGNRVFGCDDCQIVCPWNRFARPTDQSDFQPRHNLDNAGLAELFLWDEDKFLSSTEGSPLRRAGYERWLRNLAVGLGNAPSTIPVIEALHARRDYPSELVREHVEWALQRHGVADAEG

SEQ ID NO: 79982 - protein, 355 aa, Pseudomonas flavescens
  misc_feature (1)..(355): tr|A0A1G8LLV8|A0A1G8LLV8_9PSED Epoxyqueuosine reductase OS=Pseudomonas flavescens OX=29435 GN=queG PE=3 SV=1
MTDAPLDLTSLAQSIKDWGRELGFQQVGISGLELGEHEAHLQRWLEAGYQGEMDYMAAHGRKRSHPDELVPGTLRVVSLRMDYLPSDTQMAQRLQEPEKAYVSRYALGRDYHKLIRKRLQQLAERIQQTIGPFGYRAFVDSAPVLEKAIAEQSGLGWIGKNTLVLNRKAGSYFFLGELFVDIPLPEDAPHGSEHCGRCSACLDVCPTAAFVGPYVLDARRCISYLTIELKGPIPEDLRAPIGNRVFGCDDCQMVCPWNRFAKATEQGDFQPRHSLDNAELAELFRWSEEEFLSRTEGSPLRRAGYERWLRNLAVGLGNAPSSIPVLEALQARREYPSELVREHVQWALEQHARRA

SEQ ID NO: 79983 - protein, 354 aa, Pseudomonas flexibilis
  misc_feature (1)..(354): tr|A0A0B3BYW7|A0A0B3BYW7_9PSED Epoxyqueuosine reductase OS=Pseudomonas flexibilis OX=706570 GN=queG PE=3 SV=1
MSATFPDLDTLARSIKDWGRELGFQQVGIADVDLGTHEQYLQDWLAAGYQGEMDYMAAHGHKRSRPAELVEGTRRVISVRMDYLPGDTGMAERLADPEQAYVSRYALGRDYHKLVRKRLQQLAERIQGVVGPFGYRAFVDSAPVLEKAVAQQAGLGWIGKNTLLLNRQAGSWFFLGELFVDLPLPMDEPHNREHCGSCRACLDICPTGAFAGERLLDARRCISYLTIELKGAIPLELRPLIGNRVFGCDDCQLVCPWNRFARPTGESDFLPRHDLDNSQLAALFRWSEEEFLQRTEGSPLRRAGYQRWLRNLAVGLGNAPSTIAVIEALELRRDDPSELVREHVAWALARHGRG

SEQ ID NO: 79984 - protein, 354 aa, Pseudomonas flexibilis
  misc_feature (1)..(354): tr|A0A1N7BEL6|A0A1N7BEL6_9PSED Epoxyqueuosine reductase OS=Pseudomonas flexibilis OX=706570 GN=queG PE=3 SV=1
MSATFPDLDTLARSIKDWGRELGFQQVGIADVDLGTHEQYLQDWLAAGYQGEMDYMAAHGHKRSRPAELVEGTRRVISVRMDYLPGDTGMAERLADPEQAYVSRYALGRDYHKLVRKRLQQLAERIQGVVGPFGYRAFVDSAPVLEKAVAQQAGLGWIGKNTLLLNRQAGSWFFLGELFVDLPLPMDEPHNREHCGSCRACLDICPTGAFAGERLLDARRCISYLTIELKGAIPLELRPLIGNRVFGCDDCQLVCPWNRFARPTGESDFLPRHGLDNSQLAALFRWSEEEFLQRTEGSPLRRAGYQRWLRNLAVGLGNAPSTIAVIEALELRRDDPSELVREHVAWALARHGRG

SEQ ID NO: 79985 - protein, 359 aa, Pseudomonas floridensis
  misc_feature (1)..(359): tr|A0A1X0NC25|A0A1X0NC25_9PSED Epoxyqueuosine reductase OS=Pseudomonas floridensis OX=1958950 GN=queG PE=3 SV= 1
MSAITAEHPTSDDLVTLAQSIKAWGRELGFQEVGIAGLDLAEHEQHLQGWLDAGYHGEMDYMAAHGSKRSHPDELVPGTLRVVSLRMDYLPGDTEMARRLTEPEKAYVSRYALGRDYHKLIRKRLQQLAERIQQAIGPFGFRAFVDSAPVLEKAIAEQAGLGWIGKNTLVLNRKAGSFFFLGELFVDIPLPVDAPHATEHCGRCTACLDICPTAAFVGPYVLDARRCISYLTIELKTAIPEELRPLIGNRVFGCDDCQIVCPWNRFARPTDQSDFQPRHNLDNAGLAELFLWDEDTFLSRTEGSPLRRAGYERWLRNLAVGLGNAPSTIVVIEALEMRREYPSQMVREHVEWALSRHGR

SEQ ID NO: 79986 - protein, 359 aa, Pseudomonas fluorescens
  misc_feature (1)..(359): tr|A0A0F4TU00|A0A0F4TU00_PSEFL Epoxyqueuosine reductase OS=Pseudomonas fluorescens OX=294 GN=queG PE=3 SV=1
MPAITTDLPALAQSIKDWGRELGFQQVGISGLDLAEHEQHLERWLEAGYHGEMDYMGAHGSKRSHPEELVPGTLRVVSLRMDYLAGDTQMAKVLAQPEKAYVSRYALGRDYHKLIRKRVQQLAEKIQAEIGPFGFRAFVDSAPVLEKAIAEQAGLGWIGKNTLVLNRKAGSYFFLAELFVDLPLPVDPPHATEHCGRCSACLDICPTNAFVGPYVLDARRCISYLTIELKGAIPEDLRPLIGNRVFGCDDCQIVCPWNRFARPSGESDFKPRHNLDNAGLAELFMWDEEKFLSSTEGSPLRRTGYENWLRNLAVGLGNAPSTIPVLEALKARREYPSELVREHVEWALRQHAERQATPL

SEQ ID NO: 79987 - protein, 393 aa, Pseudomonas fluorescens
  misc_feature (1)..(393): tr|E2XKE3|E2XKE3_PSEFL Epoxyqueuosine reductase OS=Pseu domonas fluorescens WH6 OX=746360 GN=yjeS PE=3 SV=1
MAEQQRLNVSYWVFCLRHASSSSDVWQNYTHLTCGFPCLMPAITFDLPALAQSIKDWGRELGFQQVGISGLDLAEHEQHLQRWLDAGYHGEMDYMGAHGSKRSHPEELVPGTLRVVSLRMDYLPGDTHMAQLLAQPEKAYISRYALGRDYHKLIRKRVQQLADRIQAQIGPFGFRAFVDSAPVLEKAIAEQAGLGWIGKNTLVLNRKAGSYFFLSELFVDLPLPLDEPHRTEHCGRCTACLDICPTNAFVGPYVLDARRCISYLTIELKSAIPEDLRALIGNRVFGCDDCQIVCPWNRFARSTAEGDFKPRHNLDNAELAELFMWDEDKFLSSTEGSPLRRAGYERWLRNLAVGLGNAPSSIVVLEALKARRDYPSELVREHVEWALNQHATR

SEQ ID NO: 79988 - protein, 363 aa, Pseudomonas formosensis
  misc_feature (1)..(363): tr|A0A1I5ZYB1|A0A1I5ZYB1_9PSED Epoxyqueuosine reductase OS=Pseudomonas formosensis OX=1002526 GN=queG PE=3 SV= 1
MSSPSHDHAALADRIRSIASELGFQQLGITDADIGEHEQHLQRWLEAGYHGEMEWMASHGTKRTRPAELVPGTCRVISVRMDYLPGDSRMAQRLADPDSAYVSRYALGRDYHKLMRRRLQQLAERIQALIGPFGYRAFVDSAPVMERALASRAGLGWIGKNTLLINPRAGSYFFLGELYTDLPLPVDAPFDQHHCGSCSACLSRCPTDAFVGPQVLDARRCISYLTIELKGAIPEELRAPMGNRVFGCDDCQLVCPWNKFASPAREPDFSPRHQLDQADLVSLFRWDEEEFLRNTEGSPIRRIGHERWLRNLAVGLGNARTSIPVIEALRSRLAHPSELVREHVIWALAQHGISPDGEGAAAG

SEQ ID NO: 79989 - protein, 358 aa, Pseudomonas fragi
  misc_feature (1)..(358): tr|A0A267AT91|A0A267AT91_PSEFR Epoxyqueuosine reductase OS=Pseudomonas fragi OX=296 GN=queG PE=3 SV=1
MPAITADLPALAQSIKEWGRELGFQQVAITGLDLGEHEHHLQRWLDAGYHGDMDYMAAHGSKRSHPEELVPGTLRVVSLRMDYLPGDTHMAQLLAQPEKAYVSRYALGRDYHKLIRKRVQQLADRIQKDIGPFGFRAFVDSAPVLEKAIAQQAGLGWIGKNTLVLNRKAGSYFFLSELFVDLPLPVDAPHETEHCGRCTACLDICPTNAFVGPYVLDARKCISYLTIELKTAIPEELRSMIGNRVFGCDDCQIVCPWNRFARTTAEGDFKPRHNLDNAGLAELFMWDEDKFLSSTEGSPLRRAGYERWLRNLAVGLGNAPSTIPVLEALNARRDYPSELVQEHVEWALKQHANRSPSP

SEQ ID NO: 79990 - protein, 355 aa, Pseudomonas fragi
  misc_feature (1)..(355): tr|A0A267D877|A0A267D877_PSEFR Epoxyqueuosine reductase OS=Pseudomonas fragi OX=296 GN=queG PE=3 SV=1
MPAITADLPALARSIKEWGRELGFQQVAIAGLDLGEHEHHLQRWLEAGYHGDMDYMAAHGSKRSHPQELVPGTVRVISLRMDYLPGDTHMAQLLAQPEKAYVSRYALGRDYHKLIRKRVQQLADRIQKDIGPFGFRAFVDSAPVLEKAIAQQAGLGWIGKNTLVLNRKAGSYFFLSELFVDLPLPVDAPHETEHCGRCTACLDICPTNAFVGPYVLDARKCISYLTIELKTAIPEELRSMIGNRVFGCDDCQIVCPWNRFARTTAEGDFKPRHNLDNAGLAELFMWDEDKFLSSTEGSPLRRAGYERWLRNLAVGLGNAPSTIPVLEALNARRDYPSELVREHVEWALTQHAKRA

SEQ ID NO: 79991 - protein, 362 aa, Pseudomonas frederiksbergensis
  misc_feature (1)..(362): tr|A0A423KS51|A0A423KS51_9PSED Epoxyqueuosine reductase OS=Pseudomonas frederiksbergensis OX=104087 GN=queG PE =3 SV=1
MPAITTDLPALAQSIKDWGRELGFQQVGISGLDLAEHEQHLERWLEAGYHGEMDYMAAHGSKRSHPEELVPGTLRVVSLRMDYLPGDTQMAQLLAQPEKAYVSRYALGRDYHKLIRKRVQQLADKIQAEIGPFGFRAFVDSAPVLEKAIAEKAGLGWIGKNTLVLNRKAGSYFFLSELFVDLPLPEDPPHSTEHCGRCTACLDICPTNAFVGPYVLDARRCISYLTIELKTAIPEDLRPLIGNRVFGCDDCQIVCPWNRFARPSGESDFKPRHNLDNAELAELFMWDEDKFLSSTEGSPLRRAGYERWLRNLAVGLGNAPSSIPVLEALKARREYPSELVREHVEWALKQHEQRADNAVSPF

SEQ ID NO: 79992 - protein, 354 aa, Pseudomonas frederiksbergensis
  misc_feature (1)..(354): tr|A0A2S8HS36|A0A2S8HS36_9PSED Epoxyqueuosine reductase OS=Pseudomonas frederiksbergensis OX=104087 GN=queG PE =3 SV=1
MPAITTDLPALAQSIKDWGRELGFQQVGISGLDLAEHEQHLERWLAAGYHGEMEYMGAHGSKRSHPEELVPGTLRVVSLRMDYLPGDTHMAQRLAQPEKAYVSRYALGRDYHKLIRKRVQQLAEKIQAVIGPFGYRAFVDSAPVLEKAIAEQAGLGWIGKNTLVLNRKAGSYFFLSELFVDLPLPVDPPHATEHCGRCTACLDICPTNAFVGPYVLDARRCISYLTIELKSAIPEDLRPLIGNRVFGCDDCQIVCPWNRFARPSGESDFKPRHNLDNAELAELFMWDEEKFLSSTEGSPLRRAGYERWLRNLAVGLGNAPSSIPVLEALKARRDYPSELVREHVEWALKQHGLA

SEQ ID NO: 79993 - protein, 354 aa, Pseudomonas fulva
  misc_feature (1)..(354): tr|A0A2V4J517|A0A2V4J517_9PSED Epoxyqueuosine reductase OS=Pseudomonas fulva OX=47880 GN=queG PE=3 SV=1
MSASPPDLDALAHNIKLWGQELGFAHVGIAGIDLGEHEHHLQRWLDAGYQGEMEYLGAHGSKRAHPEQLIPGTVRVVSLRMDYLPGDTQMAQRLAQPEKAYVSRYALGRDYHKLVRKRVQSLADRIQQAIGPFGYRAFVDSAPVLEKALAEQAGLGWIGKNTLLLNRKAGSYFFLAELFVDLPLPVDQATTSEHCGRCTACLDICPTQAFVGPYVLDARRCISYLTIELKGPIPVELRSMMGNRVFGCDDCQIVCPWNRFAKPSREQDFQPRHGLENAELAQMFLWDEPTFLRKTEGGPLRRAGYERWLRNLAVGLGNAPSTIPVIEALKARRDDASPLVREHVEWALARHGVA

SEQ ID NO: 79994 - protein, 356 aa, Pseudomonas fulva
  misc_feature (1)..(356): tr|F6AJX5|F6AJX5_PSEF1 Epoxyqueuosine reductase OS=Pseu domonas fulva (strain 12-X) OX=743720 GN=queG PE=3 SV=1
MTDAAPDLASLAQSIKDWGRELGFQQVGISGLELGEHEAHLQRWLDAGYQGEMDYMAAHGRKRSHPDELVPGTLRVVSLRMDYLPGDTQMAQRLQEPEKAYVSRYALGRDYHKLIRKRLQQLAERIQEAIGPFGYRAFVDSAPVLEKAIAEQSGLGWIGKNTLVLNRKAGSYFFLGELFVDIPLPEDAPHGSEHCGRCSACLDICPTAAFVGPYVLDARRCISYLTIELKGPIPEELRAPIGNRVFGCDDCQMVCPWNRFAKPTEQSDFQPRHSLDNAELAELFRWSEEEFLSRTEGSPLRRAGYERWLRNLAVGLGNAPSSIPVLEALEARREYPSELVREHVRWALEQHAQRQS

SEQ ID NO: 79995 - protein, 361 aa, Pseudomonas furukawaii
  misc_feature (1)..(361): tr|L8MKN6|L8MKN6_PSEFK Epoxyqueuosine reductase OS=Pseu domonas furukawaii OX=1149133 GN=queG PE=3 SV=1
MTLSTHDLADLARAIKEWGRELGFQQVGISGVDLGEHEAHLQRWLDAGFQGEMDYMAAHGSKRSHPDELVPGTLRVISLRMDYLPGDTRMAQVLTQPEKAYVSRYALGRDYHKLIRKRLQHLAERIEKAIGPFSYRAFVDSAPVLEKAIAEQAGLGWIGKNTLVLNRKAGSYFFLGELFIDAPLPVDEPHGSEHCGRCTACLDICPTAAFTGPYQLDARRCISYLTIEYKGSIPEALRPQIGNRVFGCDDCQMVCPWNRFARPSGEGDFQPRHGLDNAELAELFRWSEEEFLSRTEGSPLRRAGYERWLRNLAVGLGNAPSSIPVLEALHLRREHPSALVREHVAWALARHQARAGDGITA

SEQ ID NO: 79996 - protein, 361 aa, Pseudomonas fuscovaginae
  misc_feature (1)..(361): tr|A0A0N0E5I6|A0A0N0E5I6_9PSED Epoxyqueuosine reductase OS=Pseudomonas fuscovaginae OX=50340 GN=queG PE=3 SV=1
MPVNSVDLPALAQSIKQWARELGFQQVGIAGLELGEHEQHLQRWLDAGYHGDMDYMGAHGSKRSHPDELVPGTLRVVSLRMDYLPGDTRMVQRLAEPEKAYVSRYALGRDYHKLIRKRLQQLAERIQQVIGPFGYRAFVDSAPVLEKAIAEQAGLGWIGKNTLVLNRKAGSYFFLGELFVDLPLPVDEPHATEHCGRCSACLDICPTAAFVGPYVLDARRCISYLTIELKTAIPEDLRPLIGNRVFGCDDCQVVCPWNRFARPTVESDFQPRHNLDNAGLAELFRWDEETFLKNTEGSPLRRAGYERWLRNLAVGLGNAPSTIAVLEALNSRRDYPSELVREHVQWALRQHAERADQAASL

SEQ ID NO: 79997 - protein, 358 aa, Pseudomonas fuscovaginae
  misc_feature (1)..(358): tr|A0A1H6P768|A0A1H6P768_9PSED Epoxyqueuosine reductase OS=Pseudomonas fuscovaginae OX=50340 GN=queG PE=3 SV=1
MPVNSVDLPALAHSIKQWARELGFQQVGIAGLELGEHEQHLQRWLDAGYHGDMDYMGAHGSKRSHPDELVPGTLRVVSLRMDYLPGDTQMVQRLAEPEKAYVSRYALGRDYHKLIRKRLQQLAERIQQVIGPFGYRAFVDSAPVLEKAIAEQAGLGWIGKNTLVLNRKAGSYFFLGELFVDLPLPVDEPHATEHCGRCTACMDICPTAAFVGPYVLDARRCISYLTIELKTAIPEELRPLIGNRVFGCDDCQVVCPWNRFARPSAENDFQPRHSLDNAGLAELFRWDEETFLKNTEGSPLRRAGYERWLRNLAVGLGNAPSTIAVLEALDSRRDYPSELVQEHVQWALRQHAERADPS

SEQ ID NO: 79998 - protein, 355 aa, Pseudomonas gallaeciensis
  misc_feature (1)..(355): tr|A0A395R8V4|A0A395R8V4_9PSED Epoxyqueuosine reductase OS=Pseudomonas gallaeciensis OX=857227 GN=queG PE=3 SV =1
MTSQTPDYQQLAEQIRQLARELGFQQLGIGATELGEHEQHLQHWLDAGYHGEMEWMASHGSKRTRPNELVPGTQRVLSVRMDYLPTETEMAKRLANPDAAYISRYALGRDYHKLIRRRLQQLAERIEQLIGPFGYRAFVDSAPVMERALATRSGLGWIGKNTMLINRKAGSYFFLGELYTDLPLPIDAPQQTEHCGKCTACLTACPTGAFVGPHLLDARRCISYLTIELKGAIPEALRKPVGNRVFGCDDCQLVCPWNRFAKATEEADFTPRHNLDQASLVELFRWDEATFLKRTEGSPVRRIGHERWLRNLAIGLGNATSSINVIEALKLRQAHPSALVREHVDWALAQHGINT

SEQ ID NO: 79999 - protein, 356 aa, [Pseudomonas] geniculata
  misc_feature (1)..(356): tr|A0A0L8AE82|A0A0L8AE82_9GAMM Epoxyqueuosine reductase OS=[Pseudomonas] geniculata N1 OX=1167641 GN=queG PE=3 SV=1
MSPAPTPVDPAQAVQRIRELARAHGFQRCGIAGIELGEDEAHLADWLGQGLYGTMDWMARHGTLRARPAELLPGTVRVISVGMDYSHKDDTEAWATLADPGRAYVARYALGRDYHKLMRNRLQKLATQINDEVAPLGYRVFVDSAPVLERALARNAGLGWIGKHTCLIDRHGGSWFFIGEIYIDIPLPIDAPATAHCGTCTRCIDVCPTQAITGPQRLDARRCISYLTIEHDGAIPEDMRPLIGNRIYGCDDCQLVCPWNKFAKRTDEADFRARNNLDTARLDQLFAWDEAEFLRRTEGSPIRRSGHERWLRNIAVALGNAPSSAEALAALQTRVDDPSPLVREHVQWGLGQHTAR

SEQ ID NO: 80000 - protein, 354 aa, Pseudomonas gessardii
  misc_feature (1)..(354): tr|A0A1V2JPZ6|A0A1V2JPZ6_9PSED Epoxyqueuosine reductase OS=Pseudomonas gessardii OX=78544 GN=queG PE=3 SV=1
MPAITTDLPALAQSIKDWGRELGFQQVGISGLDLAEHEQHLQRWLDAGYHGEMDYMGAHGSKRSHPDELVPGTLRVVSLRMDYLPGDTHMAQRLAQPEKAYISRYALGRDYHKLIRKRVQQLADRIQAQIGPFGFRAFVDSAPVLEKAIAEQAGLGWIGKNTLVLNRKAGSYFFLSELFVDLPLPVDPPHSTEHCGRCTACLDICPTNAFVGPYVLDARRCISYLTIELKSAIPEDLRPLIGNRVFGCDDCQIVCPWNRFARPSAESDFKPRHNLDNAELAELFMWDEDKFLSSTEGSPLRRAGYERWLRNLAVGLGNAPSSIPVLEALKARRDYPSELVREHVEWALNQHATR

SEQ ID NO: 80001 - protein, 357 aa, Pseudomonas gingeri
  misc_feature (1)..(357): tr|A0A2K1F769|A0A2K1F769_9PSED Epoxyqueuosine reductase OS=Pseudomonas gingeri NCPPB 3146 = LMG 5327 OX=707248 GN=queG PE=3 SV=1
MPVNSVDLPALAQSIKEWGRELGFQQVGIAGVELGEHEQHLQRWLDAGYHGDMDYMGAHGSKRSHPDELVPGTLRVVSLRMDYLPGDTQMAQRLGQPEKAYVSRYALGRDYHKLIRKRLQQLAERIQQVIGPFGYRAFVDSAPVLEKAIAEQAGLGWIGKNTLVLNRKAGSYFFLGELFVDLPLPVDAPHATEHCGRCTACMDICPTAAFVGPYVLDARRCISYLTIELKTAIPEDLRPLIGNRVFGCDDCQIVCPWNRFARASDESDFKPRHSLDNAGLAELFLWDEETFLKNTEGSPLRRAGYERWLRNLAVGLGNAPSTIVVLEALNARLDYPSELVREHVQWALHQHAGRNAP

SEQ ID NO: 80002 - protein, 372 aa, Pseudomonas graminis
  misc_feature (1)..(372): tr|A0A4R7VPL2|A0A4R7VPL2_9PSED Epoxyqueuosine reductase OS=Pseudomonas graminis OX=158627 GN=queG PE=3 SV=1
MSAITVDPSTASTPLTADGLTDLAQSIKAWGRELGFQQVGISGLDLAEHEQHLERWLEAGYHGEMDYMAAHGSKRSHPDELVPGTLRVVSLRMDYLPGDTQMAQLLGQPEKAYVSRYALGRDYHKLIRKRVQQLAERIQQAIGPFGFRAFVDSAPVLEKAIAEQAGLGWIGKNTLVLNRKAGSYFFLSELFVDLPLPVDAPHVTEHCGRCTACLDVCPTNAFVGPYVLDARKCISYLTIELKTSIPEDLRALIGNRVFGCDDCQIVCPWNRFARPTDQTDFKPRHGLDNAELTTLFLWDETTFLSNTEGSPLRRAGYERWLRNLAVGLGNAPSTISVIEALKARREHPSEMVREHVQWALRQHEGRTAARIL

SEQ ID NO: 80003 - protein, 360 aa, Pseudomonas graminis
  misc_feature (1)..(360): tr|A0A1C2E8C8|A0A1C2E8C8_9PSED Epoxyqueuosine reductase OS=Pseudomonas graminis OX=158627 GN=queG PE=3 SV=1
MPLTAAGLTDLAQSIKGWGRELGFQQVGISGLDLAEHEQHLERWLDAGYHGEMDYMAAHGSKRSHPDELVPGTLRVVSLRMDYLPGDTQMAQLLGQPEKAYVSRYALGRDYHKLIRKRVQQLAERIQQAIGPFGFRAFVDSAPVLEKAIAEQAGLGWIGKNTLVLNRKAGSYFFLSELFVDLPLPVDAPHATEHCGRCTACLDVCPTNAFVGPYVLDARKCISYLTIELKTSIPEDLRALIGNRVFGCDDCQIVCPWNRFARPTDQTDFKPRHGLDNAELTTLFLWDETTFLSNTEGSPLRRAGYERWLRNLAVGLGNAPSTIPVIEALKARREHPSEMVREHVEWALGQHEARAPGRLL

SEQ ID NO: 80004 - protein, 354 aa, Pseudomonas grimontii
  misc_feature (1)..(354): tr|A0A1H1CB21|A0A1H1CB21_9PSED Epoxyqueuosine reductase OS=Pseudomonas grimontii OX=129847 GN=queG PE=3 SV=1
MPAITSDLPALAQSIKDWGRELGFQQVGISGLDLAEHEQHLQRWLDAGYHGEMEYMGAHGSKRSHPDELVPGTLRVVSLRMDYLPGDTQMALLLAKPEKAYISRYALGRDYHKLIRKRVQQLADRIQAQIGPFGFRAFVDSAPVLEKAIAEQAGLGWIGKNTLVLNRKAGSYFFLSELFVDLPLPVDPPHSTEHCGRCTACLDICPTNAFVGPYVLDARRCISYLTIELKSAIPEDLRPLIGNRVFGCDDCQIVCPWNRFARPTAESDFKPRHNLDNAELAELFMWDEDKFLSSTEGSPLRRAGYERWLRNLAVGLGNAPSSIPVLEALKARRDYPSELVREHVEWALNQHAAR

SEQ ID NO: 80005 - protein, 363 aa, Pseudomonas guangdongensis
  misc_feature (1)..(363): tr|A0A1H2E5D5|A0A1H2E5D5_9PSED Epoxyqueuosine reductase OS=Pseudomonas guangdongensis OX=1245526 GN=queG PE=3 SV=1
MPTSEIDLAALARTVKDWGRELGFQQVGIAGIELGEHEAHLHRWLAAGHHGEMDYMAAHGDKRSRPAELVPGTLRVISLRMDYLPGDTRMTEVLARPEKAYLSRYALGRDYHKLIRKRLQQLAERIQARIGPFGYRAFVDSAPVLEKALASQAGLGWIGKNTLLINKQAGSWFFLGELYVDLPLPVDAPHASEHCGRCQACLDICPTAAFVGPYQLDARRCISYLTIELKGSIPVELRPLIGNRVFGCDDCQLVCPWNRFARPTRQGDFQPRHGLDNAELASLLRWSEEEFLARTEGSPLRRAGYERWLRNLAVGLGNAPTSIAVLEALALRREHPSALVREHVEWALARHRDAARPDTALST

SEQ ID NO: 80006 - protein, 354 aa, Pseudomonas guariconensis
  misc_feature (1)..(354): tr|A0A1G6KE08|A0A1G6KE08_9PSED Epoxyqueuosine reductase OS=Pseudomonas guariconensis OX=1288410 GN=queG PE=3 S V=1
MSACLPDLNTLAQSIKDWGRELGFAHVGIADVALGEHEHHLQRWLEAGYQGEMDYMAAHGSKRSHPDELVPGTVRVVSLRMDYLPGDTRMAQMLAQPEKAYISRYALGRDYHKLVRKRVQHLAERIQQAIGPFGFRAFVDSAPVLEKAIAEQAGLGWIGKNTLLLNRKAGSYFFLAELFVDLPLPVDQAQTSEHCGRCQACLDICPTAAFVGPYVLDARRCISYLTIELKHAIPVELRPLIGNRVFGCDDCQIVCPWNRFARPTQENDFKPRHGLDNAELAALFLWDEATFLNNTEGSPLRRAGYERWLRNLAVGLGNAPTTIPVLEALRARREHPSALVREHVEWALAQHEDQ

SEQ ID NO: 80007 - protein, 354 aa, Pseudomonas guguanensis
  misc_feature (1)..(354): tr|A0A1H0NX85|A0A1H0NX85_9PSED Epoxyqueuosine reductase OS=Pseudomonas guguanensis OX=1198456 GN=queG PE=3 SV= 1
MSDHPLDLDALALSIKDWGRELGFQQVGITDVELGEHEAHLKRWLAAGYQGEMDYMAAHGDKRSRPQELVPGTLRVVSLRMDYLPGDTQMAQRLSEPEQAYVSRYALGRDYHKLIRKRLQQLAERIQQQIGPFGYRAFVDSAPVLEKAIAEKAGLGWIGKNTLVLNRKAGSYFFLGELFVDLPLPVDAPHGSEHCGRCSACMDICPTAAFAGPYQLDARRCISYLTIELKGSIPVELRAPIGNRVFGCDDCQIVCPWNRFARATEQGDFQPRHGLDNSSLAELFMWTEEEFLSRTEGSPLRRAGYERWLRNLAVGLGNAPSTIPVLQALNARREHPSELVREHVAWALERHGAL

SEQ ID NO: 80008 - protein, 360 aa, Pseudomonas guineae
  misc_feature (1)..(360): tr|A0A1I3EK41|A0A1I3EK41_9PSED Epoxyqueuosine reductase OS=Pseudomonas guineae OX=425504 GN=queG PE=3 SV=1
MNSDALDLVALAQSIKDWGRELGFQQIGIADVQLGEHEAHLQRWLDAGYQGEMDYMAAHGSKRSHPEQLVPGTLRVVSLRMDYLPGDTQMAKRLGQPEKAYVSRYALGRDYHKLIRKRLQQLAERIQQQIGPFGFRAFVDSAPVLEKAIAEQAGLGWIGKNTLVLNRKAGSYFFLGELFVDLPLPVDEPHSSEHCGRCTACMDICPTAAFVGPYVLDARRCISYLTIELKGPIPIDLRAPIGNRVFGCDDCQIVCPWNRFAKPSEQSDFQPRHNLDNAELAELFCWSEEEFLSRTEGSPLRRAGYERWLRNLAVGLGNAPSSIPVLEALIARREYPSALVREHVEWALDQHAQRDLTPQP

SEQ ID NO: 80009 - protein, 355 aa, Pseudomonas helleri
  misc_feature (1)..(355): tr|A0A0J6I9Z7|A0A0J6I9Z7_9PSED Epoxyqueuosine reductase OS=Pseudomonas helleri OX=1608996 GN=queG PE=3 SV=1
MPAITADLPALAQSIKEWGRELGFQQVAIAGLDLGEHEQHLERWLAAGYHGDMEYMGAHGSKRSHPEELVPGTLRVVSLRMDYLPGDTHMAQLLAQPEKAYVSRYALGRDYHKLIRKRVQQLADRIQAEIGPFGFRAFVDSAPVLEKAIAQKAGLGWIGKNTLVLNRKAGSYFFLSELFVDIPLPEDEPHTTEHCGRCSACLDICPTKAFVGPYVLDARRCISYLTIELKTAIPEELRSMMGNRVFGCDDCQIVCPWNRFARSTLEGDFKPRHNLDNAELAELFMWDEDKFLSSTEGSPLRRAGYERWLRNLAVGLGNAPSTIPVLEALKARREYPSELVQEHVEWALKQHAERV

SEQ ID NO: 80010 - protein, 356 aa, Pseudomonas helmanticensis
  misc_feature (1)..(356): tr|A0A4R7VGS9|A0A4R7VGS9_9PSED Epoxyqueuosine reductase OS=Pseudomonas helmanticensis OX=1471381 GN=queG PE=3 SV=1
MSAITTDLPALAQSIKDWGRELGFQQVGISGLDLAEHEQHLARWLEAGYHGEMDYMGAHGSKRSHPEELVPGTLRVVSLRMDYLPGDTQMAQMLAQPEKAYVSRYALGRDYHKLIRKRVQQLADKIQAQIGPFGFRAFVDSAPVLEKAIAEKAGLGWIGKNTLVLNRKAGSYFFLSELFVDLPLPVDEPHSTEHCGRCTACLDICPTNAFVGPYLLDARRCISYLTIELKSAIPEDLRPLIGNRVFGCDDCQIVCPWNRFAKPSGESDFKPRHNLDNAELAELFLWDEEKFLSSTEGSPLRRAGYERWLRNLAVGLGNAPSTIPVLEALKARRDYPSELVREHVEWALQQHGHATR

SEQ ID NO: 80011 - protein, 354 aa, Pseudomonas hunanensis
  misc_feature (1)..(354): tr|A0A2I0CEK5|A0A2I0CEK5_9PSED Epoxyqueuosine reductase OS=Pseudomonas hunanensis OX=1247546 GN=queG PE=3 SV=1
MSASIPDLAQLAQSIKIWGQELGFAHVGIAGVDLGEHEHHLQRWLDAGYQGEMEYLGAHGSKRSHPDQLIPGTVRVVSLRMDYLPGDTQMAQRLAQPEKAYVSRYALGRDYHKLVRKRVQFLADRIQEAIGPFGYRAFVDSAPVLEKALAEQAGLGWIGKNTLLLNRKAGSYFFLAELFVDLPLPVDEATTSEHCGRCQACLDICPTQAFVGPYVLDARRCISYLTIELRGAIPVELRAKMGNRVFGCDDCQIVCPWNRFAKHSQEQDFQPRHGLENTDLAAMFLWDERTFLRKTEGGPLRRAGYERFLRNLAVGLGNAPSTIPVIEALKARRDDESELVREHVEWALARHGAQ

SEQ ID NO: 80012 - protein, 357 aa, Pseudomonas hussainii
  misc_feature (1)..(357): tr|A0A1H7Q7Y1|A0A1H7Q7Y1_9PSED Epoxyqueuosine reductase OS=Pseudomonas hussainii OX=1429083 GN=queG PE=3 SV=1
MPDASIDFHALAQQIKDWGRELGFQQVGIAGIELGEHEAHLQTWLDAGYHGEMDYMASHGSKRSHPEELVPGTLRVVSLRMDYLPADTAMTQVLSQPEHAYISRYALGRDYHKLIRKRISQLAQQIQQHIGDFGYRAFVDSAPVLERALADQAGLGWIGKNTMLINRQAGSFFFLGELYTDLPLPVDTPYGKNHCGSCTACLDKCPTDAFVSANVLDATRCISYLTIELKGSIPEDLRPLMGNRVFGCDDCQLVCPWNRFARPTGQGDFQPRHDLDKAQLAGLFLWDEATFLTRTEGSPIRRAGYERWLRNLAVGLGNAPSSPEVIAALKARVDYPSELVQEHVRWALAQHARKALP

SEQ ID NO: 80013 - protein, 354 aa, Pseudomonas indica
  misc_feature (1)..(354): tr|A0A1G8SET9|A0A1G8SET9_9PSED Epoxyqueuosine reductase OS=Pseudomonas indica OX=137658 GN=queG PE=3 SV=1
MSTSLDDLAALARSIKEWGRELGFQQVGITDVGLAEHEAHLQRWLDAGYHGEMDYMAAHGTKRSRPAELVPGTLRVISLRMDYLPGDTLMAQRLAEPEKAYVSRYALGRDYHKLIRKRLQQLAERIQAAIGPLGYRAFVDSAPVLEKAIAEQAGLGWIGKNTLVLNRKAGSYFFLGELFVDVPLPVDAPHGSEHCGRCSACLDICPTAAFVGPYVLDARRCISYLTIELKGSIPEALRPLIGNRVFGCDDCQIVCPWNRFARPSAQGDFQPRHGLDNVELAALFLWSEEEFLSRTEGSPLRRAGYERWLRNLAVGLGNAPATIPVIEALRARREHPSELVREHVEWALARHGER

SEQ ID NO: 80014 - protein, 354 aa, Pseudomonas indoloxydans
  misc_feature (1)..(354): tr|A0A2T5PJ71|A0A2T5PJ71_9PSED Epoxyqueuosine reductase OS=Pseudomonas indoloxydans OX=404407 GN=queG PE=3 SV= 1
MSDQTLDLNALALSIKDWGRELGFQQVGITDVELGEHEAHLQRWLAAGYQGEMDYMAAHGSKRSHPDELVPGTLRVVSLRMDYLPGDTQMAQRLNEPEQAYVSRYALGRDYHKLIRKRLQQLAERIQQQIGPFGYRAFVDSAPVLEKAIAEKAGLGWIGKNTLVLNRKAGSYFFLGELFVDLPLPVDVPHASEHCGRCSACMDICPTAAFAGPYALDARRCISYLTIELKGSIPEELRAPIGNRVFGCDDCQIVCPWNRFARPTEQGDFQPRHGLDNSGLAELFMWTEEEFLSRTEGSPLRRAGYERWLRNLAVGLGNAPSTIPVLQALQARREHPSALVREHVAWALERHGAL

SEQ ID NO: 80015 - protein, 358 aa, Pseudomonas japonica
  misc_feature (1)..(358): tr|A0A239AQK4|A0A239AQK4_9PSED Epoxyqueuosine reductase OS=Pseudomonas japonica OX=256466 GN=queG PE=3 SV=1
MSASIDLPALVQSIKNWGRELGFAHVGIAGVDLAEHEQHLERWLAAGYHGEMDYMGAHGSKRSHPDELVPGTLRVVSLRMDYLPGDTQMAQRLAQPEKAYISRYALGRDYHKLVRKRVQHLAERIQKEIGPFGFRAFVDSAPVLEKAIAEQAGLGWIGKNTLLLNRKAGSYFFLSELFVDLPLPVDEPQASEHCGRCSACLDICPTKAFVGPYQLDARRCISYLTIELKNAIPEELRAMIGNRVFGCDDCQIVCPWNRFAKDTAENDFKPRHGLDNAGLAELFMWDEEHFLASTEGSPLRRAGYERWLRNLAVGLGNAPSTIVVLEALNARREHPSELVREHVEWALRQHAERQASPA

SEQ ID NO: 80016 - protein, 353 aa, Pseudomonas jessenii
  misc_feature (1)..(353): tr|A0A370SY90|A0A370SY90_9PSED Epoxyqueuosine reductase OS=Pseudomonas jessenii OX=77298 GN=queG PE=3 SV=1
MSAITTDLPALAQSIKDWGRELGFQQVGISGLDLAEHEQHLQRWLEAGYHGEMDYMGAHGSKRSHPEELVPGTLRVVSLRMDYLPGDTEMAKRLAEPEKAYVSRYALGRDYHKLIRKRVQQLADKIQGEIGPFGFRAFVDSAPVLEKAIAEQAGLGWIGKNTLVLNRKAGSYFFLSELFVDIPLPVDEPHITEHCGRCTACLDICPTNAFVGPYVLDARRCISYLTIELKTAIPEELRPLIGNRVFGCDDCQIVCPWNRFARPSTESDFKPRHNLDNAGLAELFLWDEEKFLSSTEGSPLRRAGYERWLRNLAVGLGNAPSTIAVLEALKARRDYPSALVREHVEWALKQHSS

SEQ ID NO: 80017 - protein, 359 aa, Pseudomonas jessenii
  misc_feature (1)..(359): tr|A0A231G6M8|A0A231G6M8_9PSED Epoxyqueuosine reductase OS=Pseudomonas jessenii OX=77298 GN=queG PE=3 SV=1
MPAITTDLPALAQSIKDWGRELGFQQVGISGLDLAEHEQHLERWLEAGYHGEMDYMGAHGSKRSHPEELVPGTLRVVSLRMDYLSGDTQMAKMLAQPEKAYVSRYALGRDYHKLIRKRVQHLAEKIQAQIGPFGYRAFVDSAPVLEKAIAEQAGLGWIGKNTLVLNRKAGSYFFLAELFVDLPLPVDPPHATEHCGRCSACLDICPTNAFVGPYVLDARRCISYLTIELKGAIPEDLRPLIGNRVFGCDDCQIVCPWNRFARPSGESDFKPRHNLDNAGLAELFMWDEEKFLSSTEGSPLRRTGYENWLRNLAVGLGNAPSTIPVLEALKARREHPSELVREHVAWALRQHAERQASSL

SEQ ID NO: 80018 - protein, 354 aa, Pseudomonas jinjuensis
  misc_feature (1)..(354): tr|A0A1H0N411|A0A1H0N411_9PSED Epoxyqueuosine reductase OS=Pseudomonas jinjuensis OX=198616 GN=queG PE=3 SV=1
MHDSIPDFQQLAETIKTWGRELGFQQVGISGLDLEEHGAHLQRWLEAGYQGEMDYMGAHGSKRWRPDELVPGTLRVISLRMDYLPGDTRMAEVLAAPEKAYVSRYALGRDYHKLIRKRLQQLAERIQQEIGPFGYRAFVDSAPVLEKAIAEQAGLGWIGKNTLVLNRKAGSYFFLGELFTDLPLPVDPPHGSEHCGRCSACLDICPTAAFVAPYVLDARRCISYLTIELKGAIPEDLRPLIGNRVFGCDDCQMVCPWNRFARATDKGDFQPRHQLDNADLAALFLWSEEEFLSRTEGSPLRRAGYERWLRNLAVGLGNAPSSIPVIEALKARREFPSELVREHVEWALQRHGVV

SEQ ID NO: 80019 - protein, 354 aa, Pseudomonas kairouanensis
  misc_feature (1)..(354): tr|A0A4Z0AEJ9|A0A4Z0AEJ9_9PSED Epoxyqueuosine reductase OS=Pseudomonas kairouanensis OX=2293832 GN=queG PE=3 S V=1
MPAITSDLPALAQSIKDWGRELGFQQVGISGLNLAEHEQHLQRWLDAGYHGEMDYMGAHGSKRSHPDELVPGTLRVVSLRMDYLPGDTQMAQLLAQPKKAYISRYALGRDYHKLIRKRVQQLADRIQAQIGPFGFRAFVDSAPVLEKAIAEQAGLGWIGKNTLVLNRKAGSYFFLSELFVDLPLPVDEPHSTEHCGRCTACLDICPTNAFVGPYVLDARRCISYLTIELKNAIPEDLRPLIGNRVFGCDDCQIVCPWNRFARPTGESDFKPRHNLDNAELAELFMWDEDKFLSSTEGSPLRRAGYERWLRNLAVGLGNAPSSIPVLEALKARRDYPSELVREHVEWALNQHATR

SEQ ID NO: 80020 - protein, 359 aa, Pseudomonas kilonensis
  misc_feature (1)..(359): tr|A0A1H4WS46|A0A1H4WS46_9PSED Epoxyqueuosine reductase OS=Pseudomonas kilonensis OX=132476 GN=queG PE=3 SV=1
MPAIPTDLPALAQSIKEWGRELGFQQVGISGLDLAEHEQHLQRWLDAGYHGEMDYMGAHGSKRSHPEELVPGTLRVVSLRMDYLSGDTHMAQMLGQPEKAYVSRYALGRDYHKLIRKRVQQLAEKIQAVIGPFGYRAFVDSAPVLEKAIAEQAGLGWIGKNTLVLNRKAGSYFFLSELFVDLPLPADPPHASEHCGKCTACLDICPTNAFVGPYVLDARRCISYLTIELKSAIPEELRPLIGNRVFGCDDCQIVCPWNRFARPSGESDFKPRHNLDNAGLAELFMWDEDKFLSSTEGSPLRRAGYERWLRNLAVGLGNAPSTIPVLQALEARRNYPSELVREHVEWALRQHAERQTSSL

SEQ ID NO: 80021 - protein, 359 aa, Pseudomonas kilonensis
  misc_feature (1)..(359): tr|A0A0F4XH46|A0A0F4XH46_9PSED Epoxyqueuosine reductase OS=Pseudomonas kilonensis OX=132476 GN=queG PE=3 SV=1
MPAIPTDLPALAQSIKEWGRELGFQQVGISGLDLAEHEQHLQRWLDAGYHGEMDYMGAHGSKRSHPEELVPGTLRVVSLRMDYLSGDTHMAQMLGQPEKAYVSRYALGRDYHKLIRKRVQQLAEKIQAVIGPFGYRAFVDSAPVLEKAIAEQAGLGWIGKNTLVLNRKAGSYFFLSELFVDLPLPVDPPHASEHCGKCTACLDICPTNAFVGPYVLDARRCISYLTIELKSAIPEELRPLIGNRVFGCDDCQIVCPWNRFARPSGESDFKPRHNLDNAGLAELFMWDEATFLSSTEGSPLRRAGYERWLRNLAVGLGNAPSTIPVLQALEARRDYPSELVREHVEWALRQHAKRQTSSL

SEQ ID NO: 80022 - protein, 355 aa, Pseudomonas knackmussii
  misc_feature (1)..(355): tr|A0A024HPM9|A0A024HPM9_PSEKB Epoxyqueuosine reductase OS=Pseudomonas knackmussii (strain DSM 6978 / LMG 2375 9 / B13) OX=1301098 GN=queG PE=3 SV=1
MHDSNPDYSAIAERIKAWGRELGFQQVGISGLDLESHGEHLQRWLAAGYHGEMDYMGAHGSKRWRPEELVPGTLRVISLRMDYLPGDTQMAKVLGEPQKAYVSRYALGRDYHKLIRKRLQQLAERIQQEVGTFGYRAFVDSAPVLEKAVGEQAGLGWIGKNTLLLNRKAGSYFFLGELFTDLPLPVDEAHGTEHCGRCTACLDICPTNAFIGPYVLDARRCISYLTIELKGPIPEDLRAGMGNRVFGCDDCQMVCPWNRFARPTEQGDFQPRHGLDNAELAELFLWSEEEFLSRTEGSPLRRAGYERWLRNLAVGLGNAPSSIPVIEALKARREYPSELVREHVEWALRRHGVDL

SEQ ID NO: 80023 - protein, 357 aa, Pseudomonas koreensis
  misc_feature (1)..(357): tr|A0A4Q4L5P9|A0A4Q4L5P9_9PSED Epoxyqueuosine reductase OS=Pseudomonas koreensis OX=198620 GN=queG PE=3 SV=1
MSAITTDLPALAQSIKDWGRELGFQQVGISGLNLAEHEQHLQRWLDAGYHGDMDYMGAHGSKRSHPDELVPGTLRVVSLRMDYLPGDTEMAKRLAEPEKAYVSRYALGRDYHKLIRKRVQQLADRIQAEIGPFGFRAFVDSAPVLEKAIAEQAGLGWIGKNTLVLNRKAGSYFFLSELFVDLPLPVDEPHSSEHCGRCTACLDICPTNAFVGPYVLDARRCISYLTIELKTAIPEELRPLIGNRVFGCDDCQIVCPWNRFAKASGEGDFKPRHNLDNAELAELFMWDEEKFLSSTEGSPLRRAGYERWLRNLAVGLGNAPSTIPVLEALKARRDYPSELVKEHVEWALEQHSRPSHP

SEQ ID NO: 80024 - protein, 357 aa, Pseudomonas koreensis
  misc_feature (1)..(357): tr|A0A4U3EY31|A0A4U3EY31_9PSED Epoxyqueuosine reductase OS=Pseudomonas koreensis OX=198620 GN=queG PE=3 SV=1
MSAITTDLPALAQSIKDWGRELGFQQVGISGLDLAEHEQHLERWLEAGYHGEMDYMGAHGSKRSHPEELVPGTLRVVSLRMDYLPGDTQMAQMLAQPEKAYVSRYALGRDYHKLIRKRVQQLADKIQAQIGPFGFRAFVDSAPVLEKAIAEQAGLGWIGKNTLVLNRKAGSYFFLSELFVDLPLPVDEPHSTEHCGRCTACLDICPTNAFVGPYVLDARRCISYLTIELKSAIPEDLRPLIGNRVFGCDDCQIVCPWNRFAKPSGESDFKPRHNLDNAELAELFLWDEEKFLSSTEGSPLRRAGYERWLRNLAVGLGNAPSTIPVLEALKARRDYPSELVREHVEWALERHSRPSNP

SEQ ID NO: 80025 - protein, 359 aa, Pseudomonas kribbensis
  misc_feature (1)..(359): tr|A0A4Y8VTH0|A0A4Y8VTH0_9PSED Epoxyqueuosine reductase OS=Pseudomonas kribbensis OX=1628086 GN=queG PE=3 SV=1
MSAITTDLPALAQSIKDWGRELGFQQVGISGLDLAEHEQHLQRWLEAGYHGEMDYMGAHGSKRSHPEELVPGTLRVVSLRMDYLPGDTQMAQLLAKPEKAYISRYALGRDYHKLIRKRVQQLADKIQSEIGPFGFRAFVDSAPVLEKAIAEQAGLGWIGKNTLVLNRKAGSYFFLSELFVDLPLPVDEPHSTEHCGRCTACLDICPTNAFVGPYVLDARRCISYLTIELKNAIPEDLRPLIGNRVFGCDDCQICCPWNRFARPSGESDFKPRHSLDNAELAELFLWDEDKFLSSTEGSPLRRAGYERWLRNLAVGLGNAPSSIPVLEALKARREYPSELVREHVEWALKQHADRQCSSL

SEQ ID NO: 80026 - protein, 359 aa, Pseudomonas kribbensis
  misc_feature (1)..(359): tr|A0A345RJJ1|A0A345RJJ1_9PSED Epoxyqueuosine reductase OS=Pseudomonas kribbensis OX=1628086 GN=queG PE=3 SV=1
MSAITTDLPALAQSIKDWGRELGFQQVGISGLDLAEHEQHLQRWLEAGYHGEMDYMGAHGSKRSHPEELVPGTLRVVSLRMDYLPGDTQMAQLLAKPEKAYISRYALGRDYHKLIRKRVQQLADKIQSEIGPFGFRAFVDSAPVLEKAIAEQAGLGWIGKNTLVLNRKAGSYFFLSELFVDLPLPVDEPHSTEHCGRCTACLDICPTNAFVGPYVLDARRCISYLTIELKNAIPEDLRPLIGNRVFGCDDCQICCPWNRFARPSGESDFKPRHNLDNAELAELFLWDEDKFLSSTEGSPLRRAGYERWLRNLAVGLGNAPSSIPVLEALKARREYPSELVREHVEWALKQHADRQCSSL

SEQ ID NO: 80027 - protein, 357 aa, Pseudomonas kunmingensis
  misc_feature (1)..(357): tr|A0A2N8SEE5|A0A2N8SEE5_9PSED Epoxyqueuosine reductase OS=Pseudomonas kunmingensis OX=1211807 GN=queG PE=3 SV =1
MSSLSLDPAALAQSIKEWGRELGFQQVGITDVDLGEHEAHLDAWLAAGYQGEMDYMAAHGSKRSRPDELVPGTLRVISLRMDYLPGDTRMTQQLASPEKAYVSRYALGRDYHKLIRKRIQQLAERIQQMIGPFGFRAFVDSAPVLEKAAGQQAGLGWIGKNTLLLNRKAGSWFFLGELFVDIALPVDEPTTRDHCGSCHSCLDVCPTDAFVGERLLDARRCISYLTIELKGAIPVELRDKIGNRVFGCDDCQIVCPWNRFARPTEQSDFQPRHSLDNAELATLFRWTEEEFLSRTEGSPLRRAGYQRWLRNLAVGLGNAPSSIPVLEALQARRHDPSELVREHVEWALAQHAQRQPD

SEQ ID NO: 80028 - protein, 357 aa, Pseudomonas kunmingensis
  misc_feature (1)..(357): tr|A0A1I3UW70|A0A1I3UW70_9PSED Epoxyqueuosine reductase OS=Pseudomonas kunmingensis OX=1211807 GN=queG PE=3 SV =1
MSSLSLDPAALAQSIKEWGRELGFQQVGITDVDLGEHEAHLEAWLAAGYQGEMDYMAAHGSKRSRPDELVPGTLRVISLRMDYLPGDTRMTQQLASPEKAYVSRYALGRDYHKLIRKRIQQLAERIQQMVGPFGFRAFVDSAPVLEKAAGQQAGLGWIGKNTLLLNRKAGSWFFLGELFVDIALPVDEPATRDHCGSCHACLDVCPTDAFVGERLLDARRCISYLTIELKGAIPIELRDKIGNRVFGCDDCQIVCPWNRFARPTEQSDFQPRHSLDNAELATLFRWTEEEFLSRTEGSPLRRAGYQRWLRNLAVGLGNAPSSIPVLEALQARRDDPSELVREHVEWALAQHAQRQAD

SEQ ID NO: 80029 - protein, 354 aa, Pseudomonas kuykendallii
  misc_feature (1)..(354): tr|A0A2W5D9I8|A0A2W5D9I8_9PSED Epoxyqueuosine reductase OS=Pseudomonas kuykendallii OX=1007099 GN=queG PE=3 SV =1
MPSSPPDLALLAQSIKDWGRELGFQQVGIAGLDLSEHEAHLQRWLDAGYQGEMDYMAAHGTKRSRPDELVTGTLRVVSLRMDYLPGDTRMSQRLAEPQSAYVSRYALGRDYHKLIRKRLQQLAERIQAAIGPFGHRAFVDSAPVLEKAIAEQAGLGWIGKNTLVLNRKAGSWFFLGELFVDLPLPVDAPHASEHCGRCSACLDICPTGAFVGPYVLDARRCISYLTIELKGAIPEDLRGLIGNRVFGCDDCQIVCPWNRFARPTEQADFQPRHGLDNAELAELFRWSEEEFLSRTEGSPLRRAGYERWLRNLAVGLGNAPSTIAVIEALQARRDYPSELVREHVSWALQRHGQA

SEQ ID NO: 80030 - protein, 354 aa, Pseudomonas kuykendallii
  misc_feature (1)..(354): tr|A0A1H2R2F7|A0A1H2R2F7_9PSED Epoxyqueuosine reductase OS=Pseudomonas kuykendallii OX=1007099 GN=queG PE=3 SV =1
MPSSPPDLVLLAQSIKDWGRELGFQQVGIAGLDLREHEAHLQRWLDAGYQGEMDYMAAHGTKRSRPDELVPGTLRVVSLRMDYLPGDTRMSQRLAEAQSAYVSRYALGRDYHKLIRKRLQQLAERIQTVIGPFGHRAFVDSAPVLEKAIAEQAGLGWIGKNTLVLNRKAGSWFFLGELFVDLPLPVDAPHASEHCGRCSACLEICPTGAFVGPYVLDARRCISYLTIELKGAIPEDLRGLIGNRVFGCDDCQIVCPWNRFARPTEQADFQPRHGLDNAELAELFRWSEEEFLSRTEGSPLRRAGYERWLRNLAVGLGNAPSTIAVIEALQARRDYPSELVREHVSWALQRHGQA

SEQ ID NO: 80031 - protein, 354 aa, Pseudomonas lactis; identical to SEQ ID NO: 79929
  misc_feature (1)..(354): tr|A0A0R3CHF6|A0A0R3CHF6_9PSED Epoxyqueuosine reductase OS=Pseudomonas lactis OX=1615674 GN=queG PE=3 SV=1

SEQ ID NO: 80032 - protein, 354 aa, Pseudomonas lactis
  misc_feature (1)..(354): tr|I4KA21|I4KA21_9PSED Epoxyqueuosine reductase OS=Pseu domonas lactis OX=1615674 GN=queG PE=3 SV=1
MPAITSDLPALAQSIKDWGRELGFQQVGISGLDLAEHEQHLQRWLDAGYHGEMEYMGAHGSKRSHPDELVPGTLRVVSLRMDYLPGDTHMAQLLAQPEKAYISRYALGRDYHKLIRKRVQQLADRIQAQIGPFGFRAFVDSAPVLEKAIAEQAGLGWIGKNTLVLNRKAGSYFFLSELFVDLPLPVDPPHATEHCGRCTACLDICPTNAFVGPYVLDARRCISYLTIELKSAIPEDLRPLIGNRVFGCDDCQIVCPWNRFARPTAESDFKPRHNLDNAELAELFMWDEDKFLSSTEGSPLRRAGYERWLRNLAVGLGNAPSSIPVLEALKARRDYPSELVREHVEWALEQHAAR

SEQ ID NO: 80033 - protein, 354 aa, Pseudomonas laurylsulfatiphila
  misc_feature (1)..(354): tr|A0A2S6FD26|A0A2S6FD26_9PSED Epoxyqueuosine reductase OS=Pseudomonas laurylsulfatiphila OX=2011015 GN=queG P E=3 SV=1
MPAITTDLPALAQSIKDWGRELGFQQVGISGLDLGEHEQHLEHWLAAGYHGEMDYMGAHGSKRSHPEELVPGTLRVVSLRMDYLAGDTHMAKMLAQPEKAYVSRYALGRDYHKLIRKRVQQLADKIQAEIGPFGFRAFVDSAPVLEKAIAEQAGLGWIGKNTLVLNRKAGSYFFLAELFVDLPLPVDPPHATEHCGRCSACLDICPTNAFVGPYVLDARRCISYLTIELKGAIPQDLRPLIGNRVFGCDDCQIVCPWNRFARPSGENDFKPRHNLDNAELAELFMWDEEKFLSSTEGSPLRRTGYENWLRNLAVGLGNAPSTIPVLEALKARREHPSELVREHVEWALKQHGLV

SEQ ID NO: 80034 - protein, 359 aa, Pseudomonas laurylsulfativorans
  misc_feature (1)..(359): tr|A0A2S3VHR9|A0A2S3VHR9_9PSED Epoxyqueuosine reductase OS=Pseudomonas laurylsulfativorans OX=1943631 GN=queG PE=3 SV=1
MPAITTDLPALAQSIKDWGRELGFQQVGISGLDLGEHEQHLERWLAAGYHGEMDYMGAHGSKRSHPEELVPGTLRVVSLRMDYLSGDTQMAKMLAQPEKAYVSRYALGRDYHKLIRKRVQQLADKIQAEIGPFGFRAFVDSAPVLEKAIAEQAGLGWIGKNTLVLNRKAGSYFFLAELFVDLPLPVDPPHATEHCGRCSACLDICPTNAFVGPYVLDARRCISYLTIELKGAIPEDLRPLIGNRVFGCDDCQIVCPWNRFARPSGENDFKPRHNLDNAGLAELFMWDEEKFLSSTEGSPLRRTGYENWLRNLAVGLGNAPSTIPVLEALKARREHPSELVREHVEWALRQHAERQASSL

SEQ ID NO: 80035 - protein, 354 aa, Pseudomonas libanensis
  misc_feature (1)..(354): tr|A0A0R2YKL7|A0A0R2YKL7_9PSED Epoxyqueuosine reductase OS=Pseudomonas libanensis OX=75588 GN=queG PE=3 SV=1
MPAITSDLPALAQSIKDWGRELGFQQVGISGLDLAEHEQHLQRWLDAGYHGEMDYMGAHGSKRSHPDELVPGTLRVVSLRMDYLPGDTQMAQLLAKPEKAYISRYALGRDYHKLIRKRVQQLADRIQAQIGPFGFRAFVDSAPVLEKAIAEQAGLGWIGKNTLVLNRKAGSYFFLSELFVDLPLPVDPPHATEHCGRCTACLDICPTNAFVGPYVLDARRCISYLTIELKSAIPEDLRPLIGNRVFGCDDCQIVCPWNRFARPTAESDFKPRHNLDNAELAELFMWDEDKFLSSTEGSPLRRAGYERWLRNLAVGLGNAPSSIPVLEALKARRDYPSELVREHVEWALNQHAAR

SEQ ID NO: 80036 - protein, 354 aa, Pseudomonas lini
  misc_feature (1)..(354): tr|A0A0J6H3T8|A0A0J6H3T8_9PSED Epoxyqueuosine reductase OS=Pseudomonas lini OX=163011 GN=queG PE=3 SV=1
MPAITTDLPALAQSIKDWGRELGFQQVGISGLDLAEHEQHLERWLEAGYHGEMEYMGAHGSKRSHPEELVPGTLRVVSLRMDYLPGDTEMAKRLAEPEKAYVSRYALGRDYHKLIRKRVQQLAEKIQAVIGPFGYRAFVDSAPVLEKAIAEQAGLGWIGKNTLVLNRKAGSYFFLSELFVDLPLPVDPPHATEHCGRCTACLDICPTNAFVGPYVLDARRCISYLTIELKSAIPEDLRPLIGNRVFGCDDCQIVCPWNRFARPSGESDFKPRHNLDNAELAELFMWDEDKFLSSTEGSPLRRAGYERWLRNLAVGLGNAPSSIPVLEALKARREHPSELVREHVEWALKQHGLA

SEQ ID NO: 80037 - protein, 354 aa, Pseudomonas lini
  misc_feature (1)..(354): tr|A0A423IJ31|A0A423IJ31_9PSED Epoxyqueuosine reductase OS=Pseudomonas lini OX=163011 GN=queG PE=3 SV=1
MPAINTDLPALAQSIKDWGRELGFQQVGISGLDLAEHEQHLERWLEAGYHGEMEYMGAHGSKRSHPEELVPGTLRVVSLRMDYLPGDTEMAKRLAEPEKAYVSRYALGRDYHKLIRKRVQQLAEKIQAVIGPFGYRAFVDSAPVLEKAIAEQAGLGWIGKNTLVLNRKAGSYFFLSELFVDLPLPVDPPHATEHCGRCTACLDICPTNAFVGPYVLDARRCISYLTIELKSAIPEDLRPLIGNRVFGCDDCQIVCPWNRFARPSGESDFKPRHNLDNAELAELFMWDEEKFLSSTEGSPLRRAGYERWLRNLAVGLGNAPSSIPVLEALKARRDYPSELVREHVEWALKQHGLL

SEQ ID NO: 80038 - protein, 354 aa, Pseudomonas linyingensis
  misc_feature (1)..(354): tr|A0A1H6RQT1|A0A1H6RQT1_9PSED Epoxyqueuosine reductase OS=Pseudomonas linyingensis OX=915471 GN=queG PE=3 SV= 1
MSTTAPDLVALAQSIRDWGRELGFQQVGIAGIELDEHEAYLQRWLAAGHHGEMDYMAAHGHKRSRPGELVPGTLRVISLRMDYLPGDTRMTEVLASPDKAYVSRYALGRDYHKLIRKRLQQLAERIQTAVGPFGHRAFVDSAPVLEKALAQQAGLGWIGKNTLLLNKKAGSWFFLGELYVDLPLPVDAPHTSEHCGRCQACLDICPTAAFVGPQQLDARRCISYLTIEFKGPIPEELRPLIGNRVFGCDDCQLVCPWNRFARPTAQGDFQPRHNLDNSELAALFRWSEEEFLARTEGSPLRRAGYQRWLRNLAVGLGNAPSSIAVIEALRLRRDDPSELVREHVEWALARHGVA

SEQ ID NO: 80039 - protein, 357 aa, Pseudomonas litoralis
  misc_feature (1)..(357): tr|A0A1H1TPJ1|A0A1H1TPJ1_9PSED Epoxyqueuosine reductase OS=Pseudomonas litoralis OX=797277 GN=queG PE=3 SV=1
MPDTNADYALLAAQIRDIAAELGFQQLGISAPDIGAHEQRLQQWLDAGYHGEMEWMASHGSKRTQPAELVPGTQRVISVRMDYLPPDTRMARRLADRDAAYISRYALGRDYHKLIRRRLQQLAERIQTLIGPFGFRAFVDSAPVMERALATRSGLGWIGKNTMLLNRKAGSFFFLGELYTDLPLPTDDAYEQEHCGSCTACLSKCPTDAFIGPHVLDARRCISYLTIELKGAIPGELRPLMGNRVFGCDDCQLVCPWNKFAKPTAERDFSPRHQLDQADLISLFRWDEEQYLKNTEGSPLRRIGHERWLRNLAIGLGNAHTSIPVIDALNSRLDHPSELVREHVQWALARHGAAVTL

SEQ ID NO: 80040 - protein, 354 aa, Pseudomonas lundensis
  misc_feature (1)..(354): tr|A0A2C8F4G6|A0A2C8F4G6_9PSED Epoxyqueuosine reductase OS=Pseudomonas lundensis OX=86185 GN=yjeS PE=3 SV=1
MPANTVDLPALAQSIKEWGRELGFQQVAIAGLDLGEHEQHLERWLAAGYHGEMDYMGAHGSKRSHPEELVPGTLRVVSLRMDYLPGDTHMAHLLAQPEKAYVSRYALGRDYHKLIRKRVQQLADRIQAQIGPFGFRAFVDSAPVLEKAIAQKAGLGWIGKNTLVLNRKAGSYFFLSELFVDLALPEDEPHKTEHCGRCTACLDICPTNAFVGPYVLDARRCISYLTIELKSAIPVELRAMIGNRVFGCDDCQIVCPWNRFARTTAEGDFKPRHNLDNAELAQLFMWDEATFLSSTEGSPLRRAGYERFLRNLAVGLGNAPSTIPVLEALKARRDYPSALVQEHVQWALDQHAAR

SEQ ID NO: 80041 - protein, 354 aa, Pseudomonas lundensis
  misc_feature (1)..(354): tr|A0A266NF64|A0A266NF64_9PSED Epoxyqueuosine reductase OS=Pseudomonas lundensis OX=86185 GN=queG PE=3 SV=1
MPAITVDLPALAQSIKEWGRELGFQHVAIAGLDLEEHEQHLERWLAAGYHGEMDYMGAHGSKRSHPEELVPGTLRVVSLRMDYLPGDTHMAQLLAQPEKAYVSRYALGRDYHKLIRKRVQQLADRIQAQIGPFGFRAFVDSAPVLEKAIAQKAGLGWIGKNTLILNRKAGSYFFLSELFVDLPLPEDAPHETEHCGRCTACLDICPTNAFVGPYVLDARRCISYLTIELKSAIPVELRAMIGNRVFGCDDCQIVCPWNRFARTTAEGDFKPRHNLDNAELAQLFMWDEDTFLSSTEGSPLRRAGYERWLRNLAVGLGNAPSTIPVLEALKARRDYPSALVQEHVQWALDQHAAR

SEQ ID NO: 80042 - protein, 354 aa, Pseudomonas lurida
  misc_feature (1)..(354): tr|A0A2R3HQ90|A0A2R3HQ90_9PSED Epoxyqueuosine reductase OS=Pseudomonas lurida OX=244566 GN=queG PE=3 SV=1
MPAITTDLPALAQSIKDWGRELGFQQVGISGLDLAEHEQHLQRWLDAGYHGEMEYMGAHGSKRSHPDELVPGTLRVVSLRMDYLPGDTQMAQLLAKPEKAYISRYALGRDYHKLIRKRVQQLADRIQAQIGPFGFRAFVDSAPVLEKAIAEKAGLGWIGKNTLVLNRKAGSYFFLSELFVDLPLPIDAPHSTEHCGRCTACLDICPTNAFVGPYVLDARRCISYLTIELKTAIPEDLRPLIGNRVFGCDDCQIVCPWNRFARATAESDFKPRHNLDNAELAELFMWDEDTFLSSTEGSPLRRAGYERWLRNLAVGLGNAPSSIPVLEALKARRDYPSELVREHVEWALNQHATR

SEQ ID NO: 80043 - protein, 354 aa, Pseudomonas lurida
  misc_feature (1)..(354): tr|A0A2A9D563|A0A2A9D563_9PSED Epoxyqueuosine reductase OS=Pseudomonas lurida OX=244566 GN=queG PE=3 SV=1
MPAITTDLPALAQSIKDWGRELGFQQVGISGLDLAEHEQHLQRWLDAGYHGEMEYMGAHGSKRSHPDELVPGTLRVVSLRMDYLPGDTQMAQLLAKPEKAYISRYALGRDYHKLIRKRVQQLADRIQAQIGPFGFRAFVDSAPVLEKAIAEKAGLGWIGKNTLVLNRKAGSYFFLSELFVDLPLPIDAPHSTEHCGRCTACLDICPTNAFVGPYVLDARRCISYLTIELKTAIPEDLRPLIGNRVFGCDDCQIVCPWNRFARATAESDFKPRHNLDNAELAELFMWDEETFLSSTEGSPLRRAGYERWLRNLAVGLGNAPSSIPVLEALKARRDYPSELVREHVEWALNQHATR

SEQ ID NO: 80044 - protein, 360 aa, Pseudomonas lutea
  misc_feature (1)..(360): tr|A0A098SVF6|A0A098SVF6_9PSED Epoxyqueuosine reductase OS=Pseudomonas lutea OX=243924 GN=queG PE=3 SV=1
MRLTAAELTDLAQSIKEWGRELGFQQVGISGLDLAEHERHLERWLEAGYHGEMDYMAAHGSKRSHPDELVPGTLRVVSLRMDYLPGDTQMAQLLGQREKAYVSRYALGRDYHKLIRKRVQQLAERVQQAIGPFGFRAFVDSAPVLEKAIAEQAGLGWIGKNTLVLNRKAGSYFFLSELFVDLPLPVDAPHATEHCGRCTACLDVCPTNAFVGPYVLDARKCISYLTIELKTSIPEDLRSLIGNRVFGCDDCQIVCPWNRFARPTDQSDFKPRHGLDNAELTTLFLWDETTFLSNTEGSPLRRAGYERWLRNLAVGLGNAPSTIPVIEALKARLGHPSEMVREHVEWALKQHEIKAAARIV

SEQ ID NO: 80045 - protein, 354 aa, Pseudomonas luteola
  misc_feature (1)..(354): tr|A0A3R8WJF1|A0A3R8WJF1_PSELU Epoxyqueuosine reductase OS=Pseudomonas luteola OX=47886 GN=queG PE=3 SV=1
MSSYALDLDTLAASIKEWGRELGFQQTGITGVALGDHEAYLERWLAAGYHGEMDYMAAHGQKRSRPDELVPGTLRIVSLRMDYLPGDTDMAKRLADPAHAYISRYALGRDYHKLIRKRLQQLAERIQATIGPFGYRAFVDSAPVLEKALAEKAGLGWIGKNTLVLNRKAGSYFFLGELFTDLPLPVDEPHPSNHCGRCSACMDICPTQAFVAPYVLDARRCISYLTIEFKGSIPEELRPLIGNRVFGCDDCQIVCPWNRFAKPTAQPDFQPRHNLDSSDLVTLFRWTEDEFLSRTEGSPLRRAGYERWLRNLAVALGNAPTSIPVVEALKAHQQHPSPLVREHVEWALGRHGYA

SEQ ID NO: 80046 - protein, 354 aa, Pseudomonas luteola
  misc_feature (1)..(354): tr|A0A2X2C1D0|A0A2X2C1D0_PSELU Epoxyqueuosine reductase OS=Pseudomonas luteola OX=47886 GN=queG PE=3 SV=1
MSSYALDLDTLAASIKEWGRELGFQQTGITGVALGDHEAYLERWLAAGYHGEMDYMAAHGQKRSRPDELVPGTLRIVSLRMDYLPGDTDMAKRLADPAHAYISRYALGRDYHKLIRKRLQQLAERIQAAIGPFGYRAFVDSAPVLEKALAEKAGLGWIGKNTLVLNRKAGSYFFLGELFTDLPLPVDEPHPSNHCGRCSACMDICPTQAFVAPYVLDARRCISYLTIEFKGSIPEELRPLIGNRVFGCDDCQIVCPWNRFAKPTAQPDFQPRHNLDNSDLVTLFRWTEDEFLSRTEGSPLRRAGYERWLRNLAVALGNAPTSIPVVEALKVHQQHPSPLVREHVEWALGRHGYA

SEQ ID NO: 80047 - protein, 359 aa, Pseudomonas mandelii
  misc_feature (1)..(359): tr|A0A255XMW6|A0A255XMW6_9PSED Epoxyqueuosine reductase OS=Pseudomonas mandelii OX=75612 GN=queG PE=3 SV=1
MPAITTDLPALAQSIKDWGRELGFQQVGISGLDLAEHEQHLQRWLDAGYHGEMDYMGAHGSKRSHPEELVPGTLRVVSLRMDYLPGDTQMAQLLAQPEKAYVSRYALGRDYHKLIRKRVQHLAEKIQAVIGPFGYRAFVDSAPVLEKAIAEQAGLGWIGKNTLVLNRKAGSYFFLSELFVDLPLPVDPPHSTEHCGRCTACLDICPTNAFVGPYVLDARRCISYLTIELKSAIPEDLRPLIGNRVFGCDDCQIVCPWNRFARPSVESDFKPRHNLDNAELAELFMWDEDRFLSSTEGSPLRRAGYERWLRNLAVGLGNAPSSIPVLEALKARRDYPSELVREHVEWALKQHAERQASSL

SEQ ID NO: 80048 - protein, 362 aa, Pseudomonas mandelii
  misc_feature (1)..(362): tr|A0A059L7L5|A0A059L7L5_9PSED Epoxyqueuosine reductase OS=Pseudomonas mandelii PD30 OX=1419583 GN=queG PE=3 S V=1
MPAITTDLPTLAQSIKDWGRELGFQQVGISGLDLAEHEQHLERWLAAGYHGEMEYMGAHGSKRSHPEELVPGTLRVISLRMDYLPGDTEMAKRLAQPEKAYVSRYALGRDYHKLIRKRVQQLADKIQAEIGPFGFRAFVDSAPVLEKAIAEQAGLGWIGKNTLVLNRKAGSYFFLSELFVDLPLPVDPPHSTEHCGRCTACLDICPTNAFVGPYVLDARRCISYLTIELKSAIPEDLRPLIGNRVFGCDDCQIVCPWNRFARPSGESDFKPRHNLDNAELAELFMWDEEKFLSSTEGSPLRRAGYERWLRNLAVGLGNAPSSIPVLEALKARREHPSELVREHVEWALKQHEQRTGTLGTRP

SEQ ID NO: 80049 - protein, 354 aa, Pseudomonas marginalis
  misc_feature (1)..(354): tr|A0A5C5P8X8|A0A5C5P8X8_PSEMA Epoxyqueuosine reductase OS=Pseudomonas marginalis OX=298 GN=queG PE=3 SV=1
MPAITSDLPALAQSIKDWGRELGFQQVGISGLDLAEHEQHLQRWLDAGYHGEMDYMGAHGSKRSHPDELVPGTLRVVSLRMDYLPGDTQMAQLLAKPEKAYISRYALGRDYHKLIRKRVQQLADRIQAQIGPFGFRAFVDSAPVLEKAIAEQAGLGWIGKNTLVLNRKAGSYFFLSELFVDLPLPVDPPHATEHCGRCTACLDICPTNAFVGPYVLDARRCISYLTIELKSAIPEDLRPLIGNRVFGCDDCQIVCPWNRFARPTAESDFTPRHNLDNAELAELFMWDEDKFLSSTEGSPLRRAGYERWLRNLAVGLGNAPSSIPVLEALKARRDYPSELVREHVEWALNQHASR

SEQ ID NO: 80050 - protein, 354 aa, Pseudomonas marginalis
  misc_feature (1)..(354): tr|A0A3M5PSW4|A0A3M5PSW4_PSEMA Epoxyqueuosine reductase OS=Pseudomonas marginalis pv. marginalis OX=97473 GN=q ueG PE=3 SV=1
MPAITSDLPALAQSIKDWGRELGFQQVGISGLDLAEHEQHLQRWLDAGYHGEMDYMGAHGSKRSHPEELVPGTLRVVSLRMDYLPGDTQMAQLLAQPEKAYISRYALGRDYHKLIRKRVQQLADRIQAQIGPFGFRAFVDSAPVLEKAIAEKAGLGWIGKNTLVLNRKAGSYFFLSELFVDLPLPVDKPHSTEHCGRCTACLDICPTNAFVGPYVLDARRCISYLTIELKSAIPEDLRPLIGNRVFGCDDCQIVCPWNRFARATTEGDFKPRHNLDNAELAELFMWDEDTFLSSTEGSPLRRAGYERWLRNLAVGLGNAPSSIPVLEALKARRDYPSELVREHVEWALNQHATR

SEQ ID NO: 80051 - protein, 359 aa, Pseudomonas marincola; identical to SEQ ID NO: 79899
  misc_feature (1)..(359): tr|A0A1I7AFW6|A0A1I7AFW6_9PSED Epoxyqueuosine reductase OS=Pseudomonas marincola OX=437900 GN=queG PE=3 SV=1

SEQ ID NO: 80052 - protein, 359 aa, Pseudomonas mediterranea
  misc_feature (1)..(359): tr|A0A0A4HT67|A0A0A4HT67_9PSED Epoxyqueuosine reductase OS=Pseudomonas mediterranea CFBP 5447 OX=1348058 GN=qu eG PE=3 SV=1
MPAIPTDLPALAQSIKDWGRELGFQQVGISGLDLGEHEQHLQRWLDAGYHGEMDYMGAHGSKRSHPDELVPGTLRVVSLRMDYLPGDTHMAQMLGQPEKAYVSRYALGRDYHKLIRKRVQQLAEKIQAVIGPFGYRAFVDSAPVLEKAIAEQAGLGWIGKNTLVLNRKAGSYFFLSELFVDLPLPVDPPQASEHCGKCTACLDICPTNAFIGPYVLDARRCISYLTIELKSAIPEELRPLIGNRVFGCDDCQIVCPWNRFARPSGENDFKPRHNLDNAGLAELFLWDEDTFLKSSEGSPLRRAGYERWLRNLAVGLGNAPSTIPVLQALEARRDHPSELVREHVEWALRQHAQRQTSSL

SEQ ID NO: 80053 - protein, 364 aa, Pseudomonas meliae
  misc_feature (1)..(364): tr|A0A0P9VWN7|A0A0P9VWN7_9PSED Epoxyqueuosine reductase OS=Pseudomonas meliae OX=86176 GN=queG PE=3 SV=1
MSAITAVLPTSDDLAALAVSIKAWGRELGFQEVGISGLDLAEHEQHLQRWLDAGYHGEMDYMAAHGSKRSHPDELVPGTLRVVSLRMDYLPGDTEMAQRLTEPEKAYVSRYALGRDYHKLIRKRLQQLAERIQQAIGPFGFRAFVDSAPVLEKAIAEQAGLGWIGKNTLVLNRKAGSFFFLGELFVDIPLPVDAPHATEHCGRCTACLDICPTAAFVGPYVLDARRCISYLTIELKTAIPEELRPLIGNRVFGCDDCQIVCPWNRFARPTDQSDFQPRHNLDNAGLAELFLWDEDKFLSSTEGSPLRRAGYERWLRNLAVGLGNAPSTIPVIEALHARRDYPSELVREHVEWALQRHGVADAEG

SEQ ID NO: 80054 - protein, 354 aa, Pseudomonas mendocina
  misc_feature (1)..(354): tr|A0A2R3QL58|A0A2R3QL58_PSEME Epoxyqueuosine reductase OS=Pseudomonas mendocina OX=300 GN=queG PE=3 SV=1
MSDHALDLNALALSIKDWGRELGFQQVGIADVELGEHEAHLKRWLAAGYQGEMDYMAAHGDKRSRPQELVPGTLRVVSLRMDYLPGDTQMAQRLREPEQAYVSRYALGRDYHKLIRKRLQQLAERIQQQIGPFGYRAFVDSAPVLEKAIAEQAGLGWIGKNTLVLNRKAGSYFFLGELFVDLPLPVDAPHGSEHCGRCSACMDICPTAAFVGPYVLDARRCISYLTIELKGSIPEELRAPIGNRVFGCDDCQIVCPWNRFARPTEQGDFQPRHGLDNSGLAELFLWTEEEFLSRTEGSPLRRAGYERWLRNLAVGLGNAPSTIPVLEALRARREHPSALVREHVEWALDRHGAP

SEQ ID NO: 80055 - protein, 357 aa, Pseudomonas mendocina
  misc_feature (1)..(357): tr|A4XPY1|A4XPY1_PSEMY Epoxyqueuosine reductase OS=Pseu domonas mendocina (strain ymp) OX=399739 GN=queG PE=3 S V=1
MSDHRLDLNALAQSIKDWGRELGFQQVGIADVTLGEHEAHLQRWLAAGYQGEMDYMAAHGSKRSHPDELVPGTLRVVSLRMDYLPGDTQMAKRLAEPEKAYVSRYALGRDYHKLIRKRLQQLAERVQQQIGPFGYRAFVDSAPVLEKAIAEKAGLGWIGKNTLVLNRKAGSYFFLGELFVDLPLPVDAAHGSEHCGRCTACMDICPTAAFVAPYVLDARRCISYLTIELKGSIPEELRAPIGNRVFGCDDCQIVCPWNRFARPTEQGDFQPRHGLDNTELAALFLWTEEEFLSRTEGSPLRRAGYERWLRNLAVGLGNAPSTIAVLEALKARREHPSELVREHVEWALGRHQQCGST

SEQ ID NO: 80056 - protein, 411 aa, [Pseudomonas] mesoacidophila
  misc_feature (1)..(411): tr|A0A2A4FDI9|A0A2A4FDI9_9BURK Epoxyqueuosine reductase OS=[Pseudomonas] mesoacidophila OX=265293 GN=queG PE=3 SV=1
MNRLPELAASETRSTQAERAAPCVLDDAALTALAARIRAWGRELGFGAIGISDTDLSEAEAGLAAWLEAGCHGEMDYMAKHGMKRARPAELVAGTRRVISARLAYLPAQTLAGDAPDDAHGARAPRDWRAREQARLDDPQAAVVSIYARGRDYHKVLRNRLQTLAERIEREIGAFGYRVFTDSAPVLEVELAQKAGVGWRGKHTLLLQRDAGSLFFLGEIYVDIPLPTDAQTAPDAAPETPGAHCGSCTRCIDACPTGAIVEPYRVDARRCISYLTIELKGSIPEPMRPLIGNRVYGCDDCQLVCPWNKFAQAAPVADFDVRHGLDRATLVELFGWSADEFDARMQGSAIRRIGHECWLRNLAVGLGNALRAPRERLAPAARDAIVAALRARADDPSPLVREHVEWALRAA

SEQ ID NO: 80057 - protein, 354 aa, Pseudomonas migulae
  misc_feature (1)..(354): tr|A0A1H5A1T0|A0A1H5A1T0_9PSED Epoxyqueuosine reductase OS=Pseudomonas migulae OX=78543 GN=queG PE=3 SV=1
MPAITTDLPALAQSIKDWGRELGFQQVGISGLDLAEHEQHLERWLAAGYHGEMDYMGAHGSKRSHPEELVPGTLRVVSLRMDYLPGDTEMAKRLAQPEKAYVSRYALGRDYHKLIRKRVQQLADKIQAEIGPFGFRAFVDSAPVLEKAIAEQAGLGWIGKNTLVLNRKAGSYFFLSELFVDLPLPVDPPHSTEHCGRCTACLDICPTNAFVGPYVLDARRCISYLTIELKSAIPEDLRPLIGNRVFGCDDCQIVCPWNRFARPSGESDFKPRHNLDNAELAELFMWDEDKFLSSTEGSPLRRAGYERWLRNLAVGLGNAPSSIPVLEALKARREYPSELVREHVEWALKRHGLA

SEQ ID NO: 80058 - protein, 356 aa, Pseudomonas mohnii
  misc_feature (1)..(356): tr|A0A1H4TBF1|A0A1H4TBF1_9PSED Epoxyqueuosine reductase OS=Pseudomonas mohnii OX=395600 GN=queG PE=3 SV=1
MPAITPDLPTLAQSIKDWGRELGFQQVGISGLDLGEHEQHLERWLDAGYHGEMDYMGAHGSKRSHPEELVPGTLRVVSLRMDYLAGDTQMAQMLAQPEKAYVSRYALGRDYHKLIRKRVQQLAEKIQAEIGPFGYRAFVDSAPVLEKAIAEQAGLGWIGKNTLVLNRKAGSYFFLAELFVDLPLPVDPPHATEHCGRCSACLDICPTNAFVGPYVLDARRCISYLTIELKGAIPEDLRPLIGNRVFGCDDCQIVCPWNRFARPSGESDFKPRHNLDNAELANLFMWDEDKFLNSTEGSPLRRTGYENWLRNLAVGLGNAPSTIPVLEALKARREYPSELVREHVEWALRQHSARQA

SEQ ID NO: 80059 - protein, 354 aa, Pseudomonas monteilii
  misc_feature (1)..(354): tr|A0A3G2HN75|A0A3G2HN75_9PSED Epoxyqueuosine reductase OS=Pseudomonas monteilii OX=76759 GN=queG PE=3 SV=1
MSVCTPDLAQLAQSIKIWGQELGFAHVGIAGVDLGEHEHHLQRWLDAGYQGEMEYLGAHGSKRSHPDQLIPGTVRVVSLRMDYLSGDTQMAQRLAQPEKAYISRYALGRDYHKLVRKRVQFLADRIQEAIGPFGYRAFVDSAPVLEKALAEQAGLGWIGKNTLLLNRKAGSYFFLAELFVDLPIPVDEATTSEHCGRCQACLDICPTQAFVGPYVLDARRCISYLTIELRGAIPVELRAKMGNRVFGCDDCQIVCPWNRFAKHSQEQDFQPRHGLENAELAEMFLWDERTFLRKTEGGPLRRAGYERFLRNLAVGLGNAPSTIPVIEALKARRDDESELVREHVEWALARHGIQ

SEQ ID NO: 80060 - protein, 354 aa, Pseudomonas monteilii
  misc_feature (1)..(354): tr|V9V5H5|V9V5H5_9PSED Epoxyqueuosine reductase OS=Pseu domonas monteilii SB3101 OX=1435058 GN=queG PE=3 SV=1
MSVCTPDLAQLAQSIKIWGQELGFAHVGIAGVDLGEHEHHLQRWLDAGYQGEMDYLDAHGSKRAHPEQLIPGTVRVVSLRMDYLPGDTQMAQRLAQPEKAYVSRYALGRDYHKLVRKRVQFLADRIQEAIGPFGYRAFVDSAPVLEKALAEQAGLGWIGKNTLLLNRKAGSYFFLAELFVDLPLPVDEATTSEHCGRCQACLDICPTQAFVGPYVLDARRCISYLTIELRGPIPVELRSKMGNRVFGCDDCQIVCPWNRFARHSQEQDFQPRHGLENAELAEMFLWDERTFLRKTEGGPLRRAGYERWLRNLAVGLGNAPSTIPVIEALKARREDASELVREHVEWALAQHGIS

SEQ ID NO: 80061 - protein, 354 aa, Pseudomonas moorei
  misc_feature (1)..(354): tr|A0A1H1J8R5|A0A1H1J8R5_9PSED Epoxyqueuosine reductase OS=Pseudomonas moorei OX=395599 GN=queG PE=3 SV=1
MPAITTDLPALAQSIKDWGRELGFQQVGISGLDLGEHEQHLERWLEAGYHGEMDYMGAHGSKRSHPEELVPGTLRVVSLRMDYLAGDTQMAQMLAQPEKAYVSRYALGRDYHKLIRKRVQQLAERIQAEIGPFGFRAFVDSAPVLEKAIAEQAGLGWIGKNTLVLNRKAGSYFFLAELFVDLPLPVDPPHATEHCGRCSACLDICPTNAFVGPYVLDARRCISYLTIELKGAIPEDLRPLIGNRVFGCDDCQIVCPWNRFARPSGESDFKPRHNLDNAQLADLFMWDEDKFLSSTEGSPLRRTGYENWLRNLAVGLGNAPSTIPVLEALKARRDHPSELVREHVEWALKQHGLL

SEQ ID NO: 80062 - protein, 356 aa, Pseudomonas moorei
  misc_feature (1)..(356): tr|A0A4Q7HAC9|A0A4Q7HAC9_9PSED Epoxyqueuosine reductase OS=Pseudomonas moorei OX=395599 GN=queG PE=3 SV=1
MPAITPDLPTLAQSIKDWGRELGFQQVGISGLDLGEHEQHLERWLDAGYHGEMDYMGAHGSKRSHPEELVPGTLRVVSLRMDYLAGDTQMAQMLAQPEKAYVSRYALGRDYHKLIRKRVQQLAEKIQAEIGPFGYRAFVDSAPVLEKAIAEQAGLGWIGKNTLVLNRKAGSYFFLAELFVDLPLPVDPPHATEHCGRCSACLDICPTNAFVGPYVLDARRCISYLTIELKGAIPEDLRPLIGNRVFGCDDCQIVCPWNRFARPSDESDFKPRHSLDNAELAELFMWDEDKFLSNTEGSPLRRAGYQSWLRNLAVGLGNAPSTIPVLEALKARREYPSELVREHVEWALKQHTDRLE

SEQ ID NO: 80063 - protein, 366 aa, Pseudomonas moraviensis
  misc_feature (1)..(366): tr|A0A1Q3IA82|A0A1Q3IA82_9PSED Epoxyqueuosine reductase OS=Pseudomonas moraviensis OX=321662 GN=queG PE=3 SV=1
MSAITTDLPALAQSIKDWGRELGFQQVGISGLDLAEHEQHLQRWLDAGYHGEMDYMGAHGSKRSHPDELVPGTLRVVSLRMDYLPGDTEMAKRLAEPEKAYVSRYALGRDYHKLIRKRVQQLADRIQAEIGPFGFRAFVDSAPVLEKAIAEQAGLGWIGKNTLVLNRKAGSYFFLSELFVDLPLPVDEPHSSEHCGRCTACLDICPTNAFVGPYVLDARRCISYLTIELKTAIPEELRPLIGNRVFGCDDCQIVCPWNRFARPTGENDFKPRHNLDNAQLAELFLWDEEKFLSSTEGSPLRRAGYERWLRNLAVGLGNAPSTIPVLEALKARRDYPSELVREHVEWALERHARRELAKPASAMFKS

SEQ ID NO: 80064 - protein, 366 aa, Pseudomonas moraviensis
  misc_feature (1)..(366): tr|V8REB6|V8REB6_9PSED Epoxyqueuosine reductase OS=Pseu domonas moraviensis R28-S OX=1395516 GN=queG PE=3 SV=1
MSAITTDLPALAQSIKDWGRELGFQQVGISGLDLAEHEQHLQRWLEAGYHGEMDYMGAHGSKRSHPDELVPGTLRVVSLRMDYLPGDTEMAKRLAEPEKAYVSRYALGRDYHKLIRKRVQQLADRIQAEIGPFGFRAFVDSAPVLEKAIAEQAGLGWIGKNTLVLNRKAGSYFFLSELFVDLPLPVDDPHSTEHCGRCTACLDICPTNAFVGPYVLDARRCISYLTIELKTAIPEELRALIGNRVFGCDDCQIVCPWNRFARPTGESDFKPRHNLDNAELAELFMWDEEKFLSSTEGSPLRRAGYERWLRNLAVGLGNAPSSIPVLEALKARRDYPSELVREHVEWALEQHAHRALAEPATALFKS

SEQ ID NO: 80065 - protein, 354 aa, Pseudomonas mosselii
  misc_feature (1)..(354): tr|A0A1X1NV64|A0A1X1NV64_9PSED Epoxyqueuosine reductase OS=Pseudomonas mosselii OX=78327 GN=queG PE=3 SV=1
MSANLPDIATLAQSIKDWGRELGFAHVGIAGVDLGEHEQHLQRWLAAGYNGEMEYMGDHGHKRSRPAELIPGTLRVISLRMDYLPGDTQMAKRLAEPEKAYISRYALGRDYHKLVRKRVQHFADRIQEAIGPFGYRAFVDSAPVLEKALAQEAGLGWIGKNTLLLNRKAGSYFFLAELFVDLPLPIDGVQGSDHCGRCQACLDICPTQAFVGPYQLDARRCISYLTIELRGAIPLELRPLIGNRVFGCDDCQIVCPWNRFAKTSTEDDFMPRRGLDNIELAELFLWDEKRFLGCTEGSPLRRAGYERFLRNLAVGLGNAPSTIPVLEALNARRDDPSELVREHVEWALARHDAL

SEQ ID NO: 80066 - protein, 354 aa, Pseudomonas mosselii
  misc_feature (1)..(354): tr|A0A290H0E7|A0A290H0E7_9PSED Epoxyqueuosine reductase OS=Pseudomonas mosselii OX=78327 GN=queG PE=3 SV=1
MSANLPDIATLAQSIKDWGRELGFAHVGIAGVDLGEHEQHLQRWLAAGYNGEMEYMGDHGHKRSRPAELIPGTLRVISLRMDYLPGDTQMAKRLAEPEKAYISRYALGRDYHKLVRKRVQHFADRIQEAIGPFGYRAFVDSAPVLEKALAQEAGLGWIGKNTLLLNRKAGSYFFLAELFVDLPLPIDGVQGSDHCGRCQACLDICPTQAFVGAYQLDARRCISYLTIELRGAIPLELRPLIGNRVFGCDDCQIVCPWNRFAKTTTEDDFMPRRGLDNIELAELFLWDEKRFLGCTEGSPLRRAGYERFLRNLAVGLGNAPSTIPVLEALNARRDDPSELVREHVEWALARHDAL

SEQ ID NO: 80067 - protein, 359 aa, Pseudomonas mucidolens
  misc_feature (1)..(359): tr|A0A1H2NLS7|A0A1H2NLS7_9PSED Epoxyqueuosine reductase OS=Pseudomonas mucidolens OX=46679 GN=queG PE=3 SV=1
MPAITTDLPALAQSIKDWGRELGFQQVGISGLDLAEHEQHLQRWLDAGYHGQMDYMGAHGSKRSHPEELVPGTLRVVSLRMDYLPGDTHMAHLLAQPEKAYISRYALGRDYHKLIRKRVQQLAERIQAHIGPFGFRAFVDSAPVLEKAIAEQAGLGWIGKNTLVLNRKAGSYFFLSELFVDLPLPVDPPHTSEHCGRCTACLDICPTNAFVGAYVLDARRCISYLTIELKSAIPEDLRPLIGNRVFGCDDCQIVCPWNRFARPSGEGDFQPRHNLDNAGLAELFMWDEDKFLSSTEGSPLRRAGYERWLRNLAVGLGNAPSSIVVLEALKARRDYPSELVREHVEWALKQHAERQCSSL

SEQ ID NO: 80068 - protein, 354 aa, Pseudomonas nabeulensis
  misc_feature (1)..(354): tr|A0A4Z0B6U9|A0A4Z0B6U9_9PSED Epoxyqueuosine reductase OS=Pseudomonas nabeulensis OX=2293833 GN=queG PE=3 SV= 1
MSAITSDLPALAQSIKDWGRELGFQQVGISGLDLGEHEQHLQRWLDAGYHGEMEYMGAHGSKRSHPDELVPGTLRVVSLRMDYLPGDTQMAQLLAKPEKAYISRYALGRDYHKLIRKRVQQLADRIQAQIGPFGFRAFVDSAPVLEKAIAEKAGLGWIGKNTLVLNRKAGSYFFLSELFVDLPLPVDDPHSTEHCGRCTACLDICPTNAFVGPYVLDARRCISYLTIELKNAIPEDLRPLIGNRVFGCDDCQIVCPWNRFARSTGESDFKPRHNLDNAELAELFMWDEDKFLSSTEGSPLRRAGYERWLRNLAVGLGNAPSSIPVLEALKARRDYPSELVREHVEWALNQHATR

SEQ ID NO: 80069 - protein, 378 aa, Pseudomonas nitroreducens
  misc_feature (1)..(378): tr|A0A239LUU5|A0A239LUU5_9PSED Epoxyqueuosine reductase OS=Pseudomonas nitroreducens OX=46680 GN=queG PE=3 SV= 1
MAYGRADAGQVWQNYTHPDFGFPPSMHDSTLDYADLARSIKDWGRELGFQQVGISGLDLEEHGTHLQRWLDAGYHGEMDYMGAHGSKRWRPDELVPGTLRVVSLRMDYLPGDTRMAQVLGDPERAYVSRYALGRDYHKLIRKRLQQLAERIQQQVGPFGFRAFVDSAPVLEKAIAEQSGLGWVGKNTLVLNRKAGSYFFLGELFTDLPLPVDEPHGTEHCGRCSACMDICPTAAFVAPYVLDARRCISYLTIELKGPIPEDLRPLIGNRVFGCDDCQMVCPWNRFARATDLGDFQPRHSLDNAALAELFLWTEEEFLSRTEGSPLRRAGYERWLRNLAVGLGNAPSTIPVIEALRARQEFPSELVREHVAWALGRHCA

SEQ ID NO: 80070 - protein, 353 aa, Pseudomonas nitroreducens
  misc_feature (1)..(353): tr|A0A246FFJ5|A0A246FFJ5_9PSED Epoxyqueuosine reductase OS=Pseudomonas nitroreducens OX=46680 GN=queG PE=3 SV= 1
MHDSTLDYADLALSIKEWGRELGFQQVGISGLDLEAHGEHLQRWLEAGYHGEMDYMGAHGSKRWRPDELVPGTLRVVSLRMDYLPGDTRMAQVLADPQKAYISRYALGRDYHKLIRKRLQQLAERIQQQIGPFGFRAFVDSAPVLEKAIAEQSGLGWIGKNTLVLNRKAGSYFFLGELFTDLPLPVDEPHGTEHCGRCSACMDICPTAAFVAPYVLDARRCISYLTIELKGSIPEELRPLIGNRVFGCDDCQMVCPWNRFARATDQGDFQPRHSLDNAALAELFLWTEEEFLSRTEGSPLRRAGYERWLRNLAVGLGNAPSTIPVIEALRARREFPSELVREHVTWALHRHGA

SEQ ID NO: 80071 - protein, 353 aa, Pseudomonas oceani
  misc_feature (1)..(353): tr|A0A2P4EXV7|A0A2P4EXV7_9PSED Epoxyqueuosine reductase OS=Pseudomonas oceani OX=1708783 GN=queG PE=3 SV=1
MPDTANYQAIADQIRALAGELGFQQLGIAAPDIGDHEEWLQRWLAAGYHGEMEWMASHGTKRTRPAELVPGTQRVISVRMDYLPADSAMTKRLANRDSAYISRYALGRDYHKLIRRRLQQLADRIQNLIGPFGYRAFVDSAPVMERALATRSGLGWIGKNTMLINRKAGSYFFLGELYTDLPLPLDKPQQTEHCGKCTACLERCPTDAFVGPHLLDARRCISYLTIELKGAIPEQLRPLMGNRVFGCDDCQLVCPWNRFAKATTESDFSPRHQLDQADLVELFSWDEDTFLQRTEGSPIRRIGHERWLRNLAVGLGNATTSIPVIETLKRRRNDPSELVREHVAWALRQHGVA

SEQ ID NO: 80072 - protein, 376 aa, Pseudomonas oleovorans
  misc_feature (1)..(376): tr|A0A379JTM2|A0A379JTM2_PSEOL Epoxyqueuosine reductase OS=Pseudomonas oleovorans OX=301 GN=queG PE=3 SV=1
MHGSLTTDVWQNYTYVHRLRPPMSDQTLDLNALALSIKDWGRELGFQQVGITDVELGEHEAHLQRWLAAGYQGEMDYMAAHGSKRSHPDELVPGTLRVVSLRMDYLPGDTQMAQRLNEPEQAYVSRYALGRDYHKLIRKRLQQLAERIQQQIGPFGYRAFVDSAPVLEKAIAEKAGLGWIGKNTLVLNRKAGSYFFLGELFVDLPLPVDAPHSSEHCGRCSACMDICPTAAFAGPYVLDARRCISYLTIELKGSIPEELRAPIGNRVFGCDDCQIVCPWNRFARPTEQGDFQPRHGLDNSGLAELFMWTEEEFLSRTEGSPLRRAGYERWLRNLAVGLGNAPSTIPVLQALQARREHPSALVREHVAWALERHGAL

SEQ ID NO: 80073 - protein, 354 aa, Pseudomonas oleovorans
  misc_feature (1)..(354): tr|A0A397NGC1|A0A397NGC1_PSEOL Epoxyqueuosine reductase OS=Pseudomonas oleovorans OX=301 GN=queG PE=3 SV=1
MSDHALDLNALALSIKDWGRELGFQQVGIADVELGEHETHLKRWLAAGYQGEMDYMAAHGDKRSRPQELVPGTLRVVSLRMDYLPGDTQMAQRLREPEQAYVSRYALGRDYHKLIRKRLQQLAERIQQQIGSFGYRAFVDSAPVLEKAIAEQAGLGWIGKNTLVLNRKAGSYFFLGELFVDLPLPVDAAHGTEHCGRCSACMDICPTAAFVGPYVLDARRCISYLTIELKGPIPEELRAPIGNRVFGCDDCQIVCPWNRFARPTEQGDFQPRHGLDNSGLAELFLWTEEEFLSRTEGSPLRRAGYERWLRNLAVGLGNAPSTIPVVEALQARREHPSALVREHVEWALDRHGAL

SEQ ID NO: 80074 - protein, 354 aa, Pseudomonas orientalis
  misc_feature (1)..(354): tr|A0A3G7X9A7|A0A3G7X9A7_9PSED Epoxyqueuosine reductase OS=Pseudomonas orientalis OX=76758 GN=queG PE=3 SV=1
MPAITSDLPALAQSIKDWGRELGFQQVGISGLDLAEHEQHLQRWLDAGYHGEMDYMGAHGSKRSHPDELVPGTLRVVSLRMDYLPGDTQMAQLLAQPEKAYISRYALGRDYHKLIRKRVQQLADRIQAQIGPFGFRAFVDSAPVLEKAIAEQAGLGWIGKNTLVLNRKAGSYFFLSELFVDLPLPVDPPHATEHCGRCTACLDICPTNAFVGPYVLDARRCISYLTIELKSAIPEDLRPLIGNRVFGCDDCQIVCPWNRFARPTTENDFKPRHNLDNAELAELFMWDEDKFLSSTEGSPLRRAGYERWLRNLAVGLGNAPSSIPVLEALKARRDYPSELVREHVEWALMQHAAR

SEQ ID NO: 80075 - protein, 354 aa, Pseudomonas orientalis
  misc_feature (1)..(354): tr|A0A0R2ZV55|A0A0R2ZV55_9PSED Epoxyqueuosine reductase OS=Pseudomonas orientalis OX=76758 GN=queG PE=3 SV=1
MPAITSDLPALAQSIKDWGRELGFQQVGISGLDLAEHEQHLQRWLDAGYHGEMDYMGAHGSKRSHPDELVPGTLRVVSLRMDYLPGDTQMAQLLAQPEKAYISRYALGRDYHKLIRKRVQQLADRIQAQIGPFGFRAFVDSAPVLEKAIAKQAGLGWIGKNTLVLNRKAGSYFFLSELFVDLPLPVDPPHTTEHCGRCTACLDICPTNAFVGPYMLDARRCISYLTIELKSAIPEDLRPLIGNRVFGCDDCQIVCPWNRFARPTTESDFKPRHNLDNAELAELFMWDEDKFLSSTEGSPLRRAGYERWLRNLAVGLGNAPSSIPVVEALKARRDYPSELVREHVEWALKQHAAR

SEQ ID NO: 80076 - protein, 354 aa, Pseudomonas oryzae
  misc_feature (1)..(354): tr|A0A1H1Z816|A0A1H1Z816_9PSED Epoxyqueuosine reductase OS=Pseudomonas oryzae OX=1392877 GN=queG PE=3 SV=1
MSTSTPDLAALAQAIKTWGRELGFQQVGIADVELSAHEAHLARWLAVGYQGEMDYMAAHGHKRSRPAELVPGTLRVVSLRMDYLPGDTRMAETLAASEKAYVSRYALGRDYHKLVRKRLQQLAERIQAAIGPFGYRAFVDSAPVLEKALAQQAGLGWIGKNTLLLNKSAGSWFFLGELFVDLPLPVDAPHEREHCGRCQACLDICPTAAFVGPQLLDARRCISYLTIELKGSIPEELRAPIGNRVFGCDDCQLVCPWNRFARPTGEGDFQPRHGLDNAELATLFRWSEEEFLSRTEGSPLRRAGYERWLRNLAVGLGNAPSSIPVLEALRLRRTHPSALVREHVEWALARHGAA

SEQ ID NO: 80077 - protein, 354 aa, Pseudomonas oryzihabitans
  misc_feature (1)..(354): tr|A0A178LI92|A0A178LI92_9PSED Epoxyqueuosine reductase OS=Pseudomonas oryzihabitans OX=47885 GN=queG PE=3 SV= 1
MSAVALDLAALADLIKTWGRELGFQQTGIAGLDLARHEEHLERWLAAGFHGEMDYMAAHGSKRSRPAELVPGTLRVVSLRMDYLPGDTRMSERLADGNAAYISRYALGRDYHKLIRKRLQQLAERIQGEIGPFGYRAFVDSAPVLEKAIAEQAGLGWIGKNTLVLNRMAGSWFFLGELFVDVPLPVDEPTPRDHCGTCHACLDICPTQAFVGPYQLDARRCISYLTIEFKGSIPLELRPLIGNRVFGCDDCQLVCPWNRFAKPTAEGDFQPRHSLDSASLAELFRWTEAEFLSRTEGSPLRRAGYERWLRNLAVGLGNAPTSIPVLEALKLQREHPSPLVREHVEWALQRHGEA

SEQ ID NO: 80078 - protein, 354 aa, Pseudomonas oryzihabitans
  misc_feature (1)..(354): tr|A0A0U4P5S3|A0A0U4P5S3_9PSED Epoxyqueuosine reductase OS=Pseudomonas oryzihabitans OX=47885 GN=queG PE=3 SV= 1
MSAVALDLAALADLIKAWGRELGFQQTGIAGLDLARHEEYLERWLAAGFHGEMDYMAAHGSKRSRPAELVPGTLRVVSLRMDYLPGDTRMSERLADGTAAYISRYALGRDYHKLIRKRLQQLAERIQGEIGPFGYRAFVDSAPVLEKAIAEQAGLGWIGKNTLVLNRKAGSWFFLGELFVDVPLPVDEPTPRDHCGTCHACLDICPTQAFVGPYQLDARRCISYLTIEFKGSIPLELRPLIGNRVFGCDDCQLVCPWNRFAKPTAEGDFKPRHSLDSASLAELFRWTEAEFLSRTEGSPLRRAGYERWLRNLAVGLGNAPTSIPVLEALKLQREHPSPLVREHVEWALQRHGEA

SEQ ID NO: 80079 - protein, 356 aa, Pseudomonas otitidis
  misc_feature (1)..(356): tr|A0A1I0UBV3|A0A1I0UBV3_9PSED Epoxyqueuosine reductase OS=Pseudomonas otitidis OX=319939 GN=queG PE=3 SV=1
MPLSPQQLDELADAIKTWGRELGFQQVGISDVDLGEHEAHLQRWLEAGHHGEMDYMAAHGSKRSHPDELVPGTLRVVSLRMDYLPGDTRMTQVLAEPEKAYVSRYALGRDYHKLIRKRLQQLADRIQAAIGPFGHRAFVDSAPVLEKAIAEQAGLGWIGKNTLVLNRKAGSYFFLGELFVDLPLPVDAPHGSEHCGRCTACMDICPTAAFVAPYQLDARRCISYLTIELKGSIPEALRPLIGNRVFGCDDCQIVCPWNRFARPSDQGDFQPRHNLDNTELASLFAWTEEEFLSRTEGSPLRRAGYERWLRNLAVGLGNAPSTVPVLEALRARRDHPSELVREHVRWALARHGASEA

SEQ ID NO: 80080 - protein, 355 aa, Pseudomonas pachastrellae
  misc_feature (1)..(355): tr|A0A1S8DD64|A0A1S8DD64_9PSED Epoxyqueuosine reductase OS=Pseudomonas pachastrellae OX=254161 GN=queG PE=3 SV =1
MTPQTPDYQQLAEQIRQLARELGFQQLGIGAAELGEHEEHLQRWLDAGHHGEMEWMASHGSKRTRPDELVPGTRRVLSVRMDYLPTETEMAKRLANPNAAYISRYALGRDYHKLIRRRLQQLAERIETLIGPFGYRAFVDSAPVMERALATRSGLGWIGKNTMLINRKAGSYFFLGELYTDLPLPIDAPQQTEHCGKCTACLTACPTDAFVGSHVLDARRCISYLTIELKGAIPEDLRKPMGNRVFGCDDCQLVCPWNRFAKATQETDFTPRHNLDQASLVELFRWDEATFLKRTEGLPVRRIGHERWLRNLAVGLGNATSSINVIEALKQRQTHPSALVREHVDWALAQHSINT

SEQ ID NO: 80081 - protein, 360 aa, Pseudomonas palleroniana
  misc_feature (1)..(360): tr|A0A1H5JHG5|A0A1H5JHG5_9PSED Epoxyqueuosine reductase OS=Pseudomonas palleroniana OX=191390 GN=queG PE=3 SV= 1
MPAITSDLPALAQSIKDWGRELGFQQVGISGLDLAEHEQHLQRWLAAGYHGEMEYMGAHGSKRSHPDELVPGTLRVVSLRMDYLPGDTQMAQLLAQPEKAYISRYALGRDYHKLIRKRVQQLAERIQAQIGPFGFRAFVDSAPVLEKAIAEQAGLGWIGKNTLVLNRKAGSYFFLSELFVDLPLPVDAPHDTEHCGRCTACLDICPTNAFVGPYVLDARRCISYLTIELKSAIPEDLRPLIGNRVFGCDDCQIVCPWNRFARPTAEGDFKPRHNLDNAELAELFMWDEDKFLSSTEGSPLRRAGYERWLRNLAVGLGNAPSSIPVLEALKARRDYPSELVREHVEWALNQHAGRQCTSSL

SEQ ID NO: 80082 - protein, 355 aa, Pseudomonas panacis
  misc_feature (1)..(355): tr|A0A1H4M4Q2|A0A1H4M4Q2_PSEPA Epoxyqueuosine reductase OS=Pseudomonas panacis OX=307251 GN=queG PE=3 SV=1
MPAITSDLPALAQSIKDWGRELGFQQVGISGLDLAEHEQHLQRWLDAGYHGEMEYMGAHGSKRSHPDELVPGTLRVVSLRMDYLPGDTHMAQRLAQPEKAYISRYALGRDYHKLIRKRVQQLAERIQAQIGPFGFRAFVDSAPVLEKAIAEKAGLGWIGKNTLVLNRKAGSYFFLSELFVDLPLPVDPPHATEHCGRCTACLDICPTNAFVGPYVLDARRCISYLTIELKSAIPEDLRPLIGNRVFGCDDCQIVCPWNRFARTTAESDFKPRHNLDNAQLAELFMWDEEKFLSSTEGSPLRRAGYERWLRNLAVGLGNAPSSIPVLEALKARRDYPSELVREHVEWALKQHAERQ

SEQ ID NO: 80083 - protein, 354 aa, Pseudomonas panipatensis
  misc_feature (1)..(354): tr|A0A1G8H7F3|A0A1G8H7F3_9PSED Epoxyqueuosine reductase OS=Pseudomonas panipatensis OX=428992 GN=queG PE=3 SV= 1
MHDSSPDYSDIAQRIKTWGRELGFQQVGISGLDLERHGEHLQRWLAAGYQGEMDYMGAHGSKRWRPDELVPGTLRVISLRMDYLPGDTRMAQVLGAPSKAYVSRYALGRDYHKLIRKRLQQLAERIQQAVGPFGYRAFVDSAPVLEKAIGEQAGLGWIGKNTLLLNRKAGSYFFLGELYTDLPLPLDEAHGSEHCGRCSACLDICPTAAFVAPYVLDARRCISYLTIELKGPIPEALRAPIGNRVFGCDDCQMVCPWNRFARPTEQGDFQPRHGLDNAELAELFLWSEEEFLSRTEGSPLRRAGYERWLRNLAVGLGNAPSSIPVIEALKARRGCASELVREHVEWALRRHGID

SEQ ID NO: 80084 - protein, 354 aa, Pseudomonas parafulva
  misc_feature (1)..(354): tr|A0A497UB73|A0A497UB73_9PSED Epoxyqueuosine reductase OS=Pseudomonas parafulva OX=157782 GN=queG PE=3 SV=1
MSAITTDLPALAQSIKDWGRELGFQQVGISGLDLAEHEQHLQRWLAAGYHGEMDYMGAHGSKRSHPEELVPGTLRVVSLRMDYLPGDTQMVQMLAQPEKAYISRYALGRDYHKLIRKRVQQLADKIQSQIGPFGFRAFVDSAPVLEKAIAEQAGLGWIGKNTLVLNRKAGSYFFLSELFVDLPLPVDEPHSSEHCGRCTACLDICPTNAFVGPYVLDARRCISYLTIELKNAIPEDLRPLIGNRVFGCDDCQIVCPWNRFARPSGESDFKPRHNLDNAELAELFMWDEDKFLSSTEGSPLRRAGYERWLRNLAVGLGNAPSSIPVLEALKARRDYPSDLVREHVEWALKQHGQL

SEQ ID NO: 80085 - protein, 356 aa, Pseudomonas parafulva
  misc_feature (1)..(356): tr|A0A0A7JSD7|A0A0A7JSD7_9PSED Epoxyqueuosine reductase OS=Pseudomonas parafulva OX=157782 GN=queG PE=3 SV=1
MSASLPDLPLLAQSIKDWGHALGFAHVGIADVELGEHEQHLQRWLDAGHHGEMDYMAAHGTKRSRPAELIPGTLRVVSLRMDYLPGDTRMAQRLAQPEKAYVSRYALGRDYHKLVRKRVQHLADRIQEAIGPFGYRAFVDSAPVLEKAIAQQAGLGWIGKNTLLLNRKAGSYFFLAELFVDLPLPADEAQTSEHCGRCQACLDLCPTSAFVGPYQLDARRCISYLTIELRDAIPVELRPLIGNRVFGCDDCQIVCPWNRFAKSTGEDDFKPRHGLDNAELAALFLWDEKTFLSRTEGSPLRRAGYERWLRNLAVGLGNAPSTIAVIEALKARREHPSALVREHVQWALARHQVALE

SEQ ID NO: 80086 - protein, 354 aa, Pseudomonas paralactis
  misc_feature (1)..(354): tr|A0A0R3AGS1|A0A0R3AGS1_9PSED Epoxyqueuosine reductase OS=Pseudomonas paralactis OX=1615673 GN=queG PE=3 SV=1
MPAITSDLPALAQSIKDWGRELGFQQVGISGLDLAEHEQHLQRWLDAGYHGEMEYMGAHGSKRSHPDELVPGTLRVVSLRMDYLPGDTQMAQLLGQPEKAYISRYALGRDYHKLIRKRVQQLADRIQAQIGPFGFRAFVDSAPVLEKAIAEQAGLGWIGKNTLVLNRKAGSYFFLSELFVDLPLPVDPPHTTEHCGRCTACLDICPTNAFVGPYVLDARRCISYLTIELKSAIPEDLRPLIGNRVFGCDDCQIVCPWNRFARPTAESDFKPRHNLDNAELAELFMWDEDKFLNSTEGSPLRRAGYERWLRNLAVGLGNAPSSIPVLEALKARRDYPSELVREHVEWALNQHATR

SEQ ID NO: 80087 - protein, 359 aa, Pseudomonas pelagia
  misc_feature (1)..(359): tr|A0A2A4APP6|A0A2A4APP6_9PSED Epoxyqueuosine reductase OS=Pseudomonas pelagia OX=553151 GN=queG PE=3 SV=1
MPVPHSTSDLTQLAEQIRQLGLALGFQQLGISDAATGPHEAHLKRWLDAGYQGEMQWMASHGTKRTRPVELVPGTQRVISVRMDYLPADSAMAKRLGQPDTAYISRYALGRDYHKLMRRRLQQLAEQIQALIGPFGYRAFVDSAPVMERGLATQAGLGWIGKNTMLLNRQAGSYFFLGELFTDLPLPLDDAYEDEHCGRCTACLDKCPTNAFVGPQVLDARRCISYLTIELKGAIPEDLRPMMGNRVFGCDDCQMVCPWNRFAKPTREADFSPRHDLDQASLVSLFRWDEQTFLQNTEGSPIRRIGHERWLRNLAVGLGNASSSIPVIEALKDRLSHPSELVREHVIWALERHGITAET

SEQ ID NO: 80088 - protein, 353 aa, Pseudomonas peli
  misc_feature (1)..(353): tr|A0A1G4QNB7|A0A1G4QNB7_9PSED Epoxyqueuosine reductase OS=Pseudomonas peli OX=592361 GN=queG PE=3 SV=1
MNTDTLDLIALAQSIKDWGRELGFQQVGIADVQLGEHEAHLQRWLDAGYQGEMDYMAAHGSKRSHPDELVPGTLRVVSLRMDYLPGDTQMAQRLGEPEKAYVSRYALGRDYHKLIRKRLQQLAERIQQQIGPFGYRAFVDSAPVLEKAIAEQAGLGWIGKNTLVLNRKAGSYFFLGELFVDLPLPVDPPHASEHCGRCTACMDICPTAAFVGPYVLDARRCISYLTIELKGSIPEELRAPIGNRVFGCDDCQMVCPWNRFAKPTEQGDFQPRHSLDNAELAELFCWSEEEFLNRTEGSPLRRAGYERWLRNLAVGLGNAPSSIPVLEALKARREHPSELVREHVEWALARHGL

SEQ ID NO: 80089 - protein, 354 aa, Pseudomonas plecoglossicida
  misc_feature (1)..(354): tr|A0A495P632|A0A495P632_9PSED Epoxyqueuosine reductase OS=Pseudomonas plecoglossicida OX=70775 GN=queG PE=3 S V=1
MSASTPDLAQLAQSIKIWGQELGFAHVGIAGVDLGEHEHHLQRWLDAGYQGEMEYLGAHGSKRSHPDQLIPGTVRVVSLRMDYLPGDTQMAQRLAQPEKAYVSRYALGRDYHKLVRKRVQFLADRIQEAIGPFGYRAFVDSAPVLEKALAEQAGLGWIGKNTLLLNRKAGSYFFLAELFVDLPLPVDEATTSEHCGRCQACLDICPTQAFVGPYVLDARRCISYLTIELRGAIPVDLRAKMGNRVFGCDDCQIVCPWNRFAKHSQEQDFQPRHGLENTDLAAMFLWDERTFLRKTEGGPLRRAGYERFLRNLAVGLGNAPSTIPVIEALKARRDDESELVREHVEWALARHGAQ

SEQ ID NO: 80090 - protein, 354 aa, Pseudomonas plecoglossicida
  misc_feature (1)..(354): tr|S2JUE6|S2JUE6_9PSED Epoxyqueuosine reductase OS=Pseu domonas plecoglossicida NB2011 OX=1330531 GN=queG PE=3 SV=1
MSACTLDLAALAQSIKHWGRELGFAHVGIAGVDLGEHEQHLQRWLDAGYQGEMEYLGAHGSKRAHPEQLIPGTVRVVSLRMDYLPGDTQMAQRLAQPEKAYVSRYALGRDYHKLVRKRVQHLADRIQEDIGPFGYRAFVDSAPVLEKALAEQAGLGWIGKNTLLLNRKAGSYFFLAELFVDLPLPVDEAHASEHCGRCEACLDICPTKAFIGPYVLDARRCISYLTIELKGAIPVELRSMMGNRVFGCDDCQIVCPWNRFAQPTQENDFQPRHGLENTELAEMFLWDERTFLRKTEGGPLRRAGYERFLRNLAVGLGNAPSTIPVLEALKARRDDPSELVREHVQWALERHGCR

SEQ ID NO: 80091 - protein, 355 aa, Pseudomonas poae
  misc_feature (1)..(355): tr|A0A1H0H532|A0A1H0H532_9PSED Epoxyqueuosine reductase OS=Pseudomonas poae OX=200451 GN=queG PE=3 SV=1
MPAITSDLPALAQSIKDWGRELGFQQVGISGLDLAEHEQHLQRWLDAGYHGEMDYMGAHGSKRSHPEELVPGTLRVVSLRMDYLPGDTQMAHLLAQPEKAYISRYALGRDYHKLIRKRVQQLADRIQAQIGPFGFRAFVDSAPVLEKAIAEQAGLGWIGKNTLVLNRKAGSYFFLSELFVDLPLPVDPPHSTEHCGRCTACLDICPTNAFVGPYVLDARRCISYLTIELKSAIPEDLRPLIGNRVFGCDDCQIVCPWNRFARPTAESDFKPRHNLDNAELAELFLWDEDRFLSSTEGSPLRRAGYERWLRNLAVGLGNAPSSIPVLEALKARRAYPSELVREHVEWALKQHAERQ

SEQ ID NO: 80092 - protein, 354 aa, Pseudomonas poae
  misc_feature (1)..(354): tr|A0A2A9GBF0|A0A2A9GBF0_9PSED Epoxyqueuosine reductase OS=Pseudomonas poae OX=200451 GN=queG PE=3 SV=1
MPAITSDLPALAQSIKDWGRELGFQQVGISGLDLAEHEHHLQRWLDAGYHGEMDYMGAHGSKRSHPDELVPGTLRVVSLRMDYLPGDTQMAQLLAKPEKAYISRYALGRDYHKLIRKRVQQLADRIQAQIGPFGFRAFVDSAPVLEKAIAEQAGLGWIGKNTLVLNRKAGSYFFLSELFVDLPLPVDPPHATEHCGRCTACLDICPTNAFVGPYVLDARRCISYLTIELKSAIPEDLRPLIGNRVFGCDDCQIVCPWNRFARPTAESDFKPRHNLDNAELAELFMWDEDKFLSSTEGSPLRRAGYERWLRNLAVGLGNAPSSIPVLEALKARRDYPSELVREHVEWALNQHASR

SEQ ID NO: 80093 - protein, 361 aa, Pseudomonas pohangensis
  misc_feature (1)..(361): tr|A0A1H2H328|A0A1H2H328_9PSED Epoxyqueuosine reductase OS=Pseudomonas pohangensis OX=364197 GN=queG PE=3 SV=1
MSVSYTSADAPLLAELADSIRAWGRELGFQQVGISDVDLGEHAGHLESWLAAGYQGEMDYMAAHGSKRSHPEQLVPGTLRVISLRMDYLPGDTQMIRALKAPETAYISRYALGRDYHKLIRKRLQQLAERIQQQIGPLGYRAFVDSAPVLEKAAGQQAGLGWIGKNTLLLNRQAGSWFFLGELFVDIPLPVDAAHSSEHCGSCTACLDICPTAAFVGPYVLDARRCISYLTIELKGSIPLELRPLIGNRVFGCDDCQLVCPWNRFAKPTSQTDFLPRHHLDSTDLAALFRWTEDEFLSRTEGSPIRRTGYIGWSRNLAVGLGNAPGTIAVIEALQLRRNDPSELVREHVAWALQRHGRSVD

SEQ ID NO: 80094 - protein, 354 aa, Pseudomonas prosekii
  misc_feature (1)..(354): tr|A0A1H1U9S7|A0A1H1U9S7_9PSED Epoxyqueuosine reductase OS=Pseudomonas prosekii OX=1148509 GN=queG PE=3 SV=1
MPAITTDLPALAQSIKDWGRELGFQQVGISGLDLAEHEQHLQRWLEAGYHGEMEYMGAHGSKRSHPEELVPGTLRVVSLRMDYLPGDTQMAQLLAQPEKAYVSRYALGRDYHKLIRKRVQQLAEKIQAVIGPFGYRAFVDSAPVLEKAIAEKAGLGWIGKNTLVLNRKAGSYFFLSELFVDLPLPEDPPHATEHCGRCTACLDICPTNAFVGPYVLDARRCISYLTIELKSAIPEELRPLIGNRVFGCDDCQIVCPWNRFARPTGESDFKPRHNLDNAELAELFMWDEERFLSSTEGSPLRRAGYERWLRNLAVGLGNAPSSIPVLEALKARREYPSELVREHVEWALKQHGLI

SEQ ID NO: 80095 - protein, 354 aa, Pseudomonas prosekii
  misc_feature (1)..(354): tr|A0A3L8CL25|A0A3L8CL25_9PSED Epoxyqueuosine reductase OS=Pseudomonas prosekii OX=1148509 GN=queG PE=3 SV=1
MPAITTDLPALAQSIKDWGRELGFQQVGISGLDLAEHEQHLQRWLEAGYHGEMEYMGAHGSKRSHPEELVPGTLRVVSLRMDYLPGDTQMAQLLAQPEKAYVSRYALGRDYHKLIRKRVQQLAEKIQAVIGPFGYRAFVDSAPVLEKAIAEKAGLGWIGKNTLVLNRKAGSYFFLSELFVDLPLPEDPPHATEHCGRCTACLDICPTNAFVGPYVLDARRCISYLTIELKSAIPEELRPLIGNRVFGCDDCQIVCPWNRFARPTGESDFKPRHNLDNAELAELFMWDEERFLSSTEGSPLRRAGYERWLRNLAVGLGNAPSSIPVLEALKARREYPSELVREHVEWALKQHGLM

SEQ ID NO: 80096 - protein, 359 aa, Pseudomonas protegens
  misc_feature (1)..(359): tr|A0A423EFW2|A0A423EFW2_9PSED Epoxyqueuosine reductase OS=Pseudomonas protegens OX=380021 GN=queG PE=3 SV=1
MPAITQDLPALAQSIKDWGRELGFQQVGISGLDLAEHEQHLERWLAAGYHGEMEYMGAHGSKRSHPDQLVPGTLRVVSLRMDYLPGDTQMAQRLAQPSKAYVSRYALGRDYHKLIRKRVQQLAERIQQAIGPFGYRAFVDSAPVLEKAIAEQAGLGWIGKNTLVLNRKAGSYFFLSELFVDLPLPLDAPHATEHCGRCTACLDICPTNAFVGPYVLDARRCISYLTIELKSAIPEDLRPLIGNRVFGCDDCQIVCPWNRFARSTAEGDFKPRHNLDNAELAELFMWDEDKFLSNTEGSPLRRAGYERWLRNLAVGLGNAPSSIPVLEALKARQDYPSELVREHVQWALDQHANRQCSSL

SEQ ID NO: 80097 - protein, 386 aa, Pseudomonas protegens
  misc_feature (1)..(386): tr|A0A2C9EFH8|A0A2C9EFH8_PSEPH Epoxyqueuosine reductase OS=Pseudomonas protegens (strain DSM 19095 / LMG 27888 / CHA0) OX=1124983 GN=yjeS PE=3 SV=1
MFCLRHASSSSDVWQNYTHLSPGFSRLMPAITQDLPALAQSIKDWGRELGFQQVGISGLDLAEHEQHLERWLAAGYHGEMEYMGAHGSKRSHPDQLVPGTLRVVSLRMDYLPGDTQMAQRLAQPSKAYVSRYALGRDYHKLIRKRVQQLAERIQQAIGPFGYRAFVDSAPVLEKAIAEQAGLGWIGKNTLVLNRKAGSYFFLSELFVDLPLPVDAPHATEHCGRCTACLDICPTNAFVGPYVLDARRCISYLTIELKSAIPEDLRPLIGNRVFGCDDCQIVCPWNRFARSTAEGDFKPRHNLDNAELAELFMWDEDKFLSNTEGSPLRRAGYERWLRNLAVGLGNAPSSIPVLEALKARQDYPSELVREHVQWALDQHANRQCSSL

SEQ ID NO: 80098 - protein, 376 aa, Pseudomonas pseudoalcaligenes
  misc_feature (1)..(376): tr|W6RB94|W6RB94_PSEP5 Epoxyqueuosine reductase OS=Pseu domonas pseudoalcaligenes (strain CECT 5344) OX=1182590 GN=yjeS PE=3 SV=1
MHGSLTTDVWQNYTYVHRLRPPMSDQTLDLNALALSIKDWGRELGFQQVGITDVELGEHEAHLQRWLAAGYQGEMDYMAAHGSKRSHPDELVPGTLRVVSLRMDYLPGDTQMAQRLNEPEQAYVSRYALGRDYHKLIRKRLQQLAERIQQQIGPFGYRAFVDSAPVLEKAIAEKAGLGWIGKNTLVLNRKAGSYFFLGELFVDLPLPVDAPHASEHCGRCSACMDICPTAAFTGPYALDARRCISYLTIELKGSIPEELRAPIGNRVFGCDDCQIVCPWNRFARPTEQGDFQPRHGLDNSGLAELFMWTEEEFLSRTEGSPLRRAGYERWLRNLAVGLGNAPSTIPVLQALQARREHPSALVREHVAWALERHGAL

SEQ ID NO: 80099 - protein, 355 aa, Pseudomonas psychrophila
  misc_feature (1)..(355): tr|S6HT56|S6HT56_9PSED Epoxyqueuosine reductase OS=Pseu domonas psychrophila OX=122355 GN=queG PE=3 SV=1
MPAITADLPALAQSIKEWGRELGFQQVAIAGLDLGEHEHHLQRWLDAGYHGDMDYMAAHGSKRSHPEELVPGTLRVVSLRMDYLPGDTHMAQLLAQPEKAYVSRYALGRDYHKLIRKRVQQLADRIQADIGPFGFRAFVDSAPVLEKAIAQQAGLGWIGKNTLVLNRKAGSYFFLSELFVDLPLPVDPPHETEHCGRCTACLDICPTNAFVGPYVLDARKCISYLTIELKTAIPEELRSMIGNRVFGCDDCQIVCPWNRFARTTTEGDFKPRHNLDNAGLAELFMWDEDTFLSNTEGSPLRRAGYERWLRNLAVGLGNAPSTIPVLEALKARREYPSELVQEHVEWALAQHAKRA

SEQ ID NO: 80100 - protein, 355 aa, Pseudomonas psychrophila
  misc_feature (1)..(355): tr|A0A3N1ZP96|A0A3N1ZP96_9PSED Epoxyqueuosine reductase OS=Pseudomonas psychrophila OX=122355 GN=queG PE=3 SV= 1
MPAITADLPALAQSIKEWGRELGFQQVAIAGLDLGEHEQHLERWLAAGYHGDMEYMGAHGSKRSHPEELVPGTLRVVSLRMDYLPGDTHMAQLLAQPEKAYVSRYALGRDYHKLIRKRVQQLADRIQAEIGPFGFRAFVDSAPVLEKAIAQKAGLGWIGKNTLVLNRKAGSYFFLSELFVDIPLPEDEPHTTEHCGRCSACLDICPTKAFVGPYVLDARRCISYLTIELKTAIPEELRSMMGNRVFGCDDCQIVCPWNRFARSTLEGDFKPRHNLDNAELAELFMWDEDTFLSSTEGSPLRRAGYERWLRNLAVGLGNAPSTIPVLEALKARREYPSQLVQEHVEWALKQHAERV

SEQ ID NO: 80101 - protein, 354 aa, Pseudomonas psychrotolerans
  misc_feature (1)..(354): tr|A0A1G5PDZ5|A0A1G5PDZ5_9PSED Epoxyqueuosine reductase OS=Pseudomonas psychrotolerans OX=237610 GN=queG PE=3 SV=1
MSAVALDLAALADLIKTWGRELGFQQTGIAGLDLARHEEHLERWLAAGFHGEMDYMAAHGSKRSRPAELVPGTLRVISLRMDYLPGDTRMSERLADGAAAYVSRYALGRDYHKLIRKRLQHLAERIQGEIGPFGYRAFVDSAPVLEKAIAEQAGLGWIGKNTLVLNRKAGSWFFLGELFVDVPLPVDEPTPRDHCGTCRACLDICPTQAFVGPYQLDARRCISYLTIEFKGSIPPELRPLIGNRVFGCDDCQLVCPWNRFAKPTAEGDFQPRHSLDSASLAELFRWTEAEFLSRTEGSPLRRAGYERWLRNLAVGLGNAPTSIPVVEALKLQREHPSPLVREHVEWALQRHAAS

SEQ ID NO: 80102 - protein, 354 aa, Pseudomonas psychrotolerans
  misc_feature (1)..(354): tr|A0A147GT48|A0A147GT48_9PSED Epoxyqueuosine reductase OS=Pseudomonas psychrotolerans OX=237610 GN=queG PE=3 SV=1
MSAVALDLAALADLIKTWGRELGFQQTGIAGLDLARHEEHLERWLAAGFHGEMDYMAAHGSKRSRPAELVPGTLRVISLRMDYLPGDTRMSERLADGAAAYVSRYALGRDYHKLIRKRLQQLAERIQGEIGPFGYRAFVDSAPVLEKALAEQAGLGWIGKNTLVLNRKAGSWFFLGELFVDVPLPVDEPTPRDHCGTCRACLDICPTNAFIGPYQLDARRCISYLTIEFKGSIPLELRPLIGNRVFGCDDCQLVCPWNRFAKPTAEGDFQPRHGLDNATLAELFRWTEAEFLSRTEGSPLRRAGYERWLRNLAVGLGNAPTNIPVVEALKLQRDHPSPLVREHVEWALERHGQG

SEQ ID NO: 80103 - protein, 356 aa, Pseudomonas punonensis
  misc_feature (1)..(356): tr|A0A1M7HJP6|A0A1M7HJP6_9PSED Epoxyqueuosine reductase OS=Pseudomonas punonensis OX=1220495 GN=queG PE=3 SV=1
MTDATLDLDSLAQSIKDWGRELGFQQVGISGLELGEHEAHLQRWLDAGYQGEMDYMAAHGRKRSHPDELVPGTLRVVSLRMDYLPGDTQMAQRLQEPEKAYVSRYALGRDYHKLIRKRLQQLAERIQQAIGPFGYRAFVDSAPVLEKAIAEQAGLGWIGKNTLVLNRKAGSYFFLGELFVDIPLPEDAPHASEHCGRCSACLDICPTAAFVGPYVLDARRCISYLTIELKGPIPEDLRAPIGNRVFGCDDCQMVCPWNRFAKATEQGDFQPRHSLDNAELAELFRWSEEEFLSRTEGSPLRRAGYERWLRNLAVGLGNAPSSIPVLEALEARREYPSELVREHVQWALEQHAQRQN

SEQ ID NO: 80104 - protein, 359 aa, Pseudomonas putida
  misc_feature (1)..(359): tr|A0A177SU77|A0A177SU77_PSEPU Epoxyqueuosine reductase OS=Pseudomonas putida OX=303 GN=queG PE=3 SV=1
MSVSSLDLPALARSIKDWGRELGFAHVGIAGVDLAEHEQHLERWLAAGYHGEMDYMGAHGSKRSHPDELVPGTVRVVSLRMDYLPGDTQMAQRLAQPERAYISRYALGRDYHKLVRKRVQQLAERIQTAIGPFGFRAFVDSAPVLEKAIAEQAGLGWIGKNTLLLNRKAGSYFFLAELFVDLPLPVDEAQATEHCGRCSACLDICPTNAFVGPYVLDARRCISYLTIELKNAIPEELRSMIGNRVFGCDDCQIVCPWNRFAKDTVENDFKPRHGLDNAGLAELFMWDEERFLASTEGSPLRRAGYERWLRNLAVGLGNAPSTIPVLEALNARREHPSELVREHVEWALRQHAERQCSSL

SEQ ID NO: 80105 - protein, 354 aa, Pseudomonas putida
  misc_feature (1)..(354): tr|A0A0C5SG12|A0A0C5SG12_PSEPU Epoxyqueuosine reductase OS=Pseudomonas putida S13.1.2 OX=1384061 GN=queG PE=3 SV=1
MSSCTPDLAQLAQSIKIWGQELGFAHVGIAGVDLGEHEHHLQRWLDAGYQGEMEYLGAHGSKRAHPEQLIPGTVRVVSLRMDYLPGDTQMAQRLAQPEKAYISRYALGRDYHKLVRKRVQFLADRIQEAIGPFGYRAFVDSAPVLEKALAEQAGLGWIGKNTLLLNRKAGSYFFLAELFVDLPLPVDDATTSEHCGRCQACLDICPTQAFVGPYVLDARRCISYLTIELKGAIPVELRSMMGNRVFGCDDCQIVCPWNRFAKHTQEQDFQPRHGLENAELAQMFLWDERTFLRKTEGGPLRRAGYERFLRNLAVGLGNAPSTIPVIEALKARREDESELVREHVEWALARHNIQ

SEQ ID NO: 80106 - protein, 362 aa, Pseudomonas reidholzensis
  misc_feature (1)..(362): tr|A0A383S0H9|A0A383S0H9_9PSED Epoxyqueuosine reductase OS=Pseudomonas reidholzensis OX=1785162 GN=queG PE=3 S V=1
MPCPSMSACTPDLAALAQSIKDWGRELGFAHVGIAGVDLGEHEQHLQRWLDAGYQGEMDYMAAHGSKRSHPDQLVPGTLRVVSLRMDYLPGDTRMAQLLAQPEKAYVSRYALGRDYHKLVRKRVQHLADRIQAAIGPFGFRAFVDSAPVLEKAIAQQAGLGWIGKNTLLLNRKAGSYFFLAELFVDLPLPVDEAQASEHCGRCQACLDVCPTQAFVGPYVLDARRCISYLTIELKQAIPVELRPLIGNRVFGCDDCQIVCPWNRFARPTQEDDFKPRHGLDNAELAQLFLWDEATFLGNTEGSPLRRAGYERWLRNLAVGLGNAPSSIPVLEALRARREYPSELVREHVEWALAQHEARRQG

SEQ ID NO: 80107 - protein, 359 aa, Pseudomonas reinekei
  misc_feature (1)..(359): tr|A0A1H0N1W5|A0A1H0N1W5_9PSED Epoxyqueuosine reductase OS=Pseudomonas reinekei OX=395598 GN=queG PE=3 SV=1
MPAITTDLPALAQSIKDWGRELGFQQVGISGLDLAEHEQHLERWLEAGYHGEMDYMGAHGSKRSHPEELVPGTLRVVSLRMDYLAGDTHMAKVLAQPEKAYVSRYALGRDYHKLIRKRVQQLADKIQAQIGPFGFRAFVDSAPVLEKAIAEQAGLGWIGKNTLVLNRKAGSYFFLAELFVDLPLPVDPPHATEHCGRCSACLDICPTNAFVGPYVLDARRCISYLTIELKGAIPEDLRPLIGNRVFGCDDCQIVCPWNRFARPTGESDFKPRHNLDNAGLAELFMWDEDKFLSSTEGSPLRRTGYENWLRNLAVGLGNAPSTIPVLEALKARRDYPSELVREHVEWALKQHAKRQASSL

SEQ ID NO: 80108 - protein, 360 aa, Pseudomonas resinovorans
  misc_feature (1)..(360): tr|S6APA1|S6APA1_PSERE Epoxyqueuosine reductase OS=Pseu domonas resinovorans NBRC 106553 OX=1245471 GN=queG PE= 3 SV=1
MSLSTQELATLAQSIKEWGRELGFQQVGISGVELGEHEAHLQRWLDAGYQGEMDYMAAHGSKRSHPDELVPGTLRVISLRMDYLAGDTRMAQVLGQPEKAYVSRYALGRDYHKLIRKRLQQLAERIEQAVGPFSYRAFVDSAPVLEKAIAEQAGLGWIGKNTLVLNRKAGSYFFLGELFVDAPLPVDEPHGSEHCGRCSACLDICPTAAFVGPYQLDARRCISYLTIEYKGSIPEELRPLIGNRVFGCDDCQMVCPWNRFARPSGEGDFQPRHGLDNAELAELFRWSEEEFLSRTEGSPLRRAGYERWLRNLAVGLGNAPSSIPVLEALHLRREHPSALVREHVEWALARHRASARDVRS

SEQ ID NO: 80109 - protein, 356 aa, Pseudomonas rhizosphaerae
  misc_feature (1)..(356): tr|A0A089YVP7|A0A089YVP7_9PSED Epoxyqueuosine reductase OS=Pseudomonas rhizosphaerae OX=216142 GN=queG PE=3 SV =1
MSAPTIDLPALALSIKQWGRELGFQQVGIAGLDLAEHEQHLERWLESGYHGEMDYMAAHGSKRSHPEQLVPGTLRVVSLRMDYLPGDTHMAQRLAEPEKAYVSRYALGRDYHKLIRKRVQHLAERIQQDIGPFGFRAFVDSAPVLEKAIAQEAGLGWIGKNTLVLNRKAGSYFFLAELFVDLPLPVDEAHASEHCGRCTACLEICPTAAFVGPYVLDARRCISYLTIELKGSIPTELRPLIGNRVFGCDDCQIVCPWNRFARPSGEGDFQPRHQLDNAELAQLFLWDEAHFLSSTEGSPLRRAGYERFLRNLAVGLGNAPSSIPVLEALKTRREHPSELVREHVEWALAAHAQRSS

SEQ ID NO: 80110 - protein, 360 aa, Pseudomonas rhodesiae
  misc_feature (1)..(360): tr|A0A5C5P475|A0A5C5P475_9PSED Epoxyqueuosine reductase OS=Pseudomonas rhodesiae OX=76760 GN=queG PE=3 SV=1
MPAITSDLPALAQSIKDWGRELGFQQVGISGLDLAEHEQHLQRWLDAGYHGEMDYMGAHGSKRSHPEELVPGTLRVVSLRMDYLPGDTQMAHLLAQPEKAYISRYALGRDYHKLIRKRVHQLADRIQSQIGPFGFRAFVDSAPVLEKAIAEQAGLGWIGKNTLVLNRKAGSYFFLSELFVDLPLPVDPPHSTEHCGRCTACLDICPTNAFVGPYVLDARRCISYLTIELKTAIPEDLRPLIGNRVFGCDDCQIVCPWNRFARPTGEGDFQPRHNLDNAELAELFMWDEDKFLSSTEGSPLRRAGYERWLRNLAVGLGNAPSSIPVLEALKARREYPSELVREHVEWALKQHAERQCTSSL

SEQ ID NO: 80111 - protein, 357 aa, Pseudomonas sabulinigri
  misc_feature (1)..(357): tr|A0A1H1QNT2|A0A1H1QNT2_9PSED Epoxyqueuosine reductase OS=Pseudomonas sabulinigri OX=472181 GN=queG PE=3 SV=1
MSESIDYHDLAEQIRSLASQLGFQQLGISAPDIGEHEQHLEQWLDAGYHGEMDWMASHGSKRTQPVELVPGTQRVISVRMDYLPGDSSMAQRLSEPDAAYISRYALGRDYHKLIRRRLQKLADAIQALIGPFGYRAFVDSAPVMERALAAGSGLGWIGKNSMLINRKAGSYFFLGELYTDLPLPIDAPQQSEHCGKCTACLERCPTQAFVGDKVLDARRCISYLTIELKGAIPTELRAPMGNRVFGCDDCQLVCPWNRFAKPTDEADFSPRHRLDQASLAELFRWDEATFLANTEGSPIRRIGHERWLRNLAVGLGNASSSIPVIEALKARRNHPSELVREHVAWALQQHGSSAAAD

SEQ ID NO: 80112 - protein, 354 aa, Pseudomonas sagittaria
  misc_feature (1)..(354): tr|A0A1I5P9Z4|A0A1I5P9Z4_9PSED Epoxyqueuosine reductase OS=Pseudomonas sagittaria OX=1135990 GN=queG PE=3 SV=1
MSTTAPDLVALAQSIRDWSRELGFQQVGIAGIELDEHEAHLQRWLAAGHHGEMDYMAAHGHKRSRPAELLPGTLRVISLRMDYLPGDTRMTEVLASPDKAYVSRYALGRDYHKLIRKRLQQLAERIQQAIGPFGHRAFVDSAPVLEKALAQQAGLGWIGKNTLLLNRKAGSWFFLGELYVDLPLPVDAPHASEHCGRCQACLDICPTAAFVGPQQLDARRCISYLTIELKGPIPVELRPLIGNRVFGCDDCQLVCPWNRFARPTAQGDFQPRHNLDNSELAALFRWSEEEFLARTEGSPLRRAGYPRWLRNLAVGLGNAPSSIAVIEALRLRRDDPSELVREHVEWALARHGVA

SEQ ID NO: 80113 - protein, 357 aa, Pseudomonas salegens
  misc_feature (1)..(357): tr|A0A1H2GJ66|A0A1H2GJ66_9PSED Epoxyqueuosine reductase OS=Pseudomonas salegens OX=1434072 GN=queG PE=3 SV=1
MTMPPTNPADLAERIRDMATALGFQQLGISAASTGQHADHLQRWLDAGYHGEMQWMASHGRKRTEPAELVPGTLRVLSVRMDYLPPEPDMARCLGQPERAYISRYALGRDYHKLMRRRLQQLAEHIQQLIGPFGYRAFVDSAPVLERALATQAGLGWIGKNTMLINRRAGSYFFLGELFTDLPLPLDDAHEQEHCGRCTACLERCPTQAFTGPWSLDARRCISYLTIELKDSIPLELRPLMGNRVFGCDDCQMVCPWNRFAKPSAEDDFSPRQRLDQASLVELFRWDEATYLARTKGSAIRRIGHERWLRNLAVGLGNATSSIPVIEALRSRSTHPSELVREHVAWALARHQTTSQD

SEQ ID NO: 80114 - protein, 354 aa, Pseudomonas salomonii
  misc_feature (1)..(354): tr|A0A1H3L8Z1|A0A1H3L8Z1_9PSED Epoxyqueuosine reductase OS=Pseudomonas salomonii OX=191391 GN=queG PE=3 SV=1
MPAITSDLPALAQSIKDWGRELGFQQVGISGLDLAEHEQHLQRWLDAGYHGEMEYMGAHGSKRSHPEELVPGTLRVVSLRMDYLPGDTQMAQLLAKPEKAYISRYALGRDYHKLIRKRVQQLADRIQAQIGPFGFRAFVDSAPVLEKAIAEQAGLGWIGKNTLVLNRKAGSYFFLSELFVDLPLPVDAPHATEHCGRCTACLDICPTNAFVGPYVLDARRCISYLTIELKSAIPEDLRPLIGNRVFGCDDCQIVCPWNRFARPTAESDFKPRHNLDNAELAELFMWDEDKFLSSTEGSPLRRAGYERWLRNLAVGLGNAPSSIPVLEALKARRDYPSELVREHVEWALNQHATR

SEQ ID NO: 80115 - protein, 548 aa, Pseudomonas salomonii
  misc_feature (1)..(548): tr|A0A3M4QG02|A0A3M4QG02_9PSED Epoxyqueuosine reductase OS=Pseudomonas salomonii OX=191391 GN=queG PE=3 SV=1
MNLGCRDAHQPRRLTGMRRDYAVGRQAYTACGQLVQGIGIPDLRLLGVGGNRQQAFAPGRCAQAGTDNDHRDFFQQPHQLVGRTHADGHHLRQARQCGWHVLRASRQRDHAGATAQSAFSTQQRSTAKAMVAADDQQVAELAFMGVRGTCSQLRQMAVQQRLYVGNCVFCLRHASSSSDVWQNYTHLTCGFPCLMPAITSDLPALAQSIKDWGRELGFQQVGISGLDLAEHELHLQRWLDAGYHGEMDYMGAHGSKRSHPEELVPGTLRVVSLRMDYLPGDTQMAQLLAKPDKAYISRYALGRDYHKLIRKRVQQLADRIQAQIGPFGFRAFVDSAPVLEKAIAEQAGLGWIGKNTLVLNRKAGSYFFLSELFVDLPLPVDAPHATEHCGRCTACLDICPTNAFVGPYVLDARRCISYLTIELKSAIPEDLRPLIGNRVFGCDDCQIVCPWNRFARSTAESDFKPRHNLDNAELAELFMWDEDKFLSSTEGSPLRRAGYERWLRNLAVGLGNAPSSIPVLEALKARRDYPSELVREHVEWALNQHATR

SEQ ID NO: 80116 - protein, 359 aa, Pseudomonas saponiphila
  misc_feature (1)..(359): tr|A0A1H4WAV9|A0A1H4WAV9_9PSED Epoxyqueuosine reductase OS=Pseudomonas saponiphila OX=556534 GN=queG PE=3 SV=1
MPAITQDLPALAQSIKDWGRELGFQQVGISGLDLAEHEQHLERWLAAGYHGEMDYMGAHGSKRSHPEQLVPGTLRVVSLRMDYLPGDTQMAQRLAQPSKAYVSRYALGRDYHKLIRKRVQQLAERIQQAIGPFGYRAFVDSAPVLEKAIAEQAGLGWIGKNTLVLNRKAGSYFFLSELFVDLPLPVDEPHASEHCGRCTACLDICPTNAFVGPYVLDARRCISYLTIELKNAIPEELRPLIGNRVFGCDDCQIVCPWNRFARPSAESDFKPRHNLDNAELAELFMWDEDKFLSSTEGSPLRRAGYERWLRNLAVGLGNAPSSIPVLEALKARQDYPSELVREHVQWALAQHANRQCSSL

SEQ ID NO: 80117 - protein, 355 aa, Pseudomonas saudimassiliensis
  misc_feature (1)..(355): tr|A0A078MMF4|A0A078MMF4_9PSED Epoxyqueuosine reductase OS=Pseudomonas saudimassiliensis OX=1461581 GN=queG PE =3 SV=1
MPDTSPDYLLLAAQIRDIATELGFQQVGISDPDIGAHEQRLQEWLAAGYHGEMEWMASHGSKRTQPAELVPGTRRVISVRMDYLPGDTAMTKRLADPDAAYISRYALGRDYHKLIRRRLQQLAERIQALIGPFGFRAFVDSAPVMERALATRSGLGWIGKNTMLLNRKAGSFFFLGELYTDLPLPTDAPYEQEHCGSCTACLSRCPTDAFIGAHVLDARRCISYLTIELKGAIPEELRPRMGNRVFGCDDCQLVCPWNKFAKPTGEQDFSPRHQLDQADLITLFRWDEEQYLKNTEGSPLRRIGHERWLRNLAVGLGNAHTSIPVIDALNSRLDHPSELVQEHVRWALTQHGIAA

SEQ ID NO: 80118 - protein, 357 aa, Pseudomonas saudiphocaensis
  misc_feature (1)..(357): tr|A0A427EFA1|A0A427EFA1_9PSED Epoxyqueuosine reductase OS=Pseudomonas saudiphocaensis OX=1499686 GN=queG PE=3 SV=1
MSSSVPDPAALAQSIKEWGRELGFQQVGITGVDLAEHEAHLQRWLDQGYQGEMDYMAAHGTKRSRPDELVPGTLRVISLRMDYLPGDTGMAEQLAQAEKAYVSRYALGRDYHKLIRKRLQQLAERIQQVIGPFGFRAFVDSAPVLEKAVAQQAGLGWIGKNTLVLNRKAGSWFFLGELFVDIALPVDEPVTRDHCGSCHACLNICPTEAFVGERVLDARRCISYLTIELKGPIPVELRSKVGNRVFGCDDCQIVCPWNRFARPTEQPDFQPRHNLDNAELAVLFRWSEEEFLSRTEGSPLRRTGYERWLRNLAVGLGNAPSSIPVLEALKARREHPSELVREHVEWALAQHRLRSGA

SEQ ID NO: 80119 - protein, 357 aa, Pseudomonas saudiphocaensis
  misc_feature (1)..(357): tr|A0A078LX74|A0A078LX74_9PSED Epoxyqueuosine reductase OS=Pseudomonas saudiphocaensis OX=1499686 GN=queG PE=3 SV=1
MSSSVPDPAALAQSIKEWGRELGFQQVGITGVDLAEHEAHLQRWLDQGYQGEMDYMAAHGTKRSRPDELVPGTLRVISLRMDYLPGDTGMAEQLAQAEKAYVSRYALGRDYHKLIRKRLQQLAERIQQVIGPFGFRAFVDSAPVLEKAVAQQAGLGWIGKNTLVLNRKAGSWFFLGELFVDIALPVDEPVTRDHCGSCHACLDICPTEAFVGERVLDARRCISYLTIELKGPIPVELRSKVGNRVFGCDDCQIVCPWNRFARPTEQPDFQPRHNLDNAELATLFRWSEEEFLSRTEGSPLRRTGYERWLRNLAVGLGNAPSSIPVLEALEARREHPSELVREHVEWALAQHRLRSGA

SEQ ID NO: 80120 - protein, 392 aa, Pseudomonas savastanoi
  misc_feature (1)..(392): tr|A0A3M5GD52|A0A3M5GD52_PSESS Epoxyqueuosine reductase OS=Pseudomonas savastanoi OX=29438 GN=queG PE=3 SV=1
MRFRVEHASIGSDVWQNYTHLGPGFSLRMSAITAALPTRDDLAALALSIKAWGRELGFQEVGISGLDLAEHEQHLQRWLDAGYHGEMDYMAAHGSKRSHPDELVPGTLRVVSLRMDYLPGDTEMAQRLTEPEKAYVSRYALGRDYHKLIRKRLQQLAERIQQAIGPFGFRAFVDSAPVLEKAIAEQAGLGWIGKNTLVLNRKAGSFFFLGELFVDIPIPVDAPHATEHCGRCTACLDICPTAAFVGPYVLDARRCISYLTIELKTAIPEELRPLIGNRVFGCDDCQIVCPWNRFARPTDQSDFQPRHNLDNAGLAELFLWDEDKFLSSTEGSPLRRAGYERWLRNLAVGLGNAPSTIPVIEALHARRDYPSELVREHVEWALQRHGVADAGG

SEQ ID NO: 80121 - protein, 364 aa, Pseudomonas savastanoi
  misc_feature (1)..(364): tr|A0A0Q0G698|A0A0Q0G698_PSESS Epoxyqueuosine reductase OS=Pseudomonas savastanoi pv. savastanoi OX=360920 GN= queG PE=3 SV=1
MSAITAVLPTSDDLAALAVSIKAWGRELGFQEVGISGLDLAEHEQHLQRWLDAGYHGEMDYMVAHGSKRSHPEELVPGTLRVVSLRMDYLPGDTEMAQRLTEPEKAYVSRYALGRDYHKLIRKRLQQLAERIQQAIGPFGFRAFVDSAPVLEKAIAEQAGLGWIGKNTLVLNRKAGSFFFLGELFVDIPLPVDAPHATEHCGRCTACLDICPTAAFVGPYVLDARRCISYLTIELKTAIPEELRPLIGNRVFGCDDCQIVCPWNRFARPTEQSDFQPRHNLDNAGLAELFLWDEDKFLSSTEGSPLRRAGYERWLRNLAVGLGNAPSTIPVIEALHARRDYPSELVREHVEWALQRHGVADAGG

SEQ ID NO: 80122 - protein, 354 aa, Pseudomonas segetis
  misc_feature (1)..(354): tr|A0A239DK74|A0A239DK74_9PSED Epoxyqueuosine reductase OS=Pseudomonas segetis OX=298908 GN=queG PE=3 SV=1
MSIELLDLNQLAQSIKDWGRELGFQQVGISGLDLGEHETHLQRWLDAGYHGEMDYMAAHGSKRSHPEQLVPGTLRVISLRMDYLPGDTQMAKRLAQPEKAYVSRYALGRDYHKLIRKRLQHLAERIQEKIGPFGFRAFVDSAPVLEKAIAEKSGLGWIGKNTLVLNRKAGSYFFLGELFVDIELPVDPPHGSEHCGRCTACMDICPTQAFVGPYELDARRCISYLTIELKGAIPEELRAPIGNRVFGCDDCQMVCPWNRFASPTEQTDFKPRHQLDNAELAELFGWSEEQFLSRTEGSPLRRAGYERWLRNLAVGLGNAPSSIPVIEALKARREHSSALVREHVEWALKRHNQA

SEQ ID NO: 80123 - protein, 355 aa, Pseudomonas seleniipraecipitans
  misc_feature (1)..(355): tr|A0A1G7PY07|A0A1G7PY07_9PSED Epoxyqueuosine reductase OS=Pseudomonas seleniipraecipitans OX=640205 GN=queG P E=3 SV=1
MTDATPDLAHLAQSIKEWGRELGFQQVGISGLELGEHEAHLQRWLDAGYQGEMDYMAAHGRKRSHPDELVPGTLRVVSLRMDYLPGDTQMAERLQQPEKAYVSRYALGRDYHKLIRKRLQQLAERIQQAIGPFGYRAFVDSAPVLEKAIAEQSGLGWIGKNTLVLNRKAGSYFFLGELFVDIPLPEDAPHGSEHCGRCSACLDVCPTAAFVGPYLLDARRCISYLTIELKGPIPEELRAPIGNRVFGCDDCQMVCPWNRFAKATEQSDFQPRHSLDNAELAELFRWSEDEFLSRTEGSPLRRAGYERWLRNLAVGLGNAPSSIPVLEALQARRDYPSELVREHVEWALEQHAKRA

SEQ ID NO: 80124 - protein, 376 aa, Pseudomonas sihuiensis
  misc_feature (1)..(376): tr|A0A1H2N342|A0A1H2N342_9PSED Epoxyqueuosine reductase OS=Pseudomonas sihuiensis OX=1274359 GN=queG PE=3 SV=1
MHGSLTTDVWQNYTYVHRLRPPMSDQTLDLNALALSIKDWGRELGFQQVGITDVELGEHEAHLQRWLAAGYQGEMEYMAAHGSKRSHPDELVPGTLRVVSLRMDYLPGDTQMAQRLKESEQAYVSRYALGRDYHKLIRKRLQQLAERIQQQIGPFGYRAFVDSAPVLEKAIAEKAGLGWIGKNTLVLNRKAGSYFFLGELFVDLPLPVDAPHASEHCGRCTACMDICPTAAFVGPYVLDARRCISYLTIELKGSIPEELRAPIGNRVFGCDDCQIVCPWNRFARPTEQGDFQPRHGLDNSGLAELFMWTEEEFLSRTEGSPLRRAGYERWLRNLAVGLGNAPSTIPVLQALQARREHPSELVREHVAWALERHGAL

SEQ ID NO: 80125 - protein, 354 aa, Pseudomonas silesiensis
  misc_feature (1)..(354): tr|A0A191YM86|A0A191YM86_9PSED Epoxyqueuosine reductase OS=Pseudomonas silesiensis OX=1853130 GN=queG PE=3 SV= 1
MPAITTDLPALAQSIKDWGRELGFQQVGISGLDLAEHEQHLQRWLEAGYHGEMDYMGAHGSKRSHPEELVPGTLRVVSLRMDYLPGDTEMAQRLAQPEKAYVSRYALGRDYHKLIRKRVQQLAEKIQAVIGPFGYRAFVDSAPVLEKAIAEKAGLGWIGKNTLVLNRKAGSYFFLSELFVDLPLPVDPPHASEHCGRCTACLDICPTNAFVGPYVLDARRCISYLTIELKSAIPEDLRPLIGNRVFGCDDCQIVCPWNRFARPSGESDFKPRHNLDNAELAELFMWDEDKFLSSTEGSPLRRAGYERWLRNLAVGLGNAPSSIPVLEALKARREYPSELVREHVEWALKQHGVL

SEQ ID NO: 80126 - protein, 354 aa, Pseudomonas simiae
  misc_feature (1)..(354): tr|A0A1N7TVP4|A0A1N7TVP4_9PSED Epoxyqueuosine reductase OS=Pseudomonas simiae OX=321846 GN=queG PE=3 SV=1
MPAITTDLPALAQSIKDWGRELGFQQVGISGLDLAEHEQHLQRWLDAGYHGEMEYMGAHGSKRSHPDELVPGTLRVVSLRMDYLPGDTQMAQLLAKPEKAYISRYALGRDYHKLIRKRVQQLADRIQAQIGPFGFRAFVDSAPVLEKAIAEKAGLGWIGKNTLVLNRKAGSYFFLSELFVDLPLPIDAPHSTEHCGRCTACLDICPTNAFVGPYVLDARRCISYLTIELKHAIPEDLRPLIGNRVFGCDDCQIVCPWNRFARATGESDFKPRHNLDNAELAELFMWDEDKFLSSTEGSPLRRAGYERWLRNLAVGLGNAPSSIPVLEALKARRDYPSELVREHVEWALNQHASR

SEQ ID NO: 80127 - protein, 354 aa, Pseudomonas soli
  misc_feature (1)..(354): tr|A0A2V4HY53|A0A2V4HY53_9PSED Epoxyqueuosine reductase OS=Pseudomonas soli OX=1306993 GN=queG PE=3 SV=1
MSADLPDIATLAQSIKDWGRELGFAHVGIAGVDLGEHEQHLQRWLAAGYNGEMEYMGEHGNKRSRPAELIPGTLRVISLRMDYLPGDTQMAKRLAEPEKAYISRYALGRDYHKLVRKRVQHFADRIQEAIGPFGYRAFVDSAPVLEKALAQEAGLGWIGKNTLLLNRKAGSYFFLAELFVDLPLPIDGVQGSDHCGRCQACLDICPTQAFVGPYQLDARRCISYLTIELRGAIPLELRSLIGNRVFGCDDCQIVCPWNRFAKATTEDDFMPRRGLDNIELAELFLWDEKRFLGCTEGSPLRRAGYERFLRNLAVGLGNAPSTIPVLEALNARRDDPSELVREHVEWALARHNAL

SEQ ID NO: 80128 - protein, 354 aa, Pseudomonas soli
  misc_feature (1)..(354): tr|A0A1H9RVE2|A0A1H9RVE2_9PSED Epoxyqueuosine reductase OS=Pseudomonas soli OX=1306993 GN=queG PE=3 SV=1
MSADLPDIATLAQSIKDWGRELGFAHVGIAGVDLGEHEQHLQRWLAAGHNGEMEYMGEHGNKRSRPAELIPGTLRVISLRMDYLPGDTQMAKRLADPEKAYISRYALGRDYHKLVRKRVQHFADRIQEAIGPFGYRAFVDSAPVLEKALAQEAGLGWIGKNTLLLNRKAGSYFFLAELFVDLPLPIDGVQGSDHCGRCQACLDICPTQAFVGPYQLDARRCISYLTIELRGAIPMELRSLIGNRVFGCDDCQIVCPWNRFAKTTTEDDFMPRRGLDNIELAELFLWDEKRFLGCTEGSPLRRAGYERFLRNLAVGLGNAPSTIPVLEALNARRDDPSELVREHVEWALARHNAL

SEQ ID NO: 80129 - protein, 358 aa, Pseudomonas songnenensis
  misc_feature (1)..(358): tr|A0A482UJI8|A0A482UJI8_9PSED Epoxyqueuosine reductase OS=Pseudomonas songnenensis OX=1176259 GN=queG PE=3 SV =1
MSSQALLDPAALATSIKEWGRELGFQQVGITDVDLGEHEAHLDAWLAAGYQGEMDYMAAHGSKRSRPDELVPGTLRVISLRMDYLPGDTRMTQQLAAPEKAYVSRYALGRDYHKLIRKRIQQLAERIQQVVGPFGFRAFVDSAPVLEKAAGQQAGLGWIGKNTLLLNRKAGSWFFLGELFVDIALPVDDPTTRDHCGSCHACLDVCPTEAFVGERLLDARRCISYLTIELKGAIPIELRDKIGNRVFGCDDCQIVCPWNRFARPTEQSDFQPRHSLDNAELATLFRWTEEEFLSRTEGSPLRRAGYQRWLRNLAVGLGNAPSSIPVLEALQARRDDPSELVREHVEWALAQHALRQPD

SEQ ID NO: 80130 - protein, 176 aa, Pseudomonas sp.
  misc_feature (1)..(176): tr|A0A348R284|A0A348R284_PSESP tRNA epoxyqueuosine(34) reductase QueG (Fragment) OS=Pseudomonas sp. OX=306 GN= queG PE=4 SV=1
EPTARDHCGSCHACLDICPTEAFVGERVLDARKCISYLTIELKGSIPVELRSKIGNRVFGCDDCQIVCPWNRFAKPTQQTDFQPRHSLDNAELATLFRWTEDEFLSRTEGSPLRRTGYQNWLRNLAVGLGNAPSSIPVLEALQSRRDDSSELVREHVEWALAQHEQRSSSASDSGN

SEQ ID NO: 80131 - protein, 357 aa, Pseudomonas sp.
  misc_feature (1)..(357): tr|A0A2I0CMF4|A0A2I0CMF4_9PSED Epoxyqueuosine reductase OS=Pseudomonas sp. ZYSR67-Z OX=1905276 GN=queG PE=3 SV =1
MPTSPLDLATLAASIKEWARELGFQQAGICEPQLDEQEAHLQRWLDAGYHGEMDYMAAHGSKRSRPAELVPGTLRVISLRMDYLPGDTRMSQRLAQPEQAYVSRYALGRDYHKLIRKRLQQLAERIQQAIGPFGFRAFVDSAPVLERAIARQAGLGWVGKHSLILNRRAGSWFFLGELFVDVPLPVDAPLDSEHCGRCTACLDICPTQAFVAPYVLDARRCISYLTIELKGPIPEALRPLIGNRVFGCDDCQIVCPWNRFARPSEQSDFQPRHGLDNSSLAELFLWSEEEFLQRTEGSPLRRAGYQRWLRNLAVGLGNAPSTIPVLQALRARQDDPSELVREHVAWALRQHAERDAQ

SEQ ID NO: 80132 - protein, 356 aa, Pseudomonas straminea
  misc_feature (1)..(356): tr|A0A1I1Y5I7|A0A1I1Y5I7_PSEOC Epoxyqueuosine reductase OS=Pseudomonas straminea OX=47882 GN=queG PE=3 SV=1
MTDAAPDLASLAQSIKDWGRELGFQQVGISGLELGEHEAHLQRWLDAGYQGEMDYMAAHGRKRSHPDELVPGTLRVVSLRMDYLPGDTQMAQRLQEPEKAYVSRYALGRDYHKLIRKRLQQLAERIQQAIGPFGYRAFVDSAPVLEKAIAEQSGLGWIGKNTLVLNRKAGSYFFLGELFVDIPLPEDAPHGSEHCGRCSACLDICPTAAFVGPYVLDARRCISYLTIELKGPIPEELRAPIGNRVFGCDDCQMVCPWNRFAKPTEQSDFQPRHSLDNAELAELFRWSEEEFLSRTEGSPLRRAGYERWLRNLAVGLGNAPSSIPVLEALEARREYPSELVREHVRWALEQHAQRQS

SEQ ID NO: 80133 - protein, 354 aa, Pseudomonas stutzeri
  misc_feature (1)..(354): tr|A0A3Q9B2E7|A0A3Q9B2E7_PSEST Epoxyqueuosine reductase OS=Pseudomonas stutzeri OX=316 GN=queG PE=3 SV=1
MPAITTDLPALAQSIKDWGRELGFQQVGISGLDLGEHEQHLERWLAAGYHGEMDYMGAHGSKRSHPEELVPGTLRVVSLRMDYLAGDTHMAKMLAQPEKAYVSRYALGRDYHKLIRKRVQQLADKIQAEIGPFGFRAFVDSAPVLEKAIAEQAGLGWIGKNTLVLNRKAGSYFFLAELFVDLPLPVDPPHATEHCGRCSACLDICPTNAFVGPYVLDARRCISYLTIELKGAIPQDLRPLIGNRVFGCDDCQIVCPWNRFARPSGESDFKPRHNLDNAGLAELFMWDEEKFLSSTEGSPLRRTGYENWLRNLAVGLGNAPSTIPVLEALKARREHPSELVREHVEWALKQHGLV

SEQ ID NO: 80134 - protein, 357 aa, Pseudomonas stutzeri
  misc_feature (1)..(357): tr|I4JHA3|I4JHA3_PSEST Epoxyqueuosine reductase OS=Pseu domonas stutzeri TS44 OX=477228 GN=queG PE=3 SV=1
MPSPALDAAALAQSIKEWGRELGFQQVGITGVDLGEHEAHLDAWLAAGYQGEMDYMAAHGSKRSRPDELVPGTLRVISLRMDYLPGDTRMTQQLASPEKAYVSRYALGRDYHKLIRKRIQQLAERIQQVVGPLGFRAFVDSAPVLEKAAGQQAGLGWIGKNTLLLNRKAGSWFFLGELFVDIALPVDEPVTRDHCGSCHACLDVCPTEAFVGERLLDARRCISYLTIELKGPIPVELRDKIGNRVFGCDDCQIVCPWNRFARPTEQHDFQPRHSLDNADLAVLFRWSEEEFLSRTEGSPLRRAGYERWLRNLAVGLGNAPSSIPVLEALEARRDDPSELVREHVEWALAQHARGRTG

SEQ ID NO: 80135 - protein, 354 aa, Pseudomonas synxantha; identical to SEQ ID NO: 80032
  misc_feature (1)..(354): tr|A0A419UVI9|A0A419UVI9_9PSED Epoxyqueuosine reductase OS=Pseudomonas synxantha OX=47883 GN=queG PE=3 SV=1

SEQ ID NO: 80136 - protein, 354 aa, Pseudomonas synxantha
  misc_feature (1)..(354): tr|I4KVS4|I4KVS4_9PSED Epoxyqueuosine reductase OS=Pseu domonas synxantha BG33R OX=96901 GN=queG PE=3 SV=1
MPAITSDLPALAQSIKDWGRELGFQQVGISGLDLAEHEQHLQRWLDAGYHGEMDYMGAHGSKRSHPDELVPGTLRVVSLRMDYLPGDTQMAQLLGQPEKAYISRYALGRDYHKLIRKRVQQLADRIQAQIGPFGFRAFVDSAPVLEKAIAEQAGLGWIGKNTLVLNRKAGSYFFLSELFVDLPLPVDPPHTTEHCGRCTACLDICPTNAFVGPYVLDARRCISYLTIELKSAIPEDLRPLIGNRVFGCDDCQIVCPWNRFARPTAESDFKPRHNLDNAELAELFMWDEDKFLSSTEGSPLRRAGYERWLRNLAVGLGNAPSSIPVLEALKARRDYPSELVREHVEWALNQHAAR

SEQ ID NO: 80137 - protein, 364 aa, Pseudomonas syringae
  misc_feature (1)..(364): tr|A0A2K4X140|A0A2K4X140_PSESX Epoxyqueuosine reductase OS=Pseudomonas syringae OX=317 GN=queG PE=3 SV=1
MSAITAALPTRDDLAALALSIKAWGRELGFQEVGISGLDLAEHEQHLQRWLDAGYHGEMDYMAAHGSKRSHPDELVPGTLRVVSLRMDYLPGDTEMAQRLTEPEKAYVSRYALGRDYHKLIRKRLQQLAERIQQAIGPFGFRAFVDSAPVLEKAIAEQAGLGWIGKNTLVLNRKAGSFFFLGELFVDIPLPVDAPHATEHCGRCTACLDICPTAAFVGPYVLDARRCISYLTIELKTAIPEELRPLIGNRVFGCDDCQIVCPWNRFARPTDQSDFQPRHNLDNAGLAELFLWDEDKFLSSTEGSPLRRAGYERWLRNLAVGLGNAPSTIPVIEALQARRDYPSELVREHVEWALQRHGVADAGG

SEQ ID NO: 80138 - protein, 364 aa, Pseudomonas syringae
  misc_feature (1)..(364): tr|A0A0N8TI08|A0A0N8TI08_9PSED Epoxyqueuosine reductase OS=Pseudomonas syringae pv. viburni OX=251703 GN=queG PE=3 SV=1
MSAITAALPTLDDLAALTLSIKAWGRELGFQEVGISGLDLAEHEQHLQRWLDAGYHGEMDYMAAHGSKRSHPDELVPGTLRVVSLRMDYLPGDTEMAQRLTEPEKAYVSRYALGRDYHKLIRKRLQQLAERIQQAIGPFGFRAFVDSAPVLEKAIAEQAGLGWIGKNTLVLNRKAGSFFFLGELFVDIPLPVDAPHATEHCGRCTACLDICPTAAFVGPYVLDARRCISYLTIELKTAIPEELRPLIGNRVFGCDDCQIVCPWNRFARPTDQSDFQPRHNLDNAGLAELFLWDEEKFLGSTEGSPLRRAGYERWLRNLAVGLGNAPSTIPVIEALQARRDYPSELVREHVEWALQRHGVADAEG

SEQ ID NO: 80139 - protein, 379 aa, Pseudomonas taeanensis
  misc_feature (1)..(379): tr|A0A0A1YQG1|A0A0A1YQG1_9PSED Epoxyqueuosine reductase OS=Pseudomonas taeanensis MS-3 OX=1395571 GN=queG PE=3 SV=1
MGSDVWQNYTHLRSGFPLNMSPSTLDHTALATLAQSIKDWGRELGFQQVGIAGLDLAEHEAHLQRWLAAGYQGEMDYMAAHGSKRSHPEQLVPGTLRVVSLRMDYLPGDTQMAQRLSEPEKAYVSRYALGRDYHKLIRKRLQQLAERIQQHIGPFGYRAFVDSAPVLEKAIAEQAGLGWIGKNTLVLNRQAGSYFFLGELFVDIPLPVDAPHASEHCGRCTACLDICPTAAFVGPYLLDARRCISYLTIELKGSIPEELRAPIGNRVFGCDDCQLVCPWNRFARPTEQGDFQPRHSLDNAELAALFRWSEEEFLSRTEGSPLRRAGYERWLRNLAVGLGNAPSSIPVLEALKARREHPSALVREHVEWALARHAKRGGA

SEQ ID NO: 80140 - protein, 355 aa, Pseudomonas taetrolens
  misc_feature (1)..(355): tr|A0A0J6GPI8|A0A0J6GPI8_PSETA Epoxyqueuosine reductase OS=Pseudomonas taetrolens OX=47884 GN=queG PE=3 SV=1
MPAITVDLPALAQSIKEWGRELGFQQVAIAGLDLGEHEQHLERWLAAGYHGDMEYMGAHGSKRSHPEELVPGTLRVVSLRMDYLPGDTHMAQLLAQPEKAYVSRYALGRDYHKLIRKRVQQLADRIQAAIGPFGFRAFVDSAPVLEKAIAQKAGLGWIGKNTLVLNRKAGSYFFLSELFVDLPLPEDPPHETEHCGRCTACLDICPTNAFVGPYVLDARRCISYLTIELKTAIPEDLRPLIGNRVFGCDDCQIVCPWNRFARPTTEGDFKPRHNLDNAELAELFMWDEDKFLSSTEGSPLRRAGYERWLRNLAVGLGNAPSSIPVLEALKARREYPSQLVQEHVAWALKQHAERA

SEQ ID NO: 80141 - protein, 354 aa, Pseudomonas taiwanensis; identical to SEQ ID NO: 80060
  misc_feature (1)..(354): tr|V7DEX7|V7DEX7_9PSED Epoxyqueuosine reductase OS=Pseu domonas taiwanensis SJ9 OX=1388762 GN=queG PE=3 SV=1

SEQ ID NO: 80142 - protein, 359 aa, Pseudomonas thivervalensis
  misc_feature (1)..(359): tr|A0A176NND6|A0A176NND6_9PSED Epoxyqueuosine reductase OS=Pseudomonas thivervalensis OX=86265 GN=queG PE=3 SV =1
MPAIPTDLPALAQSIKEWGRELGFQQVGISGLDLAEHEQHLQRWLEAGYHGEMDYMGAHGSKRSHPEELVPGTLRVVSLRMDYLPGDTQMAQMLGQSEKAYVSRYALGRDYHKLIRKRVQQLAEKIQAVIGPFGYRAFVDSAPVLEKAIAEQAGLGWIGKNTLVLNRKAGSYFFLSELFVDLPLPIDPPHGTEHCGKCTACLDICPTNAFVGPYVLDARRCISYLTIELKSAIPEELRPLIGNRVFGCDDCQIVCPWNRFARPSGESDFKPRHNLDNAGLAELFMWDEDKFLSSTEGSPLRRAGYERWLRNLAVGLGNAPSTIPVLQALEARRDYPSELVREHVEWALRQHAERQTSSL

SEQ ID NO: 80143 - protein, 360 aa, Pseudomonas tolaasii
  misc_feature (1)..(360): tr|A0A2N0E4X6|A0A2N0E4X6_PSETO Epoxyqueuosine reductase OS=Pseudomonas tolaasii NCPPB 2192 OX=564423 GN=queG P E=3 SV=1
MPAITSDLPALAQSIKDWGRELGFQQVGISGLDLAEHEQHLQRWLDAGYHGEMEYMGAHGSKRSHPDELVPGTLRVVSLRMDYLPGDTQMAQLLAKPEKAYISRYALGRDYHKLIRKRVQQLADRIQAQIGPFGFRAFVDSAPVLEKAIAEKAGLGWIGKNTLVLNRKAGSYFFLSELFVDLPLPVDPPHSTEHCGRCTACLDICPTNAFVGPYVLDARRCISYLTIELKNAIPEDLRPLIGNRVFGCDDCQIVCPWNRFARATGESDFKPRHNLDNAELAELFMWDEEKFLSSTEGSPLRRAGYERWLRNLAVGLGNAPSSIPVLEALKARRDYPSELVREHVEWALNQHAARQCTSSL

SEQ ID NO: 80144 - protein, 376 aa, Pseudomonas toyotomiensis
  misc_feature (1)..(376): tr|A0A1I5PT28|A0A1I5PT28_9PSED Epoxyqueuosine reductase OS=Pseudomonas toyotomiensis OX=554344 GN=queG PE=3 SV =1
MHGSLTTDVWQNYTYVHRLRPPMSDQTLDLNALALSIKDWGRELGFQQVGITDVELGEHEAHLQRWLAAGYQGEMEYMAAHGSKRSHPDELVPGTLRVVSLRMDYLPGDTQMAQRLKESEQAYVSRYALGRDYHKLIRKRLQQLAERIQQQIGPFGYRAFVDSAPVLEKAIAEKAGLGWIGKNTLVLNRKAGSYFFLGELFVDLPLPVDAPHASEHCGRCSACMDICPTAAFAGPYVLDARRCISYLTIELKGSIPEELRAPIGNRVFGCDDCQIVCPWNRFARPTDQGDFQPRHGLDNSGLAELFMWTEEEFLSRTEGSPLRRAGYERWLRNLAVGLGNAPSTIPVLQALQARREHPSELVREHVEWALARHGAL

SEQ ID NO: 80145 - protein, 354 aa, Pseudomonas toyotomiensis
  misc_feature (1)..(354): tr|A0A2G5G073|A0A2G5G073_9PSED Epoxyqueuosine reductase OS=Pseudomonas toyotomiensis OX=554344 GN=queG PE=3 SV =1
MSDQTLDLNALALSIKDWGRELGFQQVGITDVELGEHEAHLQRWLAAGYQGEMEYMAAHGSKRSHPDELVPGTLRVVSLRMDYLPGDTQMAQRLKESEQAYVSRYALGRDYHKLIRKRLQQLAERIQQQIGPFGYRAFVDSAPVLEKAIAEKAGLGWIGKNTLVLNRKAGSYFFLGELFVDLPLPVDAPHASEHCGRCSACMDICPTAAFAGPYVLDARRCISYLTIELKGSIPEELRAPIGNRVFGCDDCQIVCPWNRFARPTDQGDFQPRHGLDNSGLAELFMWTEEEFLSRTEGSPLRRAGYERWLRNLAVGLGNAPSTIPVLQALQARREHPSELVREHVEWALARHGAL

SEQ ID NO: 80146 - protein, 390 aa, Pseudomonas tremae; identical to SEQ ID NO: 79964
  misc_feature (1)..(390): tr|A0A0Q0CF77|A0A0Q0CF77_9PSED Epoxyqueuosine reductase OS=Pseudomonas tremae OX=200454 GN=queG PE=3 SV=1

SEQ ID NO: 80147 - protein, 354 aa, Pseudomonas trivialis
  misc_feature (1)..(354): tr|A0A0H5A6Y9|A0A0H5A6Y9_9PSED Epoxyqueuosine reductase OS=Pseudomonas trivialis OX=200450 GN=queG PE=3 SV=1
MPAITSDLPALAQSIKDWGRELGFQQVGISGLDLAEHEQHLQRWLDAGYHGEMEYMGAHGSKRSHPEELVPGTLRVVSLRMDYLPGDTQMAQLLAQPEKAYISRYALGRDYHKLIRKRVQQLADRIQAQIGPFGFRAFVDSAPVLEKAIAEQAGLGWIGKNTLVLNRKAGSYFFLSELFVDLPLPVDAPHSTEHCGRCTACLDICPTNAFVGPYVLDARRCISYLTIELKSAIPEDLRPLIGNRVFGCDDCQIVCPWNRFARATAESDFKPRHNLDNAELAELFMWDEDKFLSSTEGSPLRRAGYERWLRNLAVGLGNAPSSIPVLEALKARRDYPSELVREHVEWALNQHATR

SEQ ID NO: 80148 - protein, 355 aa, Pseudomonas trivialis
  misc_feature (1)..(355): tr|A0A0R2Z9L0|A0A0R2Z9L0_9PSED Epoxyqueuosine reductase OS=Pseudomonas trivialis OX=200450 GN=queG PE=3 SV=1
MPVITSDLPALAQSIKDWGRELGFQQVGISGLDLAEHEQHLQRWLDAGYHGEMDYMGAHGSKRSHPDELVPGTLRVVSLRMDYLPGDTQMAHLLAQPEKAYISRYALGRDYHKLIRKRVQQLAERIQAQIGPFGFRAFVDSAPVLEKAIAEQAGLGWIGKNTLVLNRKAGSYFFLSELFVDLPLPVDAPHSTEHCGRCTACLDICPTNAFVGPYVLDARRCISYLTIELKSAIPEDLRPLIGNRVFGCDDCQIVCPWNRFARPTAESDFKPRHNLDNAGLAELFLWDEDRFLSSTEGSPLRRAGYERWLRNLAVGLGNAPSSIPVLEALKARRDYPSELVREHVEWALKQHAERQ

SEQ ID NO: 80149 - protein, 354 aa, Pseudomonas umsongensis
  misc_feature (1)..(354): tr|A0A1H2D0N2|A0A1H2D0N2_9PSED Epoxyqueuosine reductase OS=Pseudomonas umsongensis OX=198618 GN=queG PE=3 SV=1
MPAITTDLPALAQSIKDWGRELGFQQVGISGLDLAEHEQHLERWLAAGYHGEMEYMGAHGSKRSHPEELVPGTLRVVSLRMDYLSGDTRMAQLLAQPEKAYVSRYALGRDYHKLIRKRVQQLAEKIQAEIGPFGYRAFVDSAPVLEKAIAEKAGLGWIGKNTLVLNRKAGSYFFLAELFVDLPLPVDPPHATEHCGRCSACLDICPTNAFVGPYVLDARRCISYLTIELKGAIPEELRPLIGNRVFGCDDCQIVCPWNRFARPSGESDFKPRHNLDNAGLAELFMWDEDKFLSSTEGSPLRRAGYENWLRNLAVGLGNAPSTIPVLEALKARREHPSELVREHVEWALKQHGLV

SEQ ID NO: 80150 - protein, 359 aa, Pseudomonas vancouverensis
  misc_feature (1)..(359): tr|A0A1H2PCW6|A0A1H2PCW6_9PSED Epoxyqueuosine reductase OS=Pseudomonas vancouverensis OX=95300 GN=queG PE=3 SV =1
MPAITTDLPALAQSIKDWGRELGFQQVGISGLDLAEHEQHLERWLAAGYHGEMEYMGAHGSKRSHPEELVPGTLRVVSLRMDYLSGDTQMAKMLAQPEKAYVSRYALGRDYHKLIRKRVQQLAEKIQAEIGPFGYRAFVDSAPVLEKAIAEQAGLGWIGKNTLVLNKKAGSYFFLSELFVDLPLPVDPPHATEHCGRCTACLDICPTNAFVSPYVLDARRCISYLTIELKGAIPEDLRPLIGNRVFGCDDCQIVCPWNRFARPSGENDFKPRHNLDNAGLAELFMWDEDKFLSNTEGSPLRRAGYQSWLRNLAVGLGNAPSTIPVLEALKARREYPSELVREHVEWALKQHAERQASSL

SEQ ID NO: 80151 - protein, 355 aa, Pseudomonas veronii; identical to SEQ ID NO: 80082
  misc_feature (1)..(355): tr|A0A0R3BGC1|A0A0R3BGC1_9PSED Epoxyqueuosine reductase OS=Pseudomonas veronii OX=76761 GN=queG PE=3 SV=1

SEQ ID NO: 80152 - protein, 355 aa, Pseudomonas veronii
  misc_feature (1)..(355): tr|A0A1D3JQR8|A0A1D3JQR8_9PSED Epoxyqueuosine reductase OS=Pseudomonas veronii 1YdBTEX2 OX=1295141 GN=queG PE= 3 SV=1
MPAITSDLPALAQSIKDWGRELGFQQVGISGLDLAEHEQHLQRWLDAGYHGEMEYMGAHGSKRSHPDELVPGTLRVVSLRMDYLPGDTHMAQRLAQPEKAYISRYALGRDYHKLIRKRVQQLAERIQAQIGPFGFRAFVDSAPVLEKAIAEKAGLGWIGKNTLVLNRKAGSYFFLSELFVDVPLPVDPPHATEHCGRCTACLDICPTNAFVGPYVLDARRCISYLTIELKSAIPEDLRPLIGNRVFGCDDCQIVCPWNRFARTTAESDFKPRHNLDNAQLAELFMWDEEKFLSSTEGSPLRRAGYERWLRNLAVGLGNAPSSIPVLEALKARRDYPSELVREHVEWALKQHAERQ

SEQ ID NO: 80153 - protein, 355 aa, Pseudomonas versuta
  misc_feature (1)..(355): tr|A0A0M4QKF6|A0A0M4QKF6_9PSED Epoxyqueuosine reductase OS=Pseudomonas versuta OX=1788301 GN=queG PE=3 SV=1
MPAITVDLPALAQSIKEWGRELGFQQVAIAGLDLGEHEQHLERWLAAGYHGDMEYMGAHGSKRSHPEELVPGTLRVVSLRMDYLPGDTHMAQLLAQPEKAYVSRYALGRDYHKLIRKRVQQLADRIQADIGPFGFRAFVDSAPVLEKAIAQKAGLGWIGKNTLVLNRKAGSYFFLSELFVDLPLPVDAPHETEHCGRCTACLDICPTNAFVGPYVLDARRCISYLTIELKTAIPEDLRPLIGNRVFGCDDCQIVCPWNRFARTTAEGDFKPRHNLDNAGLAELFMWDEDKFLSNTEGSPLRRAGYERWLRNLAVGLGNAPSSIPVLEALKARREYPSELVQEHVEWALAQHEQRV

SEQ ID NO: 80154 - protein, 360 aa, Pseudomonas viridiflava
  misc_feature (1)..(360): tr|A0A1Y6JQY0|A0A1Y6JQY0_PSEVI Epoxyqueuosine reductase OS=Pseudomonas viridiflava OX=33069 GN=queG PE=3 SV=1
MSAITAELPTADDLVTLAQSIKAWGRELGFQEVGISGLDLAEHEQHLQRWLEAGYHGEMDYMAAHGSKRSHPEELVPGTLRVVSLRMDYLPGDTEMAQRLSEPEKAYVSRYALGRDYHKLIRKRLQQLAERIQQAIGPFGFRAFVDSAPVLEKAIAEQAGLGWIGKNTLVLNRKAGSFFFLGELFVDIPLPVDPPHATEHCGRCTACLDICPTAAFVGPYVLDARRCISYLTIELKTSIPEELRPLIGNRVFGCDDCQIVCPWNRFARPTDQSDFQPRHNLDNAGLAELFLWDEDKFLSSTEGSPLRRAGYERWLRNLAVGLGNAPSTIPVIEALEARRDYPSEMVREHVAWALGRHGRS

SEQ ID NO: 80155 - protein, 362 aa, Pseudomonas viridiflava
  misc_feature (1)..(362): tr|A0A0W0IIN3|A0A0W0IIN3_PSEVI Epoxyqueuosine reductase OS=Pseudomonas viridiflava ICMP 13104 OX=1198305 GN=qu eG PE=3 SV=1
MSAITAELPTFDDLAALALSIKAWGRELGFQEVGISGLDLAEHEQHLQRWLDAGYHGEMDYMAAHGSKRSHPEELVPGTLRVVSLRMDYLPGDSEMAQRLTEPEKAYVSRYALGRDYHKLIRKRLQQLAERIQQAIGPFGFRAFVDSAPVLEKAIAEQAGLGWIGKNTLVLNRKAGSFFFLGELFVDIPLPVDAPHATEHCGRCTACLDICPTAAFVGPYVLDARRCISYLTIELKTAIPEELRPLIGNRVFGCDDCQIVCPWNRFARPTGQSDFQPRHNLDNAGLAELFLWDEEKFLGNTEGSPLRRAGYERWLRNLAVGLGNAPSTIPVVEALRARRDYPSELVREHVEWALRRHGVAPL

SEQ ID NO: 80156 - protein, 365 aa, Pseudomonas vranovensis
  misc_feature (1)..(365): tr|A0A423DYF7|A0A423DYF7_9PSED Epoxyqueuosine reductase OS=Pseudomonas vranovensis OX=321661 GN=queG PE=3 SV=1
MPASAPDLPALAQSIKDWGRELGFAHVGITGVDLGEHEKHLERWLEAGYHGEMDYMGAHGSKRSHPDELVPGTLRVVSLRMDYLPGDTRMAQQLAQPEKAYISRYALGRDYHKLVRKRVQHLAERIQKDIGPFGFRAFVDSAPVLEKAIAEQAGLGWIGKNTLLLNRKAGSYFFLAELFVDMPLPVDPPQASEHCGRCSACLDICPTQAFVGPYVLDARRCISYLTIELKSAIPEELRPLIGNRVFGCDDCQIVCPWNRFARPSGENDFKPRHNLDSAGLAELFMWDEQTFLDSTEGSPLRRAGYERWLRNLAVGLGNAPSTIQVLEALKARQDFPSELVREHVQWALGQHAMKTAASIKPQASS

SEQ ID NO: 80157 - protein, 357 aa, Pseudomonas wadenswilerensis
  misc_feature (1)..(357): tr|A0A380T7I6|A0A380T7I6_9PSED Epoxyqueuosine reductase OS=Pseudomonas wadenswilerensis OX=1785161 GN=queG PE= 3 SV=1
MSASAPDLPTLAQSIKDWGRELGFAHVGIAGVDLGEHEKHLERWLEAGYHGEMDYMGAHGSKRSHPDELVPGTLRVVSLRMDYLPGDTRMAQQLAQPEKAYISRYALGRDYHKLVRKRVQHLAERIQKDIGPFGFRAFVDSAPVLEKAIAEQAGLGWIGKNTLLLNRKAGSYFFLAELFVDMPLPVDPPQASEHCGRCSACLDICPTQAFVGPYVLDARRCISYLTIELKSAIPEELRPLIGNRVFGCDDCQIVCPWNRFARPTGESDFKPRHNLDSAGLAELFMWDEQTFLDSTEGSPLRRAGYERWLRNLAVGLGNAPSTIQVLEALKARQDFPSELVREHVEWALAQHAERQAG

SEQ ID NO: 80158 - protein, 357 aa, Pseudomonas weihenstephanensis
  misc_feature (1)..(357): tr|A0A0J6INC4|A0A0J6INC4_9PSED Epoxyqueuosine reductase OS=Pseudomonas weihenstephanensis OX=1608994 GN=queG P E=3 SV=1
MPANTVDLPVLAQSIKEWGRELGFQQVAIAGLDLGEHEQHLERWLAAGYHGEMEYMGAHGSKRSHPEELVPGTLRVVSLRMDYLPGDTHMAQLLAQPEKAYVSRYALGRDYHKLIRKRVQQLADRIQAEIGPFGFRAFVDSAPVLEKAIAQKAGLGWIGKNTLVLNRKAGSYFFLSELFVDLPLPEDPPHDTEHCGRCTACLDICPTNAFVGPYVLDARRCISYLTIELKSAIPVELRSMIGNRVFGCDDCQIVCPWNRFARTTGEGDFKPRHNLDNAELAELFMWDEDTFLSSTEGSPLRRAGYERWLRNLAVGLGNAPSSIPVLEALKARREYPSELVQEHVAWALEQHAQRVSG

SEQ ID NO: 80159 - protein, 357 aa, Pseudomonas xanthomarina
  misc_feature (1)..(357): tr|A0A098FZ94|A0A098FZ94_9PSED Epoxyqueuosine reductase OS=Pseudomonas xanthomarina OX=271420 GN=yjeS PE=3 SV= 1
MSSLSLDPAALAQSIKEWGRELGFQQVGITDVDLGEHEAHLEAWLAAGYQGEMDYMAAHGSKRSRPDELVPGTLRVISLRMDYLPGDTRMTQQLASPEKAYVSRYALGRDYHKLIRKRIQQLAERIQQMVGPFGFRAFVDSAPVLEKAAGQQAGLGWIGKNTLLLNRKAGSWFFLGELFVDIALPVDEPTTRDHCGSCHACLDVCPTDAFVGERLLDARRCISYLTIELKGAIPVELRDKIGNRVFGCDDCQIVCPWNRFARPTEQSDFQPRHSLDNAELATLFRWTEEEFLSRTEGSPLRRAGYQRWLRNLAVGLGNAPSSIPVLEALEARRDDPSELVREHVEWALAQHAQRQAD

SEQ ID NO: 80160 - protein, 363 aa, Pseudomonas xanthomarina
  misc_feature (1)..(363): tr|A0A1M5KCS4|A0A1M5KCS4_9PSED Epoxyqueuosine reductase OS=Pseudomonas xanthomarina DSM 18231 OX=1403346 GN=qu eG PE=3 SV=1
MSNSTLDPTALANSIKEWGRELGFQQIGITDVDLGEHEAHLERWLAAGYHGEMDYMAAHGSKRSHPEQLVPGTLRVVSLRMDYLPGDTRMAQQLAHPEKAYVSRYALGRDYHKLIRKRLQQLAERIQQVVGPFGFRAFVDSAPVLEKAVAEQAGLGWIGKNTLVLNRKAGSWFFLGELFVDIALPVDEPTARDHCGSCHACLDICPTEAFVGERVLDARRCISYLTIELKGPIPVELRSKIGNRVFGCDDCQIVCPWNRFAKPTGQTDFQPRHSLDNAELAALFRWTEDEFLSRTEGSPLRRTGYQNWLRNLAVGLGNAPSSIPVLEALQARRDDPSELVREHVQWALVQHERRSSSVSNSGG

SEQ ID NO: 80161 - protein, 355 aa, Pseudomonas xinjiangensis
  misc_feature (1)..(355): tr|A0A1H1M5F9|A0A1H1M5F9_9PSED Epoxyqueuosine reductase OS=Pseudomonas xinjiangensis OX=487184 GN=queG PE=3 SV =1
MPETAIDYAELAERIRGFAEELGFQQTGISQPDLAEHEAWLDAWLREGYHGEMEWMASHGSKRTRPAELVPGTQRVISVRMDYLPADTDMVRRLGQPDSAYVSRYALGRDYHKLMRKRLQQLAERIQGLIGPFGFRAFVDSAPVMERALASRSGLGWVGKNSMLINRQAGSFFFLGELYTDLPLPTDEPYQQEHCGRCTACLDKCPTDAFVGDRVLDARRCISYLTIELKGSIPDELRSKMGNRVFGCDDCQLVCPWNRFARPTTEPDFSPRHELDQADLVELFRWDEASFLRNTEGSPIRRIGFERWLRNLAVGLGNASTSIPVVEALKSRRDHPSELVREHVQWALERHGEHQ

SEQ ID NO: 80162 - protein, 360 aa, Pseudomonas yamanorum
  misc_feature (1)..(360): tr|A0A143GQP7|A0A143GQP7_9PSED Epoxyqueuosine reductase OS=Pseudomonas yamanorum OX=515393 GN=queG PE=3 SV=1
MPAITYDLPALAQSIKDWGRELGFQQVGISGLDLAEHEQHLQRWLDAGYHGEMDYMGAHGSKRSHPEELVPGTLRVVSLRMDYLPGDTQMAQLLAKPEKAYISRYALGRDYHKLIRKRVQQLADRIQAQIGPFGFRAFVDSAPVLEKAIAEQAGLGWIGKNTLVLNRKAGSYFFLSELFVDLPLPVDPPHTTEHCGRCTACLDICPTNAFVGPYVLDARRCISYLTIELKSAIPEELRPLIGNRVFGCDDCQIVCPWNRFARPTDEGDFKPRHNLDNAELAELFMWDEDKFLSNTEGSPLRRAGYERWLRNLAVGLGNAPSSIPVLEALKARREYPSELVREHVEWALNQHAERQCTSSL

SEQ ID NO: 80163 - protein, 354 aa, Pseudomonas yangmingensis
  misc_feature (1)..(354): tr|A0A1I4PQG5|A0A1I4PQG5_9PSED Epoxyqueuosine reductase OS=Pseudomonas yangmingensis OX=1720063 GN=queG PE=3 S V=1
MSDSSKDPQQLAEQIRRIASELGFQQVGISDVDLGDHEQRLQQWLDAGLHGEMEWMASHGSKRTRPEELVPGTLRVISVRLDYLPGDTRMAQRLSEPDSAYISRYALGRDYHKMMRRRLQQLAEQIQQLIGPFGYRAFVDSAPVMERALASRAGLGWVGKNTMLINRKAGSYFFLGELFTDLPLPLDTPDNSNHCGRCEACLTRCPTDAFIGPHVLDARRCISYLTIELKGSIPEDLRKPMGNRVFGCDDCQLVCPWNRFAKPSAETDFSPRHQLDQADLVSLFRWSEEEFLSRTEGSPIRRIGYQRWLRNLAVGLGNAHSSIPVIEALRSQRDHPDPLVREHVQWALAQHGEG

SEQ ID NO: 80164 - protein, 354 aa, Pseudomonas zeshuii; identical to SEQ ID NO: 80046
  misc_feature (1)..(354): tr|A0A1M6CPD9|A0A1M6CPD9_9PSED Epoxyqueuosine reductase OS=Pseudomonas zeshuii OX=1076620 GN=queG PE=3 SV=1

SEQ ID NO: 80165 - protein, 360 aa, Pseudomonas zhaodongensis
  misc_feature (1)..(360): tr|A0A3M2HQ40|A0A3M2HQ40_9PSED Epoxyqueuosine reductase OS=Pseudomonas zhaodongensis OX=1176257 GN=queG PE=3 S V=1
MSSHAPDPADLALSIKEWGRELGFQQVGITGVDLAEHEAHLERWLAAGYHGEMDYMAAHGSKRSHPEQLVPGTLRVISLRMDYLPGDTRMAEQLAQPEKAYVSRYALGRDYHKLIRKRLQQLAERIQGVIGPFGFRAFVDSAPVLEKAVAQQAGLGWIGKNTLVLNRKAGSWFFLGELFVDIELPVDEPNARDHCGSCRACLDICPTEAFVGERVLDARRCISYLTIELKGPIPVELRSKIGNRVFGCDDCQIVCPWNRFARPTEQIDFQPRHSLDNAELATLFRWTEDEFLSRTEGSPLRRTGYQNWLRNLAVGLGNAPSSIPVLEALKSRREDQSDMVREHVEWALAEHEARGSTGSS

SEQ ID NO: 80166 - protein, 363 aa, Pseudomonas zhaodongensis
  misc_feature (1)..(363): tr|A0A365PWT1|A0A365PWT1_9PSED Epoxyqueuosine reductase OS=Pseudomonas zhaodongensis OX=1176257 GN=queG PE=3 S V=1
MSSTTLDPAALADSIKEWGRELGFQQVGITGVDLGEHEAHLERWLAAGYQGEMDYMAAHGSKRSHPEQLVPGTLRVISLRMDYLPGDTRMAEQLAQPEKAYVSRYALGRDYHKLIRKRLQQLAERIQHVIGPFGFRAFVDSAPVLEKAVAQQAGLGWIGKNTLVLNRKAGSWFFLGELFVDIALPVDEPTDRDHCGSCHACLDVCPTDAFVGERVLDARKCISYLTIELKGPIPVELRSKIGNRVFGCDDCQIVCPWNRFAKPTQQTDFQPRHSLDNAELATLFRWTEEEFLSRTEGSPLRRTGYQSWLRNLAVGLGNAPSSIPVLEALQARRDDPSELVREHVQWALAQHEQRPPAYPHTGD

SEQ ID NO: 80167 - protein, 353 aa, Pseudooceanicola antarcticus
  misc_feature (1)..(353): tr|A0A285HR35|A0A285HR35_9RHOB Epoxyqueuosine reductase OS=Pseudooceanicola antarcticus OX=1247613 GN=queG PE= 3 SV=1
MPGDTLVETLKRQALAEGFSAVRICAPEAVPQVAGRLQAFLEAGFHGQMQWMEERSHWRGDPAQLWPEAQSIIMLAENYGPDHDPLAVLEQPDRAGISVYAQNKDYHDVVKKRLKRLARWLIAEAGPQEDGAAAQVKVFVDTAPVPEKALGQAAGLGWQGKHTNLVSRELGSWFFLGAIFTTLELPRDAPEVDHCGQCRRCLDACPTDAFPAPYQLDARRCISYLTIEHKGPVPEELRPALGNRIYGCDDCLAVCPWNKFARRASEVKYHARDDLNAPALAELAGLDDAAFRARFSGSPIKRIGRDRFLRNVAYAIGNSGRADLRTAVAPLAEDPDPTLAEAARWALDRLPSA

SEQ ID NO: 80168 - protein, 347 aa, Pseudooceanicola atlanticus
  misc_feature (1)..(347): tr|A0A0A0EI36|A0A0A0EI36_9RHOB Epoxyqueuosine reductase OS=Pseudooceanicola atlanticus OX=1461694 GN=queG PE=3 SV=1
MAGLKARLVDQALAEGFDACRICRPGDVPEVAGRLRAFLDAGYHGQMGWMEDRAHWRGDPSVLWPEARSVIMLAESYTPEHDPLEVLEHPDRAAISVYAQNRDYHDLVKKRLKRVARWLIAETDPEVQVKVFVDTAPVPEKPLGQAAGLGWQGKHTNLVGRGLGNWFFIGSVFTTLELEPDAAEVDHCGSCRRCLDVCPTDAFPAPYQLDARRCISYLTIEHKGPVDPDLRPLMGNRIYGCDDCLAICPWNKFAVEAREIRYRGREDLTAPALEELAALDDAGFRARFSGSPIKRIGRDRFVRNVLYAIGNSGQARLRPVAQRLTDDPDDSVADAARWAAARLAEAV

SEQ ID NO: 80169 - protein, 349 aa, Pseudooceanicola batsensis
  misc_feature (1)..(349): tr|A3TWG1|A3TWG1_PSEBH Epoxyqueuosine reductase OS=Pseu dooceanicola batsensis (strain ATCC BAA-863 / DSM 15984 / KCTC 12145 / HTCC2597) OX=252305 GN=queG PE=3 SV=1
MGHDLKNRLIAQAAELGFDACRICRPGDIPEVPERLAAFLGAGFHGQMSWLAERSHWRADPETLWPEARSVIMLAENYGPDHDPLDILDRPDRGAVSVYARNRDYHDVVKKRLKRLARWLIAEAGTEPEVKVFVDTAPVAEKPLGHAAGLGWQGKHTNLVSRDLGSWFFIGSVFTTLDLPPDEAETDHCGSCRRCLDICPTDAFPAPYQLDARRCISYLTIEHDGPVDPDLRPALGNRIYGCDDCLAVCPWNKFAQTAQEARYHAREDLAAPHLAELAALDDAAFRRKFSGSPIKRIGRNRFVRNVLYAIGNSADPMFADIAGRLRTDPDPTVAEAAEWALRRLGGHKT

SEQ ID NO: 80170 - protein, 348 aa, Pseudooceanicola flagellatus
  misc_feature (1)..(348): tr|A0A1W2AJ23|A0A1W2AJ23_9RHOB Epoxyqueuosine reductase OS=Pseudooceanicola flagellatus OX=1387277 GN=queG PE= 3 SV=1
MQDLKDRLIAQALADGFDACRICRPWDVPQVAGRLAAFLESGAHGQMGWLAERSHWRGDPAALWPEARSVIMLAENYGPSHDPLEVLDQRDRAAISVYAQNRDYHDVVKKRLKRVGRWLIDAAAKSSSEAPEIKVFVDTAPVPEKPLGAAAGLGWQGKHTNLVSRDLGSWFFLGSIFTTLNLPADAAERDHCGSCRACLDVCPTNAFPASYRLDARRCISYLTIEHHGPVDEALRPLLGNRIYGCDDCLAVCPWNKFAQTAAEVKYHPRAELLAPRLAELAALDDAAFRALFSGSPVKRIGRGRFVRNVLYAIGNSGDAELRGVAQGLCDDADATVADAARWAVSRLD

SEQ ID NO: 80171 - protein, 335 aa, Pseudooceanicola lipolyticus
  misc_feature (1)..(335): tr|A0A2M8J4U1|A0A2M8J4U1_9RHOB tRNA epoxyqueuosine(34) reductase QueG (Fragment) OS=Pseudooceanicola lipolytic us OX=2029104 GN=queG PE=3 SV=1
MGAALKARLVEQALAEGFVSCRICRPWDVPQVAARLQAFLAAGFHGQMGWLAERSHWRGDPAQLWPEARSVIMLAESYAPERDPLEVLDRRDRGAISVYAQNRDYHDLVKKRLKRLARWLIAEAGGEVKVFVDTAPVPEKALGQAAGLGWQGKHTNLLSRDWGNWAFLGSVFTTLDLPADMAEQDHCGSCRACLDICPTDAFPAPYRLDARRCISYLTIEHKGPVEEALRARMGNRIYGCDDCLAVCPWNKFAVAASDLRYAARAELQAPKLAELARLDDAGFRALFSGSPIKRIGRDRFVRNVLYAIGNSGDATLRGVAQGLCDDPDPAVADAA

SEQ ID NO: 80172 - protein, 353 aa, Pseudooceanicola marinus
  misc_feature (1)..(353): tr|A0A1X7A2Z3|A0A1X7A2Z3_9RHOB Epoxyqueuosine reductase OS=Pseudooceanicola marinus OX=396013 GN=queG PE=3 SV= 1
MTEALKRKLLDQARAEGFSAARLCAPEAVPDVAERLRAFLAAGYHGQMSWLADRSHWRGDPSALWPEARSILMLAENYGPDHDPLEVLGHPDRAGITVYAQNRDYHDVVKKRLKRLARWLIAEAGPQADGEAAQVKVFVDTAPVPEKALGQAAGLGWQGKHTNLVSRELGSWFFLGAIFTTLELPLDDAEVDHCGRCRRCLDACPTDAFPQPYQLDARRCISYLTIEYKGPIPEELRAKLGNRIYGCDDCLAVCPWNKFAERAAEVKYHARDDLLAPPLAELAALDDTAFRARFSGSPIKRIGRDRFVRNVAYAIGNSGRPDLLPAVEALTGDADPVVAEAAGWAVAQLRARS

SEQ ID NO: 80173 - protein, 341 aa, Pseudooceanicola nitratireducens
  misc_feature (1)..(341): tr|A0A1I1HGD1|A0A1I1HGD1_9RHOB Epoxyqueuosine reductase OS=Pseudooceanicola nitratireducens OX=517719 GN=SAMN0 5421762_0249 PE=4 SV=1
MKEALVSRALEEGFSLCRVCRPGDIPHAADRLHAFLEAGYHGQMGWMAERTAWRGDPAALWPEARSVIMLAENYTPDCDPMEVVGQPESAAISVYARNRDYHDVVKKRLKRVARWLLEAAKEGEVKVFVDTAPVMEKPLGQAAGLGWQGKHTNLVSRDLGSWFFLGAIFTTLELEPDAAEVDHCGSCRRCLTACPTDAFPAPYRLDARRCISYLTIEHAGPVDEALRPMLGNRIYGCDDCLAACPWNKFAAEAAEVKYHARPDLVAPDLEELAGLDDAGFRALFSGSPIKRIGRGRFVRNVLYAIGNSGAGRFRPVTRALCADADPVVADAAQWALERLPE

SEQ ID NO: 80174 - protein, 346 aa, Pseudooceanicola sp.
  misc_feature (1)..(346): tr|A0A2E2P5J4|A0A2E2P5J4_9RHOB Epoxyqueuosine reductase OS=Pseudooceanicola sp. OX=1914328 GN=queG PE=3 SV=1
MDAGLKARLVAQARDEGFVACRVCRPGDVPEVAGRLAEFLDLGRHGQMGWMAERSHWRGDPAALWPEARSVIMLAESYTPEVDPRAVLERSERGAISVYAQNRDYHDLVKKRLKRLARWLIEAAGGAEVKVFVDTAPVPEKPLGQAAGLGWQGKHTNLLSRDWGNWAFLGSIFTTLELPVDASEVDHCGSCRACLDVCPTDAFPAPYHLDARRCISYLTIEHHGPVDSELRGLMGNRIYGCDDCLAVCPWNKFAVAASDMRYAARPDLVAPELAELAVLDDAAFRAMFSGSPIKRIGRDRFVRNVLYAIGNSGRRALRAVAQGLVDDADPTVADAARWAAERLAEA

SEQ ID NO: 80175 - protein, 346 aa, Pseudooctadecabacter jejudonensis
  misc_feature (1)..(346): tr|A0A1Y5SCF2|A0A1Y5SCF2_9RHOB Epoxyqueuosine reductase OS=Pseudooctadecabacter jejudonensis OX=1391910 GN=que G PE=3 SV=1
MSEDLKDRLKARAFEEGFAGFGVCRPDAVPQIAERLARFVEEGRHGQMAWMGERMAWRGNPTALWPEAKSVVMLAEPYTPEHDPLAVLEQRDRAAISVYAQNRDYHDLVKKRLKRVGRWLVDAASCEIKVFVDTAPVMEKPLAAAAGLGWQGKHTNLLSRALGNWFFLGAIFTTVELPVDRRGEERCGSCRACLDACPTDAFPAPFQLDARRCISYLTIEHKGPVPEDLRGLMGNRIYGCDDCLAVCPWNKFAAEAREVRYAARADLLAPPLRELAALDDAAFRSMFSGSPIKRIGRDRFVRNVLYAIGNSADASLFLVAQGLVEDPAPEVADAARWACGQLRETI

SEQ ID NO: 80176 - protein, 309 aa, Pseudopedobacter saltans
  misc_feature (1)..(309): tr|A0A2W5ER51|A0A2W5ER51_9SPHI Epoxyqueuosine reductase OS=Pseudopedobacter saltans OX=151895 GN=queG PE=3 SV= 1
MDLQKRSIWIKQLAQKSGFDYCGIAKAQQLDKEATYLEQWLNQGMHGKMQYMENHFDMRIDPRKLVPGAKSVITFFKNYYPNTISDNKEIKISKYAYGSDYHDVIRSQLKLLLKDINEKFGEVQGRGFVDSAPVLERAWAEKAGIGWQGKNGMVINRQSGSFFFIATLIVDLELTYDDPIAKDFCGTCTRCIDACPTEAILPNKVVDGSKCISYFTIELKDQLIPDNYKGKFDNWMFGCDTCQDVCPWNRFSKPNKEPLFSPIPEILNFKEKDWEEMTEEEFKKVFKNSPLKRSKFEGIRRNLKFLNLQ

SEQ ID NO: 80177 - protein, 313 aa, Pseudopedobacter saltans
  misc_feature (1)..(313): tr|F0S927|F0S927_PSESL Epoxyqueuosine reductase OS=Pseu dopedobacter saltans (strain ATCC 51119 / DSM 12145 / J CM 21818 / LMG 10337 / NBRC 100064 / NCIMB 13643) OX=76 2903 GN=queG PE=3 SV=1
MNEQQKLKYSEMIKAEAKRLGFLFCGISKAEFLEEEASRLEKWLRNDYQGEMAYMNNHFDKRLDPRLLVDGAKSVISIALNYYTDAKQNDESAPKISKYAYGTDYHFVIKDKLKSLHHFIEENIGAVSGRAFVDSAPVLDKAWAKKGGLGWVGKNANIINNKSGSFFFLGELIVDMELAYDVPFSTDHCGTCTRCIDACPTEAIVSPYVVDGSKCISYLTIELKEEIPHSFKNKMDNWMFGCDVCQNVCPWNRFSVIHQEEAFNPHPDLLEMSKRDWEEITEEVFGKVFKKSAVKRTKIAGLKRNITFIKTVE

SEQ ID NO: 80178 - protein, 352 aa, Pseudopelagicola gijangensis
  misc_feature (1)..(352): tr|A0A1M6ARL5|A0A1M6ARL5_9RHOB Epoxyqueuosine reductase OS=Pseudopelagicola gijangensis OX=1470563 GN=queG PE= 3 SV=1
MADDLKSKLVAEAQEMGFDSCRICRPDAVGHVPEGLSAYLAKGHHGQMGWLAERTHWRGNPSVLWPEAKSVIMLGESYSPEHDPTAVLEMPDRAAISVYAQNKDYHEIVKKRLKRLARWLIAEVGDETQVKVFVDTAPVPEKPLGQAAGLGWQGKHTNLVSRELGSWFFIGSVFTTVELETDYAEIDHCGSCRACLDACPTDAFPAPNQIDARRCISYLTIEHHGPVDLQFRPLLGNRIYGCDDCLAACPWNKFAVEAREMRYHARDDLMAPKLSSLVELDDASFRTYFSGSPIKRIGRNRFIRNVLYAIGNSDDINLLPKVRALQTDPDETVVDAAHWAEEQLKQVANRQV

SEQ ID NO: 80179 - protein, 344 aa, Pseudopuniceibacterium sediminis
  misc_feature (1)..(344): tr|A0A399IYZ5|A0A399IYZ5_9RHOB Epoxyqueuosine reductase OS=Pseudopuniceibacterium sediminis OX=2211117 GN=queG PE=3 SV=1
MTEFLRDRLLAQARGEGFSAARLCLPGDVPEVPGRLAAFLQAGRHGQMRWLEERSQWRGDPTALWPEARSVLMLAENYGPDSDPLAVLAQRDRAAISVYAQNRDYHDVVKKRLKRVARWLVSEAPGCEVKVFVDTAPVPEKALGQAAGVGWQGKHTNLVSRDLGSWFFLGAIFTTLELFPDAAESDHCGGCRRCLDVCPTDAFPAPYQLDARRCISYLTIEHKGPVDEELRARMGNRIYGCDDCLAVCPWNKFARRASEVKYHARDDLRAPSLAELAALDDAGFRARFSGSPIKRIGRDRFVRNVLYAIGNSAVPSLLPVAQGLTEDADATVADAARWAVARLR

SEQ ID NO: 80180 - protein, 310 aa, Pseudoramibacter alactolyticus
  misc_feature (1)..(310): tr|E6MEH4|E6MEH4_9FIRM Putative iron-sulfur cluster-bin ding protein OS=Pseudoramibacter alactolyticus ATCC 232 63 OX=887929 GN=HMP0721_0407 PE=4 SV=1
MCKRILAIVDEAQIRALARTLNIPLIGITDPTPLNNFLPRLQARQGANGRTIPFVRTEAEKRIDFRSVMPTVQTVIVIGVPYPLFPERAAVPGEGRIASVACGEDYHRVVGRKMAALVAALKDLSPEPHAFQTYVDNSCLIDKASAWRAGLGFFGKNNLLIHPDYGSAFNIGQILTDLPVAFTKAAPMPCRCGDCDRCLKACPTGALGEGFALDYTRCLSNLTQQKRLLPEEATHIQTFVYGCDYCQWSCPFNRKAATISATQAYGDLEMLSEIAEADFETNFGERSLAWRGAAVLRRNARLVKAKNTKK

SEQ ID NO: 80181 - protein, 382 aa, Pseudorhizobium pelagicum
  misc_feature (1)..(382): tr|A0A081MH13|A0A081MH13_9RHIZ Epoxyqueuosine reductase OS=Pseudorhizobium pelagicum OX=1509405 GN=queG PE=3 S V=1
MSPPQPDRRRQEKLTAFIKAEAAAQGFDLCRITHAGSIPEATARLDTFLADGHHGTMGWMEETRDRRGSPTALWPEARSVVMFGLNYGPDEDPRALQAKPSQGAISVYARNRDYHDVIKGRLKEIATRFAARAGEDVKVFVDTAPVMEKPLAEAAGLGWQGKHTNLLSRSHGSWLFLGSLFTTADLILDAPEVDHCGSCRACLDACPTNAFPAPYRLDARRCISYLTIEHKGPIDPDLRPLIGNRIYGCDDCLAACPWNKFAVSASEMKLKARDDLKEPSLAFLLGLDDAAFRSFFSGSPVKRIGRDRFIRNVLMAAGNSADPKLIAPCLALAGDASPMVRGMAIWALKQLMQAEEFERFATSAQGEHDPEVLDEWRLAGAL

SEQ ID NO: 80182 - protein, 340 aa, Pseudorhodobacter antarcticus
  misc_feature (1)..(340): tr|A0A1H8E2F1|A0A1H8E2F1_9RHOB Epoxyqueuosine reductase OS=Pseudorhodobacter antarcticus OX=1077947 GN=SAMN052 16227_100812 PE=4 SV=1
MQAFRDTLHARALTEGFAAMGICAPDATPHTPDRLAQFVDLGRHGQMGWMAERMAWRGSAAALWPDARSVIMLAEPYTPPENPLPVLALRDRAAVSVYAQGRDYHDLVKKRLKRLGRWVVDQTGAEIKVFVDTAPVMEKPLAQAAGLGWQGKHTNLLSRDLGNWFFLGAIFTTLDLPRDGPETSHCGNCTACLDICPTNAFPAPYQLDARRCISYLTIEHAGPVDLELRALMGNRIYGCDDCLAICPWNKFAVAASEIGYARRVGAPPLADLASLDDAAFRTRFSGSPIKRIGRNRFIRNVLYAIGNSGNPSLRTAAAPHLIDPDDTVADAARWAIARLS

SEQ ID NO: 80183 - protein, 384 aa, Pseudorhodobacter sp.
  misc_feature (1)..(384): tr|A0A5C7TJA8|A0A5C7TJA8_9RHOB Epoxyqueuosine reductase OS=Pseudorhodobacter sp. OX=1934400 GN=queG PE=3 SV=1
MTAAELAQLAHDIKLWARELGFDQVGIADTDLTLEEPKLQAWLDAGYHGTMDYMARHGMMRARPHELLPGTLRVISVRMNYLPFEAGFAATLRDPTLGYISRYALGRDYHKVLRNRLKQLGERIELRCDTLLRAAGQTLGEWRPFVDSAPILERPLAAKAGLGWVGKHSLLINESAGSFFFLGELLIALPLPVDAPVEKELCGKCVACINICPTGAIIAPYVVDGRRCISYLTIENDGPIPEEFRPLMGNRIYGCDDCQLICPWNRYANASPEPDFSPRPNLHRPPLLTLWGWSEAEFLKHTEGSPIRRIGYQRWRRNLAVALGNGPASSEVLAALQQALPEAGPMVAEHIEWALATLARRQQEGTKKTRLLIRCIEKGLPDHA

SEQ ID NO: 80184 - protein, 342 aa, Pseudorhodobacter sp.
  misc_feature (1)..(342): tr|A0A4P8EFI5|A0A4P8EFI5_9RHOB tRNA epoxyqueuosine(34) reductase QueG OS=Pseudorhodobacter sp. S12M18 OX=25005 33 GN=queG PE=4 SV=1
MDAAAFRAVLHDRALAEGFSAMGICAPDATSDTAERLAQYVDLGRHGQMGWMAERMGWRGSAAALWPEARSVIMLAEVYTPPENPLPVLELRDQAAVSVYAQGRDYHDLVKKRLKRLGRWMVDQTGAQIKVFVDTAPVMEKPLAQAAGLGWQGKHTNLLSRDLGNWFFLGSIFTTMELPRDAPETSHCGNCTACLDICPTKAFPAPYQLDARRCISYLTIEHNGPIDPDLRPLLGNRIYGCDDCLAICPWNKFAVTASENGYAHRVGAPPLAELVALDDASFRTRFSGSPVKRIGRNRFIRNVLYAIGNSGNPTLREAAQPLLADPDATVADAAAWAIARLS

SEQ ID NO: 80185 - protein, 360 aa, Pseudorhodoferax soli
  misc_feature (1)..(360): tr|A0A368XAQ8|A0A368XAQ8_9BURK Epoxyqueuosine reductase OS=Pseudorhodoferax soli OX=545864 GN=queG PE=3 SV=1
MVQIDALRLVSQIRDWASALGFSQIGIAPVDLSSAEPGFAAWLAAGFHGEMAYMAHHGMKRARPAELVAGTLSVLTARMDYLPQDTPPDWQAQEFARLERPGEAIVSVYARGRDYHKVLRARLQKLAERIAEAVGPLGFRVFTDSAPVLEAELAARSGQGWRGKHTLVLNREGGSMFFLGEIYLDIALPPSAPVSAHCGQCQACIDVCPTGAIVGPQRLDARRCISYLTIEHAGPIPLPLRHLLANRIYGCDDCQLACPWNKFAGRAALPDFDAREGLAGSALATLFGWSEDEFLRRTEGSPIRRIGHERWLRNIAVALGNALRQAPADERAPLRTALQTHAAHASALVREHVAWALAQG

SEQ ID NO: 80186 - protein, 357 aa, Pseudorhodoferax sp.
  misc_feature (1)..(357): tr|A0A0S9M3H7|A0A0S9M3H7_9BURK Epoxyqueuosine reductase OS=Pseudorhodoferax sp. Leaf265 OX=1736315 GN=queG PE= 3 SV=1
MDALRLVSRIRDWASALGFSQIGIAPVDLSSAEPGFAAWLAAGFHGEMDYMARHGMKRARPAELVVGTLSVLTARMDYLPQDTPPDWQAAEFARLARPGEAIVSVYARGRDYHKVLRTRLQKLAERIAQEVGPLGSRVFTDSAPVLEAELAARSGQGWRGKHTLVLNRTGGSMFFLGEIYLDIALPVSAPVTAHCGECQACIDVCPTGAIVGPQRLDARRCISYLTIEHAGPIPLPLRPLLANRIYGCDDCQLACPWNKFAGRAALPDFDARDGLAGSALAALFGWSEDEFLRRTEGSAIRRIGHERWLRNIAVALGNALRQAPADERAPLRAALQARAGHASALVREHVAWALAQG

SEQ ID NO: 80187 - protein, 358 aa, Pseudorhodoferax sp.
  misc_feature (1)..(358): tr|A0A0S9NXP1|A0A0S9NXP1_9BURK Epoxyqueuosine reductase OS=Pseudorhodoferax sp. Leaf274 OX=1736318 GN=queG PE= 3 SV=1
MDALRLVSHIRDWASALGFSQIGIAPVDLSSAEPGFAAWLAAGFHGEMAYMAAHGMKRARPAELVQGTLSVLTARMDYLPQDTPADWQAREFARLERPTEAIVSVYARGRDYHKVLRARLQKLAERIAQEVGPLGFRVFTDSAPVLEAELAARSGQGWRGKHTLVLNREGGSMFFLGEIYLDIALPASDAVTAHCGQCQACIDICPTGAIVGPQRLDARRCISYLTIEHAGPIPLPLRHLLANRIYGCDDCQLACPWNKFAGRSALPDFDAREGLAGSALATLFGWSEDEFLRRTEGSPIRRIGHERWLRNIAVALGNALRQLPAGEQAPLRAALQARAGHASALVREHVDWALAQQG

SEQ ID NO: 80188 - protein, 360 aa, Pseudoruegeria aquimaris
  misc_feature (1)..(360): tr|A0A1Y5TDL2|A0A1Y5TDL2_9RHOB Epoxyqueuosine reductase OS=Pseudoruegeria aquimaris OX=393663 GN=queG PE=3 SV= 1
MDGLKQRLVAQALAEGFSACRVTHPGAVPEIAERLERFVEAGRHGQMGWMAERMHWRGNPAALWPEARSVIMLAEAYTPQEDPLALLEARDRAAISVYARNRDYHDIVKKRLKRVGRWLLEQRPGEEIKVFVDTAPVMEKPLAAAAGLGWQGKHTNLLSRDLGNWFFLGAIFTTIELPPDAAARPSCGSCRACLDACPTEAFPAPFQLDARRCISYLTIEHDGPVDEDLRARMGNRIYGCDDCLAVCPWNKFAVQAREMRYAARPELLEPKLADLAELDDGAFRALFSGSPIKRIGRNRFIRNVLYAIGNSGDISLRAKAEALCADPDATVADAARWAVARLSNEGSEKSSGVVNGPAKA

SEQ ID NO: 80189 - protein, 342 aa, Pseudoruegeria haliotis
  misc_feature (1)..(342): tr|A0A2T0RTL3|A0A2T0RTL3_9RHOB Epoxyqueuosine reductase OS=Pseudoruegeria haliotis OX=1280846 GN=queG PE=3 SV= 1
MDGLRARLEAQARAEGFVAMGVCRPDSIGHVPEALSTFVAEGYHGQMEWMADRMAWRGDPVALWPEARSVIVLAESYSPDDDPRDGLEQRNCGNISVYARGKDYHDLVKKRLKRLARWLIAEAGGEVKVFVDTAPVAEKPLAQAAGLGWQGKHTNLVSRDMGNWVFLGSIFTTLELPTDPAEVDHCGSCRSCLDVCPTAAFVAPYRMDARRCISYLTIEHKGQIPEDLREGLGNRIYGCDDCLAACPWNKFAVAASDMRYAARDGTLAPPLAELAALDDRAFRERFAGSPIKRIGRNRFVRNVLYAIGNSGAPALIATAKPLLDDPDPAVADAAQWAIDRLS

SEQ ID NO: 80190 - protein, 345 aa, Pseudoruegeria lutimaris
  misc_feature (1)..(345): tr|A0A1G8R9V0|A0A1G8R9V0_9RHOB Epoxyqueuosine reductase OS=Pseudoruegeria lutimaris OX=571298 GN=queG PE=3 SV= 1
MTRLRDRLERQAVAEGFSLMRICRPDAIAHVPGELAEFVERGFHGQMDWMTERMAWRGDPSALWPEARSIILLAESYSPEEDPEANIANPELATVSVYARGKDYHDLVKKRLKRLARWLIAEGGGEVKVFVDTAPVAEKPLGQAAGLGWQGKHTNLVSRDLGNWFFIGSVFSTLELEPDEPEQDHCGSCRACLDACPTEAFVAPYRMDARRCISYLTIEHHGPVDPELRARMGNRIYGCDACLAACPWNKFAVEASDLRYAARGDLAAPPLAELAQLDDSAFRARFSGSPIKRIGRNRFVRNVLYAIGNSGQPGFRAIVENLCEDPDSTVADAANWALSRLPGVS

SEQ ID NO: 80191 - protein, 354 aa, Pseudoruegeria sp.
  misc_feature (1)..(354): tr|A0A1X4IVS3|A0A1X4IVS3_9RHOB Epoxyqueuosine reductase OS=Pseudoruegeria sp. SK021 OX=1933035 GN=queG PE=3 SV =1
MTLTEGTDGAALKSALIAQARTEGFAKTGICRPDAVPELAARLAAFIAQDRHGQMGWMAERTGWRGDPAALWPQARSVIMLAEPYTPAEDPLAVLDQPSCGAISVYARNRDYHDLVKKRLKRVGRWLIEQAPGAEIKVFVDTAPVMEKPLAAAAGLGWQGKHTNLLGRDLGNWFFLGAIFTTLDLPTDAPGVESCGSCTACLDVCPTGAFPAPFQLDARRCVSYLTIEHAGPVDLELRPRLGNRIYGCDDCLAVCPWNKFAVAATEMRYAAREDLTAPHLSLLCGLDDAAFRAMFSGSPIKRIGRNRFVRNVLYAIGNSADQGLVSTARARLEDDDPTVRDAAEWAVARLREPT

SEQ ID NO: 80192 - protein, 311 aa, Pseudosphingobacterium domesticum
  misc_feature (1)..(311): tr|A0A1H7IKX3|A0A1H7IKX3_9SPHI Epoxyqueuosine reductase OS=Pseudosphingobacterium domesticum OX=407022 GN=queG PE=3 SV=1
MQSAAASYSKLIKDEAKRLGFSFCGIAEATFLEDEAPRLETWLKGQMHGEMHYMENHFDKRLDPRLLVDGAKSVISLGFNYYNSDLQSDKESPKISKYAYGMDYHTVIKDRLKLLLAYIQTEIGEVGGRAFVDSAPVLERAWAKKSGLGWVGKNGNLINKKHGSFFFLCELIIDLPLAYDIPPTKDYCGTCTKCIDACPTEAIVAPQIVNGSKCISYLTIELKNEIPQEFAGKMDNWMFGCDVCQDVCPWNRFSEPHKEEAFHPHPDLLDMKQRDWEEITEETFQRVFKKSAVKRAKFAGLTRNIKFLKNS

SEQ ID NO: 80193 - protein, 366 aa, Pseudospirillum japonicum
  misc_feature (1)..(366): tr|A0A1H6QRS7|A0A1H6QRS7_9GAMM Epoxyqueuosine reductase OS=Pseudospirillum japonicum OX=64971 GN=queG PE=3 SV= 1
MPTQAELATLADFAKHTARDLGFSACGITDTHIPAETLHQYQAWLDAGYHGEMDYLERNIDKRAEPARLVEGSTRIICVRMDYLPAQVDTLKVLQQGERAYISRYALGRDYHKLIRKRLTQLGQALQQKAADLGFRAFVDSAPVLERPLAQQAGLGWIGKNTLVIHPRAGSLFFLGELFISLPLPIDTPYTREHCGQCDACQRLCPTQAFVAPYVLDARRCISYLTIEYSGSIPLALRPLIGNRIFGCDDCQLVCPWNRFSQPTQETDFSPRHHLDRAHLLDLLAWTQEEFLTRTQGSPIRRAGYRQWQRNLAIALGNAPYHLEIYQALAHQCHQHQEDALLLEHFTWALQQQTNKQATFIEVQAV

SEQ ID NO: 80194 - protein, 379 aa, Pseudovibrio axinellae
  misc_feature (1)..(379): tr|A0A165YYY5|A0A165YYY5_9RHOB Epoxyqueuosine reductase OS=Pseudovibrio axinellae OX=989403 GN=queG PE=3 SV=1
MTDKQAARVKAELIKRARAIGFDDVRVTTADAIPLAPERLHHFIEQGYHATMEWMPETEVRRSSPLELWPEARSVIMLAMNYGPDVDPMEMREKPDKAHISVYARNRDYHDIIKGKMKELASLLVSKGGGDVKVFVDTAPVMEKPLAHSAGLGWQGKHSNLVSRELGSWFFLGSIFSTLDLPLDEPEVDHCGNCKRCLTVCPTSAFPSAYQVDANRCISYLTIEHHGPIPMEFRRNMGNRIYGCDDCLAVCPWNKFAQSASEAKLQAREDLLEPALTDLLKLDDAAFRSFFSGNPVKRIGRNRFIRNCLIAAGNSSDAQLLPQVVEHLQDDDETVRATAVWALSQLVPSAAFEEHKSAALADEQSELVKVEWETVSHES

SEQ ID NO: 80195 - protein, 378 aa, Pseudovibrio denitrificans
  misc_feature (1)..(378): tr|A0A1I7B6D0|A0A1I7B6D0_9RHOB Epoxyqueuosine reductase OS=Pseudovibrio denitrificans OX=258256 GN=queG PE=3 S V=1
MTEKQAARVKADLIKRARAIGFDDIRITTADAIPLAPERLHHFIEQGYHATMEWMPETELRRSSPLELWPEARSVIMLAMNYGPDIDPMEMREKPDKAHISVYARNRDYHDIMKGKMKELASLLVSKGGGDVKVFVDTAPVMEKPLAYSAGLGWQGKHSNLVSRELGSWFFLAAIFSTLDLPLDEPEVDHCGNCKRCLTVCPTKAFPAPYQVDANRCISYLTIEHHGPIPLEFRKPIGNRIYGCDDCLSVCPWNKFAQSASEAKLQAREDLMEPALADLLQMDDPSFRKFFSGSPVKRIGRNRFIRNCLIAAGNSAEEKLIPRVLEHLQDEDETVRATAVWALAQLVSEADFEMHKSAVIADEPSEVVRAEWEQGTSS

SEQ ID NO: 80196 - protein, 378 aa, Pseudovibrio sp.
  misc_feature (1)..(378): tr|G8PNU4|G8PNU4_PSEUV Epoxyqueuosine reductase OS=Pseu dovibrio sp. (strain FO-BEG1) OX=911045 GN=queG PE=3 SV =1
MTEKQAARVKADLIKRARAIGFDDIRITTADAIPLAPERLHHFIEQGYHATMEWMPETEVRRSSPLELWPEARSVVMLAMNYGPDIDPMEMREKPDKAHISVYARNRDYHDIMKGKMKELASLLVSKGGGDVKVFVDTAPVMEKPLAYSAGLGWQGKHSNLVSRELGSWFFLAAIFSTLDLPLDEPEVDHCGNCKRCLTVCPTKAFPAPYQVDANRCISYLTIEHHGPIPLEFRKPMGNRIYGCDDCLSVCPWNKFAQSASEAKLQAREELMEPALADLLQMDDPTFRKFFSGSPVKRIGRNRFIRNCLIAAGNSAEEKLIPCVLEHLRDEDETVRATAVWALAQLVSEADFEMHKSAAFKNEQSEVVRTEWEQGTSS

SEQ ID NO: 80197 - protein, 378 aa, Pseudovibrio sp.
  misc_feature (1)..(378): tr|A0A166EI88|A0A166EI88_9RHOB Epoxyqueuosine reductase OS=Pseudovibrio sp. WM33 OX=1735585 GN=queG PE=3 SV=1
MTEKQAARVKADLIKRARAVGFDDIRITTADAIPLAPERLHHFIEQGYHATMEWMPETEVRRSSPLELWPEARSVVMLAMNYGPDIDPMEMRDKPDKAHISVYARNRDYHDIVKGKMKELASLLVSKGGGDVKVFVDTAPVMEKPLAHSAGLGWQGKHSNLVSRELGSWFFLGAIFSTLDLPLDEPEVDHCGNCKRCLTVCPTKAFPAPYQVDANRCISYLTIEHHGPIPLEFRKPIGNRIYGCDDCLSVCPWNKFAQSASEAKLQAREDLMEPALAELLQMDDPTFRKFFSGSPVKRIGRNRFIRNCLIAAGNSAEEKLIPNVLNHLRDEDETVRASAVWALAQLVSTTDFEKHKRALLVGETSGVVKAEWEQGTSS

SEQ ID NO: 80198 - protein, 364 aa, Pseudoxanthobacter soli
  misc_feature (1)..(364): tr|A0A1M7ZD03|A0A1M7ZD03_9RHIZ Epoxyqueuosine reductase OS=Pseudoxanthobacter soli DSM 19599 OX=1123029 GN=SAM N02745172_01149 PE=4 SV=1
MLARAAELGFDDCRIARPGDAALRATRLEAFLDAGRHGTMDWLAEAPERRADPRRLWPDVASVIMLGLNYGPAPDAWAARDDAGAGLISVYARNRDYHDVIKGRLKMLGQSLVARAGGEIKVFVDTAPVMEKPLAAEAGLGWQGKHTNLVSRRFGSWLFLGAVFTTLDIAPDAPERDHCGSCRACLDACPTAAFPAPYQIDARRCVSYLTIEHKGPIPVDLRPGIGNRIYGCDDCLAACPWNKFAEAGRETKLAARDDLAAPRLADLAALDDAGFRALFSGSPIKRIGRDRFVRNVLVAIGNSGDEALLPAVTARLDDGAPVVRGAAAWALGRLAPETFAAERDRRLAGEADPETRTEWLTPPR

SEQ ID NO: 80199 - protein, 363 aa, Pseudoxanthomonas composti
  misc_feature (1)..(363): tr|A0A4Q1JUT2|A0A4Q1JUT2_9GAMM Epoxyqueuosine reductase OS=Pseudoxanthomonas composti OX=2137479 GN=queG PE=3 SV=1
MQAHVPAPAAAVPDYAAMARRLRMLAQDFGFQRFGITGIDLAQDEAHLQRWLDEGLHGTMEWMARHGDKRARPDALIPGTLRVISVGLDYGRNDSDEAWQTLADGRRAYVARYALGRDYHKLMRNRLQKLAERMQAEVGAFGHRVFVDSAPVLERALARNAGLGWIGKHTCLIDRDGGSWFFLGEIYVDIPLPVDVPATAHCGSCVRCIEVCPTQAIVAPHRLDARRCIAYLTIEHEGAIPVEMRVPIGNRIFGCDDCQLVCPWNKFAKRSDEPDFRARNDLDVATLPQLFAWDEDEFLRRTEGSPIRRSGHERWLRNIAVALGNAPRTPEVMQALASRRDHPSALVREHVAWAITQQDTERA

SEQ ID NO: 80200 - protein, 362 aa, Pseudoxanthomonas dokdonensis
  misc_feature (1)..(362): tr|A0A0R0CR71|A0A0R0CR71_9GAMM Epoxyqueuosine reductase OS=Pseudoxanthomonas dokdonensis OX=344882 GN=queG PE= 3 SV=1
MSEMVAATRPLPPPQLQALAQRVRGLAREFGFQRCGISDINLSQDEAHLQDWLANGLYGSMHWMAQHGSKRSRPAELIPGTLRVISVGLDYGRNDGDEAWQTLADGQRAYVARYALGRDYHKLMRNRLQQLASRIQQEVGSFGHRVFVDSAPVLERALARNAGLGWIGKHTCLIDKDGGSWFFLGEIYVDLPLPVDAPASAHCGSCVRCIDICPTAAIIAPHRLDARRCISYLTIEHDGSIPEALRKPIGNRIFGCDDCQLVCPWNKFAKRNDEPDFRARNDLDVATLPQLFAWEEDEFLRRTEGSAIRRSGHERWLRNIAVALGNAPGRPDILQALASRRDHPSPLVREHVAWALRQHGVS

SEQ ID NO: 80201 - protein, 363 aa, Pseudoxanthomonas indica
  misc_feature (1)..(363): tr|A0A1T5J187|A0A1T5J187_9GAMM Epoxyqueuosine reductase OS=Pseudoxanthomonas indica OX=428993 GN=queG PE=3 SV= 1
MSPALATTIDYTALAARVRALAAEFGFQRCGIADIELGADEDHLRDWLTQGLYGSMDWMARHGDLRSRPHELLPGTLRVISVGLDYGRNDGDEAWQTLADGSRAYVARYALGRDYHKLMRNRLQKLADRLQQEVGAFGHRVFVDSAPVLERALARNAGLGWIGKHTCLIDKDGGSWFFLGEIYVDLPLPVDAPASAHCGTCTRCIDICPTQAITAPYRLDARRCISYLTIEHAGSIPEELRVPIGNRIFGCDDCQLVCPWNKFAQRTDEPDFRARNDLDTATLPQLFAWDEAEFLRRTEGSAIRRSGHERWLRNIAVALGNAPTTPEVQAALASRRDDPSDIVREHVAWAIAQHEQRARQEKL

SEQ ID NO: 80202 - protein, 359 aa, Pseudoxanthomonas sp.
  misc_feature (1)..(359): tr|A0A543DTZ9|A0A543DTZ9_9GAMM Epoxyqueuosine reductase OS=Pseudoxanthomonas sp. 3HH-4 OX=1690214 GN=queG PE=3 SV=1
MFPPGPTTSAPDPHTLALRVRALAREFGFQRCGIAGIELGDDEQHLRDWLAQGLYGSMAWMAHHGDKRARPQELIPGTLRVISVGLDYGRNDSDDAWDTLQDGTRAYVARYALGRDYHKLMRNRLQKLAERLQQEVGAFGHRVFVDSAPVLERALARNAGLGWIGKHTCLIDRDGGSWFFLGEIYVDLALPVDAPASAHCGTCTRCIDVCPTQAITAPYRLDARRCISYLTIEHDGAIPEDLRPAIGNRIFGCDDCQLVCPWNKFAKRTDEPDFRARNDLDVATLPQLFAWDGDEFLRRTEGSAIRRSGHERWLRNIAVALGNAPATPDVLAALESRREDPSPLVREHVAWALHRHRSL

SEQ ID NO: 80203 - protein, 362 aa, Pseudoxanthomonas sp.
  misc_feature (1)..(362): tr|A0A3R8MM41|A0A3R8MM41_9GAMM Epoxyqueuosine reductase OS=Pseudoxanthomonas sp. SGD-10 OX=2493089 GN=queG PE= 3 SV=1
MSPTPPASPAQPAAIDLVAAARRVRELAREHGFQRCGISGVDLAEDEAHLRDWLAQGLYGTMDWMARHGTARSRPRELVPGTVRVVSVGLDYGQDGDQAWATLADGRRAYVARYALGRDYHKLMRNRLQKLAERLQREFGAFGYRVFVDSAPVLERALGRNAGLGWIGKHTCLIDKDGGSWFFLGEIYLDLPLPVDPPASAHCGTCSRCIPACPTGAITAPYRLDARRCISYLTIEHDGPIPEELRPAIGNRIFGCDDCQLVCPWNKFARRTDEPDFRARNNLDQATLAELFAWEEEEFLRRTEGSAIRRSGHERWLRNIAVALGNAPTTPEVVAALESRREHPSQLVREHVAWALERHRGA

SEQ ID NO: 80204 - protein, 356 aa, Pseudoxanthomonas spadix
  misc_feature (1)..(356): tr|A0A3M6Q124|A0A3M6Q124_9GAMM Epoxyqueuosine reductase OS=Pseudoxanthomonas spadix OX=415229 GN=queG PE=3 SV= 1
MSACSATPIDLHALAAQARTLSRQLGFQRCGITGVELGQDQEHLRSWLAEGLYGSMDWMARHADMRSRPAELIPGTLRVISVGLDYGHDDSSQAWATLANGERAYVARYALGRDYHKLMRKRLQTLATRLQEQVGPMGHRVFVDSAPVLERALARNAGLGWIGKHTCLIDRHGGSWFFLGEIYVDIPLPVDTPASAHCGSCVRCIDVCPTQAIIAPHRLDARRCIAYLTIEHEGPIPIELRKPIGNRIFGCDDCQLVCPWNKFARRTDEPDFRARNDLDVATLPQLFAWDEAEFLTRTEGSAIRRSGHQRWLRNIAVALGNAPSSPAVLQALASRRDDASPLVREHVAWALAQHEA

SEQ ID NO: 80205 - protein, 356 aa, Pseudoxanthomonas spadix
  misc_feature (1)..(356): tr|G7USF6|G7USF6_PSEUP Epoxyqueuosine reductase OS=Pseu doxanthomonas spadix (strain BD-a59) OX=1045855 GN=queG PE=3 SV=1
MSACSATPIDLHALAAQVRALSRELGFQRCGITGVELGQDQEHLRSWLAEGLYGSMDWMARHGDMRSRPAELIPGTLRVISVGLDYGHDDSSQAWATLANGERAYVARYALGRDYHKLMRGRLQKLAMRLQEQVGPIGHRVFVDSAPVLERALARNAGLGWIGKHTCLIDRHGGSWFFLGEIYVDIPLPVDTPASAHCGSCVRCIDVCPTQAIIAPHRLDARRCIAYLTIEHEGPIPIELRKPIGNRIFGCDDCQLVCPWNKFARRTDEPDFRARNDLDVATLPQLFAWDEAEFLTRTEGSPIRRSGHQRWLRNIAVALGNAPSSPAVLEALASRREDDSALVREHVGWALAQHEA

SEQ ID NO: 80206 - protein, 359 aa, Pseudoxanthomonas suwonensis
  misc_feature (1)..(359): tr|A0A2W4YBR1|A0A2W4YBR1_9GAMM Epoxyqueuosine reductase OS=Pseudoxanthomonas suwonensis OX=314722 GN=queG PE=3 SV=1
MSAASSPHVDVASLAVRIKSLARRLGFQRCGISGIDLSEDEGHLRDWLAQGLYGSMDWMARHGDKRARPQELVPGTIRVISVGLDYGQDDDQAWQTLHDGERAYVARYALGRDYHKRMRQRLQSLADAVADVIGPFGYRAFTDSAPVLERALARNAGLGWIGKHTCLIDKNGGSWFFLGELYVDIPLPIDAPADNHCGTCSRCITVCPTQAITAPYRLDARRCISYLTIEHDGSIPEDLRPLIGNRIFGCDDCQLVCPWNKFARRTDDADFRARNNLDTATLAELFAWSETEFLQRTEGSAIRRSGYRRWLRNIAVALGNAPRTEAVLVALDSRRDDDPVVREHVQWALHMQERRPTRR

SEQ ID NO: 80207 - protein, 370 aa, Pseudoxanthomonas suwonensis
  misc_feature (1)..(370): tr|E6WU96|E6WU96_PSEUU Epoxyqueuosine reductase OS=Pseu doxanthomonas suwonensis (strain 11-1) OX=743721 GN=que G PE=3 SV=1
MAGGSYNRGMSPTLPASPAEPAAIDLVAATRRVRELAREHGFQRCGISGVDLAEDEAHLRDWLAQGLYGTMEWMARHGTARSRPQELVPGTVRVVSVGLDYGQDDEAAWQTLADGRRAYVARYALGRDYHKLMRNRLQKLAERLQQEFGSFGYRVFVDSAPVLERALARNAGLGWIGKHTCLIDRDGGSWFFLGEIYLDLPLPVDPPASAHCGTCSRCIPACPTGAITAPYRVDARRCISYLTIEHDGAIPADLRPAMGNRIFGCDDCQLVCPWNKFARRTDEPDFRARNDLDRATLAQLFAWEEDEFLRRTEGSAIRRSGHERWLRNIAVALGNAPTTPEVIAALESRRGHPSALVREHVAWALERHGR

SEQ ID NO: 80208 - protein, 362 aa, Pseudoxanthomonas taiwanensis; identical to SEQ ID NO: 80203
  misc_feature (1)..(362): tr|A0A562D310|A0A562D310_9GAMM Epoxyqueuosine reductase OS=Pseudoxanthomonas taiwanensis J19 OX=935569 GN=queG PE=3 SV=1

SEQ ID NO: 80209 - protein, 356 aa, Pseudoxanthomonas wuyuanensis
  misc_feature (1)..(356): tr|A0A286D9A6|A0A286D9A6_9GAMM Epoxyqueuosine reductase OS=Pseudoxanthomonas wuyuanensis OX=1073196 GN=queG PE =3 SV=1
MLPVRLPDPAALAHRVRELARALGFQRCGIAGIELGQDEAHLRDWLAKGLYGSMEWMARHGDKRARPDELIPGTLRVISVGLDYGRNDSDDAWHTLADGERAYVARYALGRDYHKLMRNRLQKLAERIQAEVGPFGHRVFVDSAPVLERALARNAGLGWIGKHTCLIDKDGGSWFFLGEIYVDLPLPIDAPASAHCGTCTRCIEICPTQAITAPYRLDARRCISYLTIEHEGAIPEDLRPAIGNRIFGCDDCQLICPWNKFAKRTDEADFRARNDLDTATLPQLFAWSEDEFLQRTEGSAIRRSGYERWLRNIAVALGNAPATPAVLEALASRRDHESAVVREHVAWALQRHASNT

SEQ ID NO: 80210 - protein, 308 aa, Pseudozobellia sp.
  misc_feature (1)..(308): tr|A0A2E5BBW4|A0A2E5BBW4_9FLAO Epoxyqueuosine reductase OS=Pseudozobellia sp. OX=2024854 GN=queG PE=3 SV=1
  misc_feature (212)..(212): Xaa can be any naturally occurring amino acid
MVYNKSRYCDLIKQEAARLGFLSCGISKAEFLEAEAPRLEKWLNNQMHGEMGYMANHFDKRLDPRLLVDGAKSVISLLLNYYPEEEQKSSTYKISKYAYGQDYHHVIKSKLRELHNFIVEEIGEVNGRAFVDSAPVLDKAWAAKSGLGWIGKNSNLLTQQVGSFYFIAELIVDLELDYDTPVTDHCGTCTACIDACPTNAIVEPYVVDGSKXISYFTIELKNEIPNEFQGKFDDWAFGCDVCQDVCPWNRFSKPHREPLFDPHPDLLNMSKKDWEEMTEDVFKKVFKKSAVKRTKFSGLKRNIDFLKK

SEQ ID NO: 80211 - protein, 306 aa, Pseudozobellia sp.
  misc_feature (1)..(306): tr|A0A3B0C693|A0A3B0C693_9FLAO Epoxyqueuosine reductase OS=Pseudozobellia sp. CCMM003 OX=2419782 GN=queG PE=3 SV=1
MHGKGRHTVLIKEEAKRLGFLSCGISKAAFLEEEAPRLEKWLKNSMHGEMHYMENHFDKRLDPTKLVDGAKSVISLLLNYYPSESQIQDTFKVSKYAYGMDYHFVIKEKLKNLLQFIQEEIGEVHGRAFVDSAPVLDKAWAAKSGLGWMGKHSNLLTQKVGSFYFIAELIVDLELDYDAPVTDHCGSCTACIDACPTEAIVEPYVVDGSKCISYFTIELKNEIPTSVKDQFEDWIFGCDVCQDVCPWNRFSKSHDEPLFHPKPELLSMTKKDWEEITEDVFRKVFQKSAVKRTKFSGLKRNINFIK

SEQ ID NO: 80212 - protein, 306 aa, Pseudozobellia thermophila
  misc_feature (1)..(306): tr|A0A1M6KJG8|A0A1M6KJG8_9FLAO Epoxyqueuosine reductase OS=Pseudozobellia thermophila OX=192903 GN=queG PE=3 S V=1
MNKKADYSKLIKDEAKRLGFLSCGISKADFLEEEAPRLETWLKKGMHGEMGYMENHFDKRLDPRLLVDGAQSVISLLLNYYPEKKQDEGSYKISKYAYGQDYHHVIKSKLRQLQEFISSEIGEVNGRAFVDSAPVLDKAWAAKSGLGWVGKNSNLITQKVGSFYFIAELIVDLELAYDTPVTDHCGTCTACIDACPTQAIVEPYVVDGSKCISYFTIELKNEIPEDYRGKFDDWAFGCDVCQDVCPWNRFSKPHSEPLFDPHPDLLDMTRQDWEEITEEVFRKVFKKSAVKRTKYTGLKRNIDFLK

SEQ ID NO: 80213 - protein, 379 aa, Psychrobacillus insolitus
  misc_feature (1)..(379): tr|A0A2W7PCW2|A0A2W7PCW2_9BACI Epoxyqueuosine reductase OS=Psychrobacillus insolitus OX=1461 GN=C7437_103230 P E=4 SV=1
MNINQFQNNLIEYAASIGIDKIGFTSASPFHELKNRLVRQQELGYASGFEESDIEKRTHPELLLSEAESIIAIAIAYPSKMKDAPSSTKGARRGIFARASWGMDYHTVLREKLALLELFILTHIPDAKLRSMVDTGELSDRAVAERAGIGWSAKNCAVITPEFGSYVYLGEMVTSIPFAPSEQMEDQCGDCRLCLDICPTGALIEGGQLNAQRCIAFITQTKTMVPDEFRAKIGNRIYGCDTCQTICPKNKAKANLHQEAFKPDPELVKPLLIPLLSMTNRSFKETYGHMSGAWRGKNPIQRNAIIALAHFKEASAVPTLIKLMENDARPVIRGTAAWAIGKINTEEGLVALKKAEQTEEVQEVLEEIRKGLLFYTLEK

SEQ ID NO: 80214 - protein, 379 aa, Psychrobacillus lasiicapitis
  misc_feature (1)..(379): tr|A0A544SV85|A0A544SV85_9BACI tRNA epoxyqueuosine(34) reductase QueG OS=Psychrobacillus lasiicapitis OX=16367 19 GN=queG PE=4 SV=1
MNINQFQQQLIEYAASIGIDKIGFTSASPFKELKNRLIRQQELGYASGFEESDIEKRAHPELLLSDAESIISIAIAYPSKMKDAPKSIKGARRGIFARASWGTDYHTVLREKLALLELYILTHIPDAKLRSMVDTGELSDRAVAERAGIGWSAKNCAVITPEFGSYVYLGEMITSIPFAPSEQMEDQCGECTLCLDICPTGALIQGGQLNAQRCIAFITQTKTMVPDEFRTKIGNRIYGCDTCQTICPKNKGKANLHQEAFTPDPELVKPLLLPLLNMTNRTFKETYGHMSGAWRGKNPIQRNAILALAHFKEVSAVPTLIELMEKDARPVIRGTAAWAIGKINTEEGLTALKKAEQNEKVEEVLAEIRKGLEFYTIEK

SEQ ID NO: 80215 - protein, 379 aa, Psychrobacillus psychrodurans
  misc_feature (1)..(379): tr|A0A1I4WN55|A0A1I4WN55_9BACI Epoxyqueuosine reductase OS=Psychrobacillus psychrodurans OX=126157 GN=SAMN0542 1832_11684 PE=4 SV=1
MNIIQFQQNLIDYAASIGIDKIGFTSVSPFHELKNRLIRQQELGYASGFEESNIEKRVHPKMLLEESSSIISIAIAYPSKMKDAPQSVKGARRGIFARASWGIDYHTVLREKLALLELYILTHIPDAKLRSMVDTGELSDRAVAERAGIGWSAKNCSIITPEFGSYVYLGEMITSIPFAPSEQMEEQCGDCRLCLDVCPTGALIQGGQLNAQRCIAFITQTKTMVPDEFRTKIGNRIYGCDTCQTVCPKNKGKANLHQESFKPDPELVKPLLLPLLKMTNRTFKETYGHMSGAWRGKNPIQRNAIIALAHFKEQEAVPTLIDLMQNDARPVIRGTAAWAIGKINSKEGLLALKKAEQHEQVEEVLKEIRKGLEYYTIEN

SEQ ID NO: 80216 - protein, 379 aa, Psychrobacillus psychrotolerans
  misc_feature (1)..(379): tr|A0A1I6B7S4|A0A1I6B7S4_9BACI Epoxyqueuosine reductase OS=Psychrobacillus psychrotolerans OX=126156 GN=SAMN05 421670_0227 PE=4 SV=1
MNIIQFQENLIDYAASIGIDKIGFTSVSPFHELKNRLIRQQELGYASGFEEPDIEKRVHPENLSEEASSIISIAIAYPSKMKDAPQSVKGARRGIFARASWGIDYHTVLREKLALLELYILSHIPDAKLRSMVDTGELSDRAVAERAGIGWSAKNCAIITPEFGSYVYLGEMITSIPFESSEQMEDQCGDCRLCLDVCPTGALIEGGQLNAQRCIAFITQTKTMVPDEFRAKIGNRIYGCDTCQTVCPKNKGKANLHQESFKPEPELVKPLLLPLLKMTNRTFKETYGHMSGAWRGKNPIQRNAIIALAHFKEQAAVPTLIDLMQHDARPVIRGTAAWAIGKINTQEGLLALQEAEQSEQVDEVLEEIRKGLEYYTVEN

SEQ ID NO: 80217 - protein, 379 aa, Psychrobacillus soli
  misc_feature (1)..(379): tr|A0A544T0I1|A0A544T0I1_9BACI tRNA epoxyqueuosine(34) reductase QueG OS=Psychrobacillus soli OX=1543965 GN=qu eG PE=4 SV=1
MNINQFQQQLIEYAASIGIDKIGFTSASPFHELKNRLIRQQELGYASGFEEPDIEKRTHPELLLSEAESIIAIAIAYPSKMKNAPQSVKGARRGIFARASWGTDYHTVLREKLALLELYILTHIPNARLRSMVDTGELSDRAVSERAGIGWSAKNCAIITPEFGSYVYLGEMITSIPFAPSEQMEDQCGDCTLCLDICPTGALIQGGQLDAQRCIAFITQTKTMVPDEFRDKIGNRIYGCDTCQTICPKNKGKANLHQEAFTPDPELVKPLLLPLLKMTNRTFKETYGHMSGAWRGKNPIQRNAIIALAHFREASAVPTLIELMENDARLVIRGTAAWAIGKINTDEGLAALKKAEQNEEADEVLEEIRKGLQFYILEN

SEQ ID NO: 80218 - protein, 379 aa, Psychrobacillus sp.
  misc_feature (1)..(379): tr|A0A5J6PP44|A0A5J6PP44_9BACI tRNA epoxyqueuosine(34) reductase QueG OS=Psychrobacillus sp. AK 1817 OX=230350 5 GN=queG PE=4 SV=1
MNINQFQQNLIEYAATIGIDKIGFTTVSPFHELKNRLIRQQELGYASGFEEPDLDKRTHPELLLEEAQSIISIAIAYPSKMKNAPQSVKGARRGIFARASWGIDYHTVLREKLAQLELYILTHIPDARLRSMVDTGELSDRAVAERSGIGWSAKNCSIITPEFGSYVYLGEMISSIPFAPSEQMEDQCGDCSLCLEVCPTGALIEGGQLNAQRCIAFITQTKTMVPDEFRAKIGNRIYGCDTCQTVCPKNKGKANLHQEAFKPDPELVKPLLLPLLSMSNRTFKETYGHMSGSWRGKNPIQRNAIIALAHFKEEAAVPTLIELMLHDARPVIRGTAAWAIGKINTEEGLLALKKAEKTEQEEQVIEEIRKGLAFYTIQN

SEQ ID NO: 80219 - protein, 379 aa, Psychrobacillus sp.
  misc_feature (1)..(379): tr|A0A544TNP6|A0A544TNP6_9BACI tRNA epoxyqueuosine(34) reductase QueG OS=Psychrobacillus sp. Z8 OX=2325572 GN= queG PE=4 SV=1
MNINQFQQQLIEYAATIGIDKIGFTSASPFRELKNRLIRQQELGYASGFEESDINKRTHPELLLSEAESIIAIAIAYPSKMKDAPQSVKGARRGIFARASWGTDYHTVLREKLALLELFILTHIPDARLRSMVDTGELSDRAVAERAGIGWSAKNCSIITPEFGSYVYLGEMITSIPFAPSEQMEDQCGDCTLCLDICPTGALIQGGQLDAQRCIAFVTQTKTIVPDEFRTKIGNRIYGCDTCQTICPKNKGKANMHQSAFKPDPELVKPLLVPLLSMTNRSFKETYGHMSGAWRGKNPIQRNAILALAHFKEVSAVPVLIQLLENDPRPVIRGTAAWAIGKINSEEGLTALKKAEQTEVVEEVLKEINKGLQFYKIEK

SEQ ID NO: 80220 - protein, 405 aa, Psychrobacter alimentarius
  misc_feature (1)..(405): tr|A0A144NJL7|A0A144NJL7_9GAMM Epoxyqueuosine reductase OS=Psychrobacter alimentarius OX=261164 GN=queG PE=3 S V=1
MNHSSKPNLLDASIKQVSANSGASEKKITIKNTPAFTTTADVKHWIKAQAQALGFADCGFLSVHHPLFAQQILQLQQWLDKGYEGQLQFMHNNHHLRANPDQLVEGAKTIISVRMDYLTQTPTPRTVSDNDHPNQGIIARYARGRDYHKTMRSRLKQLALNIETMLPEWQHLNIGSDQDFIFRPFSDSAPIFERPIAEAAGLGWTGKHTLLLNKQAGSFFVLGELFVSLELPDDQPVKAHCGSCSACIDICPTQAIVAPYELNASACISYLTIEHDGIIDHKYRRAIGNRVFGCDDCQLICPWNRYANLTSVDDFAPRHSLDNSSLLELWQWQEADFMKKTEGSPLRRTGYVNFLRNIAIGLGNANGSEATITHLQSKLGKHSDVLDEHIIWAINEQHEKINAAQ

SEQ ID NO: 80221 - protein, 407 aa, Psychrobacter aquaticus
  misc_feature (1)..(407): tr|U4TDC0|U4TDC0_9GAMM Epoxyqueuosine reductase OS=Psyc hrobacter aquaticus CMS 56 OX=1354303 GN=queG PE=3 SV=1
MNNDSQPDLPFLSTKQLSSTPNDASTKKIAITHAPVFATATDVKQWIKTQAQALGFADCGFLSVHHPLFTQQIVQLQQWLDKGYEGQLQFMHNNHHLRAHPEQLVEGAKTIISVRMDYLTQTPTPRTISDNDHPNQGIIARYARGRDYHKTMRSRLKQLALTIETMLPEWRHLNIGSEKDFIFRPFSDSAPIFERPIAEAAGLGWTGKHTLLINKQAGSFFVLGELFISLELPDDEPVKEHCGSCSACIDICPTQAIVAPYELNASACISYLTIEHDGIIDTKYRHAIGNRVFGCDDCQLICPWNRYANITPVEDFAPRHNLDNSSLLELWQWSEEEFMRKTEGSPLRRTGYVNFLRNITIGLGNANGSQQTIAQLQSKLGVHNEMLDEHITWAIAEQRDKLKMAES

SEQ ID NO: 80222 - protein, 405 aa, Psychrobacter arcticus
  misc_feature (1)..(405): tr|Q4FUC1|Q4FUC1_PSYA2 Epoxyqueuosine reductase OS=Psyc hrobacter arcticus (strain DSM 17307 / 273-4) OX=259536 GN=queG PE=3 SV=1
MSNNSQATLPAQLSSVLTSTSAKKIAINNTHDFATTADIKRWIKAEAQSLGFADCGFLSVHHPLFVKQTEQLKQWLAKGYEAQLQFMHSNHHLRAHPEQLVEGAKTIISVRMDYLTQTPTPRAVTDNDYPNQGIIARYARGRDYHKTMRSRLKQLALKIEAMLPEWRHLDIGADTDFIFRPFSDSAPIFERPIADAAGLGWTGKHTLLINKQAGSFFVLGELFMSLELPDDEPVKEHCGSCSACIDICPTQAIVAPYELNASACISYLTIEHDGIIDTKYRRAIGNRIFGCDDCQLICPWNRYANLTPVEDFAPRHRLDSSSLLELWQWQEAEFMKKTEGSPLRRTGYVNFLRNIAIGLGNATGNKEIIEALQVKLGLHNTMLDEHIDWAIAEQHHKLDILFISK

SEQ ID NO: 80223 - protein, 405 aa, Psychrobacter cryohalolentis
  misc_feature (1)..(405): tr|Q1QDF1|Q1QDF1_PSYCK Epoxyqueuosine reductase OS=Psyc hrobacter cryohalolentis (strain K5) OX=335284 GN=queG PE=3 SV=1
MSNKSQTNSQTQMPSLPTSVSAKKIAINNTHDFTTTTDIKHWIKETAQSLGFADCGFLSVHHPLFVKQTEQLRQWLAKGYQAQLQFMHSNHHLRAHPEQLVEGAKTIISVRMDYLTQTPTPRTVTDNDYPNQGIIARYARGRDYHKTMRSRLKQLALKIEAMLPEWRHLDIGADTDFIFRPFSDSAPIFERPIADAAGLGWTGKHTLLINKQAGSFFVLGELFMSLELPDDEPVKEHCGSCSACIDICPTQAIVAPYELNASACISYLTIEHDGVIDEKYRRAIGNRIFGCDDCQLICPWNRYANLTPVEDFAPRHRLDSSSLLELWQWQEAEFMKKTEGSPLRRTGYVNFLRNIAIGLGNATVNQENIEALQAKLGLHNTMLDEHIDWAVAEQRHKLDILLINN

SEQ ID NO: 80224 - protein, 412 aa, Psychrobacter fozii
  misc_feature (1)..(412): tr|A0A2V4UXF4|A0A2V4UXF4_9GAMM Epoxyqueuosine reductase OS=Psychrobacter fozii OX=198480 GN=queG PE=3 SV=1
MNNSSTPSLPISSTKQVAGQQRAAAIDDTTANKIALNNTSEFSTTADVKQWIKTQAQALGFADCGFLSVHHPLFAKQIVQLQQWLEKGYEGQLQFMHSNHELRANPEQLVDGARTIISVRMDYLTQAPKPRAVTDNDLPNQGIIARYARGRDYHKTMRSRLKQLALKIETMLPEWQHLNIGSERDFIFRPFSDSAPIFERPIADAAGLGWTGKHTLLINKQAGSFFVLGELFISLELPDDQPIKEHCGSCSACIDICPTQAIVAPYELNASACISYLTIEHKGTIDTKYRRAIGNRVFGCDDCQLICPWNRYANITPVEDFAPRHNLDSSSLLELWQWQESDFMKKTEGSPLRRTGYVSFLRNIAIGLGNANASTDTITQLQSKLGVHNEILDEHILWAITEQQDKLKAIES

SEQ ID NO: 80225 - protein, 398 aa, Psychrobacter frigidicola
  misc_feature (1)..(398): tr|A0A5C7A485|A0A5C7A485_9GAMM Epoxyqueuosine reductase OS=Psychrobacter frigidicola OX=45611 GN=queG PE=3 SV= 1
MTIKPTARNSSINLPATNNIAVVNTAMFTTPEDVKYWIKTQAQALGFADCGFLSVHHPLFTQQMKQLQKWLDKGYEGQLQFMHNNHHLRAHPEQLVAGARTIISVRMDYLTEAPQPRTVADNSRPNNGIIARYARGRDYHKTMRSRLKQLALQIEAALPEWQHLDIGNKTDFVFRPFSDSAPIFERPIADAAGLGWTGKHTLLLNKQAGSFFVLGELFISLELPDDKPVEAHCGSCNACIDICPTQAIVAPHELNAAACISYLTIEHKGTIDHKYRRAIGNRVFGCDDCQLICPWNRYAKLTSVDDFAPRHNFDDSSLLKLWQWTEAKFLQNTQGSPLRRTGYVSFLRNITIGLGNADVSTDIIAQLHTRLGVHSDMLDEHIQWAIDEQQSKLSSINK

SEQ ID NO: 80226 - protein, 410 aa, Psychrobacter immobilis
  misc_feature (1)..(410): tr|A0A2V1ZZN5|A0A2V1ZZN5_PSYIM Epoxyqueuosine reductase OS=Psychrobacter immobilis OX=498 GN=queG PE=3 SV=1
MNNLPKANLPISSTQQKSAKQISSEPKPASEKKIKVNNSPIFTTTADVKQWIKDQAQALGFADCGFLSVHHPLFAKQIVQLQQWLEKGYEGQLQFMHNNHELRANPDQLVEGAKTIISVRMDYLTQAPTPRTITDNDYPNQGIIARYARGRDYHKTMRSRLKQLALKIEAMLPEWQHLNIGSEQDFIFRPFSDSAPIFERPIADAAGLGWTGKHTLLINKQAGSFFVLGELFISLELPDDKPVKKHCGSCSACIDICPTQAIVAPYELNASACISYLTIEHDGIIDIKYRRAIGNRIFGCDDCQLICPWNRYANLTPVEDFAPRHNLDSSSLLELWQWQEAEFMKKTEGSPLRRTGYVNFLRNIAIGLGNANGNEETITQLQSKLGVHNEMLDVHINWAIAEQYEKLKNL

SEQ ID NO: 80227 - protein, 387 aa, Psychrobacter pacificensis
  misc_feature (1)..(387): tr|A0A1G6X826|A0A1G6X826_9GAMM Epoxyqueuosine reductase OS=Psychrobacter pacificensis OX=112002 GN=queG PE=3 S V=1
MPTDKNKIAVSNSTVFATTADVKQWIKVQAQTLGFADCGFLSVHHPLFTKQIEQLQKWLDKGYEGQLQFMHNNHHLRAHPEQLVEGAKTIISVRMDYLTKAPTPRAVTDNDHPNQGIIARYARGRDYHKTMRSRLKQLALNIEAMLPEWQHLDIGSDKEFVFRPFSDSAPIFERPIADAAGLGWTGKHTLLINKQAGSFFVLGELFLSLELPDDQPVKEHCGSCSACIDVCPTQAIVAPYELNASACISYLTIEHDGIIDTKYRRAIGNRVFGCDDCQLICPWNRYANLTTVKDFAPRHGLDNSSLLELWQWQEADFLNNTQGSPLRRTGYINFLRNIAIGLGNANASLDVVEQLKSKLTIHNAMLDEHIEWALNEQQKKLKDSTQV

SEQ ID NO: 80228 - protein, 388 aa, Psychrobacter pasteurii
  misc_feature (1)..(388): tr|A0A1R4EEZ0|A0A1R4EEZ0_9GAMM Epoxyqueuosine reductase OS=Psychrobacter pasteurii OX=1945520 GN=queG PE=3 SV= 1
MTASSPPDSNTSQPLSLNPFNDAQDVKNWIHEQALALGFADCGFISVSHPVFEQQMQGLRDWLAEGHHGQLSFLELNHDKRANPGLLVEGTRTIISVRMDYLETPPKPRQIEDNSRPNHAIIARYARGRDYHKTLRSRLKKLAQQIEAMLPQWQHLDVNAEQPFVFRPFSDSAPIFERPLADAAGLGWTGKHTLLINKQSGSFFVLGELFLSLTLPDDSPVTAHCGSCSACIDICPTQAIIGPYRLKADACISYLTIEHDGVIDEKYRKAIGNRVFGCDDCQLICPWNRYAKVSPIDDFLARHNLDNSLLAELWQWSEETFLTKTQGSPIRRTGYNNFLRNLAIGIGNAPYDEINIALLESRLGTLGEVLDEHIQWAISEQRSKAAEK

SEQ ID NO: 80229 - protein, 386 aa, Psychrobacter phenylpyruvicus
  misc_feature (1)..(386): tr|A0A379LNX4|A0A379LNX4_9GAMM Epoxyqueuosine reductase OS=Psychrobacter phenylpyruvicus OX=29432 GN=queG PE=3 SV=1
MPDSTPPDSTPSQSFATNPFNDAQDVKNWIREQALALGFADCGFIGVNHPVFEQQMQGLRDWLAAGYHGQLTFMELNHDKRANPGLLVEGSRTIVSVRMDYLEAAPKPRRIEDNHRPNHAIIARYARGRDYHKTMRSRLKKLAQQIETMLPQWQHLDVNADQPFVFRPFSDSAPIFERPLADAAGLGWTGKHTLLINRQSGSFFVLGELFLSLALPDDSPVSAHCGSCSACIDICPTQAIIGPYKLKADACISYLTIEHDGVIDKKYRRAIGNRVFGCDDCQLICPWNRYAKLSPIDDFLARHKLDDSLLIELWQWSEQTFLDKTQGSPIRRTGYVNFLRNLAIGIGNAPYTADNIIALESRLGTLGDVLDEHIHWAIAEQRAKAS

SEQ ID NO: 80230 - protein, 386 aa, Psychrobacter piechaudii
  misc_feature (1)..(386): tr|A0A1R4GTT8|A0A1R4GTT8_9GAMM Epoxyqueuosine reductase OS=Psychrobacter piechaudii OX=1945521 GN=queG PE=3 SV =1
MPDSTPPDSSAFRSLNPNPFNDAQDVKNWIREQALALGFADCGFIGVNHPVFSQQMQGLRDWLAAGHYGQLNFMELNHDKRANPGLLVEGSRTIISVRMDYLEATPKPRRIEDNHRPNHAIIARYARGRDYHKTMRSRLKQLAQKIETMLPQWQHLDVNADQPFVFRPFSDSAPIFERPLADAAGLGWTGKHTLLLNKQSGSFFVLGELFLSLALPDDSPVTAHCGSCTACIDICPTKAIIGPYKLKADACISYLTIEHDGVIDEKYRRAIGNRVFGCDDCQLICPWNRYAKLSPIDDFLARHNLDDSLLIELWQWSEQIFLDKTQGSPIRRTGYVNFLRNLAIGIGNAPYTADNITALESRLGTLGDVLDEHIRWAITEQLTKAN

SEQ ID NO: 80231 - protein, 389 aa, Psychrobacter piscatorii
  misc_feature (1)..(389): tr|A0A0T6DPD5|A0A0T6DPD5_9GAMM Epoxyqueuosine reductase OS=Psychrobacter piscatorii OX=554343 GN=queG PE=3 SV= 1
MPTDKNKIAVSNSTVFATTADIKQWIKTQAQTLGFADCGFLSVHHPLFTKQIEQLQKWLDKGYEGQLQFMHNNHHLRAHPEQLVDGAKTIISVRMDYLTKAPTPRAVTDNDHPNQGIIARYARGRDYHKTMRSRLKQLALNIEAMLPEWQHLDIGSDKEFVFRPFSDSAPIFERPIADAAGLGWTGKHTLLINKQAGSFFVLGELFLSLELPDDQPVKEHCGSCSACIDVCPTQAIVAPYELNASACISYLTIEHDGIIDTKYRRAIGNRVFGCDDCQLICPWNRYANLTTVEDFAPRHGLDNSNLLELWQWQEADFLNNTQGSPLRRTGYVNFLRNIAIGLGNANASPHVIEQLKSKLTLHNAMLDEHIEWAIAEQGRKLDASSKPTS

SEQ ID NO: 80232 - protein, 411 aa, Psychrobacter sp.
  misc_feature (1)..(411): tr|A0A3D2A2E7|A0A3D2A2E7_9GAMM Epoxyqueuosine reductase OS=Psychrobacter sp. OX=56811 GN=queG PE=3 SV=1
MSTLSKSDLPDTSNGQTAAATPAHLSQVPSKKIDVKSDSPFTSAEDVKRWIKSQAQTLGFGDCGFLSVYHPLFAQQMTQLQQWLAKGYEGQLQFMHNNHHLRAHPDQLVEGAKTIISVRMDYLTQTPTPRTVADNDFPNQGIIARYARGRDYHKTMRSRLKQLALQIEAMLPEWQHLNIGSAQEFVFRPFSDSAPIFERPIADAAGLGWTGKHTLLLNKQAGSFFVLGELFISLELPDDAPVKSHCGSCSACIDVCPTQAIVAPYELNASACISYLTIEHDGIIDEKYRRAIGNRVFGCDDCQLICPWNRYANITTVEDFAPRHSLDNSSLLELWQWQEADFMQKTQGSPLRRTGYVNFLRNIAIALGNANGSQEVITQLQAKLQTHNAMLDEHIHWAIAEQKQKLSDTDA

SEQ ID NO: 80233 - protein, 418 aa, Psychrobacter sp.
  misc_feature (1)..(418): tr|A0A553XZ52|A0A553XZ52_9GAMM Epoxyqueuosine reductase OS=Psychrobacter sp. YGAH215 OX=2596826 GN=queG PE=3 S V=1
MNSKAQPKQLQSTQPDAQTSDAHNLAAQASAPNRVEQARIAVHNASEFATPADVKQWIKTQAQGLGFADCGFLSVHHPLFIEQTEHLKQWLAKGYEGQLQFMHHNHHLRAQPEQLVEGAKTIISVRMDYLTQTPTPRAVTDNAYPNQGIIARYARGRDYHKTMRSRLKQLALKIEAMLPEWQHINIGSEQDFIFRPFSDSAPIFERPIADAAGLGWTGKHTLLINKQAGSFFVLGELFMSLELPDDEPVKEHCGSCSACIDVCPTQAIIAPYELKASACISYLTIEHDGIIDSKYRRAIGNRIFGCDDCQLICPWNRYANITPVEDFSPRHNLDNSSLLELWQWQEAEFMKKTEGSPLRRTGYVNFLRNIAIGLGNADGSTEIITQLQAKLGVHNAMLDDHIHWAIKEQQEKLENLKP

SEQ ID NO: 80234 - protein, 398 aa, Psychrobacter urativorans
  misc_feature (1)..(398): tr|A0A0M5MJY6|A0A0M5MJY6_9GAMM Epoxyqueuosine reductase OS=Psychrobacter urativorans OX=45610 GN=queG PE=3 SV= 1
MNIKLFANRSSTNDSSTNSIAVANTSPFMTPEDVKHWIKTQAQALGFADCGFLSVHHPLFAQQIEQLQKWLAKGYEGQLQFMHNNHHLRAHPEQLVEGAKTIISVRMDYLTQAPTARTVADNNRPNHGIIARYARGRDYHKTMRNRLKQLALNIEAMLPEWQHLDIGTQADFVFRPFSDSAPIFERPIADAAGLGWTGKHTLLLNKQAGSFFVLGELFISLELPDDKPVKAHCGSCSACIDICPTQAIISPHELNAAACISYLTIEHDGIIDKKYRRAIGNRIFGCDDCQLICPWNRYAKLTAVEDFAPRNNLDDSTLLELWQWQEAEFLQKTQGSPIRRTGYVNFLRNIAIGLGNAEASTDIIVQLHSKLSAHNDILDEHIHWAINEQQDKLSKNKE

SEQ ID NO: 80235 - protein, 256 aa, Psychroflexus gondwanensis
  misc_feature (1)..(256): tr|N1WZD7|N1WZD7_9FLAO (4Fe-4S)-binding protein OS=Psyc hroflexus gondwanensis ACAM 44 OX=1189619 GN=pgond44_07 400 PE=4 SV=1
MENHFDKRLDPTKLVEGSKSVISLLYNYFPETTQKDATYKVSKYAYGKDYHHVIKAKLKTLMESLTEGIGEIGGRAFVDSAPVLEKAWAAKSGLGWVGKHSNLLTKQTGSFYFIAELILDIELEYDTPVTDHCGTCTKCIDACPTEAIYEPYKVDGSKCISYFTIELKDNIPKGYQDKFEDWMFGCDICQDVCPWNRFSKPHNEPLFNPHPDLLEYDKKEWEEITKDVFNEIFRKSAVKRTKYEGLKRNMNYIKTK

SEQ ID NO: 80236 - protein, 308 aa, Psychroflexus halocasei
  misc_feature (1)..(308): tr|A0A1H4CX10|A0A1H4CX10_9FLAO Epoxyqueuosine reductase OS=Psychroflexus halocasei OX=908615 GN=queG PE=3 SV=1
MNLNAEKHSQLIKKKAEKYGFISCGISKAEFLEEEAPRLENWLNNNANGKMQYMENHFDKRLDPSELVEGAKSVVSLLYNYFPEENQKENTFKVSKYAYGQDYHHVIKKKLRMMMEELNEEIGEINGRVFVDSAPVLEKAWAAKSGLGWIGKHSNLLTKQRGSFYFISELIIDLPLAYDTPVTDHCGSCTKCIDACPTQAITPYQVDGSKCISYLTIELKEEIPSDFKNKFEDWMFGCDICQDVCPWNRFSKPHNEPLFNPHPDLLDYKKEDWTEITKDVFNEIFRKSAVKRTKYEGLKRNINYILKD

SEQ ID NO: 80237 - protein, 313 aa, Psychroflexus salarius
  misc_feature (1)..(313): tr|A0A1M4WMR5|A0A1M4WMR5_9FLAO Epoxyqueuosine reductase OS=Psychroflexus salarius OX=1155689 GN=queG PE=3 SV=1
MKTATSKHTQFIKKTAKDLGFISCGISQAEFLEAEAPRLESWLKSNAHGQMQYMENHFDKRLDPTKLVEGSKSVISLLYNYFPDKTQNENTYKVSKYAYGQDYHHVIKAKLKTFIDHIRNEIGEVSGRAFVDSAPVLEKAWAAKSGLGWIGKHSNLLSKQVGSFYFIAELILDLELETDTPVTDHCGSCTKCIDACPTNAITPYQVDGSKCISYFTIELKDEIPREFKNQFDDWMFGCDICQDVCPWNRFSKPHNEPLFNPHLNLLENTKEDWEEITKEVFNEIFRKSAVKRTKFEGLKRNINHIKQNSNPNS

SEQ ID NO: 80238 - protein, 291 aa, Psychroflexus sediminis
  misc_feature (1)..(291): tr|A0A1G7UNH9|A0A1G7UNH9_9FLAO Epoxyqueuosine reductase OS=Psychroflexus sediminis OX=470826 GN=queG PE=3 SV=1
MGFLSCGISKAEFLEEEAPRLEHWLKQNAHGEMQYMENHFDKRLDPTKLVEGSKSVISLLYNYFPAETQREDTYKISKYAYGRDYHHVIKSKLKEMMHTLNAEIGEIGGRAFVDSAPVLEKAWAAKSGLGWVGKHSNLLSKQTGSFYFIAELILDIELETDTPVTDHCGTCTKCIDACPTDAIYEPYKVDGSKCISYFTIELKNEIPTGYEDKFEDWMFGCDICQDVCPWNRFSKAHNEPLFNPHPDLLSHDKKDWEEITKDVFNDIFRKSAVKRTKFEGLKRNINYIQSS

SEQ ID NO: 80239 - protein, 308 aa, Psychroflexus sp.
  misc_feature (1)..(308): tr|A0A2M9TQS8|A0A2M9TQS8_9FLAO Epoxyqueuosine reductase OS=Psychroflexus sp. S27 OX=1982757 GN=queG PE=3 SV=1
MNSNTEKHSQLIKEKAEKYGFISCGISKAEFLEQEAPRLENWLNENANGKMQYMENHFDKRLDPSKLVEGAKSVVSLLCNYFPEEKQKENTFKVSKYAYGQDYHHVIKKKLRLMMEELNEEIGEINGRVFVDSAPVLEKAWAAKSGLGWIGKHSNLLTKQRGSFYFISELVIDLPLAYDTPVTDHCGSCTKCIDACPTQAITPYQVDGSKCISYLTIELKEEIPSDFKNKFEDWMFGCDICQDVCPWNRFSKPHNEPLFNPHPDLLTYDKEDWTEITKDVFNEIFRKSAVKRTKYEGLKRNINYILKD

SEQ ID NO: 80240 - protein, 311 aa, Psychroflexus sp.
  misc_feature (1)..(311): tr|A0A4U5TSC6|A0A4U5TSC6_9FLAO Epoxyqueuosine reductase OS=Psychroflexus sp. WDS2C27 OX=1883405 GN=queG PE=3 S V=1
MSNAEKYTQLIKTEAKRLGFLSCGISKAEFLEDEAPRLEKWLKENRHGEMRYMENHFDKRLDPTKLVEGSKSVVSLLYNYYPEKQQQSDTYKISKYAYGQDYHFVIKRKLKSLLNTLQEEIGEVHGRAFVDSAPVLDKAWAVRSGLGWMGKHSNVLTKSLGSFYFIAELIIDLELEYDTPVTDHCGSCTACIDACPTEAIVDPYVVDGSKCISYFTIELKDDLPSSYKGQFDDWMFGCDVCQDVCPWNKFSKSHNEPLFNPDGRLLNYDKQDWEEITEEVFQDIFRKSAVKRTKYTGLKRNIAFLKSKRED

SEQ ID NO: 80241 - protein, 386 aa, Psychromonas ingrahamii
  misc_feature (1)..(386): tr|A1SZL6|A1SZL6_PSYIN Epoxyqueuosine reductase OS=Psyc hromonas ingrahamii (strain 37) OX=357804 GN=queG PE=3 SV=1
MINQKNLIDPTETLDLLSLSQNIKLWGKELGFQKVGISDIDLKDQESKLQSWLDNNYHGEMEYMSKHGMKRARPDELLPGTLRVISVRMDYLPDNAQFASTLKNKDNAYISRYALGRDYHKVLRKRLKKLGQKIELEVGQLGYRPFVDSAPILERPLAAKAGLGWVGKHSLLLDAKAGSWFFIGELLVDLPLPVDQPVENKCGKCVACLTICPTQAIVAPYVVDGRRCISYLTIELQGPIPVEFRKAIGNRIYGCDDCQLICPWNRFADTTEESDYQVRQQLENKSLLELFNWTEDEFLTYSEGSPIRRIGYQRWLRNISVALGNAPASEAIVDTLKNKLALNLSEMLNEHLQWALDQHQGQIPVFNERLKKRLINSVEKGLPRDA

SEQ ID NO: 80242 - protein, 392 aa, Psychromonas sp.
  misc_feature (1)..(392): tr|A0A366WEH7|A0A366WEH7_9GAMM Epoxyqueuosine reductase OS=Psychromonas sp. B3M02 OX=2267226 GN=queG PE=3 SV=1
MKITQESTSSQINSTPLSSTVLSELAENIKVWGKALGFQGVGISDVDLTDQEANLQAWLDNQYHGEMDYMERHGMMRARPNELLPGTLRVISVRMDYLPDDAQFAANLEDKDLAYISRYALGRDYHKVLRKRLKQLGDKIKNEVGELGFRPFVDSAPILERPLAEKAGLGWVGKHSLLLDKDSGSWFFLGELLIDLALPVDQAQPNQCGQCVACMKICPTQAIVAPYVVDGRRCISYLTIELQGAIPTEFRKAIGNRIYGCDDCQLICPWNRFADTTEESDYQAKDFLQNQSLLSLFAWSETTFLKNTEGSPIRRIGYQRWLRNIAIALGNAPSSIDVITSLQNKLVESEDELVNEHIEWALAEQQQKLPINIDRLNQRLIKAVKKGLPRDA

SEQ ID NO: 80243 - protein, 388 aa, Psychromonas sp.
  misc_feature (1)..(388): tr|A0A2N1A7R9|A0A2N1A7R9_9GAMM Epoxyqueuosine reductase OS=Psychromonas sp. Urea-02u-13 OX=2058326 GN=queG PE= 3 SV=1
MVEKITPDETFNHQDIDLIQLSENIKLWGKALGFQQVGISDIDLKQHEAKLQQWLDNKYHGEMDYMEKHGMKRARPAELHPGTLRVISVRMDYLPDNAQFARTLKNKDNAYISRYALGRDYHKVIRKRLKQLGQKIEEQVGKLGYRPFVDSAPVLERPLAEKAGLGWTGKHSLLIDAKNGSWFFIGELMIDLPLPVDKPVEEKCGQCVACIKICPTQAIVAPYVVDGRRCISYLTIELQGAIPVEFRKAIGNRIYGCDDCQLICPWNRFANTTQEQDYQARHQLEKQPLLDLFSWTEAQFLSNTEGSPIRRIGYERWLRNIAVALGNAPSSPAVVESLNNKRLESDSDLLNEHIDWALEQHTMQIPIVTDRLNNRLIKAIEKGLPRDA

SEQ ID NO: 80244 - protein, 308 aa, Psychroserpens burtonensis
  misc_feature (1)..(308): tr|A0A5C7BC67|A0A5C7BC67_9FLAO Epoxyqueuosine reductase OS=Psychroserpens burtonensis OX=49278 GN=queG PE=3 SV =1
MEVNKTQHSQFIKTEAKRLGFLSCGISKAGFLEEEAPRLEKWLKNNAHGEMRYMENHFDKRLDPTKLVEGSKSVISLLLNYYPSEIQNPESYQLSKYAYGTDYHFVIKDKLKELLQSIQDEIGDVHGRAFVDSAPVLDKAWAAKSGLGWIGKHSNLLTQQIGSFYFIAELIIDLDLEYDYATTDHCGTCTACIDACPTEAITEPYVVDGSKCISYFTIELKENIPLDFKGQFDDWMFGCDICQDVCPWNKFSKAHSEPLFNPHPELLDMTKKDWEEITKDTFNKVFKKSAVKRTKFDGLERNIKFLKE

SEQ ID NO: 80245 - protein, 389 aa, Psychrosphaera saromensis
  misc_feature (1)..(389): tr|A0A2S7UVA5|A0A2S7UVA5_9GAMM Epoxyqueuosine reductase OS=Psychrosphaera saromensis OX=716813 GN=queG PE=3 SV =1
MNTSDPKNHLLDRQLNGKLNEKIKLWGQELGFQHVGISDIDLSAQEPKMLNWLEKGFHGEMGYMETHGTKRSRPAELLPGTVSIVSVRLDYLPPDAKFAATLEQPNHAFISRYALGRDYHKVIRNKLKKLGQMIEKEVGVENLSFRPFVDSAPVLERPIAEKAGLGWTGKHSLLINNTAGSWFFLGELFLPIALEPDQAVDNECGSCVACITTCPTQAIVEPYVVDGRKCISYLTIELKDSIPEQYRKAMGNRIYGCDDCQLICPWNRFAELSTEPDFLPRTQLHPVSLLELWQWQEPHFLKVTEGSPIRRIGFECWMRNIAIALGNAPFSLEIVEQLNSKLTLISDMVDEHILWALEQQKLKAENSGVDSRQLKRLIKAIKIGLPRDA

SEQ ID NO: 80246 - protein, 387 aa, Pueribacillus theae
  misc_feature (1)..(387): tr|A0A2U1K252|A0A2U1K252_9BACI tRNA epoxyqueuosine(34) reductase QueG OS=Pueribacillus theae OX=2171751 GN=que G PE=4 SV=1
MSLDKLKQEIIEYSRTIGIDKIGFTTADPFVELKERLRDQQALNYQSGFEEPDIEKRTNPKMLMPEAKSIIAIAVAYPSRIKNKPKNEKHNRRGLFASASWGMDYHHVLRDRLTKLEAFIKKREPTAIMTSMVDTGELSDRAVAERAGLGYVGKNCALITKEFGSYVYLGEMITNLPFPSDEPVTDSCGSCNKCVEACPTGALVQGGQLDSTKCLAFLTQTKGFLPDEYRDKLGNRLYGMDKCQIVCPKNKTLDFHHHPEFEPDPDIAMPPLKPLLKMSNREFKEKFGSIAGSWRGKKPIQRNAILALAHFKDTTAVDELIEVMESDPRPVIRGTAAWALGKIGDPKAETALKKKKMEEKDKEVLKEIDKGLSMLKNKQNKESQWVF

SEQ ID NO: 80247 - protein, 334 aa, Puniceibacterium antarcticum
  misc_feature (1)..(334): tr|A0A2G8RKC4|A0A2G8RKC4_9RHOB 4Fe-4S ferredoxin OS=Pun iceibacterium antarcticum OX=1206336 GN=P775_02430 PE=4 SV=1
MQEALAAGFDLCRVCRPWDVPQVPGRLAAFLERGYHGQMSWLAERSHWRGAPQVLWPEARSVIMLGESYTPGHDPLEVLGHPEQGAVSVYAQNRDYHDVVKKRLKRLARWLIAEGGGAVKVFVDTAPVPEKPLGQAAGLGWQGKHTNLVSRDLGSWFFLGSVFSTLDLPADQAEVDHCGSCRACLDICPTSAFPAPYQLDARRCISYLTIEHHGPVDEDLRALMGNRIYGCDDCLAVCPWNKFAVAAQEVKYHARAELVAPRLADLAQFDDAGFRAHFSGSPIKRIGRGRFTRNVLYAIGNSGEARLRPVAQGLCKDEDPVVADAARWAVERLG

SEQ ID NO: 80248 - protein, 342 aa, Puniceibacterium sediminis
  misc_feature (1)..(342): tr|A0A238WSH9|A0A238WSH9_9RHOB Epoxyqueuosine reductase OS=Puniceibacterium sediminis OX=1608407 GN=SAMN062653 70_10751 PE=4 SV=1
MDVLKDRLVSEALTAGFDLCRICRPWDVPEVPGRLAAFLEHGYQGQMSWLADRSHWRGAPQVLWPEARSVIMLGESYTPQHDPLEVLGLPECGAVSVYAQNRDYHDVVKKRLKRLARWLIAEAGGEVKVFVDTAPVPEKPLGQAAGLGWQGKHTNLVSRDLGSWFFLGSVFTTLELPTDKAEVDHCGSCRACLDVCPTNAFPAPYQLDARRCISYLTIEHHGPVDPELRPLLGNRIYGCDDCLAVCPWNKFAVAAQEVKYHARQDLIAPPLEVLARLDDAGFRAHFSGSPVKRIGHGRFVRNVLYAIGNSATSRLRPVAQSLCEDEDPVVADAARWAVERLA

SEQ ID NO: 80249 - protein, 344 aa, Puniceibacterium sp.; identical to SEQ ID NO: 80179
  misc_feature (1)..(344): tr|A0A5B3BLQ3|A0A5B3BLQ3_9RHOB Epoxyqueuosine reductase OS=Puniceibacterium sp. HSS470 OX=2541729 GN=queG PE=3 SV=1

SEQ ID NO: 80250 - protein, 344 aa, Puniceibacterium sp.
  misc_feature (1)..(344): tr|A0A0J5Q8Q9|A0A0J5Q8Q9_9RHOB Epoxyqueuosine reductase OS=Puniceibacterium sp. IMCC21224 OX=1618204 GN=queG P E=3 SV=1
MQALTKALKAEAVAVGFDLCRMCRPWDVGQVPDRLAAFLDRGHHGQMHWLAERSHWRGAPQLLWPEARTVIMLGESYTPQHDPLSVLDQPAHGAISVYAQNRDYHDVLKKRLKRLARWLIAEAGGEVKVFVDTAPVPEKPLGQAAGLGWQGKHTNLVSRQLGSWFFLGSVFTTLELDIDTLEVDHCGSCRACLDICPTSAFPAPYQLDARRCISYLTIEHHGPVDPALRPMLGNRIYGCDDCLAVCPWNKFAQTAHEIKYQARPELVAPELAALAVLDDGTFRTLFSGSPIKRIGRNRFVRNVLYAIGNSGTAALRGVAQGLCDDPDPVVADAARWAVARLEAV

SEQ ID NO: 80251 - protein, 340 aa, Puniceicoccaceae bacterium; identical to SEQ ID NO: 78916
  misc_feature (1)..(340): tr|A0A2D7F393|A0A2D7F393_9BACT tRNA epoxyqueuosine(34) reductase QueG OS=Puniceicoccaceae bacterium OX=2026784 GN=queG PE=4 SV=1
  misc_feature (100)..(100): Xaa can be any naturally occurring amino acid
  misc_feature (117)..(117): Xaa can be any naturally occurring amino acid

SEQ ID NO: 80252 - protein, 335 aa, Puniceicoccaceae bacterium
  misc_feature (1)..(335): tr|A0A1Z9GDP4|A0A1Z9GDP4_9BACT tRNA epoxyqueuosine(34) reductase QueG OS=Puniceicoccaceae bacterium TMED149 OX =1986788 GN=CBD09_01045 PE=4 SV=1
MKTEQWIAIEELAKTLGFHKAGVAKIPIELRKDYYKKWIESGQHGTMGWMEKNTDRRFDPGSILPEAKCLLVFSLNYFQPDPKRKFRIAKYALGNDYHKFMLKRLKQICRFMKATYGTEQRPYVDTGPLLEKPIAEAAGIGWQGKSTILVEPKGGTWSLLGTIITTLDLPSYGAGKNYCGSCSRCIDACPTRAITAPYQLDASKCIAYLTIEHKGAIPEKFRKQIGDRVFGCDTCLDVCPWNKWAKRTKEANFEAKELPELSKILDWDQSDFDLYLQASPIRRLKLNGLKRNVALVLGNIGNKGDLAALARLSEEGDADLSEQAEWSIQEINARD

SEQ ID NO: 80253 - protein, 377 aa, Puniceispirillum marinum
  misc_feature (1)..(377): tr|D5BNK6|D5BNK6_PUNMI Iron-sulfur cluster binding prot ein OS=Puniceispirillum marinum (strain IMCC1322) OX=48 8538 GN=SAR116_0030 PE=4 SV=1
MPKSAVSKDKSKLKAWLIADAKAAGFADIGITKATHSAQTTDGLAQFLDDDFEGDMAWLRDTADRRQQPHAMWGDARTAIVLGMNYGPDHDPMGNLDARDKGNISVYARGRDYHEVIKGKLKQLAGRLAVKSGWQVKVFVDTAPLMEKPLGQSAGIGWQGKHTNLVSRTHGSWLFLGTILTDGELPYDEAQSDHCGSCRDCLDICPTDAFPAPYRLDARRCISYLTIEHKGQIPKDFRTAIGNRIFGCDDCLAVCPWNKYAKAASEAKLAARMETTLPELAALLALDEAGFRAQFASTPVRRAGYERFLRNVLVAAGNSADMGLVDVIMPHLDHASGLVRGMAVWALGQLMDDADFMAMKARYIGVETDADVAAEWG

SEQ ID NO: 80254 - protein, 369 aa, Pusillimonas sp.
  misc_feature (1)..(369): tr|A0A5A9XBY6|A0A5A9XBY6_9BURK Epoxyqueuosine reductase OS=Pusillimonas sp. ANT_WB101 OX=2597356 GN=queG PE=3 SV=1
MTHTTSSLITPDSGQWIQQIQAWASELGFSKIGVAGVDLSSAEPNLLHWLSLGYHGDMHYMELHGLKRARPAELVPGTISVITARMPYLPRSTAPDWQDRERARLDQPAEGVVSLYARGRDYHKVVRSRLRKLCDRIETLVGPFGHRVFSDSAPVLEKELASRSGQGWRGKHSMVLSREAGSMFFLGEIFVDFALEPTDPVSAHCGTCTACIDVCPTGAIVAPGVVDARRCISYLTIENHGPIPEELRPLMGNHIFGCDDCQTFCPWNKYAQTTELPDFDERSPLVGRQLVDLFAWDEETFLKRAEGGPIRRINHERWLRNIAVALGNALLQADEAQAHELRTALLGRANHESPLVREHVAWALAQRLP

SEQ ID NO: 80255 - protein, 366 aa, Pusillimonas sp.
  misc_feature (1)..(366): tr|A0A4R1LRA7|A0A4R1LRA7_9BURK Epoxyqueuosine reductase OS=Pusillimonas sp. YR330 OX=2135726 GN=queG PE=3 SV=1
MPSSLSANTDSSQWIHQIRAWARELGFSQIGVSGVDLSAAEPYLLQWLAQGYHGDLHYMERHGLMRTRPAELVPGTVSVITARMPYLPRSTEPGWQDRELARLNEPGEGVVSLYARGRDYHKVVRGRLRKLCDRIETLVGPFGYRAFSDSAPVLEKELACRSGQGWRGKHSMVLSRDAGSMFFLGEIFVDFALSSTDSVSAHCGSCTACIDVCPTGAIVAPGVVDARRCISYLTIESHGPIPEDLRPLMGNRIYGCDDCQIICPWNKYAQTTEIPDFDERPPLVGHRLVNLFAWDEATFLKNTEGGPIRRINHERWLRNIAVALGNALRQADATQAQELRAALLGRANHESALVREHVAWALAQCG

SEQ ID NO: 80256 - protein, 308 aa, Pustulibacterium marinum
  misc_feature (1)..(308): tr|A0A1I7HAI4|A0A1I7HAI4_9FLAO Epoxyqueuosine reductase OS=Pustulibacterium marinum OX=1224947 GN=queG PE=3 SV =1
MNSNTTKYTQFIKAKAKELGFLSCGISKADFLEEEAPRLEKWLNEGRNGKMQYMENHFDKRLDPRLLVDDAKSVISLLLNYYPSETQNPNAPKISKYAYGTDYHFVIKDKLKILLEAIQEEIGEVGGRAFVDSAPVLDKAWAAKSGLGWIGKNANLLAKQTGSFFFIAELIVDLPLEYDGPTTDHCGSCTACIDACPTQAIVEPYVVDGSKCISYLTIELKENIPTEFKGKMDDWMFGCDVCQDVCPWNRFSKAHTEPLFHPNPELLEMDYKDWQELTQETFSKVFKKSAVKRTKFAGLNRNIKFLKE

SEQ ID NO: 80257 - protein, 322 aa, Pyrinomonas methylaliphatogenes
  misc_feature (1)..(322): tr|A0A0B6WXJ2|A0A0B6WXJ2_9BACT Epoxyqueuosine reductase OS=Pyrinomonas methylaliphatogenes OX=454194 GN=queG P E=3 SV=1
MQGTISKDASPRTRAAKIRERALNLGFHKVGIARAEPLTEERARLEEWLARGFHATMQWMARDTERRADPRHLLPSAKSVVVVALNYYTPHEHDEDPDRGKISRYAWGDDYHEIIGDKLRTLLDWIRAEWPEAEGRICVDAQPTMDKAWAVRAGLGWIGKHSNLITREYGSWVFLGELLLNLELEPDVGPAEDHCGTCTLCLEACPTGAIVEPRVVDANRCISYATIELRAAQIPEEIARNLRGWLYGCDICQDVCPWNRFEKPTDEPRFEPRYGQTTLPLAEVIAMDHETYVARFRRSPIKRAKLAGLQRNARALRNRSGD

SEQ ID NO: 80258 - protein, 381 aa, Quasibacillus thermotolerans
  misc_feature (1)..(381): tr|A0A0F5I4U0|A0A0F5I4U0_9BACI Epoxyqueuosine reductase OS=Quasibacillus thermotolerans OX=1221996 GN=queG PE= 3 SV=1
MDYQQLKQEIIEYSRIIGIDKIGFTSASPFTELKSRLLRQQELGYASGFEEKDIDKRVDPSLLLEEPRSIIAIALAYPSKMKESVKGKRGERRGIFCRASWGEDYHTILRGRLKKLEAFISSKVPDARFRSMVDTGELADRAVAERAGIGWSGKNCSIITPEFGSYVYLGEMVTNLPLEPDAPIENQCGTCTKCLDACPTGALVQGGQLNAQRCIAFLTQTKGFMPEEFREKLGNRIYGCDTCQTVCPKNKGIDFHLHEEMEPDAEAVRPLLEPLLHLSNKEFKQTFGYMSGSWRGKKPIQRNAIIALAHFKEEESVPALVDVLLNDVRPVIRGTSAWALAKIGGGQALEALLAAKEKETDEEVQQEIEQAISSVKNHEKQ

SEQ ID NO: 80259 - protein, 388 aa, Quisquiliibacterium sp.
  misc_feature (1)..(388): tr|A0A5C8P5Y6|A0A5C8P5Y6_9BURK Epoxyqueuosine reductase OS=Quisquiliibacterium sp. CC-CFT501 OX=2498847 GN=que G PE=3 SV=1
MSSTPNLATATLRQWAAELGFASLGVAGVDLSSVEGGLQAWLDAGWHGEMDYMARHGMARARPAELVPGTVSAIMVTLDYAPEDPGWVDLAWRTLAQGERAYLSRYALGRDYHKVVRARLQKLAERIAAAAGPFGHRVFCDSAPVMEVELARRAGLGWRGKHTLLIHPKRGSTFFLGTLYTDLPLPADEPEPDHCGSCTRCIEACPTGAIVSPWRLDARRCISYLTIELKGAIPEPLRAPIGNRIYGCDDCQLACPWNRFAQPAGLPDFAPRNGLDAASLVELFRWSAEEFDARLAGSPIRRIGHERWLRNIAVALGNAGGTDGVRGAEGTGGGADAIAVARAALAARADHPSALVREHVGWALAQLERRAPGGRNEGGEGAPARAND

SEQ ID NO: 80260 - protein, 384 aa, Rahnella aquatilis
  misc_feature (1)..(384): tr|H2IS52|H2IS52_RAHAC Epoxyqueuosine reductase OS=Rahn ella aquatilis (strain ATCC 33071 / DSM 4594 / JCM 1683 / NBRC 105701 / NCIMB 13365 / CIP 78.65) OX=745277 GN= queG PE=3 SV=1
MTLPLDLVQLAQHIKQWGQSLGFQQVGICDTDLSAEEPKLQDWLDKQYHGEMEWMARHGMLRARPHELLPGTLRVISVRMNYLPAKAAFAKTLNNPQLGYVSRYALGRDYHKVLRQRLKKLGDMIQTHCTEHADQTITFRPFVDSAPLMERPLAAKAGLGWVGKHSLILNRESGSWFFLGELLIDLPLPVDQPQEEKCGKCVACITTCPTGAIVAPYTVDARRCISYLTIELEGAIPEEFRPLMGNRIYGCDDCQLICPWNRYSQLTDEEDFSPRAALHAPELIELFGWTEEKFLRITEGSPIRRIGHLRWLRNIAVALGNAPYSEEVLNTLQSREGENALLDEHISWAIAQQVARRNEHRVEVQSSQQKRLIRAVEKGLPRDA

SEQ ID NO: 80261 - protein, 384 aa, Rahnella aquatilis
  misc_feature (1)..(384): tr|H8NSD2|H8NSD2_RAHAQ Epoxyqueuosine reductase OS=Rahn ella aquatilis HX2 OX=1151116 GN=queG PE=3 SV=1
MTLPLDLVQLAQHIKQWGQSLGFQQVGICDTDLSAEEPKLQDWLDKQYHGEMEWMARHGMLRARPHELLPGTLRVISVRMNYLPAKAAFAKILNNPQLGYVSRYALGRDYHKVLRQRLKKLGDMIQAHCTEHADQTVTFRPFVDSAPVMERPLAAKAGLGWVGKHSLILNRESGSWFFLGELLIDLPLPVDQPQEEKCGKCVACITTCPTGAIVAPYTVDARRCISYLTIELEGAIPEEFRALMGNRIYGCDDCQLICPWNRYSQLTDEEDFSPRAALHAPELIELFSWAEEKFLRITEGSPIRRIGHLRWLRNIAVALGNAPYSEDVLNALQSREGENALLDEHINWAIAQQTERRNEHRIEVQTSQQKRLIRAVEKGLPRDA

SEQ ID NO: 80262 - protein, 385 aa, Rahnella inusitata
  misc_feature (1)..(385): tr|A0A419M4Y8|A0A419M4Y8_9GAMM Epoxyqueuosine reductase OS=Rahnella inusitata OX=58169 GN=queG PE=3 SV=1
MTLPLDLVQLAQHIKQWGQSLGFQQVGICDTDLSAEEPKLQDWLDKQYHGEMEWMARHGMLRARPHELLPGTLRVISVRMNYLPAKAAFAKTLNNPQLGYVSRYALGRDYHKVLRQRLKKLGDMIQAYCTEQQSDHAVTFRPFVDSAPIMERPLAAKAGLGWVGKHSLILNRESGSWFFLGELLIDLPLPVDAPQEEKCGKCVACMTTCPTGAIVAPYTVDARRCISYLTIELEGAIPEEFRPMMGNRIYGCDDCQLICPWNRYSQLTDEEDFSPRAALHAPELIALFGWTEEKFLRITEGSPIRRIGHLRWLRNISVALGNAPYSEEVLTALQSRTGENALLDEHIEWAICQQTERRSEHRVEVQTSQQKRLIRAVEKGLPRDA

SEQ ID NO: 80263 - protein, 384 aa, Rahnella sp.
  misc_feature (1)..(384): tr|A0A0H3F4D4|A0A0H3F4D4_RAHSY Epoxyqueuosine reductase OS=Rahnella sp. (strain Y9602) OX=741091 GN=queG PE=3 SV=1
MTLPLDLVQLAQHIKQWGQSLGFQQVGICDTDLSAEEPKLQDWLDKQYHGEMEWMARHGMLRARPHELLPGTLRVISVRMNYLPAKAAFAKILNNPQLGYVSRYALGRDYHKVLRQRLKKLGDMIQAHCTEHADQTVTFRPFVDSAPVMERPLAAKAGLGWVGKHSLILNRESGSWFFLGELLIDLPLPVDQPQEEKCGKCVACITTCPTGAIVAPYTVDARRCISYLTIELEGAIPEEFRALMGNRIYGCDDCQLICPWNRYSQLTDEEDFSPRAALHAPELIELFSWAEEKFLRITEGSPIRRIGHLRWLRNIAVALGNAPYSEDVLNALQSREGENALLDEHISWAIAQQTERRNEHRIEVQTSQQKRLIRAVEKGLPRDA

SEQ ID NO: 80264 - protein, 330 aa, Rahnella sp.
  misc_feature (1)..(330): tr|A0A4R2Z3S5|A0A4R2Z3S5_9GAMM Epoxyqueuosine reductase OS=Rahnella sp. JUb53 OX=2485128 GN=EC840_10544 PE=4 S V=1
MARHGMLRARPHELLPGTLRVISVRMNYLPAKAAFAKTLNNPQLGYVSRYALGRDYHKVLRQRLKKLGDMIQAHCTEHADQTVTFRPFVDSAPVMERPLAAKAGLGWVGKHSLILNRESGSWFFLGELLIDLPLPVDQPQEEKCGKCVACMTTCPTGAIVAPYTVDARRCISYLTIELEGAIPEEFRPLMGNRIYGCDDCQLICPWNRYSQLTDEEDFSPRAALHAPELMTLFGWTEEKFLRITEGSPIRRIGHLRWLRNIAVALGNAPYSQDVMDSLHSREGENALLDEHISWAIAQQVERRNEHRVEVQTLQQKRLIRAVEKGLPRDA

SEQ ID NO: 80265 - protein, 384 aa, Rahnella woolbedingensis
  misc_feature (1)..(384): tr|A0A419N522|A0A419N522_9GAMM Epoxyqueuosine reductase OS=Rahnella woolbedingensis OX=1510574 GN=queG PE=3 SV =1
MTLPLDLVQLAQHIKQWGQSLGFQQVGICDTDLSVEEPKLQDWLDKQYHGEMDWMARHGMLRARPHELLPGTLRVISVRMNYLPAKAAFAKTLNNPQLGYVSRYALGRDYHKVLRQRLKKLGDMIQAHCTEHADPTVTFRPFVDSAPVMERPLAAKAGLGWVGKHSLILNRESGSWFFLGELLIDLPLPVDQPQEEKCGKCVACITTCPTGAIVAPYTVDARRCISYLTIELEGAIPEEFRPLMGNRIYGCDDCQLICPWNRYSQLTDEEDFSPRAALHAPELITLFGWTEEKFLRITEGSPIRRIGHLRWLRNIAVALGNAPYSQEVMDSLHLREGENALLDEHISWAIAQQVERRKEHRVEVQTLQQKRLIRAVEKGLPRDA

SEQ ID NO: 80266 - protein, 311 aa, Raineya orbicola
  misc_feature (1)..(311): tr|A0A2N3IAQ2|A0A2N3IAQ2_9BACT Epoxyqueuosine reductase OS=Raineya orbicola OX=2016530 GN=queG PE=3 SV=1
MGFAEKYSQLIKQKAREIGFDFCGIAKAEFLEKEAPRLEMWLKNNMQGEMSYMANHFDKRLNPKLLVEGAKSVISVLLNYFPKQDLAQTNPDNFKISKYAYGEDYHFVMKRKMNELLNFIRENIGEINGRAFVDSAPVMDKVWAERSGLGWIGKHTNLINRKIGSFFFIGEIIIDLELAYDAPTGDYCGTCRRCLEACPTEAIVSPYVVDGSKCISYLTIELKNEIPQEFQGKMENWIFGCDVCQDVCPWNRFAKPHQTPEFEPNEHLKNMQKKDWLEITEEVFAKVFPKSAVKRTKIKGLQRNIQFASLE

SEQ ID NO: 80267 - protein, 391 aa, Ralstonia insidiosa
  misc_feature (1)..(391): tr|A0A191ZZ26|A0A191ZZ26_9RALS Epoxyqueuosine reductase OS=Ralstonia insidiosa OX=190721 GN=queG PE=3 SV=1
MSATPTPAPTAALETNLDTRLPTGEADVAALVAQIRTWGAELGFDAIRIASIDLSHAEEGLQTWLAQGFHGDMDYMANHGLLRARPAELVAGTVRAIVARMPYLPHDTRGHTDQPAAGSDWRTVEWDRMRRPEDATISLYARGRDYHKVLRQRLQKLAEKIAGAVGPYGFRVFTDSAPVLEVALASNGGLGWRGKHTLLLDRDAGSMFFLGEILIDLPLPIDPPVEPHCGNCTRCIDVCPTQAIVAPYTVDARRCISYLTIEHKGSIPVELREAMGNRVYGCDDCQLICPWNKFAVPANLPDFDVRNGLDAATLVDLFGWTESEFNQRLEGSPIRRIGHERWLRNIAVALGNALRGPLPEASRAQLRAALHARADHPSELVREHVAWALAA

SEQ ID NO: 80268 - protein, 385 aa, Ralstonia mannitolilytica
  misc_feature (1)..(385): tr|A0A160BRT4|A0A160BRT4_9RALS Epoxyqueuosine reductase OS=Ralstonia mannitolilytica OX=105219 GN=queG PE=3 SV =1
MSATPTSSLQTNLDARLPANEADMRALVAQIRSWGAELGFDAIRIASIDLSHAEEGLQTWLAQGFHGDMDYMANHGMLRARPAELVAGTVRAIVARMPYLPHPTRESAPAEDWRTIEWDRLRRPQDATISLYARGRDYHKVLRQRLQKLAEKIAAAVGPYGFRVFTDSAPVLEVALASNGGLGWRGKHTLLLDRDAGSMFFLGEILIDLPLPEDPPVEPHCGNCTRCIDVCPTQAIVAPYVVDARRCISYLTIEHKGSIPVELRAVMGNHVYGCDDCQLICPWNKFAVPANVPDFDVRNGLDAATLAGLFAWTEAEFNQRLEGSPIRRIGHERWLRNIAVAIGNALREPLADDTRAQLTAALHARADDPSALVREHVAWALAQTT

SEQ ID NO: 80269 - protein, 385 aa, Ralstonia mannitolilytica
  misc_feature (1)..(385): tr|A0A2N5LCX0|A0A2N5LCX0_9RALS Epoxyqueuosine reductase OS=Ralstonia mannitolilytica OX=105219 GN=queG PE=3 SV =1
MSATPTSSLQTNLDARLPANEADMHALVAQIRSWGAELGFDAIRIASIDLSHAEEGLQTWLAQGFHGDMDYMANHGMLRARPAELVAGTVRAIVARMPYLPHPTRERAPAEDWRTIEWDRLRRPQDATISLYARGRDYHKVLRQRLQRLAEKIAAAVGPYGFRVFTDSAPVLEVALASNGGLGWRGKHTLLLDRDAGSMFFLGEILIDLPLPEDPPVEPHCGNCTRCIDVCPTQAIVAPYVVDARRCISYLTIEHKGSIPVELRAAMGNHVYGCDDCQLICPWNKFAVPANVPDFDVRNGLDAATLAGLFAWTEAEFNQRLEGSPIRRIGHERWLRNIAVAIGNALRERLSDDTRAQLSAALHARADDPSALVREHVAWALAQKT

SEQ ID NO: 80270 - protein, 385 aa, Ralstonia pickettii; identical to SEQ ID NO: 80268
  misc_feature (1)..(385): tr|A0A291EJ18|A0A291EJ18_RALPI Epoxyqueuosine reductase OS=Ralstonia pickettii OX=329 GN=queG PE=3 SV=1

SEQ ID NO: 80271 - protein, 385 aa, Ralstonia pickettii
  misc_feature (1)..(385): tr|R0CJA8|R0CJA8_RALPI Epoxyqueuosine reductase OS=Rals tonia pickettii OR214 OX=1264675 GN=queG PE=3 SV=1
MSATPTSSPETNLDARLPADAAGMHALVAQIRSWGAELGFDAVRIADVDLSHAEEGLQTWLAQGFHGDMDYMANHGMLRARPAELVAGTVRAIVARMPYLPHLADPQTPGSDWRTIEWDRLRRPKDATISLYARGRDYHKVLRQRLQKLAEKIAGAIGPYGFRVFTDSAPVLEVALATNGGLGWRGKHTLLLDRDAGSMFFLGEILVELPFPVDPPVEPLCGNCTRCIDVCPTQAIVAPYTVDARRCISYLTIEHKGSIPVELRAAMGNRVYGCDDCQLICPWNKFAVPANLPDFDVRNGLDAATLAELFNWTDAEFNQRLEGSPIRRIGHERWLRNIAVAIGNALRAPLPDTTRAQLFAALKARADDASELVREHVAWALAQTT

SEQ ID NO: 80272 - protein, 383 aa, Ralstonia pseudosolanacearum
  misc_feature (1)..(383): tr|A0A223GPV3|A0A223GPV3_9RALS Epoxyqueuosine reductase OS=Ralstonia pseudosolanacearum OX=1310165 GN=queG PE= 3 SV=1
MSGTPTSLPEPGLDARLPADEAGMAALVAQIRSWGTGLGFDAIRIADIDLSHAEDGLRTWLAQGFHGDMDYMANHGMLRARPAELVAGTVRAIVARMPYVPHRGAAPAAGDDWRAIEWDRLRRPEDATVSLYARGRDYHKVLRQRLQKLAERIAGAVGPYGYRVFTDSAPVLEVALATNGGLGWRGKHTLLLDRDAGSMFFLGEILIDLPLPVDPPVTPRCGHCTRCIEVCPTQAIVAPYVVDARRCISYLTIEHKGAIPVELRAAMGNHVYGCDDCQLACPWNKFAVHASLPDFDVRNGLDAAALVDLFGWTEDQFNQRLEGSPIRRIGHERWLRNLAVALGNALRAPLPEPAHARLRAALLTRAEDPSALVREHVAWALAQ

SEQ ID NO: 80273 - protein, 383 aa, Ralstonia pseudosolanacearum
  misc_feature (1)..(383): tr|A0A454TJS0|A0A454TJS0_9RALS Epoxyqueuosine reductase OS=Ralstonia pseudosolanacearum OX=1310165 GN=queG PE= 3 SV=1
MSGTPTSLPEPGLDARLPADEAGMAALVAQIRSWGTELGFDAIRIADIDLSHAEDGLRTWLAQGFHGDMDYMANHGMLRARPAELVAGTVRAIVARMPYVPHRGAAPAAGDDWRAIEWDRLRRPEDATVSLYARGRDYHKVLRQRLQKLAERIAGAVGPYGYRVFTDSAPVLEVALATNGGLGWRGKHTLLLDRDAGSMFFLGEILIDLPLPVDPPVTPRCGHCTRCIEVCPTQAIVAPYVVDARRCISYLTIEHKGAIPVELRAAMGNHVYGCDDCQLACPWNKFAVHASLPDFDVRNGLDAAALVDLFGWTEDQFNQRLEGSPIRRIGHERWLRNLAVALGNALRAPLPEPAHARLRAALLTRAEDPSALVREHVAWALAQ

SEQ ID NO: 80274 - protein, 386 aa, Ralstonia solanacearum
  misc_feature (1)..(386): tr|A0A5H2PIL4|A0A5H2PIL4_RALSL tRNA epoxyqueuosine(34) reductase QueG OS=Ralstonia solanacearum OX=305 GN=queG PE=4 SV=1
  misc_feature (214)..(214): Xaa can be any naturally occurring amino acid
MSGTPTSLPEPGLDARLPADEAGMAALVAQIRSWGTGLGFDAIRIADVDLSHAEDGLRTWLAQGFHGDMDYMANHGMLRARPAELVAGTVRAIVARMPYVPHRGAAAPPGSDWRAIEWDRLRRPEDATISLYARGRDYHKVLRQRLQKLAEHIASAVGPYGYRVFTDSAPVLEVALATNGGLGWRGKHTLLLDRDAGSMFFLGEILIDLPLPVXPPATPRCGHCTRCIDVCPTQAIVAPYVVDARRCISYLTIEHKGAIPVELREAMGNHVYGCDDCQLVCPWNKFAVHASLPDFDVRNGFDAVTLVDLFGWTEDEFNQRLEGSPIRRIGHERWLRNIAVALGNALRAPLPASSRARLLAALQARADDPSPLVREHVAWALAQVQH

SEQ ID NO: 80275 - protein, 456 aa, Ralstonia solanacearum
  misc_feature (1)..(456): tr|A3RYL7|A3RYL7_RALSL Epoxyqueuosine reductase OS=Rals tonia solanacearum UW551 OX=342110 GN=queG PE=3 SV=1
MARDSVVLPAPRSPESCTCTGRGPSARTACARAAPNAAVAASSTSGTVRSASGSVGPAKAAAMGTGGIAYNLGMSGTPTSLPEPGLDARLPADEGGMAALVAQIRSWGTGLGFDAIRIADVDLSHAEDGLRTWLAQGFHGDMDYMANHGMLRARPAELVAGTVRAIVARMPYVPHRGAAAPAGGDWRAIEWDRLRRPEDATISLYARGRDYHKVLRQRLQKLAEHIASAVGPYGYRVFTDSAPVLEVALATNGGLGWRGKHTLLLDRDAGSMFFLGEILIDLPLPVDPPATPRCGHCTRCIDVCPTQAIVAPYVVDARRCISYLTIEHKGAIPVELREAMGNHVYGCDDCQLVCPWNKFAVHAGLPDFDVRNGFDAVTLVDLFNWTEDEFNQRLEGSPIRRIGHERWLRNIAVALGNALRAPLPASSRARLLAALQAHADDPSPLVREHVAWALAQ

SEQ ID NO: 80276 - protein, 397 aa, Ralstonia sp.
  misc_feature (1)..(397): tr|A0A1H0MR10|A0A1H0MR10_9RALS Epoxyqueuosine reductase OS=Ralstonia sp. 25mfcol4.1 OX=1761899 GN=queG PE=3 SV =1
MIDRAVPAPTPAQTAHPAEDSAPARPDSASVTTDVDLASLAASLRGWGRALGFDEIRIADVDLRHAEAGLLAWLQAGYHGDMDYMANHGAKRARPHELVPGTVRAIVARMPYLPAQGPDDWRRHELARLDDPATAVISLYARGRDYHKVLRNRLQQLAARIETAIGPFGYRVFTDSAPVMEVALASQGGLGWRGKHTLLLDRDGGSMFFLGEILVDIPLPADPAEAPHCGNCRRCIDICPTGAILEPFRLDARRCISYLTIEHKGAIPEALRAPMGNRVYGCDDCQLACPWNKFAHRATLPDFDVRNGFDAPDMAELFGWTEAEFNQRLEGSPIRRIGHERWLRNLAVGLGNSLRAASASDPALAQRIRAALLARRDTATPLVREHIDWALAQDTAG

SEQ ID NO: 80277 - protein, 385 aa, Ralstonia sp.
  misc_feature (1)..(385): tr|A0A5C6YJQ1|A0A5C6YJQ1_9RALS Epoxyqueuosine reductase OS=Ralstonia sp. TCR112 OX=2601730 GN=queG PE=3 SV=1
MSATPTSSPETNLDARLPADAAGMQALVAQIRSWGAELGFDAVRIADVDLSHAEEGLQTWLAQGFHGDMDYMANHGMLRARPAELVAGTVRAIVARMPYLPHLADPQTPGSDWRTIEWDRLRRPEDATISLYARGRDYHKVLRQRLQKLAEKIAGAVGPYGFRVFTDSAPVLEVALATNGGLGWRGKHTLLLDRDAGSMFFLGEILVDLPFPVDPPVEPHCGNCTRCIDVCPTQAIVAPYTVDARRCISYLTIEHKGSIPVELRAAMGNRVYGCDDCQLICPWNKFAVPANLPDFDVRNGLDAATLAGLFHWTDAEFNQRLEGSPIRRIGHERWLRNIAVAIGNALRAPLPDSARAQLTAALHARADDPSELVREHVAWALTQST

SEQ ID NO: 80278 - protein, 376 aa, Ralstonia syzygii
  misc_feature (1)..(376): tr|G3A0Z1|G3A0Z1_9RALS Epoxyqueuosine reductase OS=Rals tonia syzygii R24 OX=907261 GN=queG PE=3 SV=1
MPEPGLDARLPADEAGMAALVAQIRSWGTGLGFDAIRIADVDLSHAEDGLRTWLAQGFHGDMDYMANHGMLRARPAELVAGTVRAIVARMPYVPHRGAAPPAVGDWRAIEWDRLRRPEDATISLYARGRDYHKVLRQRLQKLAEQIAGAVGPYGYRVFTDSAPVLEVALATNGGLGWRGKHTLLLDRDAGSMFFLGEILIDLPLPVDPPVTPRCGHCTRCIEVCPTQAIVAPYVVDARRCISYLTIEHKGAIPVELRAAMGNHVYGCDDCQLVCPWNKFAVHASLPDFDVRNGFDAVALVDLFSWTEDEFNQRLEGSPIRRIGHERWLRNIAVALGNALRAPQPEPARARLRAALQARADDPSPLVREHVAWALAQ

SEQ ID NO: 80279 - protein, 403 aa, Ramlibacter henchirensis
  misc_feature (1)..(403): tr|A0A4Z0C2K7|A0A4Z0C2K7_9BURK Epoxyqueuosine reductase OS=Ramlibacter henchirensis OX=204072 GN=queG PE=3 SV= 1
MRCDAFGEGARVVLARPPQQDGAARPGGASYNRRVTRAGSQIDGPSLVVSIGRWGHELGFSQIGVAGVDLSSAEPGLLQWLSNGFHGEMAYMEAHGLRRARPAELVPGTLSVITARMDYLPQATPEGWQAIEWDRLKRPREGAVSLYARGRDYHKVMRNRLQKLSDRIAQEIGPFGHRAFTDSAPVLEAELAARSGQGWRGKHTLILSREAGSMYFLGEIYVDIALPASAPVTAHCGSCTACIDICPTGAIVGEQRLDARRCISYLTIEHAGPIPVELRPLMGNRIYGCDDCQLVCPWNKYAGRSALPDFDERPGMSGAALAELLGWSEGEFLRRTEASAIRRIGHERWLRNVAVAAGNALRVADDEPLRGALRKLVDHPSSLVREHVAWALAGARVEADARG

SEQ ID NO: 80280 - protein, 348 aa, Ramlibacter rhizophilus
  misc_feature (1)..(348): tr|A0A4Z0C0J2|A0A4Z0C0J2_9BURK Epoxyqueuosine reductase OS=Ramlibacter rhizophilus OX=1781167 GN=queG PE=3 SV= 1
MRLWALELGFSQIGVAGIDLSSAEDGLLQWLSHGFHGDMSYMAAHGLKRARPAELVPGTVSVLTARMDYLPQGTPEGWQAVEWERLRRPGEGVVSLYARGRDYHKVMRSRLQKLAERLAEDVGPFGHRVFTDSAPVLEAELATRSGQGWRGKHTLVLDREGGSMFFLGEIYLDLALPTTDPVSAHCGSCEACVHACPTGAILGPGVLDARRCISYLTIEHAGSIDPALRPLMGNRIYGCDDCQLACPWNKFARPAVLADFDARDGLVGTPLADLLSWSEARFLQRTEGSAIRRIGHERWLRNLAVAAGNALRAGEGDASLVASLEALRSHSSAVVREHVAWALAQATA

SEQ ID NO: 80281 - protein, 346 aa, Ramlibacter sp.
  misc_feature (1)..(346): tr|A0A4Z0BEG7|A0A4Z0BEG7_9BURK Epoxyqueuosine reductase OS=Ramlibacter sp. 18x22-1 OX=2530451 GN=queG PE=3 SV= 1
MGRWGRELGFSQIGVAGVDLSSAEPGLLQWLSNGFHGEMAYMAAHGVKRARPAELVPGTLSVITARMDYLPAGTSGEWQAVEWDRLRRADEGYVSMYARGRDYHKVLRSRLQKLCDRIAAEIGPFGHRAFTDSAPVLEVELATRSGQGWRGKHTLVLSREAGSMFFLGEIYVDLALPESPPVTAHCGSCAACIDVCPTGAIVAPHWLDARRCISYLTIEHPGPIPLELRPLIGNRVYGCDDCQLACPWNKYAQSSSLPDFDPREGFSGATLAALLSWDEAEFLRRTEGGPIRRIGHERWLRNVAVAAGNALRIADDAALRSALQARLTHPSELVREHVQWALAQHA

SEQ ID NO: 80282 - protein, 514 aa, Ramlibacter sp.
  misc_feature (1)..(514): tr|A0A4Y7B2I0|A0A4Y7B2I0_9BURK Epoxyqueuosine reductase OS=Ramlibacter sp. WS9 OX=1882741 GN=queG PE=3 SV=1
MQQFLAQRRLRKQGDVARFVGLHLDADHQVGARKQPLGLLGPFGQLQPIPGEDVPKAGVFPFARVVEAEEVEVPDRHAGHFVRLDHGVSRALHAALHAQRAQQVPHQRGLARPQVAVQFDEGIGQLRMRSQLRGEGACVVFRAQNHGANGSFYNRRVAFNSAQMGPQLVRQIREWAVELGFSQIGIAGVDLSSAEAGLAAWLSNGFHGEMAYMQTHGLKRARPAELVPGTVSVITVRMDYLSDATPEGWQAVEFDRLNRPEEGIVSLYARGRDYHKVLRARLQKLSDRISAEVGPFGYRVFTDSAPVLEAELAARSGQGWRGKHTLVLNREAGSMFFLGEIYVDLALPASEPTSDHCGSCSACIEVCPAQAIIAPYRLDARRCISYLTIEHAGSIPEDLRPLIGNRIYGCDDCQLICPWNKFARRNALPDFDERTGLTGRQLVELFAWTEADFLTRTEGSPIRRIGHERWLRNVAVAMGNALRSHDDAVLRAALQARADHPSDLVREHVAWALS

SEQ ID NO: 80283 - protein, 349 aa, Ramlibacter tataouinensis
  misc_feature (1)..(349): tr|A0A127JZ02|A0A127JZ02_9BURK Epoxyqueuosine reductase OS=Ramlibacter tataouinensis OX=94132 GN=queG PE=3 SV= 1
MVTDIRGWAHGLGFSQIGVAGVDLSSAEAGLLAWLSNGYHGEMDYMQAHGLKRARPAELVPGTLSVITARMDYLPRTTPEGWQAIEFDRLKRPGEGVVSAYARGRDYHKVLRSRLQKLSERIAQAVGPFGHRVFTDSAPVLEAELAARSGQGWRGKHTLVLSREAGSMFFLGEIYVDIALPESLPVTEHCGSCSACIDICPTQAIVGPGRLDARRCISYLTIEHAGAIPEALRPLMGNRIYGCDDCQLACPWNKFAQRSALPDFDEREGLAGGQLADLFAWSEEEFLRRTEGGPIRRIGHERWLRNIAVALGNALRASGDPSLRAALQARADHPSALVREHVAWALGQG

SEQ ID NO: 80284 - protein, 351 aa, Ramlibacter tataouinensis
  misc_feature (1)..(351): tr|F5Y3N8|F5Y3N8_RAMTT Epoxyqueuosine reductase OS=Raml ibacter tataouinensis (strain ATCC BAA-407 / DSM 14655 / LMG 21543 / TTB310) OX=365046 GN=queG PE=3 SV=1
MAQIGHWARELGFSQIGIAGVDLSSAEPGLVAWLEQGFHGEMAYMAAHGLKRARPAELVPGTVSVLTARMDYLPAATPDGWRAVEWERLRRPGEAVVSLYARGRDYHKVLRARLQKLADRIAQAVGPFGHRVFTDSAPVLEAELAARSGQGWRGKHTLLLDREAGSMFFLGEIYLDLALPPSAPVQAHCGRCSACMDLCPTRAIVAPGRLDARRCISYLTIEHAGPIPAELRPLMGNRIYGCDDCQLACPWNKFARRSPLPDFDAREGLAGSALAELFGWSEEEFLRRTEGSAIRRIGHERWLRNLAVALGNALALQDDAAMRAALAARQDHPSALVREHVAWALAQQAQR

SEQ ID NO: 80285 - protein, 379 aa, Raoultella electrica
  misc_feature (1)..(379): tr|A0A514EX44|A0A514EX44_9ENTR Epoxyqueuosine reductase OS=Raoultella electrica OX=1259973 GN=queG PE=3 SV=1
MSQPLDLNKLAQQIKQWGTELGFQQVGITDTDLSASEPKLQAWLDKQYHGEMEWMARHGMMRARPHELQPGTLRVISVRMNYLPANAAFARTLKDPSLGYVSRYALGRDYHKLLRNRLKKLGELIQEQCTSLNFRPFVDSAPILERPLAEKAGLGWTGKHSLILNRDAGSFFFLGELLVDIPLPIDSPVTEECGRCVACMTICPTGAIVEPYTVDARRCISYLTIELEGVIPEELRPLIGNRIYGCDDCQLICPWNRFSQLTDEADFSPRQALHAPPLIELFAWSEAHFLKVTEGSAIRRIGHLRWLRNIAVALGNAAWDEAHLTALESRRGEHPLLDEHIDWAVAQQIDKRNANVVEVQLPKKQRLVRVIEKGLPRDA

SEQ ID NO: 80286 - protein, 379 aa, Raoultella ornithinolytica
  misc_feature (1)..(379): tr|A0A4R2XSQ4|A0A4R2XSQ4_RAOOR Epoxyqueuosine reductase OS=Raoultella ornithinolytica OX=54291 GN=queG PE=3 SV =1
MLQPLDLNKLAQQIKQWGTELGFQQVGITDTDLSVSEPKLQAWLDKQYHGEMEWMARHGMMRARPHELLPGTLRVISVRMNYLPANAAFARTLKDPALGYVSRYALGRDYHKLLRNRLKKLGEMIQEQCASLNFRPFVDSAPVLERPLAEKAGLGWTGKHSLIINRDAGSFFFLGELLVDIPLPVDRPVAEECGRCVACMTICPTGAIVEPYTVDARRCISYLTIELEGAIPIEFRSLIGNRIYGCDDCQLICPWNRFSQLTDEEDFSPRKALHAPPLVELFAWSESHFLKVTEGSAIRRIGHLRWLRNIAVALGNAPWDEAHLKALESRRGEHPLLDEHIEWAIDQQIARRSAGAVDVQLPKKQRLVRVVEKGLPRDA

SEQ ID NO: 80287 - protein, 379 aa, Raoultella ornithinolytica
  misc_feature (1)..(379): tr|A0A1Y6GNQ4|A0A1Y6GNQ4_RAOOR Epoxyqueuosine reductase OS=Raoultella ornithinolytica OX=54291 GN=queG PE=3 SV =1
MSQPLDLNKLAQQIKQWGTELGFQQVGITDTDLSASEPKLQAWLDKQYHGEMEWMARHGMMRARPHELQPGTLRVISVRMNYLPANAAFARTLKDPSLGYVSRYALGRDYHKLLRNRLKKLGEMIQEQCASLNFRPFVDSAPILERPLAEKAGLGWTGKHSLILNRDAGSFFFLGELLVDIPLPIDSPVTEECGRCVACMTICPTGAIVEPYTVDARRCISYLTIELEGAIPEAFRPLIGNRIYGCDDCQLICPWNRFSQLTDETDFSPRKALHAPPLIELFAWSEAHFLKVTEGSAIRRIGHLRWLRNIAVALGNAPWDEAHLTALESRRGEHPLLDEHIEWAVAQQIEKRNANVIEVQLPKKQRLVRVIEKGLPRDA

SEQ ID NO: 80288 - protein, 379 aa, Raoultella planticola
  misc_feature (1)..(379): tr|A0A485AN29|A0A485AN29_RAOPL Epoxyqueuosine reductase OS=Raoultella planticola OX=575 GN=queG PE=3 SV=1
MSQPLDLNKLAQQIKQWGTELGFQQVGITDTDLSASEPKLQAWLDKQYHGEMEWMARHGMMRARPHELQPGTLRVISVRMNYLPANAAFARTLKDPTLGYVSRYALGRDYHKLLRNRLKKLGEMIQEQCASLNFRPFVDSAPILERPLAEKAGLGWTGKHSLILNRDAGSFFFLGELLVDIPLPIDSPVTEECGRCVACMTICPTGAIVEPYTVDARRCISYLTIELEGAIPEEFRPLIGNRIYGCDDCQLICPWNRFSQLTDEADFSPRKALHAPPLVELFAWSEAHFLKVTEGSAIRRIGHLRWLRNIAVALGNAPWDEAHLTALESRRGEHPLLDEHIEWAVAQQIDKRNANVVEVQLPKKQRLVRVIEKGLPRDA

SEQ ID NO: 80289 - protein, 379 aa, Raoultella planticola; identical to SEQ ID NO: 80287
  misc_feature (1)..(379): tr|A0A377TAL0|A0A377TAL0_RAOPL Epoxyqueuosine reductase OS=Raoultella planticola OX=575 GN=queG PE=3 SV=1

SEQ ID NO: 80290 - protein, 379 aa, Raoultella sp.
  misc_feature (1)..(379): tr|A0A4R3ZEC8|A0A4R3ZEC8_9ENTR Epoxyqueuosine reductase OS=Raoultella sp. BIGb0138 OX=2485115 GN=queG PE=3 SV= 1
MSQPLDLNKLAQQIKQWGTELGFQQVGITDTDLSASEPKLQAWLDKQYHGEMEWMARHGMMRARPHELLPGTLRVISVRMNYLPANAAFARTLKDPALGYVSRYALGRDYHKLLRNRLKKLGEMIQEQCASLNFRPFVDSAPILERPLAEKAGLGWTGKHSLILNRDAGSFFFLGELLIDIPLPIDQPVTEECGRCVACMTICPTGAIVEPYTVDARRCISYLTIELEGAIPEEFRPLIGNRIYGCDDCQLICPWNRFSQLTDEEDFSPRKALHAPPLVELFAWSEAHFLKVTEGSAIRRIGHLRWLRNIAVALGNAAWDEANLIALESRRGEHPLLDEHIEWAVAQQIDKRNANVVDVQLPKKQRLVRVIEKGLPRDA

SEQ ID NO: 80291 - protein, 379 aa, Raoultella sp.
  misc_feature (1)..(379): tr|A0A509CVJ9|A0A509CVJ9_9ENTR Epoxyqueuosine reductase OS=Raoultella sp. NCTC 9189 OX=2583577 GN=queG PE=3 SV =1
MLQPLDLNKLAQQIKQWGTELGFQQVGITDTDLSVSEPKLQAWLDKQYHGEMEWMARHGMMRARPHELLPGTLRVISVRMNYLPANAAFARTLKDPALGYVSRYALGRDYHKLLRNRLKKLGEMIQEQCASLNFRPFVDSAPVLERPLAEKAGLGWTGKHSLIINRDAGSFFFLGELLVDIPLPVDRPVAEECGRCVACMTICPTGAIVEPYTVDARRCISYLTIELEGAIPIEFRPLIGNRIYGCDDCQLICPWNRFSQLTDEEDFSPRKALHAPPLVELFAWSESHFLKVTEGSAIRRIGHLRWLRNIAVALGNAPWDEAHLKALESRRGEHPLLDEHIEWAIDQQIARRSAGAVEVQLPKKQRLVRVVEKGLPRDA

SEQ ID NO: 80292 - protein, 379 aa, Raoultella terrigena
  misc_feature (1)..(379): tr|A0A3P8L2Z8|A0A3P8L2Z8_RAOTE Epoxyqueuosine reductase OS=Raoultella terrigena OX=577 GN=queG PE=3 SV=1
MLQPLDLNKLAQQIKQWGTELGFQQVGITDTDLSVSEPKLQAWLDKQYHGEMEWMARHGMMRARPHELLPGTLRVISVRMNYLPANAAFARTLKDPALGYVSRYALGRDYHKLLRNRLKKLGEMIQEQCASLNFRPFVDSAPVLERPLAEKAGLGWTGKHSLIINRDAGSFFFLGELLVDIPLPVDRPVAEECGRCVACMTICPTGAIVEPYTVDARRCISYLTIELEGAIPIEFRPLIGNRIYGCDDCQLICPWNRFSQLTDEEDFSPRKALHAPPLVELFAWSESHFLKVTEGSAIRRIGHLRWLRNIAVALGNAPWDEAHLKALESRRGEHPLLDEHIEWAIDQQIARRSAGAVDVQLPKKQRLVRVVEKGLPRDA

SEQ ID NO: 80293 - protein, 222 aa, Raoultella terrigena
  misc_feature (1)..(222): tr|A0A4U9D4L1|A0A4U9D4L1_RAOTE Epoxyqueuosine reductase OS=Raoultella terrigena OX=577 GN=queG_1 PE=4 SV=1
MIQEQCASLNFRPFVDSAPVLERPLAEKAGLGWTGKHSLIINRDAGSFFFLGELLVDIPLPVDRPVAEECGRCVACMTICPTSAIVEPYTVDARRCISYLTIELEGAIPIEFRPLIGNRIYGCDDCQLICPWNRFSQLTDEEDFSPRKALHAPPLVELFAWSESHFLKVTEGSAIRRIGHLRWLRNIAVALGNAPWDEAHLKALESRRGRAPRFSMSISSGQ

SEQ ID NO: 80294 - protein, 323 aa, Raphidiopsis brookii
  misc_feature (1)..(323): tr|D4TVM7|D4TVM7_9CYAN Epoxyqueuosine reductase OS=Raph idiopsis brookii D9 OX=533247 GN=queG PE=3 SV=1
MSYLTSLSTHTIKEKAYKLGFHKVGVAVVLGESKEKERLRKWISLGYHADMDWMTNPKREDIKLVMPEVRSLVCVAINYYTPHPRPQGVEYGKISRYGWGRDYHRILHKKLKQLATWLESKGEGIKARYYADTGPIQDKVWAEKAGIGWIGKNGNVITREYGSWVFLGEVLTNLELEGDTPATQHCGTCNRCIEACPTEAIAQPFVVDANKCIAYHTIENRGETLPITIERNLQGWVAGCDICQDVCPWNQRFSQITDVVDFHPYPGNLAPKLVELSEITDEQWNEKFSASALRRIKPGMLRKNARANLTTLKLNNDSKSNHL

SEQ ID NO: 80295 - protein, 324 aa, Raphidiopsis curvata
  misc_feature (1)..(324): tr|A0A1Z4VF81|A0A1Z4VF81_9CYAN Epoxyqueuosine reductase OS=Raphidiopsis curvata NIES-932 OX=1973482 GN=queG PE =3 SV=1
MSSLTSLSTHTIKEKAYKLGFHKVGIAVVLGVESKEKERLRKWISLGYHADMDWMTNPKREDIRLVMPEVRSLVCVAINYYTPHSRPLGGEYGKISRYGWGRDYHRILHKKLKQLATWLESQGEGIKARYYADTGPIQDKVWAEKAGIGWIAKNGNVITREYGSWVFLGEVLTNLELEGDTPATQHCGTCNRCIEACPTQAITQPFVVDANKCIAYHTIENRGETLPINIERNLQGWVAGCDICQDVCPWNQRFSQVTDVVDFHPYPGNLAPKLLELSEITDEQWNEKFTASALRRIKPEMLRKNARANLTTLKLNNDSESNHL

SEQ ID NO: 80296 - protein, 311 aa, Reichenbachiella agariperforans
  misc_feature (1)..(311): tr|A0A1M6NJT9|A0A1M6NJT9_9BACT Epoxyqueuosine reductase OS=Reichenbachiella agariperforans OX=156994 GN=queG P E=3 SV=1
MILDQTKLTYFIKQKATEEGFLSCGIAKAEFLEEEAPKLEKWLNQGMHGEMAYMANHFDKRLDPRKLVDGAKSVISLLYNYYPEKNLAEEDNYKIAKYAYGKDYHYIIKPKLKTILNEIIEHVGDVNARVFVDSAPVHERAWAAKAGQGWVGKNSLLLNKQSGSFFFLAEIILDVDLDYDGPVKDYCGTCSKCMDACPTDAIPEPYVVDGSRCISYLTIELRDQIPEEFRGKMENWVFGCDICQDVCPWNRFSKKHQEEAFVPHDKLEGMSTSDWEEITEEMFREVFKGSAVKRTKLEGLKRNISFAKKNA

SEQ ID NO: 80297 - protein, 310 aa, Reichenbachiella faecimaris
  misc_feature (1)..(310): tr|A0A1W2GDC6|A0A1W2GDC6_9BACT Epoxyqueuosine reductase OS=Reichenbachiella faecimaris OX=692418 GN=queG PE=3 SV=1
MDHFKLTQLIKQKSAEEGFQFCGVAKAEFLEKEAPKLEEWLNQDMHGEMAYMANHFDKRLDPRKLVDGAKSVISLLYNYYPEKDLNEDKEVKIAKYAFGKDYHHIIKPKLKTILQSISEQVGEVNARVFVDSAPVHERAWAAKAGLGWVGKNSLLLNKSMGSFFFLAEIIVDVELKYDGPIKDYCGTCTACMDACPTDAIPDPYVVDGSKCISYLTIELKNEIPNSFAGQMEGWAFGCDICQDVCPWNRFSKPHQEPDFKPHEKLGEMKSSDWSELTEELFREVFKGSAVKRTKYSGLKRNIDFLKKKPN

SEQ ID NO: 80298 - protein, 310 aa, Reichenbachiella sp.
  misc_feature (1)..(310): tr|A0A2G5L4X8|A0A2G5L4X8_9BACT Epoxyqueuosine reductase OS=Reichenbachiella sp. 5M10 OX=1889772 GN=queG PE=3 S V=1
MDRVKLTHLIKQKALQEGFMACGIAKADFLAEEAPKLERWLNQGMHGEMGYMANHFDKRLDPRKLVEGAKTVISLSYNYFPESNLAKEDNYKIAKYAYGKDYHYIIKPKLKTVLQEVIEQVGEVNARVFVDSAPVHERAWAAKAGIGWVGKNSLLLNKKSGSFFFLAEIILDVELDYDSPVKDYCGTCTKCMDACPTDAIPEPYVVDGSRCISYLTIELRDQIPSEFQGKMENWVFGCDICQDVCPWNRFSKPHQEESFMPHAQLDEWSKSDWEEMTEEVFREVFRGSAVKRAKYEGLKKNVAFAKSRNT

SEQ ID NO: 80299 - protein, 357 aa, Reinekea blandensis
  misc_feature (1)..(357): tr|A4BEA9|A4BEA9_9GAMM Epoxyqueuosine reductase OS=Rein ekea blandensis MED297 OX=314283 GN=queG PE=3 SV=1
MAERSDLISTYDPLTLAEQIRALGRDLGFQAVTFANPSTEQHRAGFESWLEAGYAGDMGWLERNLDKRFDAASLHPGTKTVICVRMDYWPEAADGLTLLSQTDRAYISRYALGRDYHKVLRKRLSDFARQITELAGDHGARPFVDSAPVMERQLAAHSGLGWIGKNSLLLAPGHGSTFFLGELCTNLALPFDSPNPASHCGSCQQCMVDCPTDAFVSDGVLDATRCISYLTIEYSGAIPEDLRAAMGNRIYGCDDCQLVCPHNRKAPVSDETDFQPRSELDGGALVDLFDWSEAEFLKKTEGSAIRRIGYEQWQRNLAVALGNGPVTAEARESLSRGLGRVSELVDDHIRWALNRLG

SEQ ID NO: 80300 - protein, 368 aa, Reinekea forsetii
  misc_feature (1)..(368): tr|A0A2K8KMJ4|A0A2K8KMJ4_9GAMM Epoxyqueuosine reductase OS=Reinekea forsetii OX=1336806 GN=queG PE=3 SV=1
MMNLPMAVPVDLIATTTELSLAEKIRALGAPLGFQAMRFCAPDTRAHGEHLQQWLDAGYHGEMDWLTRNSDKRLRGDLLQPGTKTVIAVRMDYLPANHHSMAVLDSPELAYVARYALGRDYHKVLRKRLVQLAQQITELAGSHGYRPFVDSAPVMERQLAEQAGLGWTGKNTLLLAPGVGSWFFLGELFTDLDLPFDPPLEQGHCGSCNQCLVDCPTDAFVAPGVLDARKCISYLTIEYDGSIPVDLRAKMGNRIYGCDDCQLVCPHNNKADTTQEADFTPRHSLEKISLMEAFSWTEVEFLHNTEGSPIRRIGYAQWQRNIAVALGNAPASPELIATLERAKGRVSALVDEHIDWALVQLQSAVVAD

SEQ ID NO: 80301 - protein, 363 aa, Reinekea marinisedimentorum
  misc_feature (1)..(363): tr|A0A4R3IBT0|A0A4R3IBT0_9GAMM Epoxyqueuosine reductase OS=Reinekea marinisedimentorum OX=230495 GN=queG PE=3 SV=1
MQSPDNLITTAESLTLAEQIRDIGKKLGFQAVHFSTPDTSGHAEQYNAWVDAGYNGDMAWMARNCDKRFDGSELQPGTKTVISVRMNYQPDGAAPESVLGDPGKAYIARYALGRDYHKVLRKRLMHFAKAIEEIAGKHGYRPFVDSAPVMERQIAEQSGMGWIGKNTLLLAPGSGSWFFLGELFTDLELPFDAPFPKSHCGSCQQCLIDCPTDAFLGPNKLDARKCISYLTIEYAGSIPVELREKMGNRIYGCDDCQLVCPHNRKANDTEEADFQPRHNLDDASLLSLFAWSEQQFLNNTEGSPIRRIGYEQWTRNLAVALGNGPCSEQATDQLKQKLGQVSALVDEHIEWALSRLQQQAGDR

SEQ ID NO: 80302 - protein, 364 aa, Reinekea sp.
  misc_feature (1)..(364): tr|A0A5C8Z7Q9|A0A5C8Z7Q9_9GAMM Epoxyqueuosine reductase OS=Reinekea sp. SSH23 OX=2593301 GN=queG PE=3 SV=1
MQPTNSIIATSGELTLAEQIRQLGLNLGLQAVHFSSPSTDEHELRFQQWLDAGHHGEMDWLQRNKDKRFHGGQLHPGTKTVISVRMDYLPDGAPPFNILSDPNKAYVARYAVGRDYHKVLRKRLTLFAKQIAQLAGEHGYRPFVDSAPVMERQLAEKSGMGWIGKNTLLLAPGAGSWFFLGELFTDLELPFDEPFEKNHCGSCQECLVKCPTDAFTQAGVLDARKCISYLTIEYSGSIPVDLRSKMGNRIYGCDDCQLVCPHNNKADTSAESDFTPRHQLDQASLTDLFSWDETTFLSRTEGSPIRRIGYQQWLRNIAIALGNGEPSHQVIQLLSNKLGCYSELLDEHLRWAIEQLEQRLTINS

SEQ ID NO: 80303 - protein, 399 aa, Reyranella soli
  misc_feature (1)..(399): tr|A0A512NIJ4|A0A512NIJ4_9PROT Epoxyqueuosine reductase OS=Reyranella soli OX=1230389 GN=queG PE=3 SV=1
MSRQPPVPKRKPKPATPAELRNAIRDEALRLGFDAVGFAPANAGAEARDQRLLRLGEFLNAGWQGDMGWLGERTEQRADPQTLWQEARTVVSLAINYAPPTDPLEVLRQDERAAISVYAQGRDYHDVMKSKLKTLGRFIWDTYRHDLKVFVDTAPLMEKPMAQMAGHGWQGKHTNLVSRQFGSWLFLGEILLSVELPADSPESDHCGQCRACLDICPTKAFPAPYRLEARRCISYLTIEHEGPIDRELRPLLGNRIYGCDDCLAVCPWNKFAQEARETSLMPRPALNAPLLAELATLDEEGFRKRFAGTAIKRIGRDRFLRNVAYALGNSSSRETALPAVERLLDDPSPLVRGGAVWALSRLAPRQIVQRQRTAREDDPEVRNEWREALQTVRGRENGR

SEQ ID NO: 80304 - protein, 315 aa, Reyranella sp.
  misc_feature (1)..(315): tr|A0A522ZFT4|A0A522ZFT4_9PROT tRNA epoxyqueuosine(34) reductase QueG (Fragment) OS=Reyranella sp. OX=1929291 GN=queG PE=4 SV=1
MARLPPRPKRPPKQATPRALRDAISAKALELGFDAVAFAPAQLSPEARQLRRERMEAFLERGFQGDMGWLVDRAEQRIDPSGLWPEARTVVSVALNYGPAGDPRFMQEERERGAVSVYAQGRDYHDVMKSRLKQLGRFIWDTYHESLKVFVDTAPLMEKLAAQQAGHGWQGKHTNLVSRRFGSWLFLGELLLSIELPPDEPETDHCGQCRACLDACPTNAFPAPYQLDARRCISYLTIEHAGPIDREFRSALGNRIYGCDDCLAACPWNKFARQSREAAFAPRAELQAPLLAELATLDDPTFRTRFSGTAVKRIG

SEQ ID NO: 80305 - protein, 393 aa, Reyranella sp.
  misc_feature (1)..(393): tr|A0A5C5SUP8|A0A5C5SUP8_9PROT Epoxyqueuosine reductase OS=Reyranella sp. CPCC 100927 OX=2599616 GN=queG PE=3 SV=1
MTRHPAPGLKRRAPSDPRAIREEIRAEAQRLGFDAVGFAAAQAPPEQHDALAAFVHQGWHGDMDWLADDTETRANPARLWPRAGTLIALGMTYTPAHDPLAVLAQRDRAAIAVYAQGRDYHMVVKSRLKALGLWIWNRWGRELKVFVDTAPVMERPAAARAGLGWQGKHTNLVSRTHGSWLFLGEILTTLALPADEPERDHCGTCRACLDICPTGAFPAPGRLDARRCISYLTIEHAGPIPREFRAPIGNRIYGCDDCLAVCPWNKFAQTAREAAFAPRPGTAAPRLTDLAALDDAAFRRLFSGTAIKRSGRDRFVRNVAIALGNSADAQSLPAVRHLLDDTSPLVRGAAVWALMQLSPTAFREERERRRVAESDADVQAEWDAVPGTRKHAS

SEQ ID NO: 80306 - protein, 375 aa, Rheinheimera nanhaiensis
  misc_feature (1)..(375): tr|I1DUS8|I1DUS8_9GAMM Epoxyqueuosine reductase OS=Rhei nheimera nanhaiensis E407-8 OX=562729 GN=queG PE=3 SV=1
MNYHELAQQIKQWAKQLGFADAGISGVSLADAERQLQKWLDAGYHGEMDYMASHGMLRARPDELVPGTLRVISVRMDYLPKAAGFATNLADPTQAYISRYALGRDYHKLIRNRLKQLGERINQQVSELGYRPFTDSAPILERPLAQQAGLGWVGKHSLLLNHQAGSWFFLGELLVNLPLPVDQPHDGDCGSCVACITSCPTGAIVEPYVVDARRCISYLTIELKGAIPEEFRPLLGNRIYGCDDCQLVCPENRNAPLSIESDFQRREQWQNQSLLSLFAWQEDEFLRFTEGSAIRRIGYERWQRNIAVALGNAPYQIEIEQALSAKLSSASPLVAEHIAWALAQQKRKGWQAESLLPRSTERLVRIIQKGLPRDA

SEQ ID NO: 80307 - protein, 377 aa, Rheinheimera pacifica
  misc_feature (1)..(377): tr|A0A1H6JL65|A0A1H6JL65_9GAMM Epoxyqueuosine reductase OS=Rheinheimera pacifica OX=173990 GN=queG PE=3 SV=1
MTTDYAALALQIKRWAQELGFAQLGITGVSLPDAERQLQKWLDAGYHGEMDYMASHGMLRARPAELVPGTLRVLSVRMNYLPEGAGFATNLADPTQAYISRYALGRDYHKLVRNRLKQLGERINQQVAELGYRPFTDSAPILERPLAQQAGLGWIGKHSLLLNQEAGSWFFLGELLVNLPLPIDTPHEGDCGSCVACITSCPTGAIVEPYVVDARRCISYLTIELKGAIPEEFRPLLGNRIYGCDDCQLVCPENRAAPLSIEGDFQRRPQWQSQSLLSLFAWQEGEFLSHTEGSAIRRIGYERWQRNIAVALGNAPYQADIVQALSAKLDSASELVAEHIHWALAQQKRKSWQAESLLPRSTERLVRIIQKGLPRDA

SEQ ID NO: 80308 - protein, 378 aa, Rheinheimera salexigens
  misc_feature (1)..(378): tr|A0A1E7Q978|A0A1E7Q978_9GAMM Epoxyqueuosine reductase OS=Rheinheimera salexigens OX=1628148 GN=queG PE=3 SV= 1
MMNIDYPQLALQIKQWAKELGFAELGITDVDLSEAEPHLQRWLDAGYHGEMDYMASHGMMRARPAELHPGTLRVLSVRLNYLPTTAAFATNLADPNLAYISRYALGRDYHKLMRNRLKQLGDKIKQQVTTLGFRPFVDSAPILERPLAQKAGLGWIGKHSLLLNSDHGSWFFLGELLVDIPLPVDPPHQGDCGHCVACITTCPTGAIVAPYIVDARRCISYLTIELKEAIPEEFRPLIGNRIYGCDDCQLVCPENRQAPLSTETDFQRREHWQDQSLLSLFAWPESVFLRNTEGSAIRRIGHQRWQRNIAVALGNAPYSADIIAVLQQQLTDATPLVAEHIQWALQQQKRKGWQQDSLIPRQTARLVRIIEKGLPRDA

SEQ ID NO: 80309 - protein, 383 aa, Rheinheimera sp.
  misc_feature (1)..(383): tr|A0A3D5BFY8|A0A3D5BFY8_9GAMM Epoxyqueuosine reductase OS=Rheinheimera sp. OX=1869214 GN=queG PE=3 SV=1
MSNSHSFSDADWATLASQIKSWALELGFSQAGICDTDLNSQEPKLQQWLDAGMHGEMQYMAEHGMKRARPAELQPGTIRVISVRLDYLPAGAGFATNLSDPQQAYISRYALGRDYHKLMRQRLKQLGEKIEQHIGAYGYRPFVDSAPVLERPLAAKAGLGWTGKHSLLLNPQAGSWFFLGELLVSLPLPVDEPIQQDCGSCVACITMCPTGAIVSPYVVDARRCISYLTIELKDAIPQELRPLLGNRIYGCDDCQLVCPVNRQAPLGKEEDFQRRPQWRDQSLLSLFLWDEATFLKMTEGSAIRRIGYQRWQRNLAVALGNAPFNEEILALLLAEQQHPDALVREHLQWALAQQQQKQQQQQKENRQQQRLIRIIQLGLPRDA

SEQ ID NO: 80310 - protein, 379 aa, Rheinheimera sp.
  misc_feature (1)..(379): tr|A0A3S3S852|A0A3S3S852_9GAMM Epoxyqueuosine reductase OS=Rheinheimera sp. YQF-1 OX=2499626 GN=queG PE=3 SV=1
MTSTINWLHLAEQIKVWGQQLGFQQIGITDTDLASEEAKLQQWLDDGFHGEMEYMAAHGMKRARPAELHPGTIRVISARMDYLPEHAQFAANLADPSMAYISRYALGRDYHKLIRNRLKQLGERIEKELGALGFRPFVDSAPILERPLAIKAGLGWQGKHSLVLNQDAGSWFFLGELLVDIPLPVDAVHTGDCGACVACITICPTQAIVAPYTVDARRCISYLTIELQGAIPEEFRSLLGNRIYGCDDCQLVCPVNRAADTTQEQDFQRRPQWLNKSLLDLWRWTETEFLKYTEGSAIRRIGYQRWQRNIAVALGNAPFDLAIIEALQQQQPQSDELVSEHIQWALLQQQKKSLLQQNLLSRQTDRLIRAIQKGLPRDA

SEQ ID NO: 80311 - protein, 377 aa, Rheinheimera tuosuensis
  misc_feature (1)..(377): tr|A0A285IXH8|A0A285IXH8_9GAMM Epoxyqueuosine reductase OS=Rheinheimera tuosuensis OX=1323745 GN=queG PE=3 SV= 1
MAIDYQQLAAQIKQWARQLGFQELGITATDLSTEEPKLKAWLEQGYHGDMQFMAEHGMLRARPAELLPGTLRVLSVRMDYLPAAAGFATNLADPTKAYISRYALGRDYHKLVRSRLKKLAQKISNEIPELGFRPFVDSAPVLERPLAQRAGLGWVGKHSLLLERGVGSWFFLGELLVDIPLPVDEPHQGDCGSCVACITSCPTGAIVAPYVVDGRRCISYLTIELKTAIPEELRPLIGNRIYGCDDCQLVCPENREAPLSIESDFQRRTQWQDQDLLQLFAWDEETFLRLTEGSAIRRIGFERWQRNIAVALGNAPYQSEITDALQQAKAHCSVLVAEHIDWALAQQKRKSWQAANLLPRSTERLIRIIQKGLPRDA

SEQ ID NO: 80312 - protein, 360 aa, Rhizobacter gummiphilus
  misc_feature (1)..(360): tr|A0A1W6LHR8|A0A1W6LHR8_9BURK Epoxyqueuosine reductase OS=Rhizobacter gummiphilus OX=946333 GN=queG PE=3 SV=1
MDQVGDPAALVEQLRGWARSLGFSQIGVADVDLSSAEPGLLAWLDHGFHGSMAYMATHGLKRARPAELVPGTVRVITARMDYLPRTRHDGDNDWQAVEWAHLARPENAGVSTYARGRDYHKVLRNRLQKLADRLAEAVGPLGHRVFTDSAPVLEVELASRSGIGWRGKHTLTLHREAGSMFFLGEIYIDLPLPLSEPVTPHCGSCSACIDVCPTRAIVAPYRVDARRCISYLTIEHDGAIPEDLRPLIGNRIYGCDDCQLVCPWNKYAQRSTLPDFDPRAPLLHPTLLQLWAWTEADFLRHTEGGPIRRIGYERWRRNLAVGLGNALRADPSLADVRAALEAARDAASPLVQEHIDWALR

SEQ ID NO: 80313 - protein, 364 aa, Rhizobacter sp.
  misc_feature (1)..(364): tr|A0A1M7P4I4|A0A1M7P4I4_9BURK Epoxyqueuosine reductase OS=Rhizobacter sp. OV335 OX=1500264 GN=queG PE=3 SV=1
MTEAQQLDGDGLVAQLREWGLALGFSQIGVADVDLSSAEAGLLAWLRDGFHGEMGYMAAHGLKRARPAELVPGTVRVITARMDYLPKGTTDDWQAVEWDRLASPAQATVSVYARGRDYHKVLRHRLQKLADRLQQEVGPRGHRVFTDSAPVLEVELASRSGIGWRGKHTLTLHREAGSMFFLGEIYVDLPLPLSTPVTGHCGSCSACIDVCPTRAIVAPYRVDARRCISYLTIEHAGPIPVELRPAIGNRIYGCDDCQLACPWNKYAQRSPLPDFDMRDTLAAPTLLGLWAWTEADFLRHTEGSAIRRIGHQRWRRNLAVAIGNALRDAATPAADRAALAAALQASREGADELVREHIDWALSA

SEQ ID NO: 80314 - protein, 370 aa, Rhizobacter sp.
  misc_feature (1)..(370): tr|A0A3N7HU64|A0A3N7HU64_9BURK Epoxyqueuosine reductase OS=Rhizobacter sp. S-16 OX=2496871 GN=queG PE=3 SV=1
MTGAQDLNADALLPLLRQWAAALGFSQIGVADVDLASAEPGLMRWLDNGFHGSMDYMATHGLKRARPAELVPGTVRVITARMDYLPSNTPEGWQAIEWQRLADPMQANVSMYARGRDYHKVLRSRLQKLADQLAEEVGPFGFRVFTDSAPVLEVELASRSGIGWRGKHTLTLHREAGSMFFLGEIYVDMPLPLTEPVQAHCGSCTACIDVCPTKAIIAPYRVDARRCIAYLTIEDRGPIPVEMRAAIGNRIYGCDDCQLVCPWNKFAQRATVPDFDAREGLSDAQLLHLWAWSEDDFLRYTEGSPIRRIGHEAWLRNIAVALGNALRATGRGDIADALRSRRESACALVREHIDWALAQAGLGENSGGGS

SEQ ID NO: 80315 - protein, 354 aa, Rhizobiaceae bacterium
  misc_feature (1)..(354): tr|A0A522SK36|A0A522SK36_9RHIZ tRNA epoxyqueuosine(34) reductase QueG OS=Rhizobiaceae bacterium OX=1913961 GN= queG PE=4 SV=1
MTRPDAIKAAPERLKLFVADNFHGTMGWMAETAERRGDPETLWPDVKSVIMLGTNYGPAFDPLAVLAERDRGAISVYAQNRDYHDVVKGRLKQVAGKLAALSGADVKVFVDTAPVMEKPLAAAAGLGWQGKHTNLVSRDFGSWLFLGSIFTTAVLEPDPPETDRCGSCRACLDICPTKAFPEPYRLDARRCISYLTIEHKGPIPHEFREAIGNHIYGCDDCLSVCPWNKFARAASEVKLAQRPELRAPRLDELLELDDAAFRLFFSGSPVKRIGRDRFVRNVLIAVGNSGEGAFVPRCESLLGDSSALVRGASVWALSRLLTPQAFAERALPYRAKETDPDVIAEWDAGMGNKG

SEQ ID NO: 80316 - protein, 394 aa, Rhizobiaceae bacterium
  misc_feature (1)..(394): tr|A0A4U6ATN3|A0A4U6ATN3_9RHIZ Epoxyqueuosine reductase OS=Rhizobiaceae bacterium LC148 OX=1120689 GN=queG PE= 3 SV=1
MRTSISDRTRPGEQAPEKEARRREKLTAFIRAEAAAQGFDLCRITHPDSIPQAPGRLRTFLNDGHHGTMEWMAETRERRGDPKVLWPEVRSVVVFGLNYGPDEDPRELLDKPEKAAISVYARNRDYHDVIKGRLKEIATRFAARAGEDVKVFVDTAPVMEKPLAEAAGLGWQGRHTNLVSRTHGSWIFLGSLFTTADLDIDAPEIDHCGSCRACLDACPTAAFPAPYRLDARRCISYLTIEHKGPIDPEFRPLIGNRIYGCDDCLAACPWNKFAASASEMKLKAREDLKEPSIAFLLTLDEAAFRSFFSGSPVKRIGRDRFIRNVLIAAGNSGDRSLIDQCRMLASDPSATVRGMAIWALKQLMTLEEFARFAEMRAGETDAEVQEEWRMAGVA

SEQ ID NO: 80317 - protein, 388 aa, Rhizobiales bacterium
  misc_feature (1)..(388): tr|A0A2N6BM31|A0A2N6BM31_9RHIZ Epoxyqueuosine reductase OS=Rhizobiales bacterium OX=1909294 GN=queG PE=3 SV=1
MDGSLRANIINWAREAGFERVGITRPDRIEAAGRQLARFLEAGHHGQMSWMAERQDWRADPRALWPACRSVVVLGLNYGPDHNPLDDLAKTGTGLVSVYARRKDYHVIVKKKLKQVAGKIARASGGEVKVFVDTAPVLEKPLAMAAGIGWQGKHSSLVSRDYGNWLFLGEIFTEAEIDPDEAESDHCGRCRQCLDICPTNAFPAPYQLDARRCISYLTIEHRGHIAPDLRAAMGNRVFGCDDCLAICPWNKFAQNARTATLALRPELAELPLARLAALDETAFRELFAGTPVKRTGREGFVRNVLIAIGNSADAALAPAAMARLEDASPVVRAAAVWALGRLMRPQEMKALAERHRMREKDRQVADEWSAATARPPETATACSGEKRD

SEQ ID NO: 80318 - protein, 372 aa, Rhizobiales bacterium
  misc_feature (1)..(372): tr|A0A3R7Q6C7|A0A3R7Q6C7_9RHIZ Epoxyqueuosine reductase OS=Rhizobiales bacterium TMED94 OX=1986858 GN=queG PE= 3 SV=1
  misc_feature (316)..(316): Xaa can be any naturally occurring amino acid
  misc_feature (323)..(323): Xaa can be any naturally occurring amino acid
  misc_feature (327)..(328): Xaa can be any naturally occurring amino acid
  misc_feature (333)..(333): Xaa can be any naturally occurring amino acid
  misc_feature (357)..(357): Xaa can be any naturally occurring amino acid
MHSLISKSTIQKKSKEFGFDIIKITDPKIHKKDQHYIKDFLENDFHGDMDWLKKNLERRVSPKKLWPDVKSIIVLGVNYGPNHDPMKNLENEEIGNISVYARGNDYHDVIKKNLKKFGRWIVNQTNSEIKVFIDTAPIMEKTIAQKAGLGWQGKHTNLVSRDYGSWLFLASIFTNLELESDKEGINHCGNCNNCIEICPTDAFTEPYKLDARKCISYLTIEHKGIIPSHLRSKIGNRIYGCDDCLAVCPWNKFAKESNEIKFKQKNQTELYDLKKLSLLNDNNFRKMFSKSPIKRIGRNRFLRNVLIAIGNAKLKXAKYHINXNIFXXSPIVXGAAIWALNQITEGEELDKIKKLSXSKEKDPDVIKEWIEL

SEQ ID NO: 80319 - protein, 383 aa, Rhizobium acidisoli
  misc_feature (1)..(383): tr|A0A0N0LF84|A0A0N0LF84_9RHIZ Epoxyqueuosine reductase OS=Rhizobium acidisoli OX=1538158 GN=AOG23_05705 PE=4 SV=1
MPEADDKERRRRDNLTNFVRAESAAKGFDLCRITRPDAIPEAKERLGQFIDAGRHGTMEWMAETRERRGDPRTLWSEVRSVVVFGLNYAPEEDPRGILAKPDKAAISVYARNRDYHDIIKGRLKEIATRFAARAGADVKVFVDTAPVMEKPLAAAAGLGWQGKHTNLVSRTHGSWLFLGSMFTTADLAVDAEEADHCGSCRACLDICPTAAFPAPYQIDARRCISYLTIEHKGPIDPELRPLIGNRIYGCDDCLAACPWNKFASAASEMKLKARDDLQEPSITFLLTLDDPTFRAFFSGSPVKRIGRDRFIRNVLIAAGNSGEKALIGQCRMLADDASPVVRGMAVWALSRLMAAGEFSAFAAQRAGESDDDVLNEWRLAGVG

SEQ ID NO: 80320 - protein, 385 aa, Rhizobium aethiopicum
  misc_feature (1)..(385): tr|A0A1C3Y0C4|A0A1C3Y0C4_9RHIZ Epoxyqueuosine reductase OS=Rhizobium aethiopicum OX=1138170 GN=queG PE=3 SV=1
MPEAYRDDKERRRRDNLTDFVRAESAAKGFDLCRITRPDSIPDAKQRLGEFIDAGRHGTMEWMAETRERRGDPRTLWSEVRSVVVFGLNYAPEEDPRGILAKPDKAAISVYARNRDYHDIIKGRLKEIATRFAARAGADVKVFVDTAPVMEKPLAAAAGLGWQGKHTNLVSRTHGSWLFLGTMFTTADLAIDAPETDHCGSCRACLDACPTAAFPAPYQIDARRCISYLTIEHKGPIDPDLRMLIGNRIYGCDDCLAACPWNKFASAASEMKLQAREDLQEPSIAFLLTLDDPAFRAFFSGSPVKRIGRDRFIRNVLIAAGNSGEKALIPQCRMLAGDVSPVVRGMAIWALSRLMEAGEFSVFAAQRADESDDDVLNEWRLAGVG

SEQ ID NO: 80321 - protein, 388 aa, Rhizobium album
  misc_feature (1)..(388): tr|A0A2U2DS64|A0A2U2DS64_9RHIZ tRNA epoxyqueuosine(34) reductase QueG OS=Rhizobium album OX=2182425 GN=queG PE =4 SV=1
MPHAGTEEKRERRRESLTAFLRAEALAQGFDLCRITGPGSIPQAPARLAEFIDAGRHGTMDWMPETQARRADPSVLWSEVRSIAVFGLNYGPDEDPRGILDKPDKAAISVYARNRDYHDVIKGRLKEIATRFAARAKEDVKVFVDTAPVMEKPLAAAAGLGWQGKHTNLVNRTHGSWLFLGSLFTTADLVQDEPERDHCGSCRACLDACPTDAFPAPYKIDARRCISYLTIEHKGDIDPSLRVRMGNRIYGCDDCLAACPWNKFAQAASEMKFRAREDLKEPSIAFLLTLDDPTFRSFFSGSPVKRIGRHRFVRNVLIAAGNSGDRSLIGPCRECLADEMPVVRAMAVWALSRLMTPQEFGGLAEWREKEQDSAVLAEWQRAGAALCI

SEQ ID NO: 80322 - protein, 382 aa, Rhizobium altiplani
  misc_feature (1)..(382): tr|A0A125Q799|A0A125Q799_9RHIZ Epoxyqueuosine reductase OS=Rhizobium altiplani OX=1864509 GN=queG PE=3 SV=1
MAMENKDQKRRDTLTAFVRSEAKALGFDLCRITRPDAIPEAKERLGEFIDAGRHGTMEWMAETRDRRGDPRTLWSDVRSIVVFGLNYGPDEDPREILTKPDKAAISVYARNRDYHDIIKGRLKEIATRFAARAGADVKVFVDTAPVMEKPLAAAAGLGWQGKHTNLVSREHGSWLFLGSMFTTADLNIDAPEIDHCGSCRACLDICPTKAFPGPYQIDARRCISYLTIEHKGPIDPALRSLIGNRIYGCDDCLAACPWNKFAHEASEMKLQAREDLKEPSIEYLLGLDDAAFRTFFSGSPVKRIGRDRFIRNVLIAAGNSNDRRFVEQCRKLSEDPSPVVRGMAIWALSRLLEAGEFSAFAAQRPDESDSDVLSEWRLAGAV

SEQ ID NO: 80323 - protein, 385 aa, Rhizobium anhuiense
  misc_feature (1)..(385): tr|A0A432NB82|A0A432NB82_9RHIZ tRNA epoxyqueuosine(34) reductase QueG OS=Rhizobium anhuiense OX=1184720 GN=que G PE=4 SV=1
MPEPKNDDKERRRRDNLTEFVRAESAAKGFDLCRITRPDAIPEAKERLGQFIDAGRHGTMDWMAETRDRRGDPRTLWSEVRSVVVFGLNYAPEEDPRGILDKSDKAAISVYARNRDYHDVIKGRLKEIATRFAARAGADVKVFVDTAPVMEKPLAAAAGLGWQGKHTNLVSRTHGSWLFLGTMFTTADLAVDAAENDHCGSCRACLDICPTAAFPAPYQIDARRCISYLTIEHKGPIDADLRVLIGNRIYGCDDCLAACPWNKFASSASEMKLQAREELKEPSIAFLLTLDDAAFRTFFSGSPVKRIGRDRFVRNVLIAAGNSGETALIGQCRMLASDPSPVVRGMAVWALSRLMEAGEFSAFAAQRAHERDDDVLNEWRLAGVG

SEQ ID NO: 80324 - protein, 385 aa, Rhizobium azibense
  misc_feature (1)..(385): tr|A0A4R8ARY6|A0A4R8ARY6_9RHIZ Epoxyqueuosine reductase OS=Rhizobium azibense OX=1136135 GN=EV128_101719 PE=4 SV=1
MPERIADDKERKRRDNLTAFVRAQAATFGFELCRITRPDSIPEAKERLGEFIDAGRHGTMEWMAETRDRRGDPRTLWSDVKSIVVFGLNYGPGEDPRYILEKPDKAAISVYARNRDYHDVIKGRLKEIATRFAARAGADVKVFVDTAPVMEKPLAAAAGLGWQGKHTNLVSRSHGSWLFLGSMFTTADLNIDDAEIDHCGSCRACLDSCPTNAFPAPYQIDARRCISYLTIEHKGPIDLEFRPLIGNRIYGCDDCLAACPWNKFAVSASEMKLQARDDLKEPSIAFLLTLDDAAFRIFFSGSPVKRIGRARFIRNVLIAAGNSGDRSLADQCRWLATDASPVVRGMAIWALSRLMEPGEFAVFAAQRPDETDVGVLAEWQLAGVV

SEQ ID NO: 80325 - protein, 385 aa, Rhizobium azibense
  misc_feature (1)..(385): tr|A0A4R3RV15|A0A4R3RV15_9RHIZ Epoxyqueuosine reductase OS=Rhizobium azibense OX=1136135 GN=queG PE=3 SV=1
MPERIADDKERKRRDSLTAFVRAEAAKLGFELCRITRPDSIPEAKERLGEFIDAGRHGTMEWMAETRDRRGDPRTLWSDVKSIVVFGLNYGPGEDPRHILETPDKAAISVYARNRDYHDVIKGRLKEIATRFAARAGADVKVFVDTAPVMEKPLAAAAGLGWQGKHTNLVSRSHGSWLFLGSMFTTADLNIDDAEIDHCGSCRACLDACPTNAFPAPYQIDARRCISYLTIEHKGPIDVEFRPLIGNRIYGCDDCLAACPWNKFAASASEMKLRARDDLKEPSISFLLTLDEAAFRTFFSGSPVKRIGRDRFIRNVLIAAGNSGDQSLADQCRRLATDASADVRGMAIWALSRLMEPGEFGDFAAQRPDETDAGVLAEWQLAGVM

SEQ ID NO: 80326 - protein, 385 aa, Rhizobium esperanzae
  misc_feature (1)..(385): tr|A0A246E467|A0A246E467_9RHIZ Epoxyqueuosine reductase OS=Rhizobium esperanzae OX=1967781 GN=queG PE=3 SV=1
MPEAYRDDKERRRRDNLTEFVRTESAAKGFDLCRITRPDAIPEAKQRLGQFIDAGRHGTMEWMAETRERRGDPLTLWSEVRSVVVFGLNYAPEEDPRGILDKPDKAAISVYARNRDYHDIIKGRLKEIATRFAARAGADVKVFVDTAPVMEKPLAAAAGLGWQGKHTNLVSRTHGSWLFLGSMFTTADLAVDAPETDHCGSCRACLDVCPTAAFPAPYQIDARRCISYLTIEHKGPIDPDLRPLIGNRIYGCDDCLAACPWNKFAVSASEMKLKAREDLQEPSLTFLLTLDDAAFRAFFSGSPVKRIGRDRFIRNVLIAAGNSGETALIAQCRELAGDAAPAVRGMAVWALSRLMEAGEFSAFAAQRTDESDDDVLHEWRLAGVG

SEQ ID NO: 80327 - protein, 386 aa, Rhizobium etli
  misc_feature (1)..(386): tr|A0A327XRV6|A0A327XRV6_RHIET Epoxyqueuosine reductase OS=Rhizobium etli OX=29449 GN=queG PE=3 SV=1
MPERSALTKEDKRLQTLTAFVKAEAQALGFDLCRITRPDSIPEAKERLGQFIDAGRHGTMEWMAETRERRGDPRTLWSDVKSVVVFAMNYGPEEDPRGILEKPDKAAISVYARNRDYHDIIKGRLKEIATRFAARAGEDVKVFVDTAPVMEKPLAAAAGLGWQGKHTNLVSRAHGSWLFLGSMFTTADLLIDAPEIDHCGSCRACLDACPTAAFPDPYQIDARRCISYLTIEHKGPIDPAIRPLIGNRIYGCDDCLAACPWNKFASAASEIKLKAREDLQEPDISALLALDDPSFRSFFSGSPVKRIGRDRFVRNVLIAAGNSGDRQFLDACLSLSADASPVVRAMAIWALSRLMEAGEFQRFAAQRPQDESDSDVLNEWRLAGAA

SEQ ID NO: 80328 - protein, 383 aa, Rhizobium etli
  misc_feature (1)..(383): tr|A0A0A8G7C8|A0A0A8G7C8_RHIET Epoxyqueuosine reductase OS=Rhizobium etli bv. phaseoli str. IE4803 OX=1432049 GN=queG PE=3 SV=1
MPEIDDKERRRRDNLTEFVRAESAAKGFDLCRITRPDAIREAKERLGQFIDAGRHGTMEWMAETRDRRGDPLTLWSEVRSVVVFGLNYAPEEDPRGILGKPDKAAISVYARNRDYHDIIKGRLKEIATRFAARAGADVKVFVDTAPVMEKPLAAAAGLGWQGKHTNLVSRTHGSWLFLGSMFTTADLTVDAPETDHCGSCRACLDICPTAAFPAPYQIDARRCISYLTIEHKGPIDPDLRPLIGNRIYGCDDCLAACPWNKFAVSAFEMKLKAREDLKEPSLAFLLTLDDAAFRAFFSGSPVKRIGRDRFIRNVLIAAGNSGETALIAQCRELAGDAAPAVRGMAIWALSRLMEAGEFSIFAAQRTDENDDDVLNEWRLAGVD

SEQ ID NO: 80329 - protein, 382 aa, Rhizobium favelukesii
  misc_feature (1)..(382): tr|W6RP28|W6RP28_9RHIZ Epoxyqueuosine reductase OS=Rhiz obium favelukesii OX=348824 GN=queG PE=3 SV=1
MATENKEQRRRDTLTAFVRAEAKALGFDLCRVTRPDAIPEAKERLGEFIDAGRHGTMEWMAQTRDRRGDPRTLWNDVRSIVVFGLNYGPEDDPREILAKSDKAAISVYARNRDYHDVIKGRLKEIATRFVARAGADVKVFVDTAPVMEKPLAAAAGLGWQGKHTNLVSREHGSWLFLGSMFTTADLNTDAPEIDHCGSCRACLDICPTNAFPGPYQIDARRCISYLTIEHKGPIDPALRPLIGNRIYGCDDCLAACPWNKFAHEASEMKLQAREDLKEPSIEDLLSLDDASFRAFFSGSPVKRIGRDRFIRNVLIAAGNSGDRRFVDRCRALSRDASPVVRGMAVWALSRLLEAGEFSAFAAQKPDESDSDVLDEWRLAGAV

SEQ ID NO: 80330 - protein, 390 aa, Rhizobium fredii
  misc_feature (1)..(390): tr|A0A2A6M128|A0A2A6M128_RHIFR Epoxyqueuosine reductase OS=Rhizobium fredii OX=380 GN=queG PE=3 SV=1
MPGDAPKAENQGRKRRTLTAFLKEEAAAKGFDLCRITRPDAIPEAPDRLRQFLAAGCHGTMEWLAETAERRAEPRVLWSDVRSIVLFGMNYGPDSDPLAILAKRDRGAISVYAQNRDYHDVVKGRLKEIATRFAARAGEDVKVFVDTAPVMEKPLAEKAGIGWQGKHTNLVSREFGSWLFLGSLFTTADLDLDAPERDNCGSCRACLDACPTGAFPVPYRIDARRCISYLTIEHKGPIDPELRPLIGNRIYGCDDCLAVCPWNKFARSASEMKLKARDDLQEPELAALLTLDDVAFRSLFSGSPVKRIGRDRFVRNVLIAAGNSGQKDLIPACKALARDGSPTVRGMAVWALSRLMPAGDLAAFAAECGQETDDEVLSEWEMAGVSRCMS

SEQ ID NO: 80331 - protein, 390 aa, Rhizobium fredii
  misc_feature (1)..(390): tr|G9A678|G9A678_RHIFH Epoxyqueuosine reductase OS=Rhiz obium fredii (strain HH103) OX=1117943 GN=queG PE=3 SV= 1
MPGDAIKAENQGRKRRTLTAFLKEEAAAKGFDLCRITRPDAIPEAPDRLAQFLAAGCHGTMEWLAETAERRADPRVLWSDVRSIVLFGMNYGPDSDPLAILARRDRGAISVYAQNRDYHDVVKGRLKEIATRFAARAGEDVKVFVDTAPVMEKPLAEKAGIGWLGKHTNLVSREFGSWLFLGSLFTTADLDLDAPERDNCGSCRACLDACPTGAFPAPYRIDARRCISYLTIEHKGPIDLELRPLIGNRIYGCDDCLAVCPWNKFARSASEMKLKAREDLQEPELAALLTLDDAAFRSLFSGSPVKRIGRDRFVRNVLIAAGNSGQKDLIPACKALARDGSPTVRGMAVWALSRLMPAGDLAAFAAECGQETDDEVLSEWEMAGVSRCMS

SEQ ID NO: 80332 - protein, 385 aa, Rhizobium freirei
  misc_feature (1)..(385): tr|N6UGW2|N6UGW2_9RHIZ Epoxyqueuosine reductase OS=Rhiz obium freirei PRF 81 OX=363754 GN=queG PE=3 SV=1
MPEDRETERANKRRSALTAFLREEARAQGFDLCRITRPDAIPEAAVRLGQFLDKGHHGTMGWMEETRDRRADPRVLWSETRSIAVFGLNYGPDEDPRGILDKRDKAAISVYAQNRDYHDIIKGRLKEIATRFAARSKEDVKVFVDTAPVMEKPLAGAAGLGWQGKHTNLVSRAFGSWLFLGSMFTTADLEPDQPEVDHCGSCRACLDICPTSAFPAPYQLDARRCISYLTIEHKGPIDPELRPMIGNRIYGCDDCLAVCPWNKFASAASEMKLVARDDLKEPSIAFLLDLDDPTFRTFFSGSPVKRIGRDRFIRNVLIAAGNSRERSLTEKCRELAEDPSPVVRGMAVWALSQLMTAGEFRAFAAQRHGEADEEVRAEWKLAGVL

SEQ ID NO: 80333 - protein, 391 aa, Rhizobium galegae
  misc_feature (1)..(391): tr|A0A5J5KJA4|A0A5J5KJA4_RHIGA tRNA epoxyqueuosine(34) reductase QueG OS=Rhizobium galegae OX=399 GN=queG PE=4 SV=1
MRTLISDATSREEEKTLRRREKLTVFIREEAAAQGFDLCRITGPDSIPQAPERLEIFLADGHHGSMDWLSETRLRRADPKVLWDQVRSIVMFGLNYGPDEDPRGVLDKHDKAAISVYARNRDYHDVIKGRLKEIATRFAARAGEDVKVFVDTAPVMEKPLAEAAGLGWQGKHTNLVSRTHGSWLFLGSLFTTADLLVDEAETDHCGSCRACLDACPTSAFPAPYRLDARRCISYLTIEHKGPIDPEFRPLIGNRIYGCDDCLAACPWNKFAASASEMKLQAREDLKEPSIAFLLTLDDATFRSFFSGSPVKRIGRDRFIRNVLIAAGNSGDAMLIGQCLELAGDLSPAVRGMAIWALKRLMTDIDFARFAGARGVEDDPDVREEWRLAGAA

SEQ ID NO: 80334 - protein, 385 aa, Rhizobium gallicum
  misc_feature (1)..(385): tr|A0A1L5NDP8|A0A1L5NDP8_9RHIZ Epoxyqueuosine reductase OS=Rhizobium gallicum OX=56730 GN=queG PE=3 SV=1
MPERIADDRERKRRDNLTAFVRAEAATLGFELCRITRPDSIPEAKERLGEFIDAGRHGTMEWMAETRDRRGDPRALWSDVKSIVVFGLNYGPGEDPRSILEKPDKAAISVYARNRDYHDVIKGRLKEIATRFAARAGADVKVFVDTAPVMEKPLAAAAGLGWQGKHTNLVSRSHGSWLFLGSMFTTADLNIDDAEIDHCGSCRACLDACPTNAFPAPYQIDARRCISYLTIEHKGPIDFEFRPLIGNRIYGCDDCLAACPWNKFAVSASEMKLQARDDLKEPSIAFLLTLDDAAFRIFFSGSPVKRIGRARFIRNVLIAAGNSGDHSLADQCRWLATDASPVVRGMAIWALSRLMEPGEFAVFAAQRPDETDAGVLAEWQLAGVV

SEQ ID NO: 80335 - protein, 385 aa, Rhizobium gallicum; identical to SEQ ID NO: 80324
  misc_feature (1)..(385): tr|A0A0B4WYP6|A0A0B4WYP6_9RHIZ 4Fe-4S cluster binding p rotein OS=Rhizobium gallicum bv. gallicum R602 OX=14181 05 GN=RGR602_CH00324 PE=4 SV=1

SEQ ID NO: 80336 - protein, 382 aa, Rhizobium grahamii
  misc_feature (1)..(382): tr|A0A370KVP1|A0A370KVP1_9RHIZ Epoxyqueuosine reductase OS=Rhizobium grahamii OX=1120045 GN=queG PE=3 SV=1
MATENKEQKRRDTLTAFVRSEAKALGFDLCRITRADAIPEAKERLGEFIDAGRHGTMEWMAETRDRRGDPRNLWSDVRSIVVFGLNYGPDEDPRDILAKPDKAAISVYARNRDYHDVIKGRLKEIATRFAARAGADVKVFVDTAPVMEKPLAAAAGLGWQGKHTNLVSRELGSWLFLGSMFTTADLNTDAAEVDHCGSCRACLDICPTNAFPAPYQIDARRCISYLTIEHKGPIDPVLRPLIGNRIYGCDDCLAVCPWNKFAHEASEMKLQPREDLKEPTIEFLLSLDDAAFRAFFSDSPVKRIGRDRFIRNVLIAAGNSGDRRFVERCRALSQDPSPVVRGMAVWALSRLFEAGEFAAFAAQRPDESDSDVRDEWRLAGAV

SEQ ID NO: 80337 - protein, 382 aa, Rhizobium grahamii
  misc_feature (1)..(382): tr|S3I458|S3I458_9RHIZ Epoxyqueuosine reductase OS=Rhiz obium grahamii CCGE 502 OX=990285 GN=queG PE=3 SV=1
MATENKEQKRRDTLTAFVRSEAKALGFDLCRITRPDAIPEAKERLGEFIDAGRHGTMDWMAETRDRRGDPRTLWSDVRSIVVFGLNYGPDEDPRDILAKPDKAAISVYARNRDYHDVIKGRLKEIATRFAARAGADVKVFVDTAPVMEKPLAAAAGLGWQGKHTNLVSRELGSWLFLGSMFTTADLNIDAAEVDHCGSCRACLDICPTNAFPAPYQIDARRCISYLTIEHKGPIDPGLRPLIGNRIYGCDDCLAVCPWNKFAHEASEMKLQPREDLKEPTIEFLLSLDDAAFRVFFSGSPVKRIGRDRFIRNVLIAAGNSGDRRFVERCRALSQDPSPVVRGMAVWALSRLFEAGEFAAFAAQRPDESDSDVRDEWRLAGAV

SEQ ID NO: 80338 - protein, 385 aa, Rhizobium hainanense
  misc_feature (1)..(385): tr|A0A1C3WDM3|A0A1C3WDM3_9RHIZ Epoxyqueuosine reductase OS=Rhizobium hainanense OX=52131 GN=GA0061100_11624 PE =4 SV=1
MPDDREAEKTDKRRKALTAFLREEALAQGFDLCRITRPDAIPEAAVRLGEFLDKGRHGTMGWMAETRDRRGDPRVLWGETRSIAVFGLNYGPDEDPRGILEKKDKAAISVYARNRDYHDIIKGRLKEIATRFAARSKEDVKVFVDTAPVMEKPLAGAAGLGWQGKHTNLVSRDFGSWLFLGSMFTTADLEPDEPEIDHCGSCRACLDVCPTAAFPAPYQLDARRCISYLTIEHKGPIDPELRPLIGNRIYGCDDCLAACPWNKFASAASEMKLVARDDLKGPSIAFLLDLDDAAFRAFFSGSPVKRIGRDRFIRNVLIAAGNSGQRSLIGRCCELTGDPSPVVRGMAIWTLSRLMTAGEFNAFAAQRGDEADEEVRTEWALAGVL

SEQ ID NO: 80339 - protein, 385 aa, Rhizobium hidalgonense
  misc_feature (1)..(385): tr|A0A2A6KHD6|A0A2A6KHD6_9RHIZ tRNA epoxyqueuosine(34) reductase QueG OS=Rhizobium hidalgonense OX=1538159 GN= queG PE=4 SV=1
MPEADRDDKERRRRDNLTEFVRAESAAKGFDLCRITRPDAIPEAKQRLGEFIDAGRHGTMEWMAETRDRRGDPRTLWSEVKSVVVFGLNYAPEEDPRGILDKSDKAAISVYARNRDYHDVIKGRLKEIATRFAARAGADVKVFVDTAPVMEKPLAAAAGLGWQGKHTNLVSRTHGSWLFLGTMFTTADLAVDAEETDHCGSCRACLDACPTAAFPAPYQIDARRCISYLTIEHKGPIDPELRPLIGNRIYGCDDCLAACPWNKFASSASEMKLQAREELKEPSIAFLLTLDDAAFRAFFSGSPVKRIGRDRFVRNLLIAAGNSGEKALIAQCRMLAGDTSPVVRGMAVWALSRLMAAGEFSLFAAQRAGESDGDVLNEWRLAGVV

SEQ ID NO: 80340 - protein, 384 aa, Rhizobium ipomoeae
  misc_feature (1)..(384): tr|A0A4S8P1T1|A0A4S8P1T1_9RHIZ tRNA epoxyqueuosine(34) reductase QueG OS=Rhizobium ipomoeae OX=1210932 GN=queG PE=4 SV=1
MREPQSDPKIRKRREELTRFLRQEAAAQGFDLCRVTLPDSIPQAPERLQHFLDAERHGTMAWMEETKERRADPRVLWSDVRSVVMFGMNYGPDDDPRLLQEQPDKAAISVYARNRDYHDVIKGRLKEIATRFAARAGEDVKVFVDTAPVMEKPLAAAAGLGWQGKHTNLVSREYGSWLFLGSLFTTAELDIDTGEVDHCGSCRACLAACPTDAFPAPYQIDARRCISYLTIEHKGTIHPDLRPAFGNRIYGCDDCLAACPWNKFAEEAREMKLQARDDLKAPDIASLLTLDDAAFRSLFSGSPVKRIGRNRFVRNVLIAAGNSGLPHLIPLCSSLLDDASPDVRGMAVWALSRLMPAADFDALRQTRQAGETDDEVQSEWMRER

SEQ ID NO: 80341 - protein, 385 aa, Rhizobium jaguaris
  misc_feature (1)..(385): tr|A0A387FF19|A0A387FF19_9RHIZ tRNA epoxyqueuosine(34) reductase QueG OS=Rhizobium jaguaris OX=1312183 GN=queG PE=4 SV=1
MPENRAAEKEGKRRHTLTAFLRDEARAQGFDLCRITRPDAIPEAGIRLDQFLERGFHGTMAWMEETRERRGNPHVLWNDVRSIAVFGLNYGPEEDPRGILEKPDKGAISVYARNRDYHDVIKGRLKEIATRFAARSQEDVKVFVDTAPVMEKPLAAAAGLGWQGKHTNLVSRTHGSWLFLGSMFTTADLDPDEAEIDRCGSCRACLDACPTAAFPAPYQLDARRCISYLTIEHKGPIDPWLRPLIGNRIYGCDDCLAACPWNKFASAASEMKLAARNDLKEPSISFLLTLDDAAFRTFFSGSPVKRIGRDRFVRNVLIAAGNSGERGLIATCRTLAGDPSPAVRGMAVWALSRLMTAGEFRSFAAERGDEPDADVRAEWTMAGVA

SEQ ID NO: 80342 - protein, 385 aa, Rhizobium laguerreae
  misc_feature (1)..(385): tr|A0A1S9GXA9|A0A1S9GXA9_9RHIZ tRNA epoxyqueuosine(34) reductase QueG OS=Rhizobium laguerreae OX=1076926 GN=BS 630_10090 PE=4 SV=1
MPEADNDDKERRRRDNLTEFVRAESAAKGFDLCRITRPDAITEAKERLGQFIDAGRHGTMDWMAETRDRRGDPRTLWSEVRSVVVFGLNYAPDEDPRGILDKPDKAAISVYARNRDYHDVIKGRLKEIATRFAARAGADVKVFVDTAPVMEKPLAEAAGLGWQGKHTNLVSRVHGSWLFLGTMFTTADLVIDEAETDHCGSCRACLDICPTAAFPAPYQIDARRCISYLTIEHKGPIDADLRGLIGNRIYGCDDCLAACPWNKFASSASEMKLKAREDLKEPSIAFLLTLDDAAFRAFFSGSPVKRIGRDRFIRNVLIAAGNSGDKVLVGPCRLLSDDPSPVVRGMAVWALSRLMEAGEFAAFAARRTDERDDDVLNEWRLAGVG

SEQ ID NO: 80343 - protein, 385 aa, Rhizobium laguerreae
  misc_feature (1)..(385): tr|A0A4R3QXE0|A0A4R3QXE0_9RHIZ Epoxyqueuosine reductase OS=Rhizobium laguerreae OX=1076926 GN=EV131_104204 PE= 4 SV=1
MPEPDNDDKDRRRRDNLTEFVRAESAAKGFDLCRITRPDAIPEAKERLGQFIDAGRHGTMDWMAETRDRRGDPRTLWSEVRSVVVFGVNYAPDEDPRSILDKPDKAAISVYARNRDYHDVIKGRLKEIATRFAARAGADVKVFVDTAPVMEKPLAAAAGLGWQGKHTNLVSRVHGSWLFLGTMFTTADLAVDAPESDHCGSCRACLDICPTAAFPAPYQIDARRCISYLTIEHKGPIDADLRGLIGNRIYGCDDCLAACPWNKFASSASEMKLKAREDLKEPSIAFLLTLDDAAFRAFFSGSPVKRIGRDRFVRNVLIAAGNSGDKALIGQCRGLSEDPSPVVRGMAVWALSRLMEAGEFAAFAAQRADERDDDVLNEWRLAGVG

SEQ ID NO: 80344 - protein, 385 aa, Rhizobium leguminosarum
  misc_feature (1)..(385): tr|A0A4V1P2M3|A0A4V1P2M3_RHILE tRNA epoxyqueuosine(34) reductase QueG OS=Rhizobium leguminosarum OX=384 GN=B5P 46_04185 PE=4 SV=1
MPEPKNDDKERRRRDNLTEFVRAESAAKGFDLCRITRPDTIPQAKERLGQFIDAGRHGTMDWMAETRDRRGDPRTLWSAVRSVVVFGLNYAPEEDPRGILDKPDKAAISVYARNRDYHDVIKGRLKEIATRFAVRAGADVKVFVDTAPVMEKPLAEAAGLGWQGKHTNLVSRVHGSWLFLGTMFTTADLAVDAPESDHCGSCRACLDICPTAAFPAPYQIDARRCISYLTIEHKGPIDADLRVLIGNRIYGCDDCLAACPWNKFASSASEMKLKAREDLKEPSIAFLLTLDDAAFRAFFSGSPVKRIGRDRFVRNVLIAAGNSGDKVLIGPCRLLSEDPSPVVRGMAVWALSRLMEAGEFSAFAAQRADERDDDVLNEWRLAGVG

SEQ ID NO: 80345 - protein, 385 aa, Rhizobium leguminosarum
  misc_feature (1)..(385): tr|J0JX01|J0JX01_RHIL1 Epoxyqueuosine reductase OS=Rhiz obium leguminosarum bv. viciae (strain WSM1455) OX=7551 76 GN=queG PE=3 SV=1
MPEPDYDDKERRRRDNLTEFVRAESAAKGFDLCRITRPDAIPQAKERLDEFIDAGRHGTMDWMAETRDRRGHPRTLWSEVRSVVVFGLNYAPEEDPRGILDKPDKAAISVYARNRDYHDVIKGRLKEIATRFAARAGADVKVFVDTAPVMEKPLAAAAGLGWQGKHTNLVSRAHGSWLFLGTMFTTADLAVDAPETDHCGSCRACLDICPTAAFPAPYQIDARRCISYLTIEHKGPIDADLRGLIGNRIYGCDDCLAACPWNKFASSASEMKLQAREDLKEPSIAFLLTLDDAAFRAFFSGSPVKRIGRDRFVRNVLIAAGNSGDKALIGPCRGLSEDPSPVVRGMAVWALWRLMEAGEFAAFAAQMADERDDDVLNEWRLAGVG

SEQ ID NO: 80346 - protein, 385 aa, Rhizobium loessense
  misc_feature (1)..(385): tr|A0A1G4Q0H8|A0A1G4Q0H8_9RHIZ Epoxyqueuosine reductase OS=Rhizobium loessense OX=158890 GN=SAMN02927900_01192 PE=4 SV=1
MPERIADDKERKRRDNLTAFVRAEAATLGFELCRITRPDSIPEAKERLGEFIDAGRHGTMEWMAETRDRRGDPRTLWSDVKSIVVFGLNYGPGEDPRHILEKPDKAAISVYARNRDYHDVIKGRLKEIATRFAARAGADVKVFVDTAPVMEKPLAAAAGLGWQGKHTNLVSRSHGSWLFLGSMFTTADLNTDDAEIDHCGSCRACLDACPTNAFPAPYQIDARRCISYLTIEHKGPIDFEFRPLIGNRIYGCDDCLAACPWNKFAVSASEMKLQSRDDLKEPSIAFLLTLDDAAFRSFFSGSPVKRIGRARFIRNVLIAAGNSGDHSLVDQCRWLATDASPVVRGMAIWALSRLMEPGEFAVFAAQRPDEIDAGVLAEWQLAGVV

SEQ ID NO: 80347 - protein, 384 aa, Rhizobium loti
  misc_feature (1)..(384): tr|A0A101KNZ1|A0A101KNZ1_RHILI Epoxyqueuosine reductase OS=Rhizobium loti OX=381 GN=queG PE=3 SV=1
MRTSISDKTRLRALIDAEARRAGFEAVAVTRPDAIPRAPARLAEFVADGFHGSMDWIAETIERRAEPSTLWPEVRSIIVLAMNYGPDRDPREILQKRDRGAISVYAQNRDYHDVMKGRLKEIAGKIVARAGGDVKVFVDTAPVMEKPLAEAAGLGWQGKHTNLVSREHGSWLFLGTIFTTAELEPDAPEVDHCGSCRACLDVCPTDAFPAPYRLDARRCISYLTIENMGPIPREFREKIGNRIYGCDDCLAACPWNKFASIASEAKLAARNDLREPSLSELLLLDDAAFRSFFSGSPIKRIGRDRFVRNVLVAAGNSDDTSLTPVVRGLLDDGSPLVRGAAVWALSRLMASSDFAKLAASAMKTESDAAVRDEWLSTLPDAEGS

SEQ ID NO: 80348 - protein, 387 aa, Rhizobium loti
  misc_feature (1)..(387): tr|A0A2T3F242|A0A2T3F242_RHILI Epoxyqueuosine reductase OS=Rhizobium loti OX=381 GN=queG PE=3 SV=1
MPGDAAKADNQGRKRRTLTAFLKEEAAAKGFDICRITHPDAIPQAPERLRQFLAAGAHGTMDWLAETAERRSDPRVLWSEVRSIVLFGMNYAPEDDPREVLARRDRGAISVYARNRDYHDVVKGRLKEIATRFAARAGEDVKVFVDTAPVMEKPLAEKAGIGWQGKHTNLVSREFGSWLFLGSLFTTAELDLDEPERDHCGSCRACLDACPTDAFPAPYRIDARRCISYLTIEHKGSIAPELRPLIGNRIYGCDDCLAACPWNKFARSASEMKLQARDDLREPELSFLLTLDDPGFRAFFSGSPVKRIGRDRFVRNALIAAGNSGEKSLIEVCKALAADASPTVRGMAVWALSRLISSADLAVFARQCGPETDDEVLAEWQMAGVNR

SEQ ID NO: 80349 - protein, 385 aa, Rhizobium lusitanum
  misc_feature (1)..(385): tr|A0A1C3W5C0|A0A1C3W5C0_9RHIZ Epoxyqueuosine reductase OS=Rhizobium lusitanum OX=293958 GN=GA0061101_108207 P E=4 SV=1
MPEDREAEKAGKRRRALTAFLREEAGAQGFDLCRITRPDAIPEAAVRLGQFLEQGHHGTMSWMEETRDRRGDPRVLWRETRSIAVFGLNYGPDEDPRGILEKTDKAAISVYARNRDYHDVIKGRLKEIATRFAARSKEDVKVFVDTAPVMEKPLAAAAGLGWQGKHTNLVSRTHGSWLFLGSMFTTADLEPDEPEIDHCGSCRACLDVCPTAAFPAPYQLDARRCISYLTIEHKGPIDPQIRPMIGNRIYGCDDCLAACPWNKFASAASEMKLVAREELKEPSIAFLLTLDDTAFRAFFSGSPVKRIGRDRFIRNVLIAAGNSGERALIELCRDLAKDPSSVVRGMAVWALSRLMTAGEFRAFAAERDDEPDEEVRAEWKIAGAM

SEQ ID NO: 80350 - protein, 387 aa, Rhizobium meliloti
  misc_feature (1)..(387): tr|A0A2J0ZAD3|A0A2J0ZAD3_RHIML Epoxyqueuosine reductase OS=Rhizobium meliloti OX=382 GN=queG PE=3 SV=1
MPGDAAKAENQGRKRRTLTAFLKEEAAAKGFDICRITHPDAIPHAPERLRQFLAAGAHGTMDWLAETAERRSDPRVLWSEVRSIVLFGMNYAPEDDPRDVLARRDRGAISVYARNRDYHDVVKGRLKEIATRFAARAGEDVKVFVDTAPVMEKPLAEKAGIGWQGKHTNLVSREFGSWLFLGSLFTTAELELDEPERDHCGSCRACLDACPTDAFPAPYRIDARRCISYLTIEHKGSIAPELRPLIGNRIYGCDDCLAACPWNKFARSASEMKLQAREDLKEPELSFLLTLDDTGFRAFFSGSPVKRIGRDRFVRNALIAAGNSGEKNLTEVCKALAADASPTVRGMAVWALSRLISSTDLAVFARQCGPETDDEVLAEWQMAGVNR

SEQ ID NO: 80351 - protein, 366 aa, Rhizobium meliloti
  misc_feature (1)..(366): tr|Q92SP4|Q92SP4_RHIME Epoxyqueuosine reductase OS=Rhiz obium meliloti (strain 1021) OX=266834 GN=queG PE=3 SV= 1
MPGDAAKADNQGRKRRTLTAFLKEEAAAKGFDICRITHPDAIPQAPERLRQFLAAGAHGTMDWLAETAERRSDPRVLWSEVRSIVLFGMNYAPEDDPREVLARRDRGAISVYARNRDYHDVVKGRLKEIATRFAARAGEDVKVFVDTAPVMEKPLAEKAGIGWQGKHTNLVSREFGSWLFLGSLFTTAELDLDEPERDHCGSCRACLDACPTDAFPAPYRIDARRCISYLTIEHKGSIAPELRPLIGNRIYGCDDCLAACPWNKFARSASEMKLQARDDLREPELSFLLTLDDPGFRAFFSGSPVKRIGRDRFVRNALIAAGNSGEKSLIEVCKALAADASPTVRGMAVWALSRLISSADLAVFAR

SEQ ID NO: 80352 - protein, 382 aa, Rhizobium mesoamericanum
  misc_feature (1)..(382): tr|K0PWH4|K0PWH4_9RHIZ Epoxyqueuosine reductase OS=Rhiz obium mesoamericanum STM3625 OX=1211777 GN=queG PE=3 SV =1
MATENKELKRRDTLTAYIRSQAKALGFDLCRITRPDAIPEAKQRLGEFIDAGRHGTMEWMAETRDRRGDPRTLWSDVRSIVVFGLNYGPDEDPRDILKKPDKAAISVYARNRDYHDVIKGRLKEIATRFAARAGADVKVFVDTAPVMEKPLAAAAGLGWQGKHTNLVSRELGSWLFLGSMFTTANLNIDNPEVDHCGSCRACLDICPTDAFPGPYQIDARRCISYLTIEHKGPIDPTLRPLIGNRIYGCDDCLAACPWNKFAHEASEMKLRAREDLKEPTIEYLLGLDDAAFRTFFSGSPVKRIGRDRFIRNVLIAAGNSGERRFVEKCHALTRDPSPVVRGMAVWALSRLLEAGEFSAFAAQRPDESDSDVLNEWRLAGAV

SEQ ID NO: 80353 - protein, 385 aa, Rhizobium miluonense
  misc_feature (1)..(385): tr|A0A1C3U0K9|A0A1C3U0K9_9RHIZ Epoxyqueuosine reductase OS=Rhizobium miluonense OX=411945 GN=queG PE=3 SV=1
MPEDREAEKAGKRRSALTAFLREEARAQGFDLCRITRPDAIPQAAVRLGQFLDKGHHGTMGWMAETRERRGDPRVLWSETRSIVVFGLNYGPDEDPRGVLEKKDKAAISVYARNRDYHDIIKGRLKEIATRFAARSKEDVKVFVDTAPVMEKPLAGAAGLGWQGKHTNLVSRAFGSWLFLGSMFTTADIEPDEPEIDHCGSCRACLDVCPTNAFPAPYQLDARRCISYLTIEHKGPIDPELRPMIGNRIYGCDDCLAACPWNKFASAASEMKLVARDDLKEPSIAFLLTLDDAAFRAFFSGSPVKRVGRDRFIRNVLIAAGNSGEPSLIGRCCELAEDPSPVVRGMAVWALSRLMTSGEFRAFAAQRHDEADEEVRAEWTLAGVL

SEQ ID NO: 80354 - protein, 385 aa, Rhizobium mongolense
  misc_feature (1)..(385): tr|A0A559ST78|A0A559ST78_9RHIZ Epoxyqueuosine reductase OS=Rhizobium mongolense USDA 1844 OX=1079460 GN=queG P E=3 SV=1
MPQRIADDKERKRRDNLTAFVRAEAATLGFELCRITRPDSIPEAKERLGEFIDAGRHGTMEWMAETRDRRGDPRTLWSDVKSIVVFGLNYGPEEDPRRILEKPDKAAISVYARNRDYHDVVKGRLKEIATRFAARAGADVKVFVDTAPVMEKPLAAAAGLGWQGKHTNLVSRSHGSWLFLGSMFTTADLNTDDAEIDHCGSCRACLDACPTNAFPAPYQIDARRCISYLTIEHKGPIDLEFRPLIGNRIYGCDDCLAACPWNKFAVSASEMKLQARGDLKEPSIAFLLTLDDAAFRSFFSGSPVKRIGRARFIRNVLIAAGNSGDHSLADQCRSLATDASPVVRGMAIWALSRLVKPGEFAVFAAQRPDETDAGVLAEWQLAGVV

SEQ ID NO: 80355 - protein, 385 aa, Rhizobium multihospitium
  misc_feature (1)..(385): tr|A0A1C3WG51|A0A1C3WG51_9RHIZ Epoxyqueuosine reductase OS=Rhizobium multihospitium OX=410764 GN=GA0061103_540 6 PE=4 SV=1
MPDDRETEKAGKQRRALTVFLREEARAQGFDLCRITRPDAIPEAAIRLGQFLDKGHHGTMGWMEETRDRRGDPRVLWSETRSIAVFGLNYCPDEDPRGILEKKDKAAISVYARNRDYHDVIKGRLKEIATRFAARSKEDVKVFVDTAPVMEKPLAAAAGLGWQGKHTNLVSRAFGSWLFLGSMFTTADLEPDEAEVDHCGSCRACLDACPTAAFPAPYQLDARRCISYLTIEHKGPIDPEFRSLIGNRIYGCDDCLAACPWNKFASTASEMKLVAREDLKEPSIAFLLDLDDAAFRTFFSGSPVKRIGRDRFIRNVLIAAGNSGERSLIERCCELAGDPSPVVRGMAIWALSRLMTAGEFSAFAAQRHEEADEEVRAEWKLAGVL

SEQ ID NO: 80356 - protein, 384 aa, Rhizobium naphthalenivorans
  misc_feature (1)..(384): tr|A0A512HE29|A0A512HE29_9RHIZ Epoxyqueuosine reductase OS=Rhizobium naphthalenivorans OX=1118451 GN=queG PE=3 SV=1
MPEAQAISTSDRKRASLTAFIKKEAEALGFELCRVVAPDSIPDAPARLSSYIAAGYHGTMDWMPETRERRADPRVLWSEVRSIVMFGMNYGPDLDPRHLQQEPGKGAISVYARNRDYHDVMKGRLKEIATRFAARSGADVKVFVDTAPVMEKPLAAEAGLGWQGKHTNLVSRKFGSWLFLGSLFTTADLNRDAPEIDHCGSCRACLDACPTDAFPAPYKIDARRCISYLTIEHKGSIDPALRAAFGNRIYGCDDCLSVCPWNKFAQAAREMKLQARADLIEPDLRFLLALDDPHFRTFFSGSPVKRIGRNRFVRNCLIAAGNSALPELIPACQTLVDDPAPEVRGMAVWALSRLMPGPEFERLSRERLPLETDAEVRREWMLSE

SEQ ID NO: 80357 - protein, 383 aa, Rhizobium nepotum
  misc_feature (1)..(383): tr|A0A0D8KH53|A0A0D8KH53_9RHIZ Epoxyqueuosine reductase OS=Rhizobium nepotum 39/7 OX=1368418 GN=queG PE=3 SV=1
MDVASDKQRIRARKLTDFVRQEALSLGFDLCRITAPDSIPLAPERLRQFLDKGYHGTMAWMEETEARRAEPKTLWGDVRSIVMFGLNYGPEEDPRGILSKPDKAAISVYARNRDYHDVIKGRLKEIATRFAARAGEDVKVFVDTAPVMEKPLAAAAGLGWQGKHTNLVSRTHGSWLFLGSMFTTAELCLDEAERDHCGSCRACLDACPTAAFPAPYQLDARRCISYLTIEHKGTIPHEFRPMIGNRIYGCDDCLAACPWNKFAASASEMKLQAREDLQEPSIAFLLTLDDAAFRSFFSGSPVKRIGRNRFIRNVLIAAGNSGDRQFVEQCKSLAERDPSPEVRGMAAWALSRLMDRDEFRTYSAGRAPEPDPEAEMEWQLAEA

SEQ ID NO: 80358 - protein, 390 aa, Rhizobium oryzae
  misc_feature (1)..(390): tr|A0A1X7ETP9|A0A1X7ETP9_9RHIZ Epoxyqueuosine reductase OS=Rhizobium oryzae OX=464029 GN=queG PE=3 SV=1
MRTLISDQDQEDEKALRRREKLTAFIREEAEAQGFDLCRITRPDSIPRAPERLRTFLDEGHHGTMAWMAETRERRADPKALWSEVRSIVLFGLNYGPDEDPRGILDRPDRAAISVYARNRDYHDVIKGRLKEIATRFAARAGEDVKVFVDTAPVMEKPLAEAAGLGWQGKHTNLVSRTHGSWLFLGSLFTTAELIVDAPETDHCGSCRACLDACPTAAFPAPYRLDARRCISYLTIEHKGPIDPEFRPLIGNRIYGCDDCLAACPWNKFAASASEMKLRAREDLKEPSIAFLLTLDDAAFRTFFSGSPVKRIGRDRFVRNVLIAAGNSGDPALIGQCLELARDPSPVVRGMAIWALKRLMRPEDFARFAQTRDVEDDPGVREEWRLAGAG

SEQ ID NO: 80359 - protein, 392 aa, Rhizobium oryzae
  misc_feature (1)..(392): tr|A0A1Q9AUV2|A0A1Q9AUV2_9RHIZ Epoxyqueuosine reductase OS=Rhizobium oryzae OX=464029 GN=queG PE=3 SV=1
MRISTSDNPEGSAERQRAKLTAFLKDEARDKGFDLCRITLPSAIPQAPARLKDFLDNNYHGTMDWMAETAERRADPRALWDEVRSVVVFGMNYGPEHDPRAVLAMPDRGAISVYAQNRDYHDVIKGKLKEVATRFAARAGADVKVFVDTAPVMEKPLAEQAGLGWQGKHTNLVSRELGSWLFLGSLFTTADLMIDAPEQDHCGSCRACLDACPTDAFPAPYRIDARRCISYLTIEHKGEIEPEMRPLFGNRIYGCDDCLAACPWNKFARQAAEMKLRAREDLKAPPLRDLLALDDAAFRSLFSGSPVKRIGRDRFLRNCLIAAGNSGDPALAEPVRTLLDDGAPVVRAMAVWALARLLGMPAMHALAHRAAAEEDAAVLREWKRLEDPACIS

SEQ ID NO: 80360 - protein, 390 aa, Rhizobium oryziradicis
  misc_feature (1)..(390): tr|A0A1Q8ZT30|A0A1Q8ZT30_9RHIZ tRNA epoxyqueuosine(34) reductase QueG OS=Rhizobium oryziradicis OX=1867956 GN= BJF95_17925 PE=4 SV=1
MPHDRNSDRAAEKAAEKRRKLTAFLKEEAADKGFDVCRITPPDSMPQAPARLDAFLAANHHGTMAWMSETKERRADPRVLWSDVRSVAMFGLNYGPDSDPRALQDQPEKAAISVYARNRDYHDIIKGKLKEVATRFAARAGEDVKVFVDTAPVMEKPLAEAAGLGWQGKHTNLVSRTFGSWLFLGSLFTTADLDMDERERDHCGSCQSCLDACPTDAFPAPYQIDARRCISYLTIEHKGVIDRTLRSAFGNRIYGCDDCLAACPWNKFASLSREMKLHARADLQAPDIAFFLTLDDASFRSHFSGSPVKRIGRDRFVRNTLIAAGNSGMRAFIPQCQALLTDPSPDVRGMAVWALSRLMPPSDFKNLALYSVREPDEDVRNEWRDAGVEQ

SEQ ID NO: 80361 - protein, 383 aa, Rhizobium phaseoli
  misc_feature (1)..(383): tr|A0A2U3D4Z1|A0A2U3D4Z1_9RHIZ Epoxyqueuosine reductase OS=Rhizobium phaseoli OX=396 GN=B5K03_01375 PE=4 SV=1
MPDNDDKERRRRDNLTEFVRTESAAKGFDLCRITRPDAIPEAKQRLGQFIDAGRHGTMEWIAETRERRGDPLALWSEVRSVVVFGLNYAPEEDPRGILGKPDKAAISVYARNRDYHDIIKGRLKEIAMRFAARAGADVKVFVDTAPVMEKPLAAAAGLGWQGKHTNLVSRTHGSWLFLGSMFTTADLAVDEAETDHCGSCRACLDICPTAAFPAPYQIDARRCISYLTIEHKGPIDPDLRPLIGNRIYGCDDCLAACPWNKFAVSAAEMKLKARDDLKEPSLAFLLTLDDAAFRTFFSGSPVKRIGRDRFIRNVLIAAGNSGEKALIAQCRQLAADASPVVRGMAVWALSRLMEAGEFSGFATQRADETDDDVLTEWRLAGVS

SEQ ID NO: 80362 - protein, 383 aa, Rhizobium phaseoli
  misc_feature (1)..(383): tr|A0A0M3GQY9|A0A0M3GQY9_9RHIZ Iron-sulfur cluster bind ing protein OS=Rhizobium phaseoli Ch24-10 OX=1128399 GN =RPHASCH2410_CH08520 PE=4 SV=1
MPDNDDKERRRRDNLTEFVRAESAAKGFDLCRITRPDAIPEAKQRLGQFIDAGRHGTMEWMAETRERRGDPLTLWSEVRSVVVFGLNYAPEEDPRGILGKPDKAAISVYARNRDYHDIIKGRLKEIATRFAARAGADVKVFVDTAPVMEKPLAAAAGLGWQGKHTNLVSRAHGSWLFLGSMFTTADLAVDEAETDHCGSCRACLDICPTAAFPAPYQIDARRCISYLTIEHKGPIDPDLRPLIGNRIYGCDDCLAACPWNKFAVSAAEMKLKARENLKEPSLTFLLTLDDAAFRTFFSGSPVKRIGRDRFIRNVLIAAGNSGETALIAQCRALAGDAAPAVRGMAVWALSRLMQAGEFSAFAAQRTDESDDDVLNEWRLAGVD

SEQ ID NO: 80363 - protein, 383 aa, Rhizobium pisi
  misc_feature (1)..(383): tr|A0A427N8W0|A0A427N8W0_9RHIZ Epoxyqueuosine reductase OS=Rhizobium pisi OX=574561 GN=queG PE=3 SV=1
MPEPNDKESKRRDNLSAFVKAESAAHGFDLCRITRADAIPEAGQRLGEFIDAGRHGTMEWMAETRDRRGDPRTLWSDVKSVVVFGLNYAPEEDPRGILDKPDKAAISVYARNRDYHDVIKGRLKEIATRFAARASADVKVFVDTAPVMEKPLAVAAGLGWQGKHTNLVSRLHGSWLFLGSMFTTADLAVDAPETDHCGSCRACLDICPTAAFPAPYQIDARRCISYLTIEHKGPIDPDLRPLIGNRIYGCDDCLAVCPWNKFASSASEMKLKAREDLKEPSIAFLLTLDDAAFRAFFSGSPVKRIGRDRFIRNLLIAAGNSGMPELIAQCRLLAADPSPVVRGMAVWALSRLMEAGEFVAFAAQRADERDDGVLNEWRLAGVG

SEQ ID NO: 80364 - protein, 383 aa, Rhizobium pusense
  misc_feature (1)..(383): tr|A0A4U1K1U9|A0A4U1K1U9_9RHIZ Epoxyqueuosine reductase OS=Rhizobium pusense OX=648995 GN=queG PE=3 SV=1
MDVADEKQRIRARKLTDFIRQEALSLGFDLCRVTAPDSIPLAPERLREFLGKGYHGTMAWMEETEARRAEPKTLWSDVRSIVMFGLNYGPDEDPRNLLSKPDKAAISVYARNRDYHDVIKGRLKEIATRFAARAGEDVKVFVDTAPVMEKPLAAAAGLGWQGKHTNLVSRSHGSWLFLGSMFTTADLCLDEAEKDHCGSCRACLDACPTAAFPAPYQLDARRCISYLTIEHKGPIPHEFRPMMGNRIYGCDDCLAACPWNKFAASASEMKLQAREDLKEPSIDFLLTLDDAAFRSFFSGSPVKRIGRSRFIRNVLIAAGNSGNRQFVERCKALAETDPSPEVRGMAAWALSRLMDRGEFRTYSATRAPETDPEAEMEWQLAEA

SEQ ID NO: 80365 - protein, 383 aa, Rhizobium pusense; identical to SEQ ID NO: 74973
  misc_feature (1)..(383): tr|A0A1S9EIZ1|A0A1S9EIZ1_9RHIZ Epoxyqueuosine reductase OS=Rhizobium pusense OX=648995 GN=queG PE=3 SV=1

SEQ ID NO: 80366 - protein, 383 aa, Rhizobium radiobacter
  misc_feature (1)..(383): tr|A0A546Y6D9|A0A546Y6D9_RHIRD Epoxyqueuosine reductase OS=Rhizobium radiobacter OX=358 GN=queG PE=3 SV=1
MDVATDKQRIRARKLTDFVRQEALSLGFDLCRITAPDSIPLAPERLRLFLDSGYHGTMAWMEETEARRAEPKTLWGDVRSIVMFGLNYGPEEDPRALLSKPDKAAISVYARNRDYHDIIKGRLKEIATRFAARAGEDVKVFVDTAPVMEKPLAAAAGLGWQGKHTNLVSRTHGSWLFLGSMFTTAELCLDEAEKDHCGSCRACLNACPTAAFPAPYQLDARRCISYLTIEHKGPIPHEFRPMIGNRIYGCDDCLAACPWNKFAASASEMKLQAREDLKEPAIAFLLTLDDTAFRSFFSGSPVKRIGRNRFVRNVLIAAGNSADRQFMEQCKTLAETDPSPEVRGMAAWALSRLMDREEFRTYSAGRAPEHDPEVEMEWQQAEA

SEQ ID NO: 80367 - protein, 383 aa, Rhizobium radiobacter
  misc_feature (1)..(383): tr|A0A5B1AKH4|A0A5B1AKH4_RHIRD Epoxyqueuosine reductase OS=Rhizobium radiobacter OX=358 GN=queG PE=3 SV=1
MDVASEKQRIRAHKLTDFVRQEALSLGFDLCRITAPDSIPLAPERLRQFLDNGYHGTMAWMEETEARRAEPKTLWGDVRSIVMFGLNYGPEEDPRDLLSKPDKAAISVYARNRDYHDIIKGRLKEIATRFAARAGEDVKVFVDTAPVMEKPLAAAAGLGWQGKHTNLVSRTHGSWLFLGSMFTTAELCLDEAEKDHCGSCRACLDACPTAAFPAPYQLDARRCISYLTIEHKGPIPHEFRPMIGNRIYGCDDCLAACPWNKFAASASEMKLQAREDLKEPSIAFLLTLDDAAFRSFFSGSPVKRIGRNRFIRNVLIAAGNSADRQFVEQCKALAETDPSPEVRGMAAWALSRLMDRDEFRTYSAGRAPEPDPEAEMEWQLAEA

SEQ ID NO: 80368 - protein, 392 aa, Rhizobium rhizosphaerae
  misc_feature (1)..(392): tr|A0A1Q9AEZ0|A0A1Q9AEZ0_9RHIZ Epoxyqueuosine reductase OS=Rhizobium rhizosphaerae OX=1672749 GN=queG PE=3 SV= 1
MRISTSEDKDSPEARQKAKLTAFLKAEARDKGFDLCRITLPDSIPEAPARLRDFLDRGYHGTMDWMAETAERRADPRVLWGEVRAIVVFGMNYGPEHDPRAVLSMPDRGAISVYAQNRDYHHVIKGRLKEVATRFAARAGADVKVFVDTAPVMEKPLAEQAGLGWQGKHTNLVSRDFGSWLFLGSLFTTADLEIDAPERDHCGSCRACLSACPTDAFPAPYRIDARRCISYLTIEHKGEIAPEMRASFGNRIYGCDDCLAACPWNKFAAQAAEMKLRAREELKAPPLADLLRLDDAEFRSLFSGSPVKRIGRDRFLRNCLIAAGNSGDPALVEPVLRCLDDATPVVRAMAVWALGRLLGTAARTTLADRIAAEEDEAVLREWKRLEDPACIS

SEQ ID NO: 80369 - protein, 384 aa, Rhizobium rosettiformans
  misc_feature (1)..(384): tr|A0A4V4HR90|A0A4V4HR90_9RHIZ tRNA epoxyqueuosine(34) reductase QueG OS=Rhizobium rosettiformans W3 OX=538378 GN=queG PE=4 SV=1
MDEPQIDPKIRKLRADLTRFLRQEAEAQGFDLCRITLPDAIPEAPARLESFLEDGRHGTMAWMEETKERRSDPRVLWSDVSSIVMFGMNYGPDEDPRLLQAQPEKAAISVYARNRDYHDVIKGRLKEVATRFAARAGEDVKVFVDTAPVMEKPLAAAAGLGWQGKHTNLVSREYGSWLFLGSLFTTADLEIDEAERDHCGSCRACLDACPTNAFPAPYQIDARRCISYLTIEHKGPIDRALRPAFGNRIYGCDDCLAACPWNKFAASAREMKLVAREDLKAPDIAYFLTLDDPTFRTYFSGSPVKRIGRDRFVRNVLIAAGNSGSVELAPACQALLSDASADVRGMAAWALSRLLRGDDFMRLRAEHMPGEMDETVRQEWMTGS

SEQ ID NO: 80370 - protein, 384 aa, Rhizobium selenitireducens
  misc_feature (1)..(384): tr|A0A376ACS5|A0A376ACS5_9RHIZ Epoxyqueuosine reductase OS=Rhizobium selenitireducens ATCC BAA-1503 OX=1336235 GN=queG PE=3 SV=1
MPQEQAISAPDKKRASLTAFIKKEAEAQGFDLCRITTPDAIPEAPERLSAYIEAGYHGTMDWMPETRERRGDPRVLWPDVRSIVMFGMNYGPDLDPRYLQSRPEKGAVSVYARNRDYHDVMKGRLKEIATRFAARAGADVKVFVDTAPVMEKPLAAAAGLGWQGKHTNLVSRDFGSWLYLGSLFTTADLLLDEPEVDHCGSCRACLDACPTHAFPAPYKIDARRCISYLTIEHKGSIDPDLRAAFGNRIYGCDDCLSACPWNKFASEAREMKLQARADLLEPDLSFLLSLDDPTFRTFFSGSPVKRIGRNRFVRNCLIAAGNSGSGDLVPACRTLIGDAAPEVRGMAVWALSRLLPQADFAKMRQAHLPAETEAEVRREWTMAE

SEQ ID NO: 80371 - protein, 391 aa, Rhizobium smilacinae
  misc_feature (1)..(391): tr|A0A5C4XSN6|A0A5C4XSN6_9RHIZ tRNA epoxyqueuosine(34) reductase QueG OS=Rhizobium smilacinae OX=1395944 GN=qu eG PE=4 SV=1
MRTSISSAETTGDDKALRRREKLTAFIRQEATAQGFDLCRITLPTSIPRAPERLSTFLEDSHHGTMDWMAETKERRADPTTLWSEVRSIVMFGLNYGPEEDPRYLLSMKDKAAISVYARNRDYHDIIKGRLKEIATRFAARAGEDVKVFVDTAPVMEKPLAEAAGLGWQGKHTNLVSRSHGSWLFLGSLFTTAELTIDGAEKDHCGSCRACLDACPTAAFPAPYRLDARRCISYLTIEHKGSIDAGLRPLIGNRIYGCDDCLAACPWNKFAASSSEMKLQAREDLKEPSIAFLLTLDDPTFRSFFSGSPVKRIGRDRFVRNVLIAAGNSGDPQFIPQCRQLADDASPTVRGMAVWTLRRLMDDDAFAAFARPRVPDNDPEVRREWQMAGVD

SEQ ID NO: 80372 - protein, 383 aa, Rhizobium sophoriradicis
  misc_feature (1)..(383): tr|A0A3R9C9B8|A0A3R9C9B8_9RHIZ Epoxyqueuosine reductase OS=Rhizobium sophoriradicis OX=1535245 GN=queG PE=3 SV =1
MPDNDDKERRRRDNLTEFVRAESAAKGFDLCRITRPDAIPEAKERLGQFIDAGRHGTMEWMAETRERRGDPLTLWSEVRSVVVFGLNYAPEEDPRGILDKPDKAAISVYARNRDYHDIIKGRLKEIATRFAARAGADVKVFVDTAPVMEKPLAAAAGLGWQGKHTNLVSRTHGSWLFLGSMFTTADLAVDAPETDHCGSCRACLDICPTAAFPAPYQIDARRCISYLTIEHKGPIDPDLRPLIGNRIYGCDDCLAVCPWNKFAISAFEMKLKAREDLKEPSLAFLLTLDDAAFRAFFSGSPVKRIGRDRFIRNVLIAAGNSGETALIAQCRELAGDAAPAVRGMAVWALSRLMEAGEFSIFAAQRTDESDDDVLNEWRLAGVD

SEQ ID NO: 80373 - protein, 383 aa, Rhizobium sophoriradicis
  misc_feature (1)..(383): tr|A0A2A5KUD6|A0A2A5KUD6_9RHIZ tRNA epoxyqueuosine(34) reductase QueG OS=Rhizobium sophoriradicis OX=1535245 G N=queG PE=4 SV=1
MPDNDDKERRRRDNLTEFVRAESAAKGFDLCRITRPDAIPEAKERLGQFIDAGRHGTMEWMAETRERRGDPLTLWSEVRSVVVFGFNYAPEEDPRGILGKPDKAAISVYARNRDYHDIIKGRLKEIATRFAARAGADVKVFVDTAPVMEKPLAAAAGLGWQGKHTNLVSRTHGSWLFLGSMFTTADLAVDAPETDHCGSCRACLDICPTAAFPAPYQIDARRCISYLTIEHKGPIDPDLRPLIGNRIYGCDDCLAACPWNKFAVSAFEMKLKAREDLKEPSLAFLLTLDDAAFRAFFSGSPVKRIGRDRFIRNVLIAAGNSGETALIAQCRELAGDAAPAVRGMAVWALSRLMEAGEFSIFAAQRTDENDDDVLNEWRLAGVD

SEQ ID NO: 80374 - protein, 384 aa, Rhizobium sp.
  misc_feature (1)..(384): tr|A0A2M8UJQ1|A0A2M8UJQ1_RHISP Epoxyqueuosine reductase OS=Rhizobium sp. OX=391 GN=queG PE=3 SV=1
MPPEQADPSSDRKRASLTAFIRKEAEAQGFELCRITRPDAIPEAPARLSAYVEAGYHGTMEWMPETRERRSDPRVLWGDVRSIVMFGMNYGPDLDPRYLQAKPDKGAISVYARNRDYHDVMKGRLKEIATRFAARAGADVKVFVDTAPVMEKPLAAAAGLGWQGKHTNLVSRYYGSWLFLGSLFTTADLEVDAPEIDHCGSCRACLDACPTDAFPAPYKIDARRCISYLTIEHKGSIDPELRAAFGNRIYGCDDCLSACPWNKFAREAREMKLQARADLIEPDLTFLLSLDDPTFRAFFSGSPVKRIGRNRFVRNCLIAAGNSGLGDVIPACRTLIGDAAPEVRGMAIWALSRLLTAAEFAELREGHLPGEAEGEVRREWMMSE

SEQ ID NO: 80375 - protein, 390 aa, Rhizobium sp.
  misc_feature (1)..(390): tr|A0A095UBV1|A0A095UBV1_9RHIZ 4Fe-4S ferredoxin OS=Rhi zobium sp. YS-1r OX=1532558 GN=JL39_30900 PE=4 SV=1
MRTLISDDNREAEKALRRREKLTAFLHAEAKSQGFDLCQVTGPDSIPRAPERLEVFLAEGHHGTMDWMAETRLRRADPKVLWSEVRSIVMFGLNYGPDEDPRGILDRPDKAAISVYARNRDYHDLIKGRLKEIATRFAARAGEDVKVFVDTAPVMEKPLAEAAGLGWQGKHTNLVSRTHGSWLFLGSLFTTAELIVNEPETDHCGSCRACLDACPTAAFPAPYRLDARRCISYLTIEHKGPIAPEFRPLIGNRVYGCDDCLAACPWNKFAASASEMKLKAREDLKEPSIAFLLTLDDATFRTFFSGSPVKRIGRDRFIRNVLIAAGNSGDASLIARCRELSGDPSPVVRGMAIWALRRLMPDGDFARFAQTRRIEEDPEVLEEWRLAGAG

SEQ ID NO: 80376 - protein, 397 aa, Rhizobium straminoryzae
  misc_feature (1)..(397): tr|A0A549T7S2|A0A549T7S2_9RHIZ Epoxyqueuosine reductase OS=Rhizobium straminoryzae OX=1387186 GN=queG PE=3 SV= 1
MRTSTSDQDRPSAAEAQKAAERRRKLTGFLHAEAAAQGFDLCRITRPDAIPDAKARLDAFLAAGRHGTMAWMEETRERRADPKVLWGAVRSIVMFGLNYGPDEDPRGILDRPDRAAISVYARNRDYHDVIKGRLKEIATRFAARAGEDVKVFVDTAPVMEKPLAAAAGLGWQGKHTNLVSRSHGSWLFLGSLFTTVDLEIDAAERDHCGSCRACLDACPTAAFPAPYQIDARRCISYLTIEHKGPIDRDLRPLIGNRIYGCDDCLAACPWNKFAASASEMKFRAREDLKEPEIAALLTLDDAAFRALFSGSPVKRIGRDRFVRNVLIAAGNSGRADLIAPCLRLLTDGSDIVRAMAVWALSRLMPADAFETLKAEPRSEASAEVETEWQNAGVQTCG

SEQ ID NO: 80377 - protein, 388 aa, Rhizobium subbaraonis
  misc_feature (1)..(388): tr|A0A285UR46|A0A285UR46_9RHIZ Epoxyqueuosine reductase OS=Rhizobium subbaraonis OX=908946 GN=queG PE=3 SV=1
MAMAGAATSADRIERQRNKLKAFLLAEAADKGFDVCRVARPDSIPDAPARLDDFLAAGYHGTMDWMAETRDRRADPRALWSEVRSVVLFGMNYGPDEDPRDVLAMKNSAAISVYAKNRDYHDVIKGKLKEVATRFAARAGEDVKVFVDTAPVMEKPLAMQAGLGWQGKHTNLVSRDFGSWLFLGSMFTTAELIADDPERDHCGSCRACLDACPTSAFPAPYRIDARRCISYLTIEHKGTIERELRPLLGNRIYGCDDCLAACPWNKFAAVAAEMKFHARDDLRAPKLAELLTLDDAAFRTRFSGSPVKRIGRDRFVRNVLIAAGNSGDAALAPICATLASDPSPTVRGMAVWALRQLLARDSFEKFARRAADETDPEVRAEYEAATEV

SEQ ID NO: 80378 - protein, 385 aa, Rhizobium sullae
  misc_feature (1)..(385): tr|A0A2N0DD95|A0A2N0DD95_RHISU Epoxyqueuosine reductase OS=Rhizobium sullae OX=50338 GN=queG PE=3 SV=1
MPERMTDDKERKRRDNLTAFVHAEAAALGFDLCRITRPDSIPEAKERLGEFIDAGRHGTMEWMAETRDRRGDPRTLWSDVKSIVVFGLNYGPEEDPRQILEKPDKAAISVYARNRDYHDVIKGRLKEIATRFAARAGVDVKVFVDTAPVMEKPLAAAAGLGWQGKHTNLVSRSHGSWLFLGSMFTTADLNIDGAEIDHCGSCRACLDACPTNAFPAPYQIDARRCISYLTIEHKGPIDPEFRPLIGNRIYGCDDCLAACPWNKFAASASEMKLQARKDLKEPSIAFLLTLDDAAFRTFFSGSPVKRIGRNRFIRNVLIAAGNSGDRGLIGQCRRLAADASPVVRAMAIWALSRLMDPGEFAAFAAQRPDESDADVRAEWQLAGVV

SEQ ID NO: 80379 - protein, 385 aa, Rhizobium sullae
  misc_feature (1)..(385): tr|A0A4R3QC72|A0A4R3QC72_RHISU Epoxyqueuosine reductase OS=Rhizobium sullae OX=50338 GN=queG PE=3 SV=1
MPERMTDDKERKRRDNLTAFVHAEAAALGFDLCRITRPDSIPEAKERLGEFIDAGRHGTMEWMAETRDRRGDPRTLWSDVKSIVVFGLNYGPEEDPRQILEKPDKAAISVYARNRDYHDVIKGRLKEIATRFAARAGVDVKVFVDTAPVMEKPLAAAAGLGWQGKHTNLVSRSHGSWLFLGSMFTTADLNIDGAEIDHCGSCRACLDACPTNAFPAPYQIDARRCISYLTIEHKGPIDPEFRPLIGNRIYGCDDCLAACPWNKFAASASEMKLQARKDLKEPSIAFLLTLDDAAFRTFFSGSPVKRIGRNRFIRNVLIAAGNSGDRGLIGQCRRLAADASPVVRAMAIWALSRLMVPGEFAAFAAQRPDESDADVRAEWQLAGVV

SEQ ID NO: 80380 - protein, 390 aa, Rhizobium taibaishanense
  misc_feature (1)..(390): tr|A0A1Q9A978|A0A1Q9A978_9RHIZ Epoxyqueuosine reductase OS=Rhizobium taibaishanense OX=887144 GN=queG PE=3 SV= 1
MAEADKPGREAEKARIRAGKLTAFLKQEAADKGFDLCRITGPDSIPQAPARLSAFIKAGHHGTMAWMEETRERRGDPKVLWPEVRSVVMFGLNYGPDSDPRLLQAEPEKAAISVYARNRDYHDVIKGKLKEVATRFAARAGEDVKVFVDTAPVMEKPLAAAAGLGWQGKHTNLVSRDFGSWLFLGSMFTTADLELDAPERDRCGSCRACLDACPTAAFPAPYEIDARRCISYLTIEHKGVIDRDLRPAFGNRIYGCDDCLAACPWNKFAATAREIKLQAREDLQAPEIAAFLALDDTGFRSHFSGSPVKRIGRDRFVRNVLIAAGNSGSGELIAPCKALLDDASPDVRGMAVWALSRLMTSADFSTLASYKDKEPDEDVRAEWLAVGVTS

SEQ ID NO: 80381 - protein, 382 aa, Rhizobium tibeticum
  misc_feature (1)..(382): tr|A0A1H8E169|A0A1H8E169_9RHIZ Epoxyqueuosine reductase OS=Rhizobium tibeticum OX=501024 GN=queG PE=3 SV=1
MATENKEQRRRDTLTAFVRAEAKALGFDLCRVTRPDAIPQAKERLGEFIDAGRHGTMEWMAQTRDRRGDPRTLWSDVRSIVVFGLNYGPEDDPREILAKSDKAAISVYARNRDYHDVIKGRLKEIATRFAARAGADVKVFVDTAPVMEKPLAAAAGLGWQGKHTNLVSREHGSWLFLGSMFTTADLNTDAPEIDHCGSCRACLDICPTNAFPGPYQIDARRCISYLTIEHKGPIDPALRPPIGNRIYGCDDCLAACPWNKFAHEASEMKLQAREDLKEPSIEDLLSLDDAGFRAFFSGSPVKRIGRDRFIRNVLIAAGNSGDRRFVDRCRALSRDASPVVRGMAVWALSRLLEAGEFSAFAAQRADESDSDVLDEWRLAGAV

SEQ ID NO: 80382 - protein, 385 aa, Rhizobium tropici
  misc_feature (1)..(385): tr|A0A329Y921|A0A329Y921_RHITR Epoxyqueuosine reductase OS=Rhizobium tropici OX=398 GN=queG PE=3 SV=1
MPDDRETEKANKRRSTLTAFLREEARAQGFDLCRITRPDAIPQAAVRLGQFLDKGHHGTMGWMEETRDRRGDPRVLWSETRSIVVFGLNYGPDEDPRGILEKKEKAAISIYARNRDYHDIIKGRLKEIATRFAARSKEDVKVFVDTAPVMEKPLAEAAGLGWQGKHTNLVSRAFGSWLFLGSMFTTADLELDEPEIDHCGSCRACLDVCPTAAFPAPYQLDARRCISYLTIEHKGPIDPELRPLIGNRIYGCDDCLAACPWNKFASAASEMKLVARDDLKEPSIAFLLDLDDAAFRTFFSGSPVKRIGRDRFIRNVLIAAGNSGERSFIERCRQLAGDPSPVVRGMAIWALSRLMTAGEFRAFAAERDDEANEEVRAEWTLAGVV

SEQ ID NO: 80383 - protein, 385 aa, Rhizobium tropici
  misc_feature (1)..(385): tr|L0LF61|L0LF61_RHITR Epoxyqueuosine reductase OS=Rhiz obium tropici CIAT 899 OX=698761 GN=queG PE=3 SV=1
MPGDREAEKADKRRNTLTAFLREEARAHGFDLCRITRPDAIPEAAVRLGQFLDKGYHGTMGWMEETRDRRGDPRVLWSETRSIVVFGLNYGPEEDPRGILEKQDKAAISVYARNRDYHDVIKGRLKEIATRFAAHSKEDVKVFVDTAPVMEKPLAGAAGLGWQGKHTNLVSRAFGSWLFLGSMFTTADLEPDEPEVDHCGSCRACLDVCPTSAFPAPYQLDARRCISYLTIEHKGPIAPQLRPLIGNRIYGCDDCLAACPWNKFASSASEMKLVAREDLKEPSIAFLLDLDDATFRTFFSGSPVKRIGRDRFIRNVLIAAGNSSERSLIERCCELAGDPSPVVRGMAVWALSRLMTAGEFHAFAAQRHDEADEEVRAEWKLAGVS

SEQ ID NO: 80384 - protein, 390 aa, Rhizobium tubonense
  misc_feature (1)..(390): tr|A0A2W4CMV0|A0A2W4CMV0_9RHIZ Epoxyqueuosine reductase OS=Rhizobium tubonense OX=484088 GN=queG PE=3 SV=1
MPEEIDTSSRAEDGRRKRRETLTSFVRAEALAQGFDLCRITRPDAIPEARERLDDFLDHGYHGTMDWMAETRDRRGNPLVLWSEVRSVVVFGLNYGPDEDPRGILSRPDKAAISVYARNRDYHDVIKGRLKEIATRFAARSKEDVKVFVDTAPVMEKPLAAAAGLGWQGKHTNLVSRTHGSWLFLGSMFTTADLTTDAPEVDHCGSCRACLDACPTAAFPAPYQIDARRCISYLTIEHKGPIDPALRPLIGNRIYGCDDCLAACPWNKFAAAASEMKLVARDDLKEPSIAFLLTLDDPTFRTFFSGSPIKRIGRDRFIRNVLIAAGNSSDGALAAPCRRLTDDPSPVVRGMAVWALSRLMPAGEFHAFAAERREETDEDVRREWQLAGVA

SEQ ID NO: 80385 - protein, 392 aa, Rhizobium tumorigenes
  misc_feature (1)..(392): tr|A0A2W4BWC6|A0A2W4BWC6_9RHIZ Epoxyqueuosine reductase OS=Rhizobium tumorigenes OX=2041385 GN=queG PE=3 SV=1
MPEATENPSTRPDKAAGRSLKTFLQEEARRLGFDLCRITGPDSIQQAGPRLGIYLDEGFHGTMDWMAETRERRASPAALWSDVRSVVVFGLNYGPDEDPRGILGKPDKAAISVYARNRDYHDVIKGRLKEIATRFAARSKEDVKVFVDTAPVMEKPLAAAAGLGWQGKHTNLVSRTHGSWLFLGSMFTTADLGSDEPESDHCGSCTACLTACPTDAFPAPYQLDARRCISYLTIEHKGPIDRQLRPLIGNHIYGCDDCLAACPWNKFAASASEMKLVAREDLREPSIAFLLGLDDATFRSFFSGSPIKRIGRDRFTRNVLIAAGNSHDGTLIEPCRRLADDSAPIVRGMAAWALGRLMTAGEFARFAAERPDDLDEEVREEWRAARMMSCTQ

SEQ ID NO: 80386 - protein, 385 aa, Rhizobium vallis
  misc_feature (1)..(385): tr|A0A432PS87|A0A432PS87_9RHIZ Epoxyqueuosine reductase OS=Rhizobium vallis OX=634290 GN=queG PE=3 SV=1
MPEADNNDKDRRRRDNLTDFVRAESAAKGFDLCRITRPDAIPHARERLGQFIDAGRHGTMDWMAETRDRRGDPRTLWSEVRSVVVFGLNYAPEEDPRGVLDKPDKAAISVYARNRDYHDVIKGRLKEIATRFAARAGADVKVFVDTAPVMEKPLAAAAGLGWQGKHTNLVSRVHGSWLFLGSMFTTADLAVDAPETDHCGSCRACLDICPTAAFPAPYQIDARRCISYLTIEHKGPIDPELRPLIGNRIYGCDDCLAVCPWNKFASSASEMKLKARQDLQEPSIAFLLTLDDAAFRSFFSGSPVKRIGRDRFVRNVLIAAGNSGETSLIGQCRILANDASPVVRGMAVWALSRLMEAGEFSAFAAQRADERDADVLNEWWLAGVG

SEQ ID NO: 80387 - protein, 370 aa, Rhizomicrobium sp.
  misc_feature (1)..(370): tr|A0A177QAF7|A0A177QAF7_9PROT Epoxyqueuosine reductase OS=Rhizomicrobium sp. SCGC AG-212-E05 OX=1799655 GN=qu eG PE=3 SV=1
MPNSISDQIRERAKAEGFDLVRFASAKAAPANAQRLQEFLHAGHHGEMDWMAERAGWRADPQEMWPAARSVIMLGVNYGPGDDPLAIQQRRDRAAISVYAQGDDYHDVVKKKLKALAGHIFQSFGADVKVFVDTAPVMEKPLAQKAGLGWQGKHTNLVSREFGSWLFLGSIFTTLELPPDAAEEDHCGNCHACLDVCPTNAFPAPYRLDARRCISYLTIENKGPIPREFRAAMGNRIYGCDDCLAVCPWNKFASAASEMKLSAREELKAPRLAELATLDDAGFRALFRKSPVKRIGRERFARNVMIAIGNSADPSLAGAAREALADTSPLVRGAAVWALSQLLPADEFAALAQKTQENDEDVRREWSATA

SEQ ID NO: 80388 - protein, 382 aa, Rhizorhabdus dicambivorans
  misc_feature (1)..(382): tr|A0A2A4G0N4|A0A2A4G0N4_9SPHN Epoxyqueuosine reductase OS=Rhizorhabdus dicambivorans OX=1850238 GN=queG PE=3 SV=1
MTTDPSSLREAIRAEALALGFAACGFARADAAPEAAERLDDWLEAGAHGSMDWMEARKGQRARPQALWPEARSLIMLGMSYAPRENPMRLADEPGIGRISVYAQGADYHDIVKKALKHLARWLVDRAGGELKVFVDTAPVMEKPLSAAAGIGWQGKHSNLVSRDHGSWLFLGAIMTSLDLPPDEAHDDRCGSCDACQTACPTDAFPRPYVVDARRCISYLTIEHKGPIPHEFRSAIGNRIYGCDDCLAVCPWNKFAQAGAANRAFAARAELAAPELADLLAMDDAAFRAIFSGSPIKRIGRDRMLRNALIAAGNSRRAGLVPMVEALLDDPAPVVRGAAVWALARLDPTRFAVQHAARLPSEKDQQVGKEWNVAIAKTGAAD

SEQ ID NO: 80389 - protein, 381 aa, Rhizorhabdus sp.
  misc_feature (1)..(381): tr|A0A521STX3|A0A521STX3_9SPHN Epoxyqueuosine reductase OS=Rhizorhabdus sp. OX=1968843 GN=queG PE=3 SV=1
MTDAFTLREEIRAHALSLGFAACGFAHADAAPEAAARLDDWLEAGSHGSMDWMEARKGERARPRGLWPDARSLIMLGMSYAPREDPLRLAAEPGIGRISAYAQGHDYHDVVKKALKHLARWLVEQAGGELKVFVDTAPVMEKPLAAAAGIGWQGKHSNLVSRDHGSWLFLGAIMTSLDLPPDEAHDDRCGSCDACQTACPTDAFPRPYVVDARRCISYLTIEHKGPIPQEFRVALGNRIYGCDDCLAVCPWNKFAEAAAANRAFAARAELAAPELADLIAMDDAAFRAIFSGSPIKRIGRDRMVRNALLAAGNSGLSRLVPAIASLLDDPAPVVRGAAIWALGRLDPARFDAERAARRACEKDQDVAAEWDVAIAKRAVAR

SEQ ID NO: 80390 - protein, 365 aa, Rhodanobacter denitrificans
  misc_feature (1)..(365): tr|M4NFN5|M4NFN5_9GAMM Epoxyqueuosine reductase OS=Rhod anobacter denitrificans OX=666685 GN=queG PE=3 SV=1
MRRIYNRWMSGTDIQAPPDYATLARDIKRWAIELGFADAGISGTDLGEDEQHLQRWLDGDHHGEMEYMARHGTKRTRPAELEPGTQRVISVRMDYIPPGTANAWDVLGDAEAGYVSRYALGRDYHKLMRQRLQKLAERIHGVVGDFGYRAYVDSAPVLEKALARNAGLGWIGKHTVLINRHAGSYFFLGELYTDLPLPVDEPASAHCGSCTRCIEVCPTQAILGPYRLDAKRCISYLTIELKGSIPEELRTPMGNRIFGCDDCQLVCPWNKFAQMTAEPDFAPRHSLDGAKLVELFAWSEEEFLKRTEGMAIRRTGYEGWLRNIAVALGNAPKSAAVIAALAARADHPSAVVREHVAWALAKQRS

SEQ ID NO: 80391 - protein, 378 aa, Rhodanobacter denitrificans
  misc_feature (1)..(378): tr|A0A2W5MX30|A0A2W5MX30_9GAMM Epoxyqueuosine reductase OS=Rhodanobacter denitrificans OX=666685 GN=queG PE=3 SV=1
MPAPDQPAIDFDALAREVRAWARELGFADVGISGTELGEDEAHLLAWLDAGHHGEMAYMASHSTKRSRPAELQPGTLRVISVRMDYLPAAARDGWDVLADAERGYVARYALGRDYHKLMRNRLQKLAERIEAAAGPFGYRAFVDSAPVLERALARNAGIGWIGKHTCLIDSRGGSWFFLGELFTDLPLPLDQPASAHCGTCTRCIEICPTQAILGPNRLDARRCIAYLTIESRGPIPLELRPLIGNRIFGCDDCQLICPWNKFATPTTSPDFAPRHRLDDARLVDLFAWSEAEFLQRTEGSPIRRTGYAGWLRNIAVALGNAPYSDETLCALQAREHDVSDLVREHVQWAIGEQRRKRDRGELRTCSAPASPSPARTA

SEQ ID NO: 80392 - protein, 357 aa, Rhodanobacter fulvus
  misc_feature (1)..(357): tr|I4VKF6|I4VKF6_9GAMM Epoxyqueuosine reductase OS=Rhod anobacter fulvus Jip2 OX=1163408 GN=queG PE=3 SV=1
MSAADVPSTTDFAALARDIKHWARELGFANTGISGVDLDEDEQHLQRWLDEGHHGEMDYMARHGSKRTRPAELEPGTQRVISVRMDYIPPGTANAWEVLGDAQAGYVSRYALGRDYHKLMRSRLQKLAERIQGVVGDFGYRAYVDSAPVMEKALARNAGLGWIGKHTVLINRRAGSYFFLGELYTDLPLPVDPPASAHCGTCTRCIDVCPTQAILGPYQLDAKRCISYLTIELKGSIPEDLRAPMGNRIFGCDDCQLVCPWNKFAQETSEPDFAPRHSLDGAKLVELFAWTEQEFLKRTEGMAIRRTGYEGWLRNIAVALGNAPRSTEVVEALNARADHPSPVVREHVAWALARQRG

SEQ ID NO: 80393 - protein, 359 aa, Rhodanobacter glycinis
  misc_feature (1)..(359): tr|A0A502BYB0|A0A502BYB0_9GAMM Epoxyqueuosine reductase OS=Rhodanobacter glycinis OX=582702 GN=queG PE=3 SV=1
MSSTGIRSTPDYTALARDIKRWANELGFADAGISGTDLGEDEQHLERWLGHGHHGEMEYMARHGTRRARPAELEPGTQRVISVRMDYIPPGTANAWSVLQDTEAGYVSRYALGRDYHKLMRNRLQKLAERIHAVVGDFGYRAYVDSAPVLEKALARNAGLGWIGKHTVLINRHAGSYFFLGELYTDLPLPVDEPASAHCGSCSRCIEICPTQAILGPYRLDAKRCISYLTIELRGSIPEDLRAPMGNRIFGCDDCQLVCPWNKFAQATAEPDFAPRHSLDGAKLIDLFAWSEEEFLKRTEGMAIRRTGYEGWLRNIAVALGNAPPSTSVREALGARADHPSAIVREHVAWALAKQQNPA

SEQ ID NO: 80394 - protein, 359 aa, Rhodanobacter glycinis
  misc_feature (1)..(359): tr|A0A5B9E136|A0A5B9E136_9GAMM Epoxyqueuosine reductase OS=Rhodanobacter glycinis OX=582702 GN=queG PE=3 SV=1
MSTVPAIDYNALARDIKQWARELGFAEAGISGVTLAPDETHLQDWLDAGHHGEMEYMARHGTKRSRPDELEPGTQRVISVRMDYIPPGTRNAWEVIGDGDAGYVSRYALGRDYHKLMRNRLQKLAARIQAEVGDFGYRAYVDSAPVLEKALARNAGLGWIGKHTVLINRHAGSYFFLGELYTDLPLPVDVPATAHCGTCTRCIDVCPTGAILGPNKLDARRCISFLTIELKGSIPEELRAPMGNRIFGCDDCQLVCPWNKFAQEAVEPDFAPRHSLDGAKLLELFAWSEAEFLKRTEGMAIRRTGYEGWLRNIAVALGNAPHSQATIDALNARADDASPVVREHVAWALQRQAEKETGA

SEQ ID NO: 80395 - protein, 365 aa, Rhodanobacter lindaniclasticus
  misc_feature (1)..(365): tr|A0A4S3KIF7|A0A4S3KIF7_9GAMM Epoxyqueuosine reductase OS=Rhodanobacter lindaniclasticus OX=75310 GN=queG PE= 3 SV=1
MRMSVPSLSAPPDYAALARDIKRWARELGFADTGISGVDLAEDEQHLQHWLDAGRHGEMEYMARHGTKRTRPAELEPGTQRVISVRMDYTPPGTANAWDVLGDGEAGYVSRYALGRDYHKLMRNRLQKLAERIRAVVGEFGHRAYVDSAPVMEKALARNSGLGWIGKHTVLINRHAGSYFFLGELYTDLPLPVDPPASAHCGTCTRCIEVCPTQAITGPYQLDAKRCISYLTIELKGSIPEELRAPMGNRIFGCDDCQLVCPWNKFAQVATEADFAPRHSLDGAKLVELFGWSEEEFLKRTEGMAIRRTGYEGWLRNIAVALGNAPPGDAIDAALAGRADDASPLVREHVAWAQAQQAARKRRGG

SEQ ID NO: 80396 - protein, 356 aa, Rhodanobacter sp.
  misc_feature (1)..(356): tr|A0A522LBY3|A0A522LBY3_9GAMM Epoxyqueuosine reductase OS=Rhodanobacter sp. OX=1883446 GN=queG PE=3 SV=1
MAHISYPQLALDIKRWARELGFAETGITDTDLSQDAEGLKQYLAAGHHGTMRWLQDRFDLKTHPEALHPGTIRVISVRMNYAQADIKGAWDIVRNSELGYISRYALGRDYHKLVRKQLQKLADRITQEIGPFNYRAFCDSAPVMEKSLAQKAGLGWRGKHTLTLSRSGGSYFFLGELFTDLPLPIDHPVENYCGTCTRCIDACPTGAIIAPYQLDAKRCISYLTIEYKGSIDPELRPLMGNRIFGCDDCQLACPWNKFAQVTMENDFLPRHHLDGTKLVELFAWDEDTYLKKTEGMSIRRAGYESWLRNIAIALGNAKHSDEVVAALQTRTEHPSPIVREHVAWALAEQAKKAAAT

SEQ ID NO: 80397 - protein, 365 aa, Rhodanobacter sp.
  misc_feature (1)..(365): tr|A0A4R8LA22|A0A4R8LA22_9GAMM Epoxyqueuosine reductase OS=Rhodanobacter sp. TND4FH1 OX=1907401 GN=queG PE=3 S V=1
MRRTYNRQMFRTDSPSAPDYTVLARDIKRWARELGFADTGISGTQLGDDEQHLLSWLDHGHHGEMEYMARHGTKRTRPAELEPGTQRVISVRMDYIPPGTANAWAVLNDAEAGYVSRYALGRDYHKLMRSRLQKLAERIQGVVGDFGYRAYVDSAPVLEKALARNAGMGWIGKHTVLINRNAGSYFFLGELYTDLPLPVDEPASAHCGTCARCIEICPTQAILGPYRLDAKRCISYLTIELKGSIPEDLRAPMGNRIFGCDDCQLVCPWNKFAQTTTEPDFAPRHSLDGAKLVELFAWSEDEFLKRTEGMAIRRTGYEGWLRNIAVALGNAPGSTAVIEALQARADHPSEIVREHVAWALAKQRH

SEQ ID NO: 80398 - protein, 364 aa, Rhodanobacter spathiphylli
  misc_feature (1)..(364): tr|I4W419|I4W419_9GAMM Epoxyqueuosine reductase OS=Rhod anobacter spathiphylli B39 OX=1163407 GN=queG PE=3 SV=1
MRRTYNSRMSDIDTRSPDYAALARDIKCWARELGFADTGISGTRLADDEKHLLSWLDHGHHGEMEYMARHGTKRARPAELEPGTQRVISVRMDYIPPGTANAWGVLKDAEAGYVSRYALGRDYHKLMRGRLQKLAERIHGAIGDFGYRAYVDSAPVLEKALARNAGMGWIGKHTVLINRNAGSYFFLGELYTDLPLPVDEPASAHCGSCTRCIEVCPTQAIIGPYQLDAKRCISYLTIELKGSIPEELRTPMGNRIFGCDDCQLVCPWNKFAQTTTEADFAPRHSLDGARLVELFAWSEDEFLKRTEGMAIRRTGYEGWLRNIAVALGNAPQSAAAIESLNARADDPSPVVREHVAWALAKQRR

SEQ ID NO: 80399 - protein, 365 aa, Rhodanobacter thiooxydans
  misc_feature (1)..(365): tr|A0A154QCQ0|A0A154QCQ0_9GAMM Epoxyqueuosine reductase OS=Rhodanobacter thiooxydans OX=416169 GN=queG PE=3 SV =1
MQRIYNDRMSSTETHATPDYATLARDIKRWAIELGFADAAISGTDLGEDEQHLQRWLDGGHHGEMEYMARHGSKRTRPAELEPGTQRVISVRIDYIPPGTANAWDVLGDAEAGYVSRYALGRDYHKLMRGRLQKLAERIHGVVGDFGYRAYVDSAPVLEKALARNAGLGWIGKHTVLINRHAGSYFFLGELYTDLPLPLDEPASAHCGTCTRCIEVCPTQAILGPYRLDAKRCISYLTIELKGSIPEELRTPMGNRIFGCDDCQLVCPWNKFAQVATEPDFAPRHSLDGAKLVELFAWSEDEFLKRTEGMAIRRTGYEGWLRNIAVALGNAPKSAAAIEALESRADHPSAIVREHVAWALAKQRH

SEQ ID NO: 80400 - protein, 363 aa, Rhodanobacteraceae bacterium
  misc_feature (1)..(363): tr|A0A522R416|A0A522R416_9GAMM Epoxyqueuosine reductase OS=Rhodanobacteraceae bacterium OX=2052182 GN=queG PE= 3 SV=1
MQSGSEPTARDIDFAVLARRIKAWGVELGFAKVGITGVDLGEDEAHLHEWLRKGRHGSMDYMQHHGNKRSRPQELQPGTVRVVSVRMDYFPRGMDAGATWRTLGDGERAYIARYALGRDYHKLIRGRLQKLADRIAAEIGPFGYRAFTDSAPVLEKALARNAGLGWIGKHTLLLDRDAGSWFFLGELYTDLPLPMDEPATAHCGTCTRCMDVCPTRAITGPYQLDARRCIAYLTIESKDAIPEELRPLMGNRVFGCDDCQLVCPWNKFAQPTHEEDFAPRHGLDGTKLAELFAWTEEEFLKKTEGMPIRRAGYEGFSRNVAVALGNAPPSPEVIDALNARAHDPSPLVREHVAWALARHAHHG

SEQ ID NO: 80401 - protein, 362 aa, Rhodanobacteraceae bacterium
  misc_feature (1)..(362): tr|A0A2Z6E5Q9|A0A2Z6E5Q9_9GAMM Epoxyqueuosine reductase OS=Rhodanobacteraceae bacterium Dysh456 OX=2010829 GN= queG PE=3 SV=1
MAAMSAMPPDYAALARDIKQWARELGFAAAGISDVELEEDERHLEGWLAEGLHGAMDYMARHGRKRSRPAELQPGTRRVISVRMDYLPAQARDPWQVLGDGELAYVARYALGRDYHKLMRSRLQRLAERIQAAIGPFGHRVFVDSAPVLEKALARHAGLGWIGKHTLLIDRRAGSYFFLGELYTDLPLPVDAPVGAHCGSCRRCLDVCPTQAILAPYRLDARRCIAYLTIEFKGSIPKELRAPIGNRIFGCDDCQLVCPWNKFAQPSVERDFAPRHGLDGARLIELFAWSEETFLHRTEGMAIRRAGYEGWLRNIAVALGNAPASAAVRAALATRMEHPSALVREHVAWALERQQAAARAAA

SEQ ID NO: 80402 - protein, 358 aa, Rhodobaca barguzinensis
  misc_feature (1)..(358): tr|A0A2K8KGG1|A0A2K8KGG1_9RHOB Epoxyqueuosine reductase OS=Rhodobaca barguzinensis OX=441209 GN=queG PE=3 SV=1
MSADLKTALLTEARAVGFDACAITRPDAIPQAPERLRSFVDLGRHGQMAWMAERMSWRANPTALWPQARSIIMLAESYTPDYNPLDLLAQRERGVISAYALGRDYHDVVKKRLKRLGRWLIDQAGGEIKVFVDTAPVMEKPLAAAAGLGWQGKHTNLLSRDLGNWVFLGAIFTTHDLPPDAPAQENCGSCRACLDICPTDAFPAPFQLDARRCISYLTIEHHGPVPLDLREKMGNRIYGCDDCLAVCPWNKFARSASEAKYAAREGMVAPDLAELAGLDDAGFRAHFSGSPIKRIGRNRFVRNVLYAIGNSGAARLLPVAQALTDDPDPTVAEAARWAAERLQTRSDAAPGAPARPRS

SEQ ID NO: 80403 - protein, 292 aa, Rhodobacter aestuarii
  misc_feature (1)..(292): tr|A0A1N7MV40|A0A1N7MV40_9RHOB Epoxyqueuosine reductase OS=Rhodobacter aestuarii OX=453582 GN=SAMN05421580_106 213 PE=4 SV=1
MHWRADPAALWPEARSVIMLAESYSPETDPRAATKVKDGGAISVYAQGKDYHDLVKRRLKRLGRWLIEQEPCEIKVFVDTAPVMEKPLAQAAGLGWQGKHTNLLARDLGNWVFLGALFTTLELPPDAPEVSHCGSCTACLDACPTGAFPAPYQIDARRCISYLTIEHHGPVAPDLRPLMGNRIYGCDDCLAACPWNKFAVAAQDIGYAHRHGTPPLAELLALDDAAFRARFAGSPIKRIGRNRMVRNALYAAGNSGLAALLPPVQALLDDPDPTVAEAARWAHGCLAGKTPQ

SEQ ID NO: 80404 - protein, 343 aa, Rhodobacter azotoformans
  misc_feature (1)..(343): tr|A0A2T5K8L0|A0A2T5K8L0_9RHOB Epoxyqueuosine reductase OS=Rhodobacter azotoformans OX=43057 GN=queG PE=3 SV=1
MNGDETLRGRLEGRAREEGFARLGICAPDATPETAGRLRAFLAAGRHGQMGWMEEREAWRGSAAALWPEARSVIMLAEPYTPAEDPRRVLEERGRGAVSVYAQGRDYHDLVKKRLKRLGRWLVAETGCEIKVFVDTAPVMEKPLAQAAGLGWQGKHTNLLSRELGNWFFLGAIFTTLELPRDAAERDHCGSCRACLDACPTGAFPAPFQLDARRCISYLTIEHRGPVAEELRERMGNRIYGCDDCLAACPWNKFAVAASEIGYAARVGAPPLAELAALDDAEFRLRFAGSPVKRIGRDRFVRNVLYAIGNSGDPALRPAAEALLADPDPAVAEAAAWALRRLA

SEQ ID NO: 80405 - protein, 356 aa, Rhodobacter blasticus
  misc_feature (1)..(356): tr|A0A2T4JEI0|A0A2T4JEI0_RHOBL tRNA epoxyqueuosine(34) reductase QueG OS=Rhodobacter blasticus DSM 2131 OX=118 8250 GN=queG PE=4 SV=1
MKRRLHDQALAEGFSAMGICRPDAIPQAAGQLRAFLAQGRHGQMQWMAEREGWRGNPAALWPEARSVIMLAELYTPEGDPLAGHGQAGRGVVSAYAQGKDYHDLVKRRLKRLGRWLIDQAARQGTACEIKVFVDTAPVMEKPLAQAAGLGWQGKHTNLLSRDLGNWFFLGAIFTTLELEPDAPEISHCGSCTGCLDACPTAAFPAPYQLDARRCISYLTIEHDGPVAPELRALMGNRVYGCDDCLAACPWNKFARAAREIGYAPRVGLPELADLAGLDDAAFRARFAGSPVKRIGRNRMVRNALYAIGNSGEAALAPVAAGLTGDADPTVAEAARWALGQLSQPQDARVGFAGESC

SEQ ID NO: 80406 - protein, 338 aa, Rhodobacter capsulatus
  misc_feature (1)..(338): tr|A0A4U1JP05|A0A4U1JP05_RHOCA tRNA epoxyqueuosine(34) reductase QueG OS=Rhodobacter capsulatus OX=1061 GN=que G PE=4 SV=1
MKSRLIEEALAVGFAKARITRPDACPDLPDRLSAFVAAGHHGQMSWMAERMEWRGNPAALWPEARSVILLAESYTPEVDPREATRLPGHGAISVYAQGKDYHDLVKRRLKRLGRWLIENSACEIKVFVDTAPVMEKPLSQAAGLGWQGKHTNLLARDLGNWVFLGAIFTTLELPPDTPEISHCGSCTACLDACPTGAFVAPYQMDARRCISYLTIEHRGPVDPALRPGLGNRIYGCDDCLAACPWNKFAATARDIGYTAKQGTPALTEILSLDDAAFRARFAGSPVKRIGRDRMIRNALYALGNSARPELAAAARPHLDDPDPAVAEAAAWALARLGL

SEQ ID NO: 80407 - protein, 338 aa, Rhodobacter capsulatus
  misc_feature (1)..(338): tr|A0A0E2PAP7|A0A0E2PAP7_RHOCA 4Fe-4S ferredoxin OS=Rho dobacter capsulatus Y262 OX=1415161 GN=U715_15355 PE=4 SV=1
MKTRLIEEARAIGFAKARITRPDACPDLPDRLSAFVAAGYHGQMSWMAERMEWRGNPAALWPEARSVILLAESYTPEVDPREATRQPGHGAISVYAQGKDYHDLVKRRLKRLGRWLIENSPCEIKVFVDTAPVMEKPLSQAAGLGWQGKHTNLLARDLGNWVFLGAIFTTLDLPPDAPEISHCGSCTACLDACPTEAFVAPYQMDARRCISYLTIEHRGPVDPELRPGLGNRIYGCDDCLAACPWNKFAATARDIGYAAKQGTPALTEILALDDAAFRARFAGSPVKRIGRDRMIRNALYALGNSGRRDLAAAARPHLDDPDPAVAEAAAWALARLGL

SEQ ID NO: 80408 - protein, 348 aa, Rhodobacter johrii
  misc_feature (1)..(348): tr|A0A330HCM9|A0A330HCM9_9RHOB Epoxyqueuosine reductase OS=Rhodobacter johrii OX=445629 GN=queG PE=3 SV=1
MKADETLRERLEARARAEGFARLGICAPDAAPETAGRLRAFLAAGRQGQMGWMEEREAWRGSAAALWPEARSIIMLAELYTPEEDPRQVLEARGHGAVSVYAQGRDYHDLVKKRLKRLGRWLVAEAGCEIKVFVDTAPVMEKPLAQAAGLGWQGKHTNLLSRELGNWFFLGAIFTTLELPRDAPGREHCGSCRACLDACPTGAFPAPFQLDARRCISYLTIEHRGPVEEELRGRMGNRIYGCDDCLAACPWNKFAQAASEIGYAARVGAPPLEELAGLDEAGFRARFSGSPIKRIGRDRFLRNVLYAIGNSGDRRLRAAAAPHVDDPDGAVADAARWALARLDENSPQ

SEQ ID NO: 80409 - protein, 349 aa, Rhodobacter maris
  misc_feature (1)..(349): tr|A0A285TBA0|A0A285TBA0_9RHOB Epoxyqueuosine reductase OS=Rhodobacter maris OX=446682 GN=queG PE=3 SV=1
MEAPLERLKTRLIAQALAEGFAKARITRPDSRPDLPADLAGFVAAGHHGQMGWMAERMAWRANPAALWPEARSVIMLAENYTPEADPRAATAVKEAGAISVYAQGKDYHDLVKRRLKRLGRWLIAEEPCEIKVFVDTAPVMEKPLAEAAGLGWQGKHTNLLARDLGNWFFLGALFTTLELPPDAPDVSHCGSCTACLDACPTGAFPAPYRIDARRCISYLTIEHRGPVEPALRPLLGNRIYGCDDCLAACPWNKFAVTARDIGYATRHGTPPLAELLALDDTAFRARFASSPIKRIGRDRLVRNALYAAGNSGLPDLLPFARALTADPEPSVAEAASWACARLATIGHD

SEQ ID NO: 80410 - protein, 348 aa, Rhodobacter megalophilus
  misc_feature (1)..(348): tr|A0A239G7B4|A0A239G7B4_9RHOB Epoxyqueuosine reductase OS=Rhodobacter megalophilus OX=418630 GN=queG PE=3 SV= 1
MKAYETLRERLEARARAEGFARLGICAPDATPETAGRLRAFLAAGRQGQMGWMEEREAWRGSAAALWPEARSVIMLAELYTPEEDPRQVLEARGHGAVSVYAQGRDYHDLVKKRLKRLGRWLVAETGCEIKVFVDTAPVMEKPLAQAAGLGWQGKHTNLLSRELGNWFFLGAIFTTLELPRDAPGREHCGSCRACLDACPTGAFPAPFQLDARRCISYLTIEHRGPVEEELRARMGNRIYGCDDCLAACPWNKFAQAASEIGYAARVGAPPLAELAGLDEAGFRARFSGSPIKRIGRDRFLRNVLYAIGNSGDRRLRAAAAPHVDDPDMAVADAARWALARLDEKSPQ

SEQ ID NO: 80411 - protein, 343 aa, Rhodobacter ovatus
  misc_feature (1)..(343): tr|A0A285CZ69|A0A285CZ69_9RHOB Epoxyqueuosine reductase OS=Rhodobacter ovatus OX=439529 GN=SAMN05878503_11248 PE=4 SV=1
MKGPEGLKQRLVARALEEGFSGVGICAPDAVPEAAGRLRAFLDAGRHGQMLWMEDREAWRGSAAALWPDARSVVMLAEVYTPEADPRAVLTQRDRGAISVYAQGKDYHDLVKRRLKRLGRWLVAEAGCEIKVFVDTAPVMEKPLAQAAGLGWQGKHTNLLSRELGNWFFLGALFTTLDLPRDRAGRERCGSCRACLDACPTGAFPAPFQLDARRCISYLTIEHRGPVDEALRGLLGNRIYGCDDCLAACPWNKFAVDAREIGYAVRVGAPPLAALAGLDDAAFRVQFAGSPIKRIGRDRFVRNVLYAIGNSGEAGLRPVAAALREDPDPAVADAARWAMARLE

SEQ ID NO: 80412 - protein, 343 aa, Rhodobacter sp.
  misc_feature (1)..(343): tr|A0A3D3JBP7|A0A3D3JBP7_9RHOB tRNA epoxyqueuosine(34) reductase QueG OS=Rhodobacter sp. OX=1062 GN=queG PE=4 SV=1
MTSVFKDLLIARAKLEGFSKLGICAPDSTPKAAPRLKAFLDDGRHGQMAWMDERVAWRGSAQALWPEARSVIMLAEPYTPNYNPLDVLKNRDLAAISAYAQGRDYHDLVKRRLKRLGGWIVGQTAAEIKVFVDTAPVMEKPLAEAAGLGWQGKHTNLLARDLGNWFFLGAIFTTLDLPKDPPEVSHCGSCTACLDICPTHAFPAPYQLDARRCISYLTIEHRGPIAIELREKMGNRIYGCDDCLAVCPWNKYAQSAHDIGYDVRVGAPPLRELALLDDVAFRSRFSGSPIKRIGRDRFLRNVLYAIGNSGEKNLQSALPAHFKDPDPTIVDAARWAMGRLDKA

SEQ ID NO: 80413 - protein, 345 aa, Rhodobacter sp.
  misc_feature (1)..(345): tr|C8S5E0|C8S5E0_9RHOB 4Fe-4S ferredoxin-type domain-co ntaining protein OS=Rhodobacter sp. SW2 OX=371731 GN=Rs w2DRAFT_3269 PE=4 SV=1
MKVQGFGDLKQRLVARALEEGFSKVGICAPGAVPQAAGRLAEWLAAGHHGQMGWMADRAEWRGSAAALWPAARSVVMLAEVYTPDCDPLAVLGQRDRGAVSVYAQGKDYHDLVKRRLKRLGGWFVGVSGAEIKVFVDTAPVMEKPLAQAAGLGWQGKHTNLVARDLGSWFFLGAIFTTAELQPDAAEADHCGSCSACLDICPTRAFPAPYQLDARRCISYLTIEHRGPVDPALRGMLGNRIYGCDDCLAVCPWNKFAGAAREIGYAAKVGAPMLADLVVLDDAGFRALFAGSPVKRIGRDRFVRNVLYAMGNSGDKRLRAVAAGLQGDADAAVADAAVWAVARLS

SEQ ID NO: 80414 - protein, 348 aa, Rhodobacter sphaeroides
  misc_feature (1)..(348): tr|A0A3G6W767|A0A3G6W767_RHOSH Epoxyqueuosine reductase OS=Rhodobacter sphaeroides OX=1063 GN=queG PE=3 SV=1
MKADETLRERLEARARAEGFARLGICAPDATPETAGRLRAFLAAGRQGQMGWMEEREAWRGSAAALWPEARSVIMLAELYTPEEDPRQLLEARGHGAVSVYAQGRDYHDLVKKRLKRLGRWLVAETGCEIKVFVDTAPVMEKPLAQAAGLGWQGKHTNLLSRELGNWFFLGAIFTTLELPRDAPGREHCGSCRACLDACPTGAFPAPFQLDARRCISYLTIEHRGPVEEELRARMGNRIYGCDDCLAACPWNKFAQAASEIGYAARVGAPPLAELAGLDEAGFRARFSVSPIKRIGRDRFLRNVLYAIGNSGDRRLRAAAAPHVDDPDMAVADAARWALARLDEKSPQ

SEQ ID NO: 80415 - protein, 348 aa, Rhodobacter sphaeroides
  misc_feature (1)..(348): tr|A0A370XZB7|A0A370XZB7_RHOSH Epoxyqueuosine reductase OS=Rhodobacter sphaeroides f. sp. denitrificans OX=397 23 GN=queG PE=3 SV=1
MKADETLRERLEARARAEGFARLGICAPDAAPETAGRLRAFLAAGRQGQMGWMEEREAWRGSAAALWPEARSIIMLAELYTPEEDPRQVLEARGHGVVSVYAQGRDYHDLVKKRLKRLGRWLVAEAGCEIKVFVDTAPVMEKPLAQAAGLGWQGKHTNLLSRELGNWFFLGAIFTTLELPRDAPGREHCGSCRACLDACPTGAFPAPFQLDARRCISYLTIEHRGPVEEELRGRMGNRIYGCDDCLAACPWNKFAQAASEIGYAARVGAPPLEELAGLDEAGFRARFSGSPIKRIGRDRFLRNVLYAIGNSGDRRLRAAAEPHVDDPDGAVADAARWALARLDEKSPQ

SEQ ID NO: 80416 - protein, 348 aa, Rhodobacter veldkampii
  misc_feature (1)..(348): tr|A0A2T4JLD5|A0A2T4JLD5_9RHOB Epoxyqueuosine reductase OS=Rhodobacter veldkampii DSM 11550 OX=1185920 GN=queG PE=3 SV=1
MMAEMKDRLVRRALEEGFYKVRVCRPDAIPDAAARLAAFVAAGRHGQMGWMTERMGWRGDPVALWPEARSVIMLAEVYSPGFDPMAVLTQRDRGAVSVYAQGKDYHDLVKRRLKRLGRWLIDEAGGEIKVFVDTAPVMEKPLAQAAGLGWQGKHTNLLARDLGSWFFLGAIFTTLDLPPDAPEVSHCGACTACLEACPTGAFPAPYQLDARRCISYLTIEHRGPVDSELRGLMGNRIYGCDDCLAVCPWNKFAQAAREIGYAPREAGAPALADLAGLDDAGFRARFAGSPIKRIGRDRMVRNVLYAIGNSGIPALRAVAEGLCTDPDPAVADAACWAVARLSSGTGAR

SEQ ID NO: 80417 - protein, 362 aa, Rhodobacter vinaykumarii
  misc_feature (1)..(362): tr|A0A1N7MNV8|A0A1N7MNV8_9RHOB Epoxyqueuosine reductase OS=Rhodobacter vinaykumarii OX=407234 GN=queG PE=3 SV= 1
MRSLTSDLAARLKAQALAEGFTAARLTTPDAIPHADAALRAFVAAGYHGQMRWMEDRMNWRGNPAALWPEARSILMLAESYSPAEDPRAVTACPDLGAVSVYARGRDYHDLVKKRLKRLGRWLIAEAGGEIKVFVDTAPVMEKPLAQAAGLGWQGKHTNVVSREIGNWFFLGAIFTSLALPPDAPETDHCGSCRSCLDACPTAAFVAPGRMDARRCISYLTIEHRGPVDPDLRPALGNRIYGCDECLAACPWNKFAAPMTEPGYAPRADALLADAPRLADLVTLDEAAFRAAFSGSPIKRIGHARFLRNVLYAIGNSGQPALAPLAAAHRDADDRAVADAARWALARLGGPAYRAIPGASEA

SEQ ID NO: 80418 - protein, 345 aa, Rhodobacter viridis
  misc_feature (1)..(345): tr|A0A318TZ75|A0A318TZ75_9RHOB Epoxyqueuosine reductase OS=Rhodobacter viridis OX=1054202 GN=queG PE=3 SV=1
MEAHLETLKTRLFEEALAVGFAKARITRPDACPDLPERLSAFVAAGYHGQMGWMAERMAWRGNPAALWPEARSVIMLAESYSPEVDPRDATAQPECGAISVYAQGKDYHDLVKRRLKRLGRWLIEQSPCEIKVFVDTAPVMEKPLAQAAGLGWQGKHTNLLARDLGNWVFLGAIFTTLELPPDAPEISHCGSCTACLDACPTGAFPAPYRLDARRCISYLTIEHKGPVDPALRPGLGNRIYGCDDCLAACPWNKFAVAAQDIGYAAKQGTPELTEILALDDAAFRARFAGSPVKRIGRDRMIRNALYALGNSGRPDLAEAARPHLTDPDPAVAEAAAWALARLAL

SEQ ID NO: 80419 - protein, 384 aa, Rhodobacteraceae bacterium
  misc_feature (1)..(384): tr|A0A353V176|A0A353V176_9RHOB Epoxyqueuosine reductase OS=Rhodobacteraceae bacterium OX=1904441 GN=queG PE=3 SV=1
MVCADQVPPVLPALAGGSDPGLSATNPLCGSRLLTGAEAAALTARLKARARAEGFAAAGICAPDAIPRAPARLARFLALGWHGQMGWMERRADWRGDPRVLWAEARSVIMLADLYTPDGDPLATLGQADRATISVYARGRDYHDVIKKRLKRLGRWLIEQAPGARIKVFVDTAPLMEKPLAQAAGLGWQGKHTNLLARDLGNWFFLGAILTTLELPRDDPAEAHCGRCRACLDICPTDAFPAPFTLDARRCISYLTIEHRGPVDPALRPALGNRIYGCDDCLAVCPWNKFAQSAQEAKYTARDDLRAPHLAALAGLDDAGFGARFAGSPIKRIGRDRFLRNVLYAIGNSADPTLGAAAAPHCDDPDPAVADAARWALNRLRATA

SEQ ID NO: 80420 - protein, 347 aa, Rhodobacteraceae bacterium
  misc_feature (1)..(347): tr|A0A2V1P4Z2|A0A2V1P4Z2_9RHOB Epoxyqueuosine reductase OS=Rhodobacteraceae bacterium WDS4C29 OX=1914409 GN=qu eG PE=3 SV=1
MADLKARLIERARAEGFAKVGVCRPDAVPEMAARLDRFVAEGRHGQMGWMAERMGWRGDPSALWPEARSVIMLAEPYTPDHDPLEVLTQRDRAAISVYAQNRDYHDIVKKRLKRVGRWLVEEEGCEIKVFVDTAPVMEKPLAQAAGLGWQGKHTNLLSRDLGNWFFLGAIFTTVALAPDDPGQENCGSCTACLDICPTDAFPAPFQLDARRCISYLTIEHKGPVDEELRPLMGNRIYGCDDCLAICPWNKFAQQATEMRYVGREDLRGPKLAELAKLDDAGFRTMFSGSPIKRIGRDRFVRNVAYAIGNSGDPTLLEAVRALCTDPDDTVADAAQWAVGRLTERRFE

SEQ ID NO: 80421 - protein, 352 aa, Rhodobacterales bacterium
  misc_feature (1)..(352): tr|A0A2P6G6Y4|A0A2P6G6Y4_9RHOB tRNA epoxyqueuosine(34) reductase QueG OS=Rhodobacterales bacterium OX=1948890 GN=queG PE=4 SV=1
  misc_feature (184)..(184): Xaa can be any naturally occurring amino acid
  misc_feature (234)..(234): Xaa can be any naturally occurring amino acid
  misc_feature (237)..(237): Xaa can be any naturally occurring amino acid
  misc_feature (241)..(241): Xaa can be any naturally occurring amino acid
  misc_feature (262)..(262): Xaa can be any naturally occurring amino acid
  misc_feature (271)..(273): Xaa can be any naturally occurring amino acid
  misc_feature (276)..(276): Xaa can be any naturally occurring amino acid
  misc_feature (281)..(281): Xaa can be any naturally occurring amino acid
  misc_feature (284)..(284): Xaa can be any naturally occurring amino acid
  misc_feature (288)..(288): Xaa can be any naturally occurring amino acid
  misc_feature (333)..(333): Xaa can be any naturally occurring amino acid
  misc_feature (347)..(347): Xaa can be any naturally occurring amino acid
MVIKPHKSLKQKISDVAHKEGLSDIGFTNPKLDPEEFKNFKDFINKGYHGQMYWLNNNIGWRENPKLMWEDVETIIVFAENYYKGGNPLADINIKDKANISIYARGDDYHNVLKKKLKAVASQIIKLVDKSEVKVFVDTAPIMEKNFAQKAGIGWQGKHTNVLSKKLGNWIFLGLIFTNIKIEXDNPEINHCGNCSRCLEVCPTNAFIAPYKLNAKKCISYLTIEHKGPVDIEXRSXLGNXIFGCDDCLAVCPWNKFSKKSXELKYSNNLXXXLDXNELAXLDXFQFXKLFRKSPIKRIGRNRFVRNVLYAIGNSGDLKFKNTLIKLTKDNDXTIVDAAYWAIREIXKNGKK

SEQ ID NO: 80422 - protein, 347 aa, Rhodobacterales bacterium
  misc_feature (1)..(347): tr|B6B5U3|B6B5U3_9RHOB Epoxyqueuosine reductase OS=Rhod obacterales bacterium Y4I OX=439496 GN=queG PE=3 SV=1
MKDGSGIKEKLVAQALAEGFVSCRICRPWDVPEVPGRLQAFLNAGYHGQMGWMAERTHWRGDPAQLWPEARSVIMLAESYTPEGDPMAVVGKADRGAVSVYARGKDYHDLVKKRLKRLARWLIAETGEDCEVKVFVDTAPVPEKALGQAAGLGWQGKHSNLVSRDWGNWAFLGSVFTTLDLPADMAEPDRCGSCRACLDSCPTDAFPAPYQVDARRCISYLTIEHKGPVAQELREKMGNRIYGCDDCLAACPWNKFAVAASDMRYAAREELKAPKLAELAVLDDAGFRAMFSGSPIKRIGRDRFVRNVLYAIGNSGRPELRETAQRLAEDPDPAVADAARWAVQRLA

SEQ ID NO: 80423 - protein, 388 aa, Rhodobiaceae bacterium
  misc_feature (1)..(388): tr|A0A2A4S3B7|A0A2A4S3B7_9RHIZ Epoxyqueuosine reductase OS=Rhodobiaceae bacterium OX=2026785 GN=queG PE=3 SV=1
  misc_feature (373)..(373): Xaa can be any naturally occurring amino acid
MSTKRPAKPKPPLTPELIKSMAREIGFDAIHIVRVEDVPDRTDKLQSWLGKGHHGVMEWMAETVERRGHPNALWPEARSVIVLGQNYGPDSDPLEVLNHPDHAAISVYARNRDYHDLIKKRLKRLARWLVEQCGADVKVFVDTAPVMEKPLAASAGLGWQGRHTNLVSREFGSWLFLGSIYTTVELPSDPPEVDHCGSCHACLDICPTKAFPAPYQIDARRCISYLTIEYKGHIPDEFRIPIGNRIYGCDDCLAVCPWNKFASKTDEVAFHPRESLIAPLLKELVGFDDAAFRTFFTVSPIKRIGRDRFTRNVLIAIGNSAEPDLLPHAQARLEDASPLVRAMAIWAVGRLASQAQIDQMLKGRENDPDPDVXSEWEKLKGRPLPAPH

SEQ ID NO: 80424 - protein, 369 aa, Rhodobiaceae bacterium
  misc_feature (1)..(369): tr|A0A2E9B7V8|A0A2E9B7V8_9RHIZ Epoxyqueuosine reductase OS=Rhodobiaceae bacterium OX=2026785 GN=queG PE=3 SV=1
MKAITKEVLQTKIEMLGFDDIGFTDITDIPDQKDSLEEYLKNGYHGDMIWLEKNKERRSHPSNIWQDAKSVIAVSKNYGPQDNPLHNIKETLKANISVYARADDYHELMKKSLKKLSIWLLNEYGIESKLFVDTAPIMEKPIAQIAGIGWQGKHSNLVSRKLGSWFFLGVILLPIKLEASSPELDHCGSCSSCIDICPTNAIVSPYKLDSRRCISYLTIEHKGHIPEEFRELIGNRIYGCDDCLAVCPWNKFASQTRDIQLKAKKILNMPDISFFLDFDYDAFNKFFKTSPIKRIGKDRFLRNVLIAAGNSGSQQISIKVKKFLRHESSIIRASAIWALKKIISKKEFQKLRKIYILEENDPLVVSEWG

SEQ ID NO: 80425 - protein, 382 aa, Rhodobium orientis
  misc_feature (1)..(382): tr|A0A327JSF3|A0A327JSF3_9RHIZ Epoxyqueuosine reductase OS=Rhodobium orientis OX=34017 GN=queG PE=3 SV=1
MPDKLRPALEARAKALGFDAVRIAPADIGETPGEHLADFVAAGHHGTMDWMAMTLDRRRSPRALWPEARSVVVLGLNYGPERDPREILEKPDRGAIAAYAGNRDYHDIVKGRLKQLAGWLASRADCDVKVFVDTAPVMEKPIAAHAGLGWQGKHTNLVSRDYGSWLFLGEIYTTLDLAPDPPLADHCGSCRACLDACPTGALPEPYRIDARLCISYLTIEMKGPIPRHLRPAIGNRIYGCDDCLAVCPWNKYASATREMKLAVRDDLEAPRLADLAALDDAAFRAFFSGSPAKRIGRDRFVRNVLIAIGNSGDTALLQSVRPLLADESPLVRGAAAWAFRRLAAPGAIETTRTQRLALETDTDVRAEWAAEKERERKEETGQ

SEQ ID NO: 80426 - protein, 324 aa, Rhodoblastus acidophilus
  misc_feature (1)..(324): tr|A0A212RZK8|A0A212RZK8_RHOAC Epoxyqueuosine reductase OS=Rhodoblastus acidophilus OX=1074 GN=SAMN06265338_10 9105 PE=4 SV=1
MDWLGERRDRRADPRKLWPDVRSIVMLGINYGPDLAPVEPNAGAISVYARNRDYHDVIKGKLKQLAGAFLAFARAQAGVEGEVKVFVDTAPVMEKPLAAAAGLGWQGKHTNLVSRQFGSWLFLGSIFTNLDLPADPPEADHCGKCRACVDACPTGALDSGKIDARLCVSYLTIETKGQIPAGLREKIGNRIYGCDDCLAVCPWNKFAQTAREAKFSARADLVAPPLAELAALDEAAFRQKFSGNPVKRIGHARFLRNVLLAIGNSGDGALAPLAKARLGHESALVRGMAVWALARLLPRDEFASLAAKNSDEPDPDVRSEWGTP

SEQ ID NO: 80427 - protein, 398 aa, Rhodoblastus sphagnicola
  misc_feature (1)..(398): tr|A0A2S6MZ47|A0A2S6MZ47_9RHIZ tRNA epoxyqueuosine(34) reductase QueG OS=Rhodoblastus sphagnicola OX=333368 GN =CCR94_19350 PE=4 SV=1
MVPAPEKPPEFSPAAGGSGAGRRGQSDLRGSGLLSFLRGEAARLGFDGCRVTKPDAIPHAPAALETFIAEGRHGDMDWLAERRDWRADPLKLWPEVRSVVMLAMNYGPEILPVPPRAGNISVYARHRDYHDVVKGKLKLLAGALLARAKILGVAGEVKVFVDTAPVMEKPLAAAAGLGWQGKHTNLVSRDFGSWLFLGSIFTTLDLASDAPETDHCGSCRACLDACPTGALDTGKIDANLCVSYLTIEAKGQIPRDLREKIGNRIYGCDDCLAVCPWNKFAQQAHEAKFRARADLVAPPLTKLATMDEGEFRAFFSGNPIKRVGSARFLRNVLLALGNSGDVSLAPLAMARLGHESALVRGMAVWALARLLPRDEFATLAAQNNEPDPSVRSEWGFYP

SEQ ID NO: 80428 - protein, 377 aa, Rhodococcus qingshengii
  misc_feature (1)..(377): tr|A0A4R5ZHI2|A0A4R5ZHI2_9NOCA tRNA epoxyqueuosine(34) reductase QueG OS=Rhodococcus qingshengii OX=334542 GN= queG PE=4 SV=1
MNIDQLKEEVIAYSKTIGIDKIGFTTADPFTELKNRLIRQQELGYQSGFEEPDIEKRVTPAMLLPEPRSIISIALAYPSKMKVRIEGRKGERRGFFSRASWGLDYHHILRDRLKKLEAFILEKVPEARLKSMVDTGELSDRAVAVRAGIGWSGKNCAVMTPEFGSYVYIGEMITSLPFAADTPMEDQCGSCTACIDACPTGALVQGGQINAQRCIAFLTQTKAVIPEEFRDKIGNRVYGCDSCQTSCPVNKGKDFHFHEEMEADPETAKPLLRPMLKMSNREFKNRFGPVAGSWRGKRPIQRNAIIALAHFKDESAIPDLLDVLENETSSVLKETAAWALGKIGSMEAVEALEKAAEKEDDLVVKSEINKSLLKLKN

SEQ ID NO: 80429 - protein, 438 aa, Rhodococcus sp.
  misc_feature (1)..(438): tr|A0A1Y5LF69|A0A1Y5LF69_9NOCA Uncharacterized protein OS=Rhodococcus sp. NCIMB 12038 OX=933800 GN=CA951_16295 PE=4 SV=1
MAGEFTRNGLQRAALKWGHQLSTLLYPVARKTLPYRPKMWWIPRLPIWAHPRRAPHGRPWSTPVPAPADELRTGPGVQLIPEAQQRAFDEAPLHDFIRLHPEMRGEHSPTGHMWISLLSTSPRVQGAARRRAQANRRPDATAPAARVTPAALTEAMKREAARLGLAAVGVTAYDIKCNYAEYHGLAVGDTIIVGIVEQNFDSTQMCPSLRSEKAALSAYAGLEDRMRLLADWIREQGYAARAEGFVGESMVIPYAVQAGLGQLGLNGQLLTPNAGSRCRIEVMSTDAPFLHDTPVDFGIEGVCDKCQICVRRCPAGAIPAIRKESRGVVKAKLNTKRCLPVMGKTAGCSVCMKVCPVQRYGLPAVLQEFEATGRVLGKDTDDLEGFDWPLDGRHYGPGERPRLAPEVFETPGFEFDPDRKVPLDWVDPTGTNTEALGY

SEQ ID NO: 80430 - protein, 438 aa, Rhodococcus sp.
  misc_feature (1)..(438): tr|A0A507SDT7|A0A507SDT7_9NOCA Uncharacterized protein OS=Rhodococcus sp. WS4 OX=1882742 GN=EEB14_10985 PE=4 S V=1
MAGEFTRNGLQRAALKWGHQLSNLLYPIARKTLPYRPKMWWIPRLPIWAHPRRAPHGRPWSTPIPAPADELRTGPGVQLLPEAQQRAFDEAPLHDFIRLHPEMRGVHSPTGHMWISLLSTSPRVQGAARRRAQANLHPDATAPPARVTPAALTEAMKREAARLGLAAVGVTAYDIKYNYAEYHGLAVGDTIIVGIVEQNFDSTQMCPSLRSEKAALSAYAGLEDRMRLLADWIRAQGYAARAEGFVGESMVIPYAVQAGLGQLGLNGQLLTPDAGSRCRIEVMSTDAPFLHDAPVDFGIEGVCDKCQICVRRCPAGAIPAIRKESRGVVKAKLNTKRCLPVMGKTAGCSVCMKVCPVQRFGLPAVLQEFEATGRVLGKDTDDLEGFDWPLDGWHYGPGERPRLAPEVFETPGFEFDPGRKVPLDWVNPTGKNTEALGY

SEQ ID NO: 80431 - protein, 349 aa, Rhodocyclaceae bacterium
  misc_feature (1)..(349): tr|A0A431MII3|A0A431MII3_9RHOO Epoxyqueuosine reductase OS=Rhodocyclaceae bacterium OX=1898103 GN=queG PE=3 SV =1
MHGDWISLAQQIKEWGLALGFDAISISERTLKDAEQGLEQWLAQGFHGEMDYMASHGSKRARPEELVPGTRSVICVRLNYRPSAANEAANLADGERAYISRYALGRDYHKVLRNRLQKLADRIASTVGPFGYRAFTDSAPVMEVALASQSGLGWRGKHTLLLTREAGSYFFLGEIYTDLPLPTDTLVADHCGTCNACIQSCPTGAIVAPYQVDARRCISYLTIELKGSIPEALRPQIGNRVYGCDDCQLCCPWNRFAPTTKEEDFAVRNGLDSATLVELFAWDEPQFNERLAGSAIRRIGHERWLRNIAVGLGNGPRIPVAIAALKGRLDHSSALVREHVAWALARLTG

SEQ ID NO: 80432 - protein, 353 aa, Rhodocyclaceae bacterium
  misc_feature (1)..(353): tr|A0A455RGL6|A0A455RGL6_9RHOO Epoxyqueuosine reductase OS=Rhodocyclaceae bacterium SHINM1 OX=1751046 GN=queG PE=3 SV=1
MHVLPDSTSLRQLIAAEAKALGFSDVRIGPARIPESSRAELDAWLAEGCHGSMAYMERHADLRKDPALLVNGAQNVICVRLPYWPAQATDADTQLRNTEGAYVSRYALGRDYHKVIRNRLQKLADALTKKFGSFNYRACTDSAPVMEVALASQAGLGWQGKHTLALNRTGSWYFLGELICDLPIEADPPIESHCGDCTRCIDSCPTGAITSAYKVDARRCISYLTIEHKGEIPEAFRKAIGNRIYGCDDCQLVCPWNRFTTDGDTEFAPRHNLDNASLLELYAWDETEFLNKMAGSAIRRIGFEQWQRNISVALGNATPTEPIINALNDKKAHASTLVKTHIEWALAQLTAPR

SEQ ID NO: 80433 - protein, 357 aa, Rhodocyclales bacterium
  misc_feature (1)..(357): tr|A0A383X5G5|A0A383X5G5_9RHOO Epoxyqueuosine reductase OS=Rhodocyclales bacterium OX=2072421 GN=queG PE=3 SV= 1
MILGMQNIHSIDGVELAARIRQWGQELGFDAIGIASTALDAAETELQAWLAAGFHGEMDYMASHGTKRSRPAELVPDTVSIITARMNYLPQAAPMEAVLADGTRAAISRYALGRDYHKLLRARLQKLAERIAAEIGPFGHRVFTDSAPVQEVALAEQSGLGWRGKHTLLIHREAGSYFFLGEIYTDLPLPADRPQEEHCGSCRACLDVCPTQAIVAPFTVDARRCISYLTIELKGAIPEELRPLIGNRIYGCDDCQLACPWNRFARRTVETDFAVRHGLDSASLVELFAWTEAEFKSRLAGSAIYRIGHARWLRNIAVALGNAPSSPVIVAALESRRDHPSELVREHVSWALARHRA

SEQ ID NO: 80434 - protein, 362 aa, Rhodocyclales bacterium
  misc_feature (1)..(362): tr|A0A1G3HLK8|A0A1G3HLK8_9RHOO Epoxyqueuosine reductase OS=Rhodocyclales bacterium RIFCSPLOWO2_02_FULL_63_24 O X=1802018 GN=queG PE=3 SV=1
MHGGDQKNSAELKEDIRRWSRELGFDAVGFSGTRVDAAEANLMAWLAAGCHGEMDYMAAHVTDAGNMRALPTELMPGTRSIITVRMNYRPVAADSAAALADGERAFISRYALGRDYHKLLRVRLQQLADRITAEIGQFAYRVFTDSAPVMEIGLAQNSGLGWRGKHTLLLDREAGSYFFLGEIFTDLSLSPDTPVTDHCGTCSACIEACPTQAIVAPYRIDARRCISYLSIELKGSIPEPLRLPLGNRIYGCDDCQLACPWNRFAPLTRESDFAPRRDLDQARLVELFAWEEEDFNERLAGSPIRRIGYPRWLRNIAVALGNAPSNNEVIGALRSRANHASALVREHVAWALQRHGSVPQKA

SEQ ID NO: 80435 - protein, 365 aa, Rhodoferax antarcticus
  misc_feature (1)..(365): tr|A0A1Q8YE98|A0A1Q8YE98_9BURK Epoxyqueuosine reductase OS=Rhodoferax antarcticus ANT.BR OX=1111071 GN=queG PE =3 SV=1
MNNFRTHNGDDARVSNIQEWGLALGFSQISVSGVDLSSAEPGLSAWLAAGFHGDMAYMAAHGMKRARPAELVPGTLSVISARMDYLPATTPEGWQAVEFDRLQRPQQAIVSLYARGRDYHKVLRNRLQKLSDRIALEFGPLGYRVFTDSAPVLEVELAARSGQGWRGKHTLLLNRDAGSMFFLGEIFVDVALPPTPAVADHCGSCSACIDICPTQAIVAPYRVDARRCISYLTIEHAGPIPLELRPLMGNHIYGCDDCQLVCPWNKFARTSALPDFDARAGLADQSLAEVFAWTEAVFLNLTEGGPIRRIGHERWLRNVAVALGNALRGAANAEVRQALQSALQTCQTHPSALVREHVAWALAQA

SEQ ID NO: 80436 - protein, 365 aa, Rhodoferax fermentans
  misc_feature (1)..(365): tr|A0A1T1AYK3|A0A1T1AYK3_RHOFE Epoxyqueuosine reductase OS=Rhodoferax fermentans OX=28066 GN=queG PE=3 SV=1
MNSFRTHNKGDDWVSRIRGWARELGFSQIGVTGVDLSSAEPGLSAWLEAGWHGQMAYMAAHGLKRARPAELVPGTLSVITARMDYLPSNTPVGWQRVELDRSNEPTQGIVSLYARGRDYHKVMRQRLQTLCEQMVMELGPLGYRVFTDSAPVLEVELASRSGLGWRGKHTLALNREAGSMAFLGEIFVDMALPPTEPVRSHCGSCSACLDVCPTQAIVAPYRLDARRCLSYLSIEHAGPIPEALRVPMGNRIYGCDDCQLVCPWNKFAQTSKLPDFDARQQLVEQPLVALFAWTEDAFLRHTEGSPIRRIGHERWLRNLAVALGNALRVASSDDQRQVLMAALHSRRAHPSELVREHVVWALAQA

SEQ ID NO: 80437 - protein, 349 aa, Rhodoferax ferrireducens
  misc_feature (1)..(349): tr|A0A1W9L0X5|A0A1W9L0X5_9BURK Epoxyqueuosine reductase OS=Rhodoferax ferrireducens OX=192843 GN=queG PE=3 SV= 1
MRDWAQALGFSQIGVAGVDLSTAEPGLSAWLAAGFQGDMAYMAAHGLKRARPAELVPGTLSVITARLDYLPAATPDGWQVLELDRLNRADEATVSLYARGRDYHKVLRNRLQKLADQMTEAFGPLGYRVFTDSAPVLEAELATRSGLGWRGKHTLVLSRDAGSMYFLGELFIDVALPPTAPVTPHCGSCRACIDICPTQAIVAPYRLDARRCISYLTIEHAGPIPVELRPLMGNHIYGCDDCQLVCPWNKFAQTSCLPDFDARASCVNPSLAEVFAWTEDAFLRLTEGSPIRRIGHERWLRNVAVALGNALRVADASGSRQAITSALQGRVNHPSALVREHVAWALAQV

SEQ ID NO: 80438 - protein, 372 aa, Rhodoferax ferrireducens
  misc_feature (1)..(372): tr|Q21T93|Q21T93_RHOFT Epoxyqueuosine reductase OS=Rhod oferax ferrireducens (strain ATCC BAA-621 / DSM 15236 / T118) OX=338969 GN=queG PE=3 SV=1
MTNFNIHAEASQWVSKIQAWARELGFSQIGVAGVDLSSSEQGLSTWLARGFHGDMAYMAAHGLKRARPAELVPGTVSVITVRMDYLPAATKPGWQAIEFDRLRRPREGIVSVYARGRDYHKVLRKRLQQLSERIALEMGPFGHRVFTDSAPVLEAELAARSGQGWRGKHTLVLSREAGSMFFLGEIYVDLALPTSAPVLGHCGSCSACIEVCPTQAIVAPQQLDARRCISYLTIEHAGPIPLELRPLIGNRIYGCDDCQLICPWNKFAQRSALPDFDERPGLGGSQMVTLFAWTEEDFLRLTEGSPIRRIGHERWLRNIAVALGNALRADPAADLVQALALRAEHPSALVREHVAWALESRLAVPLSIDPGA

SEQ ID NO: 80439 - protein, 365 aa, Rhodoferax koreense
  misc_feature (1)..(365): tr|A0A1P8K3P9|A0A1P8K3P9_9BURK Epoxyqueuosine reductase OS=Rhodoferax koreense OX=1842727 GN=queG PE=3 SV=1
MFDSAQNDGLQLVSQIQLWARELGFSQIGVAPVDLSSAEAGLSAWLAQGFHGEMAYMATHGLKRARPAELVPGTVSVITARMNYLPRGTPPDWQAHEFARLQRPSEGIVSVYARGRDYHKVLRTRLQKLGERIAAHLGPMGFRAFTDSAPVLEAELASRSGQGWRGKHTLVLSRDAGSMFFLGEIYVDIALPPTAPVSDHCGSCQACIDVCPTQAILGPQRLDARRCISYLTIEHPGAIPLELRPLIGNRIYGCDDCQLVCPWNKFAQRAALPDFDERRGLSGQQLGALFAWTEEEFLRLTEGSPIRRIGHERWLRNVAVALGNALRMGNGGDGRAALQARAMHESPIVREHVAWALRQGAGQMA

SEQ ID NO: 80440 - protein, 370 aa, Rhodoferax saidenbachensis
  misc_feature (1)..(370): tr|A0A1P8KFV4|A0A1P8KFV4_9BURK Epoxyqueuosine reductase OS=Rhodoferax saidenbachensis OX=1484693 GN=queG PE=3 SV=1
MTINSTQFDGNQLVSQIQAWARELGFSQIGVADVDLSSAEPGLLAWLARGYHGDMAYMANHGLKRARPAELVPGTLSVITARMDYLPAATPTDWQGEELARLERPGEGIVSLYARGRDYHKVLRSRLQKLTDRIAAHIGPLGHRVFTDSAPVLEAELAARSGQGWRGKHTLLLNREAGSMFFLGEIYVDIALPTSSPVQEHCGTCNACISICPTQAILAPQRLDARRCISYLTIEHAGPIPLELRPLMGNRIYGCDDCQLVCPWNKFAQRSALADFDPREGLSGQQLGALLGWTEEEFLRRTEGSPIRRIGHARWLRNVAVALGNALRQGGGDALRRESLLAALGTRLEHADAVVREHVQWAMAQAPELE

SEQ ID NO: 80441 - protein, 357 aa, Rhodoferax sp.
  misc_feature (1)..(357): tr|A0A5C7T554|A0A5C7T554_9BURK Epoxyqueuosine reductase OS=Rhodoferax sp. OX=50421 GN=queG PE=3 SV=1
MRAWALELGFSQIGVAGVDLSSSEPGLLAWLDQGFHGDMHYMAAHGLKRARPMELVPGTVCVLTARMDYLPRGTAPDWAEQELARLQTPTQGVVSVYARGRDYHKVLRSRLQKLADKIAEVLGPVGHRVFTDSAPVLEAELAARSGQGWRGKHTLLLSREGGSMFFLGEIYLDFALPLSEPTSHHCGQCTACISACPTGAIVSPGKLDARRCISYLTIEHAGPIPEDLRPLLGNRIYGCDDCQLVCPWNKFAQPSALPDFDARAPVQPQDLLAFFAWTEAQFLAHTEGSPIRRIGHARWIRNVAVALGNALRQPTLDADVTQRIRQALQQRLQEADAVVAEHVQWALAQGPAQEEGL

SEQ ID NO: 80442 - protein, 306 aa, Rhodoferax sp.
  misc_feature (1)..(306): tr|A0A2U0YV97|A0A2U0YV97_9BURK Epoxyqueuosine reductase OS=Rhodoferax sp. YR267 OX=2135500 GN=C7516_102124 PE= 4 SV=1
MAYMESHGLKRARPAELVPGTVSVITARMDYLPRSTPEGWQALEFDRLQRPGEGIVSVYARGRDYHKVLRARLQKLSDRIAAELGPLGYRVFTDSAPVLEAELATRSGQGWRGKHTLVLNREAGSMFFLGEIYVDRALPPTEATSGHCGSCSACIDICPTQAIIAPQRLDARRCISYLTIEHAGPIPLEFRPLIANRIYGCDDCQLACPWNKFAQRSALPDFDERRGLSGQQLGTLFGWTEDEFLRYTEGGPIRRIGHERWLRNVAVAMGNALRQQDDPALRQALQRRAQSASPLVREHIDWALGV

SEQ ID NO: 80443 - protein, 315 aa, Rhodohalobacter barkolensis
  misc_feature (1)..(315): tr|A0A2N0VJR2|A0A2N0VJR2_9BACT Epoxyqueuosine reductase OS=Rhodohalobacter barkolensis OX=2053187 GN=queG PE=3 SV=1
MDPLKNTIHIRAKALELGFDRCGFAKAGKLDEEAYRLEEWLNSGHHGNMNWMENYFDKRTDPTKLVPGAKSVVSVIAGYRFEENEQYDQNYKVPKISKYARGRDYHKLFKNRLKHLFRYSQDLIGDINGRIFVDSAPVLDRAWGRLSGNGWIGKNSMLMNKTHGSWFFIGEMILDVPFVYDAPETDHCGTCTKCIDACPTDAIYEPQKVDGSKCISYLTIEMKETMPKEFQEQLGEWMFGCDICQDVCPWNRKAEYGNYKDLKPRENVLYPADRKWSEITEKEFDDIFEGSAVRRATHKWFVRNAKLAEQNLKSK

SEQ ID NO: 80444 - protein, 318 aa, Rhodohalobacter sp.
  misc_feature (1)..(318): tr|A0A371QP61|A0A371QP61_9BACT Epoxyqueuosine reductase OS=Rhodohalobacter sp. SW132 OX=2293433 GN=queG PE=3 S V=1
MDPLVITHKVRQKARELGFDGCGFSRAGKLDKEARRLEQWLNEGRHGTMDWMENNFDKRIDPTRLVPGSKSVVSLLASYRFEKNELDDKINPGPKIAKYARGRDYHKTFKSRLKKLFRYTKEQSGGLEGRIFVDSAPVMDKAWAEKSGLGWMGKNGNMLNKDLGSWFLIGEMIVDIPFVYDAPVAEHCGSCTRCIDACPTNAIYEPYRIDSERCISYLTIELKDKIPESKKAGLGEWAFGCDICQDVCPWNRKADYSSVEDFTPREQVLRPPESKNWSEITPDEFDIVFEGTPIRRAKHKWFTRNAKIAEQNIISGSG

SEQ ID NO: 80445 - protein, 385 aa, Rhodomicrobium udaipurense
  misc_feature (1)..(385): tr|A0A037UV89|A0A037UV89_9RHIZ Epoxyqueuosine reductase OS=Rhodomicrobium udaipurense JA643 OX=858455 GN=queG PE=3 SV=1
MRISTSEHARTVAAGDNLSGFVKARALAEGFDTVGIADPASIGEAGEGLMGFLAAGFHGDMGWLEANADKRADPRVLWPEVRSVILVTLSYGPDADPRIARNDPSRGAVSVYAKGADYHDIIKAKLKAVARDFASIAGADVKVFVDTAPVMEKPLAQAAGLGWQGKHTNLVSRDLGSWFFLGAIFTTAKLAPDAPERDRCGTCRACLDACPTRAFPEPHRIDARRCISYLTIEHKGQIAPEFREAIGNRIYGCDDCLAACPWNKFAQEASEMRFHARDAADNPPLRELLRLDDAAFRARFAGSPIKRIKRDRFVRNALIAAGNSDDAALLDDALPLLCDDSPLVRGMAVWAVRQLGGLELKSKLKESYSSEEKDVAVREEWERTP

SEQ ID NO: 80446 - protein, 385 aa, Rhodomicrobium vannielii
  misc_feature (1)..(385): tr|E3HYR5|E3HYR5_RHOVT Epoxyqueuosine reductase OS=Rhod omicrobium vannielii (strain ATCC 17100 / ATH 3.1.1 / D SM 162 / LMG 4299) OX=648757 GN=queG PE=3 SV=1
MRISTSEHARSAAAGDNLSGVVKARALAEGFDTVGIADPASIGGAGEGLMGFLAAGFHGDMGWLEANADKRADPRVLWPDVRSVILVTLSYGPDVDPRTARNDPSRGAVSVYAKGADYHDIIKAKLKAVARDFASIAGADVKVFVDTAPVMEKPLAQAAGLGWQGKHTNLVARDLGSWFFLGAIFTTAKLAPDAPERDRCGTCRACLDACPTRAFPAPHRIDARRCISYLTIEHKGQIAPEFREAIGNRIYGCDECLAACPWNKFAQEASEMRFHARDGADNPLLRELLRLDDAAFRARFAGSPIKRIKRDRFVRNALIAAGNSGDAALLDDALSLLCDDSPLVRGMAVWAVRQLGGLELKSKLKESYSSEEKDVAVREEWERTP

SEQ ID NO: 80447 - protein, 311 aa, Rhodonellum psychrophilum
  misc_feature (1)..(311): tr|U5C251|U5C251_9BACT Epoxyqueuosine reductase OS=Rhod onellum psychrophilum GCM71 = DSM 17998 OX=1123057 GN=q ueG PE=3 SV=1
MNVQKDKYAQIIKTQAKNLGFDFCGVAKAEFLKEEAPKLEDWLNKNHHGEMAYMANHFDKRLDPTLLVEGAKTVISLIYNYYPEKRLPDSPENLKIAKYAYGEDYHFVIKEKLKTLLTNLRTEIGEFGGRAFVDSAPVMERQWAQKSGLGWQGKNSLLLNRQMGSFFFLAELIIDLEVTPDPPMIKDYCGTCTKCVDACPTDAIVQAGVVDGSKCISYFTIELKDQIPNEMKGKFENWVFGCDICQDVCPWNSFSKPHQEAKFAPHPDLKTMGNKDWQELTEETFNKVFQKSAIKRTKFQGLLRNINFNLS

SEQ ID NO: 80448 - protein, 358 aa, Rhodopila globiformis
  misc_feature (1)..(358): tr|A0A2S6NI82|A0A2S6NI82_RHOGL Epoxyqueuosine reductase OS=Rhodopila globiformis OX=1071 GN=queG PE=3 SV=1
MTETTVRKTGTTTDLKTRIRDKALQIGLDAVGFCPADLAPEARERLTHFLRAGYHGDMGWLADRKQQRSQPKALWPDVRSVIVVGMSYAPAYDPLSAAGQRNCGNISVYARNRDYHDIIKGHLKHLAQFLVSRFACQVKVFVDTAPVMEKPLAQQSGLGWQGKHTNLVSREYGSWLLLGEIYTDLELQGDDPSADHCGSCSRCLDVCPTRAFPAPYRLDASRCISYLTIEHHGPIPTELRPLMGNHIYGCDDCLAVCPWNKFATPTTHEKLVARGDLAAPALSDLAGLDDKTFRARFAGSPIKRTGRNRFVRNVLIAIGNSGDRALLPVAQRLQADQDPVVAEAAHWAAARLAAAAGC

SEQ ID NO: 80449 - protein, 384 aa, Rhodopirellula bahusiensis
  misc_feature (1)..(384): tr|A0A2G1W6L8|A0A2G1W6L8_9PLAN tRNA epoxyqueuosine(34) reductase QueG OS=Rhodopirellula bahusiensis OX=2014065 GN=queG PE=4 SV=1
MSDLVEQIRATALSEGFAAMGIAPAVTSQGFHHLVQWIESGYAGSMDYLERRLDAYRHPSGVLEGTKSIVVLAMNYDAAIREPMPSNGGSEGLAFGKTARYTWSAIDYHDVIHPKLKRIVRMIREEIPDANARGIVDTAPLMEREVAVLAGLGWRGKNTLLLNKQLGSYFFLACVLVDVELPIDQPHETSHCGTCTACLDACPTDAFPSPGVLDASKCISYLTIENSELPEQSLRAGIGDWVFGCDVCQEVCPWNRRPSRTQHDPDGLRGHRDSANPLDVDDGWLELTSLFSMTDEEFRSQFRRTPFWRSRRRGMLRNAIVVLGNQKRLKAIELLFTTLKDADPELRAIAVWAICQMQDQAAFDRLLGYRHTETDPLVLAEFPE

SEQ ID NO: 80450 - protein, 381 aa, Rhodopirellula baltica
  misc_feature (1)..(381): tr|Q7UQM6|Q7UQM6_RHOBA 4Fe-4S ferredoxin-type domain-co ntaining protein OS=Rhodopirellula baltica (strain DSM 10527 / NCIMB 13988 / SH1) OX=243090 GN=RB6226 PE=4 SV= 1
MNDLVEQIRETALSEGFAAMGIAPAVTSEGFHQLVDWIEAGYAGSMDYLERRLDAYRHPTGVLEGTKSIIVLAMNYDASNRGPAPSVEGSAYGKTARYTWSGVDYHDVIHPKLKRIVRLIREQVPEANARGIVDTAPLMEREVAVLAGLGWRGKNTLLLNKQLGSYFFLACVLVDIDLPIDQPHDSSHCGTCSACLDACPTDAFPSAGVLDASKCISYLTIENPGLPELSLRSGIDEWAFGCDVCQEVCPWNRRPSRQQNAANGLRGHREPADDSQGHDGWLELTSLFSMTEDQFRSQFRRTPYWRTKRRGMLRNAIIVLGNQKRRDAIELLFTTLNDPDPELRAIAVWAICQMQDSESLDRLRGYRQSENDPIVLAEFPG

SEQ ID NO: 80451 - protein, 381 aa, Rhodopirellula baltica
  misc_feature (1)..(381): tr|F2APA5|F2APA5_RHOBT Iron-sulfur cluster-binding prot ein OS=Rhodopirellula baltica WH47 OX=991778 GN=RBWH47_ 04420 PE=4 SV=1
MNDLVEQIRETALSEGFAAMGIAPAVTSEGFHQLVDWIEAGYAGSMDYLERRLDAYRHPTGVLEGTKSIIVLAMNYDASNRGPAPSVEGSAYGKTARYTWSGVDYHDVIHPKLKRIVRMIREQIPEANARGIVDTAPLMEREVAVLAGLGWRGKNTLLLNKQLGSYFFLACVLVDIDLPIDQPHDSSHCGTCSACLDACPTDAFPSAGVLDASKCISYLTIENPGLPESSLRSDIDEWAFGCDVCQEVCPWNRRPSRQQNAANGLRGHREPADEPQGHDGWLELTSLFSMTEDQFRSQFRRTPFWRTKRRGMLRNAIIVLGNQKRRDAIELLFTTLDDPDPELRAIAVWAICQMQDSESLDRLRGYRQTENDPIVLAEFPG

SEQ ID NO: 80452 - protein, 381 aa, Rhodopirellula europaea
  misc_feature (1)..(381): tr|M2AYD9|M2AYD9_9PLAN Protein putative iron-sulfur clu ster binding protein OS=Rhodopirellula europaea 6C OX=1 263867 GN=RE6C_04321 PE=4 SV=1
MNDLVEQIRETALSEGFAAMGIAPAITSEGFHQLVDWIESGYAGSMDYIERRLDAYRHPGGVLEGTKSIIVLAMNYDASDRGAAPSDEGLAFGKTARYTWSGVDYHDVIHPKLKRIVRLIRDQIPEANARGIVDTAPLMEREVAVLAGLGWRGKNTLLLNKQLGSYFFLACVLVDIDLPIDQPHDSSHCGTCTACLDACPTDAFPSAGVLDASKCISYLTIENSDLPELSLRSGIGEWAFGCDVCQEVCPWNRRPSRQKNETNGLRGHREPTSASSDHAGWLELTSLFSMTDDQFRSQFRRTPFWRTKRRGMLRNAIVVLGSQKRRDAIELLFTTLDDPDPELRAIAVWAICQMEDHDALDRLRGYRQSEDDPIVLAEFPG

SEQ ID NO: 80453 - protein, 381 aa, Rhodopirellula europaea
  misc_feature (1)..(381): tr|M5SSS7|M5SSS7_9PLAN Protein putative iron-sulfur clu ster binding protein OS=Rhodopirellula europaea SH398 O X=1263868 GN=RESH_00034 PE=4 SV=1
MNDLVEQIRETALSEGFAAMGIAPAITSEGFHQLVDWIESGYAGSMDYIERRLDAYRHPSGVLEGTKSIIVLAMNYDASDRGAAPSDEGLAFGKTARYTWSGVDYHDVIHPKLKRIVRLIRDQIPEANARGIVDTAPLMEREVAVLAGLGWRGKNTLLLNKQLGSYFFLACVLVDIDLPIDQPHDSSHCGTCTACLDACPTDAFPSAGVLDASKCISYLTIENSHLPELSLRSGIGEWAFGCDVCQEVCPWNRRPSRQKNETNGLRGHREPTSASSDHDGWLELTSLFSMTDDQFRSQFRRTPFWRTKRRGMLRNAIIVLGNQKRRDAIELLFTTLDDPDPELRAIAVWAICQMEDHDALDRLRGYRQSEDDPIVLAEFPG

SEQ ID NO: 80454 - protein, 384 aa, Rhodopirellula islandica
  misc_feature (1)..(384): tr|A0A0J1BIC1|A0A0J1BIC1_RHOIS Epoxyqueuosine (OQ) redu ctase QueG OS=Rhodopirellula islandica OX=595434 GN=RIS K_001506 PE=4 SV=1
MRETVEQIREAALSEGFAGMGIAPAVTSQGFHQLVQWIEAGYAGTMDYLERRLDAYRHPSGVLEGAKSIIVLAMNYDASDREPIPDGDVGDDLAFGKTARYTWSGIDYHDVIHPKLKRIVRLIREQIPEANARGIVDTAPLMEREVAVLAGLGWRGKNTLLLNKQLGSYFFLACVLVDVELPIDQRHESSHCGTCTACLDACPTDAFPRPGVLDASKCISYLTIESSELPERHLRAGIGDWAFGCDVCQEVCPWNRRPARAQHDLSGLRGHRESESDSNHREGWLELTALFTMTDDEFRRRYRRTPFWRSRRRGMLRNAILVLGNQKRRDAIELLFITMGDSDAELRAIAVWAICQMQDGAALERLMAYRQSETDPRVLAEFPH

SEQ ID NO: 80455 - protein, 360 aa, Rhodopirellula maiorica
  misc_feature (1)..(360): tr|M5R791|M5R791_9PLAN Protein putative iron-sulfur clu ster binding protein OS=Rhodopirellula maiorica SM1 OX= 1265738 GN=RMSM_07732 PE=4 SV=1
MRLSERGKPESVTSPADFMATFRNQASELGFIAVGVAPAIESSGFSQLARWIEAGYAGEMDYMANRLDAYKHPSGVLEGCRSVIAMAYPYDAAPTPPVASGAGRVARYAWQGVDYHDVIHPKLKRLVKSIRESFPGAAARGVVDTAPIMEREIAQLAGLGWQGKNTLLLNKQLGSYFFLACVLTDVDFPADTPHESSHCGTCTACLDACPTDAFPQAGVLDATRCISYLTIENRNEIAEDLRESIGDWAFGCDVCQEVCPWNRKPMRQYERESAPNQPLDALELRALFSLDEAEFRRRYRKTPLWRTRRRGVLRNAALVLGNQRDPASLPALRIGLTDEDALVRDASQWAIDQIQRNPLS

SEQ ID NO: 80456 - protein, 407 aa, Rhodopirellula sallentina
  misc_feature (1)..(407): tr|M5TY92|M5TY92_9PLAN Iron-sulfur cluster-binding prot ein OS=Rhodopirellula sallentina SM41 OX=1263870 GN=RSS M_04547 PE=4 SV=1
MPDAVENDPHAIIQAIREAAAEEGFVACGIAPAIDSQGFPDLVRWIDAGYHAEMEYFPNRLDAYRNPKGVLPGAKSVVALAWPYSALEHEHESTQTSVAGRNGQDGEAVVGGKVARYTWQATDYHDVIHPKLKRICKTILRLCPAANARGIVDTAPLMEREFAQLAGLGWRGKNTLLLNKTLGSYFFLACVLVDVELPPDTPHESDHCGTCTACLDACPTGAFVGPHVLDASRCISYLTIESREMIPEPLREGIGDWLFGCDVCQEVCPWNRKPTKRAMSNESVLQSDWRLSPDTPRGLMELSTLFQLDEETFRARFRKSPMWRTRRRGLLRNAAIVLGNVGNIEHADALILGMRDAEPIVRASSVWAGKRILAKSPSDARSGILANELKRLAIDEQNEIVRAELPS

SEQ ID NO: 80457 - protein, 382 aa, Rhodopirellula sp.
  misc_feature (1)..(382): tr|A0A2E4M8Z4|A0A2E4M8Z4_9PLAN tRNA epoxyqueuosine(34) reductase QueG OS=Rhodopirellula sp. OX=2024855 GN=queG PE=4 SV=1
MSNPADSLKRRAVELGFQFSGVAPAVTPEGMHRLVDWLDKGYAGQMSYIAERQNAYADPNLVLDGVRSVLMLGMHYSGYESIPETSPGQGRIARYANGTVDYHDLIHSRLKSLHVFHDDLLPAESSRGIVDTAPLLEREFAQLSGIGWIGKNTMLISKEQGSYFFLAALLSTADLQADNPQTTDHCGTCTACLDACPTDAFPEPFVLNANRCISYLTIEHRDEISGDLRTGMGDWLFGCDICQEVCPWNRHGDYCEEPDLQSSHELANLELYQLFNLDDDAFRNRFRKTPLWRPKRRGILRNAAIVLGNQAHLESIPALCKGLSDIEPLVRSACAWAIGKINSPDSILILETALGVESNETVLKELQKSIHELLKQTADSND

SEQ ID NO: 80458 - protein, 357 aa, Rhodopirellula sp.
  misc_feature (1)..(357): tr|A0A1Z8MIM8|A0A1Z8MIM8_9PLAN tRNA epoxyqueuosine(34) reductase QueG OS=Rhodopirellula sp. TMED11 OX=1986614 GN=CBB71_05485 PE=4 SV=1
MTVPETDSSHEDAPTWLASVKAQATELGLVNLGITPAVQATGFAPLTEWIESGYAASMDYFANRLDAYRHPRGVMPGVQSIMVFAWPYPTNPSQETAPGNGQVARYAWSGVDYHDSIHRMLKTLARTIKQSAPELRSRGCVDTAPLLERELGQAAGLGWTGKNTLLLNRNLGSYFFLCCLMVDCELPYDDAFESSHCGTCTACLDHCPTDAFVEPGLMDAGKCISYLTIEHRGSIDHDLRPGIGNWVFGCDVCQEVCPWNRKPAKQPRQSQQHYPLHELDLLGLFSLDEDSFRAKYRKSPFWRTRLQGMQRNAAIVLGNQKAKHALPVLTQAAKSDDAVVAEACQWAINEINSPPTD

SEQ ID NO: 80459 - protein, 395 aa, Rhodoplanes elegans
  misc_feature (1)..(395): tr|A0A327K0X9|A0A327K0X9_9RHIZ tRNA epoxyqueuosine(34) reductase QueG (Fragment) OS=Rhodoplanes elegans OX=294 08 GN=queG PE=3 SV=1
MTDASAPDSSALLVALRAEAKALGFDAVAVAAPDAIGDAGARFEKFLAAGMHGDMDWLADRPERRTSLRGLWADVQAVVMLGVNYGPERDPRDVLAQRDRGAISVYARGDDYHEVIKPRLKALARWLIGAAGGDAKVFVDTAAVMEKPLAAAAGLGWQGRHTNLVSRDFGSWLFLGALFTTLPLPPDAPADDCCGSCRACLDACPTEAFVAPYRLDARRCVSYLTIEHKGPIPREFREKLGNRIYGCDDCLAACPWNKFAQAGRDAKLAAREVLNAPSLRDLAGLDDAAFRALFRKTAIKRTGRDRVVRNVMIAIGNSGDAALADAAQARLADASSLVRGAAVWALSRLLPVDAFATLAACHRDHEPDPQVREEWTLGVSQNDAPSPLPARGERS

SEQ ID NO: 80460 - protein, 368 aa, Rhodoplanes piscinae
  misc_feature (1)..(368): tr|A0A327JZY0|A0A327JZY0_9RHIZ tRNA epoxyqueuosine(34) reductase QueG (Fragment) OS=Rhodoplanes piscinae OX=44 4923 GN=queG PE=3 SV=1
MTGPPAPDSSATDPSALVTALRAEATALGFDAVAIAAPDAIGRAAERLADFLAAGLHGDMDWLADRPERRASPRGLWPEVRAVVMLGVNYGPADDPRAATARRDRAAVSVYAQGDDYHEVIKPRLKALARWLVATAGGDVKVFVDTAAVMEKPLAAAAGLGWQGKHTNLVSRDFGSWLFLGAVFTTLPLPPDAAAADHCGDHCGSCRACLDACPTAAFPAPYRLDARRCISYLTIEHKGPIPRDLRPAIGNRVYGCDDCLAACPWNKFAKAGRDAKLAARQELTAPALADLAELDDAAFRALFRKTAVKRVGRDRFVRNVLVAIGNSGDPHLADAAAARLADASPLVRGAAVWALARLLPTTDISILA

SEQ ID NO: 80461 - protein, 350 aa, Rhodoplanes piscinae
  misc_feature (1)..(350): tr|A0A447CQC2|A0A447CQC2_9RHIZ Epoxyqueuosine reductase OS=Rhodoplanes piscinae OX=444923 GN=queG PE=4 SV=1
MDWLADRPERRASPRGLWPEVRAVVMLGVNYGPADDPRAATARRDRAAVSVYAQGDDYHEVIKPRLKALARWLVATAGGDVKVFVDTAAVMEKPLAAAAGLGWQGKHTNLVSRDFGSWLFLGAVFTTLPLPPDMPAADHCGDHCGSCRACLDACPTAAFPAPYRLDARRCISYLTIEHKGPIPRDLRLAIGNRVYGCDDCLAACPWNKFAKAGRDAKLAARQELTAPALADLAELDDAAFRALFRKTAVKRVGRDRFVRNVLVAIGNSGDPHLAGAAAARLADASPLVRGAAVWALARLMPAADFSNLADRHAAGETDPQVREEWAAALLFTSPRSRGEVDIHAAGMDIG

SEQ ID NO: 80462 - protein, 339 aa, Rhodoplanes sp.
  misc_feature (1)..(339): tr|A0A127ENT8|A0A127ENT8_9RHIZ 4Fe-4S ferredoxin OS=Rho doplanes sp. Z2-YC6860 OX=674703 GN=RHPLAN_03240 PE=4 S V=1
MRLQQFLAEGAHGDMAWMEATAERRASPQALWPQVRSVIMLGLNYGPDHDPLEILKARERGAISVYAKGEDYHEVIKPRLKDIARWLIAEAGGDVKVFVDTAAVMEKPLAAAAGLGWQGKHTNMVSRQFGSWLFLGAIFTTLELPADEPERDSCGTCHACLDICPTAAFPAPYRLDARRCISYLTIEHKGPIPREMRAMIGNRIYGCDDCLAVCPWNKFAQEGRNAKLAAREVARAPKLEELARLDDAAFRKMFAKTAVKRTGRDRFIRNVLIAIGNSGDAALAPAAERLLSDASPLARGAAVWALTRLDPARAAAVAPQYAGEPDPAVAEEWALTPNA

SEQ ID NO: 80463 - protein, 392 aa, Rhodopseudomonas faecalis
  misc_feature (1)..(392): tr|A0A318TJQ0|A0A318TJQ0_9BRAD Epoxyqueuosine reductase OS=Rhodopseudomonas faecalis OX=99655 GN=queG PE=3 SV= 1
MAGRGAGVADLCGPRLLTRPNDLSPQLAEQARALGFDAFGIVAPDAIPFAAARLEAFLESGAHGTMEWLAAHRDRRADPRVLWPQVRSIIMLGMNYGPDVDPRPLLQMRERGAISVYAKGDDYHDLIKPRLKTLARWLIAQAGGDVKVFVDTAPVMEKPLAQAAGLGWQGKHTNLVSRDRGSWLLLGAIFTTLELPRDAGMDERCGSCRACLDACPTGAFPAPYQLDARRCVSYLTIEHKGPIAPELRPLLGNRIYGCDDCLAACPWNKFAEIGREAKLAAREALRAPTLAELVTLDDPGFRALFSKSPIKRIGQARFIRNVLIAIGNSGSAELVASARSRLADPEPMIRGAAVWALSRLLPPEEFAALAAAHCSCESDDSVVQEWRLAVAS

SEQ ID NO: 80464 - protein, 417 aa, Rhodopseudomonas palustris
  misc_feature (1)..(417): tr|A0A418VIV5|A0A418VIV5_RHOPL Epoxyqueuosine reductase OS=Rhodopseudomonas palustris OX=1076 GN=queG PE=3 SV= 1
MARGRAGVADLRGSRLLSAADPAPDPAETSYGKLKTELAAQARALGFGAIGVCAPDAIPEALGRLREYLASDYHGQMAWLADRPERRADPRVMWSEVRSVIMLSVNYGPSTDPLALTAATDRGAISVYAQGDDYHDVIKARLKQLARWLIAAAGGEVKVFVDTAAVMEKPLAHAAGIGWQGKHSNLVSREFGSWLFLGAIFTTLELPRDDAERDHCGSCRNCLDACPTAAFPAPYRLDARRCISYLTIEHKGPIPHEFRQRLGNRIYGCDDCLAVCPWNKFAQAGREAKLASREAQRAPALAELVRLDDAAFRALFSKSPVKRIGRDRFVRNVLIAIGNSGDARLAAEAERLLGDADPAVRGAAVWALGRLVAGDQFAALRDGHLGGEVDESVREEWAGALPSPLVGEGGADAVRAG

SEQ ID NO: 80465 - protein, 370 aa, Rhodopseudomonas palustris
  misc_feature (1)..(370): tr|B3Q5X6|B3Q5X6_RHOPT 4Fe-4S ferredoxin-type domain-co ntaining protein OS=Rhodopseudomonas palustris (strain TIE-1) OX=395960 GN=Rpal_0043 PE=4 SV=1
MKARLAEQARALGFDAFGICAPDSIPEAPARLRAFLDAGYHGEMAWLADRPERRSDPRVMWSEVQSVILLGFNYGPDADPRAVLTQKDRGAISVYAQGDDYHDVIKARLKQFARWLVATGGGDVKVFIDTAAVMEKPLAQAAGLGWQGRHTNLVSKGRGSWMFLGAVFTTLDLPRDAAEGDHCGSCRACLDACPTAAFPAPYQLDARRCISYLTIEHKGPIPREFRARLGNRIYGCDDCLAACPWNKFAQAGREAKLAARDALRAPALGELVRLDDPSFRALFTKSPVKRIGRDRFIRNALIAIGNSGDAELAPEAERLLADPSPTIRGAAAWALAQLLPPERVATLKAVHLAAEVDDGVRAEWGGFAAE

SEQ ID NO: 80466 - protein, 366 aa, Rhodopseudomonas pentothenatexigens
  misc_feature (1)..(366): tr|A0A336JJB2|A0A336JJB2_9BRAD Epoxyqueuosine reductase OS=Rhodopseudomonas pentothenatexigens OX=999699 GN=SA MN05892882_10349 PE=4 SV=1
MADQARALGFDAFGICAPDSIPEAPARLRAFLDAGYHGDMAWLADRPERRSDPRVMWSEVRSVILLGFNYGPDVDPRTVLARKDRGAISVYAQGDDYHDVIKARLKLFGRWLVATAGGDVKVFIDTAAVMEKPLAQAAGLGWQGRHTNLVSTSRGSWMFLGAVFTTLDLPRDASERDHCGSCRACLDACPTAAFPAPYQLDARRCISYLTIEHKGAIPHEFRPRLGNRIYGCDDCLAACPWNKFAQAGREAKLAARQGLRAPELGELVRLDDPSFRALFTKSPVKRVGRDRFIRNVLIAIGNSGDVELAVEAERLLADPSATIRGAAAWALAQLLPPERFAALKASHLAGEPHQGVRAEWGGVAAE

SEQ ID NO: 80467 - protein, 380 aa, Rhodopseudomonas pseudopalustris
  misc_feature (1)..(380): tr|A0A1H8MI53|A0A1H8MI53_9BRAD Epoxyqueuosine reductase OS=Rhodopseudomonas pseudopalustris OX=1513892 GN=SAMN 05444123_101531 PE=4 SV=1
MAKQGQTLGFDAIGICAPDSIPHALDRLRDYLASGFHGEMAWLADRPERRADPRVMWSEVRSVIMLGVNYGPQSDPRHILGAKDRGAISVYAQGDDYHDVIKARLKQLARWLVATAGGEVKVFVDTAAVMEKPLAQAAGLGWQGKHSNLVSRELGSWLFLGAIFTTLELPRDAAERDHCGSCRACLDSCPTAAFPEPYRLDARRCISYLTIEHKGPIPHEFRQPIGNHIYGCDDCLAACPWNKFAQVGREAKLAARDALRAPSLGELVRLDDPSFRALFTKSPVKRIGRDRFIRNVLIAIGNSGDAELAREAERLLGDGSAVVRGAAVWALAQLLPGDQFAALKAARLGDEPDESVRAEWVGALPSPLVGEGGTDAVRAG

SEQ ID NO: 80468 - protein, 393 aa, Rhodopseudomonas sp.
  misc_feature (1)..(393): tr|A0A0N0KHR6|A0A0N0KHR6_9BRAD Epoxyqueuosine reductase OS=Rhodopseudomonas sp. AAP120 OX=1523430 GN=IP86_1491 0 PE=4 SV=1
MKAALTDQARALGFAPLGVCAPDAIPDALGYLREYLASDYHGQMAWLADRPERRADPRVMWSEVRSVIMLGVNYGPTSDPRAILEATDRGAISVYAQGDDYHDVIKARLKQLARWLVGAAGGEVKVFVDTAAVMEKPLAQAGGLGWQGKHSNLVSREFGSWLFLGAIFTTLDLPRDQAERDHCGSCRNCLDACPTAAFPAPYRLDARRCISYLTIEHKGPIPREFRRPLGNRIYGCDDCLAACPWNKFAQAGREAKLASREALRAPPLGELVRLDDAAFRALFTKSPVKRIGRARFIRNVLIAIGNSGDARLAAEAGRLLGDADPAVRGAAVWALGQLVAEEQFGALREQHLGEEADESVRAEWCGVNVARDPAPSSDVIPRASEGPSIPERG

SEQ ID NO: 80469 - protein, 345 aa, Rhodosalinus sediminis
  misc_feature (1)..(345): tr|A0A3D9BRQ8|A0A3D9BRQ8_9RHOB Epoxyqueuosine reductase OS=Rhodosalinus sediminis OX=1940533 GN=queG PE=3 SV=1
MGRDLKERLIEEARAAGFDAAGVCHPDAVPELPARLAAFLEAGYHGQMRWMAERAHWRADPAALWPEARSVIMLAMSYTPESDPLATLSEPEVGTISVYARGGDYHDLIKKRLKRVARWLIGTAGGEVKVFVDTAPVMEKPLAQAAGLGWQGKHTNLLSRDLGNWIFLGAIFTTLDLPPDAAEAEHCGSCRRCLDVCPTDAFPEPFRLDARRCISYLTIEHEGPVDESLRPLLGNRIYGCDDCLAVCPWNKFAVEAREAKLKARDALDAPRLAELARLDDAGFRAMFSGSPIKRIGRDRFVRNVLYAIGNSGRAELRAVAEGLTGDPDPAVADAAAWAVRRLDGV

SEQ ID NO: 80470 - protein, 345 aa, Rhodosalinus sp.
  misc_feature (1)..(345): tr|A0A365UAL0|A0A365UAL0_9RHOB Epoxyqueuosine reductase OS=Rhodosalinus sp. E84 OX=2259333 GN=queG PE=3 SV=1
MGRELKDRLIEEARAAGFDAVGVCRPDAVPELPARLRAFLEAGYHGQMGWMAEREAWRADPATLWPEARSVVMLAMSYTPESDPLATLSQPEVGTISVYARGGDYHDVIKKRLKRVARWLIGAAGGEVKVFVDTAPVMEKPLAQAAGLGWQGKHTNLLSRELGNWIFLGAIFTTLELAPDAPGEAHCGSCRKCLDICPTDAFPAPFQLDARRCISYLTIEHAGPVDEALRPLLGNRIYGCDDCLAVCPWNKFAVEAREAKLAAREELGAPPLAELARLDDAGFRAMFSGSPIKRIGRDRFVRNVLYAIGNSGRAELRPVAAELTGDPDPAVADAARWAVRRLQGV

SEQ ID NO: 80471 - protein, 375 aa, Rhodospirillaceae bacterium
  misc_feature (1)..(375): tr|A0A2E7HFF4|A0A2E7HFF4_9PROT Epoxyqueuosine reductase OS=Rhodospirillaceae bacterium OX=1898112 GN=queG PE=3 SV=1
MPSAADAFSAIREKAHELGFNACRVTDAEADPAWRRSLQELTTAGRHGDMDWLERRADERSDPRQLWSDVRSVITLAMSYGPDHDPLDDLKRTDRGVVSVYARGRDYHDVVKKRLKALARWIVETSGAEVKVFVDTAPVMEKPLAQRSGLGWQGKHSNLVSRELGSWFFLGEIYTTLVFEPDPPEPDHCGSCRACQDICPTDAFPQPYQLDPSRCISYLTIEHKGHIAPEFREPMGNRIYGCDDCLAVCPWNKFAVVAREAALAPRDSLAGPRLTDLAALDDSAFRELFRASPVKRTGRDRFVRNVMIALGNSGDPDSLNAVRTRLDDASPLVRAMAVWALSRLGAAHEVAEARATHYVAEQDAAVRREWDALES

SEQ ID NO: 80472 - protein, 368 aa, Rhodospirillaceae bacterium
  misc_feature (1)..(368): tr|A0A1Z8LLL3|A0A1Z8LLL3_9PROT tRNA epoxyqueuosine(34) reductase QueG OS=Rhodospirillaceae bacterium TMED8 OX= 1986645 GN=CBB68_10600 PE=4 SV=1
MNKVAREAIRQHALNQGFDAVGFTSAHSDPKDHAALAKFLKKNWHGDMSWMAEVGYSNVNPRGKPRALMPEAQTIIVLGSNYTPSDDPMFAVKNPKVGAISVYARPKRDYHYTIKKRLKKFGRWLVKNYAAKGIKVFVDTAPIMEKPLAARSGIGWQGKHTNLVSRDFGSWLFLSEVFTTLRIAPDLPEPDHCGSCTACMDACPTDAFPAPYQLDARRCISYLTIEHKAMIAPSLMTKMGNHIFGCDDCLTACPWNKFAMVTKDPVFEPREDLSSPLLSKLLKLDDDAFRSKFAGSSIKRLGRSRFIRNVLIAVANSGDHNLISTVELLFQDTDKLVAKTANWAHAQLSTLDQNKGSDNHFNNNKSQN

SEQ ID NO: 80473 - protein, 390 aa, Rhodospirillales bacterium
  misc_feature (1)..(390): tr|A0A2D9WDY9|A0A2D9WDY9_9PROT Epoxyqueuosine reductase OS=Rhodospirillales bacterium OX=2026786 GN=queG PE=3 SV=1
  misc_feature (62)..(62): Xaa can be any naturally occurring amino acid
MEFNIVNTLLKNQIRDFALKSGFIAVGFAPATLSKKNKDSMAEFIERGYHGDMGWLSAKADXRAAPHALWPEVKSVITLGISYAPSEDPLANLSNPEVGNISVYSRGRDYHEVFKKRLRVLGRWITDNFSCDIKIFVDTAPVMEKPIAEQAGIGWQGKHTNLVSRIHGSWLFLGEIFTTLDLSTSEIQENSVGKYCGNCERCLDVCPTNAFPSPYKLDARRCISYLTIEHKGLIDRDLRPLIGNRIYGCDDCLAVCPWNKFASAAADPDFESNEQFNSPKLIQLAKLTDEEFRKLFSKTAIKRIGRDRFIRNVLIALGNLKKAEAIPVILSLLTDPAPIVRGSAIWALSRTANIETFLVHKTMLLPKEDSTDVISEWNNSQRELELNLKS

SEQ ID NO: 80474 - protein, 399 aa, Rhodospirillales bacterium
  misc_feature (1)..(399): tr|A0A1H8XZ58|A0A1H8XZ58_9PROT Epoxyqueuosine reductase OS=Rhodospirillales bacterium URHD0017 OX=1380357 GN=q ueG PE=3 SV=1
MSRHPPVPKRKPRPASPGELRDAIRDEALRLGFDAVGFAPANLAPEARDQRLQRLGEFLDAGWQGDMGWLGERTAERADPQALWREAKTVVSLAINYAPANDPLEILEHDERAAISVYAQGRDYHEVMKSKLKALGRFIWDTYRHDLKVFVDTAPLMEKPAAQAVGHGWQGKHTNLVSRQFGSWLFLGELLLSVELPADQAETDHCGQCRACLDICPTNAFAGPYRLEARRCISYLTIEHEGPIDRELRPLLGNRIYGCDDCLAVCPWNKFAQEARETALMPRPALSAPSLAELATLDDQAFRKRFTGTAIKRIGRDRFVRNVAYALGNSQARATALPAVEALLGDFSPLVRGAAVWALSRLAPHQVAQRQRATREDDADVRAEWQDALQTAQRRDNGR

SEQ ID NO: 80475 - protein, 375 aa, Rhodospirillum rubrum
  misc_feature (1)..(375): tr|Q2RXR1|Q2RXR1_RHORT Epoxyqueuosine reductase OS=Rhod ospirillum rubrum (strain ATCC 11170 / ATH 1.1.1 / DSM 467 / LMG 4362 / NCIB 8255 / S1) OX=269796 GN=queG PE=3 SV=1
MAKAKPTPAEIKDAIRAKAVELGFSACAFARAELPDRVRADLNAFLDAGHHGSMAWLSETAERRGDPKVLWPSAVSVIALAVNYASGGDPKALAAQADRGVISVYAHNRDYHDVAKGRAKMLGQWMAARLGGAIKVFVDTAPVMEKPLAHAAGLGWQGKHTNLVSRAHGSWLFLAEVFSTLDLPADEAEADHCGSCRRCLDICPTAALPAPYRIDARRCISYLTIEHAGPIPRDLRPLMGNHIYGCDDCLAICPWNRFAVPTREQAFYPRVELTAPRLADLAGLDDATFRGIFSGSPIKRIGRDRFVRNVLIALGNSADGALLPAVAARLDDPSPLVRGAGAWAFRRLAGAEDQRREKNRRLAIEDDPQVRAEWD

SEQ ID NO: 80476 - protein, 388 aa, Rhodothalassium salexigens
  misc_feature (1)..(388): tr|A0A4R2P7J1|A0A4R2P7J1_RHOSA Epoxyqueuosine reductase OS=Rhodothalassium salexigens DSM 2132 OX=1188247 GN=q ueG PE=3 SV=1
MTPAPAASSAPIPPVTADAVRAEARALGFDAVGLARPDAVPALLAHAGTALDRFLAQGHHGGMAWMAERADQRRHPQALWPEMRTAVMVGLNYGPAVDPMILRDHPTKGAVSVYARGKDYHDVLKKRLKRLARWLHERSGQPVKVFVDTAPVMEKPLAEAAGIGWRGKHTNLVSRDLGNWLFLGALFTPLALDADAPERDHCGSCRRCLDACPTNAFVAPYQLDARRCISYLAIEHKGPIPHALRPALGNRIYGCDDCLAVCPWNKFAECATEAQFFARAELGAPDLADLALLDDADFRALFSGSPIKRTGRARFVRNVLIAIANSGDAGLMGLVEGLLDDAEPAVRGAAVWAVAQLAPADRVRALKARRADRETDPDVIAEWAHLPD

SEQ ID NO: 80477 - protein, 318 aa, Rhodothermaceae bacterium
  misc_feature (1)..(318): tr|A0A2E3QXY6|A0A2E3QXY6_9BACT Epoxyqueuosine reductase OS=Rhodothermaceae bacterium OX=2026787 GN=queG PE=3 S V=1
MYDSARLARDLKAQARRIGFDGVGIARAERLDVEARRLEAWLTAGRHGGSDGAMTWMERNVEKRVDPRALVPGAESVVSVFVSYVQPGRRPGEDGGAKISRYAWGDDYHDVLKEKLAELFDWLDTRTGGAGGRAFVDSAPVMDKAWAQRAGLGWQGKNTNLLTTTHGSFVFLGELIVDVPLEPDVPFQADHCGSCTRCLDACPTGALDAPYQIDATRCISYWTIEHRGPDLPEIASEFGAWAFGCDICQDVCPWTKFSQPTRDARFLPRPGVTDTPAREWAEIDIEAWRERFRRSPVKRVKYEGFLRNMENAARNATS

SEQ ID NO: 80478 - protein, 317 aa, Rhodothermaceae bacterium
  misc_feature (1)..(317): tr|A0A424HMA9|A0A424HMA9_9BACT tRNA epoxyqueuosine(34) reductase QueG OS=Rhodothermaceae bacterium TMED105 OX= 1986665 GN=queG PE=4 SV=1
  misc_feature (240)..(240): Xaa can be any naturally occurring amino acid
MDPLLLTRQIRQKAEELGFGACRFAKAEPLVEEARHLEEWLSRGHHGSMAWMEHYFDKRIDPTKLVEGAKTVVCLMAGYHFQERWESPQSRVPRVAKYAQSRDYHKVLKKACHGIINHLHETISPDIHARAFVDSAPVMERAWAQRSGIGWLGKNGNILNRTHGSWFLLAEIILDQETIPDQPMQDHCGSCTACIDACPTEAIVKPSVIDSRKCISYLTIEHKQELSNETVKQLDGWLFXCDICQDVCPWNRKAVPHRMPGLETREAFSPLPSLKEWSEFTEDTFFEQFQGSPLMRAGWQRLTTTARAINNLDRSIS

SEQ ID NO: 80479 - protein, 314 aa, Rhodothermaeota bacterium
  misc_feature (1)..(314): tr|A0A2A5XY19|A0A2A5XY19_9BACT Epoxyqueuosine reductase OS=Rhodothermaeota bacterium MED-G12 OX=1986237 GN=que G PE=3 SV=1
MITQEQARWTQFIRNTALEMGFDAIGFAQATYLEDDDRRLSTWLEQGRNGTMSWMENNHDKRVDPRLLVPGTQSVISLLVSYHRKDDHSQSNKGVSFARYAQGRDYHRVIKKKLKLLYQRIQQEIPFVEGRYFVDSAPVLERSWAQRSGLGWIGKNGNLLNKQLGSYFFIADILLNIPLLYDHPTTDHCGTCRRCIDACPTDAIYEPQKVDGAKCISHWNIEHDGEIPSFFQEKIGNWIFGCDICQEVCPWNRKALLGHWPEFQPNDNWMSLTPLEWSQLQEEEYEEYFNGTAVRRVKYKDFLRNATIVLKNHQ

SEQ ID NO: 80480 - protein, 317 aa, Rhodothermaeota bacterium
  misc_feature (1)..(317): tr|A0A368D496|A0A368D496_9BACT tRNA epoxyqueuosine(34) reductase QueG OS=Rhodothermaeota bacterium MED-G64 OX= 2164156 GN=queG PE=4 SV=1
MDPLLLTRQIRQKAEELGFGACRFAKAEPLVEEARHLEEWLSRGHHGSMAWMEHYFDKRIDPTKLVEGAKTVVCLMAGYHFQERWESPQSRVPRVAKYAQSRDYHKVLKKACHGIINHLHETISPDIHARAFVDSAPVMERAWAQRSGIGWLGKNGNILNRTHGSWFLLAEIILDQETIPDQPMQDHCGSCTACIDACPTEAIVKPSVIDSRKCISYLTIEHKQELSNETVKQLDGWLFGCDICQDVCPWNRKAVPHRMPGLETREAFSPLPSLKEWSEFTEDTFFEQFQGSPLMRAGWQRLTTTARAINNLDRSIS

SEQ ID NO: 80481 - protein, 326 aa, Rhodothermus marinus
  misc_feature (1)..(326): tr|D0MDL6|D0MDL6_RHOM4 Epoxyqueuosine reductase OS=Rhod othermus marinus (strain ATCC 43812 / DSM 4252 / R-10) OX=518766 GN=queG PE=3 SV=1
MPGFDEHAQQRLAQALKAEARRLGFDACGISKAEPLDEEARRLEAWLKAGYHGTMYWMERHFDKRIDPTRLVEGARSVISVLHNYYQPVAHDPSPETGKISRYAWGDDYHEVLKEKLYQLFAWLEAQVGEVHGRAFVDSAPVMDKAWARRSGLGWIGKNTNLINRRMGSFFFIGELIVDVPLPPDGPIPDYCGTCTRCIDACPTGALVQPYVLDARRCISYLTIEHRGDDIPPELQEKMGNWIFGCDICQDVCPWNKFKYATSEPRFMPRPGLPDTPLERWEELDLEAFRQKFRKNAVKRTKFEGFKRNVRIALQNVRRDTLQTPE

SEQ ID NO: 80482 - protein, 326 aa, Rhodothermus marinus
  misc_feature (1)..(326): tr|G2SFR3|G2SFR3_RHOMG Epoxyqueuosine reductase OS=Rhod othermus marinus (strain SG0.5JP17-172) OX=762570 GN=qu eG PE=3 SV=1
MPGFDEHAQQRLAQALKAEARRLGFDACGISKAEPLDEEARRLEAWLKAGYHGTMYWMERHFDKRIDPTRLVEGARSVISVLHNYYQPVAHDPSPETGKISRYAWGDDYHEVLKEKLYQLFAWLEAQVGEVHGRAFVDSAPVMDKAWARRSGLGWIGKNTNLINRRMGSFFFIGELIVDVPLPPDGPIPDYCGTCTRCIDACPTGALVQPYVLDARRCISYLTIEHRGDDIPPELQEKMGNWIFGCDICQDVCPWNKFKYATSEPRFMPRPGLPDTPLERWEELDLEAFRQKFRKSAVKRAKFEGFKRNVRIALQNVRRATLQTPE

SEQ ID NO: 80483 - protein, 326 aa, Rhodothermus profundi
  misc_feature (1)..(326): tr|A0A1M6VXQ5|A0A1M6VXQ5_9BACT Epoxyqueuosine reductase OS=Rhodothermus profundi OX=633813 GN=queG PE=3 SV=1
MPGFDQHAQERLARALKAEARRLGFDACGISKAEVLDEEARRLEAWLKAGFHGTMHWMERHFDKRIDPTKLVEGARSVISVLHNYYQPLSPDPSPETGKISRYAWGDDYHEVLKEKLYQLFAWLEAQVGEVHGRAFVDSAPVMDKAWARRSGLGWIGKNTNLINRRMGSFFFIGELIVDVPLPPDGPIPDYCGSCTRCLDACPTGALVQPYVLDARRCISYLTIEHRGDDIPPELQEKMGNWIFGCDICQDVCPWNKFKYATNEPRFLPRPGLPDTPLDRWEELDLEAFRQKFRKSAVKRAKFEGFKRNVRIALQNVRRTMLHTSE

SEQ ID NO: 80484 - protein, 344 aa, Rhodovarius sp.
  misc_feature (1)..(344): tr|A0A437MM20|A0A437MM20_9PROT Epoxyqueuosine reductase OS=Rhodovarius sp. CCP-6 OX=1979269 GN=queG PE=3 SV=1
MLKQAITDRARTLGFDAIGFTTATLPPEARARLDAFVAEGAHGAMGWMETRMEQRAHPQALWPEAVTVISLGLNYGPEEDPLAILAHRHRGAISVYAQGRDYHDVVKKKLKALGQWMVHAFKGSELKVFVDTAPVMEKPLAAQAGLGWQGKHTNLVSRTHGSWLFLGEIYTTLSIEPDAPEGEHCGRCTACLTACPTNAFPAPFRLDARRCISYLTIEQAGPIPHEFRAAMGNRIYGCDDCLAVCPWNKFAARAREAELHARETAANPPLAELATLEDASFRTRFSGSPIKRIGVNRFLRNVMIAIGNSGDPALRASAEAHTQAEDPVLAEAARWAVERLNDAR

SEQ ID NO: 80485 - protein, 335 aa, Rhodovulum adriaticum
  misc_feature (1)..(335): tr|A0A4V6NQM2|A0A4V6NQM2_RHOAD Epoxyqueuosine reductase OS=Rhodovulum adriaticum OX=35804 GN=EV656_101678 PE=4 SV=1
MARAEGLARMGVCRPDAIPQAPARLASFVGQGRHGQMDWMERRMEWRGNPAALWPAARSILTFAEPYTQDHDPLAVLDRPDCGAVSVYAQHRDYHDVLKKRLKRVGRWFLDQAPGHEIKVFVDTAPVMEKPLAQAGGLGWQGKHTNLLGRDLGNWFFLGLIFTTVDLPPDPPEGEHCGSCTACLDACPTGAFPAPFQLDARRCISYLTIEHKGPVDPDLRAALGNRIYGCDDCLGACPWNKYAVAATEAKYAARPDLIAPPLAELAALDDAGFRARFSGSPIKRIGRDRFVRNVCYAIGNSGDAALLPAVQALVDDPDATVADAARWAVDRLRRA

SEQ ID NO: 80486 - protein, 346 aa, Rhodovulum bhavnagarense
  misc_feature (1)..(346): tr|A0A4R2RAM4|A0A4R2RAM4_9RHOB Epoxyqueuosine reductase OS=Rhodovulum bhavnagarense OX=992286 GN=queG PE=3 SV= 1
MSAALKARLAETARDEGFAAMGVCRPDAIPHAPARLAEFVAQGRQGQMAWMAERMGWRGNPAALWPEARAIISFAEPYTPAHDPLAVLDRPDRGAISVYAQNRDYHDVLKKRLKRVGRWLLEQAPEHQIKVFVDTAPVMEKPLAQAAGLGWQGKHTNLLGRDLGNWFFLGLIFTTLDLPPDAPEAEHCGSCTACLDACPTGAFPAPFQLDARRCISYLTIEHKGPVDGELRALMGNRIYGCDDCLGVCPWNKFAVAAREVKYLARPDLIEPPLAELAALDDAAFRARFSGSPVKRIGRGRFVRNVCYAIGNSGDPTLSSVVAALTDDQDAAVADAARWALARLGGA

SEQ ID NO: 80487 - protein, 346 aa, Rhodovulum euryhalinum
  misc_feature (1)..(346): tr|A0A4R2K960|A0A4R2K960_9RHOB Epoxyqueuosine reductase OS=Rhodovulum euryhalinum OX=35805 GN=queG PE=3 SV=1
MSAALKDRLAARARDEGFAAMGVCRPDAIPEAAGRLAEFVALGRHGQMGWMAERMDWRGNPAALWPAARSVIMLAEPYTQDHDPLAVLARGDRGAISVYAQNRDYHDVLKKRLKRLGRWLLEQAPGEAIKVFVDTAPVMEKPLAQAAGLGWQGKHTNLLGQGLGNWFFLGSIFTTLDLPPDAPAAEHCGSCTACLDICPTRAFPAPFRLDARRCISYLTIEHKGPVNEALRPLLGNRIYGCDDCLAACPWNKFAVAASETKYAARPELVAPPLADLARLDDAAFRTLFAGSPIKRIGRDRFVRNVCYAIGNSGDPALTGAARGLTDDPAPTVADAARWAVARLSRP

SEQ ID NO: 80488 - protein, 369 aa, Rhodovulum imhoffii
  misc_feature (1)..(369): tr|A0A2T5BP83|A0A2T5BP83_9RHOB Epoxyqueuosine reductase OS=Rhodovulum imhoffii OX=365340 GN=queG PE=3 SV=1
MPISTSEPLKARLRNRAQQEGFAACRVCSPDSIPKAPARLARFVALGRHGQMGWMADRMGWRANPAALWPEARSIVMLAEPYTQAHDPLAVLKRPDRGAISVYAQNRDYHDVLKKRLKRVGRWFLEQAPGEQIKVFVDTAPVMEKPLAQAAGLGWQGKHTNLLARDLGNWFFLGVIFTTVALPPDPPEHEHCGSCTACLDACPTGAFPAPFQLDARRCVSYLTIEHKGPVPADLRHLLGNRIYGCDDCLGVCPWNKFAAAAYEVKYKARPDLIAPPLAELCALDDAAFRARFSGSPIKRLGRGRFVRNVCYAIGNSGDQALYPAVRALVADADPVVADAACWALDRLSRCPSARGVQGGASFPPGEGKV

SEQ ID NO: 80489 - protein, 346 aa, Rhodovulum kholense
  misc_feature (1)..(346): tr|A0A2T5TWZ0|A0A2T5TWZ0_9RHOB Epoxyqueuosine reductase OS=Rhodovulum kholense OX=453584 GN=queG PE=3 SV=1
MNAALKDRLGARARDEGLAAMGVCRPDAIPEAAGRLAEFVARGRHGQMGWMAERMGWRGDPAALWPEARSVVMVAEPYTQTHDPLAALDRPDRAAISVYAQNRDYHDVLKKRLKRLGRWLLDEAPGHQIKVFVDTAPVMEKPLAQAAGLGWQGKHTNLLGRSLGNWFFLGAIFTTIELPPDEPETQHCGQCTACLDACPTGAFPAPFQLDARRCISYLTIEHKGPVDPALRPLLGNRIYGCDDCLGVCPWNKFAVAATEAKYAARPDLVEPPLADLAALDDAAFRDRFSGSPIKRIGRNRFVRNVCYAIGNSGDPALAAAVRRLTDDPDATVAEAARWALARLKDA

SEQ ID NO: 80490 - protein, 346 aa, Rhodovulum marinum
  misc_feature (1)..(346): tr|A0A4R2PYE1|A0A4R2PYE1_9RHOB Epoxyqueuosine reductase OS=Rhodovulum marinum OX=320662 GN=queG PE=3 SV=1
MSAGLKDRLKARALDEGFAAMGVCRPDAIPQAPARLAAFVGQGRHGQMTWMAERMAWRGDPAALWPAAQSVVMLAEPYTPEHDPLDVLARRDRAAISVYAQNRDYHDVVKKRLKRLGRWLIDQAPGAEIKVFVDTAPVMEKPLAQAAGLGWQGKHTNLLSRDLGNWVFLGAMFTTVNLPPDPPETDHCGRCTACLDICPTRAFPAPFQLDARRCISYLTIEHKGPVDEALRPGLGNRIYGCDDCLAVCPWNKFAVAATEAKYAARDDLCAPPLAELAALDDAAFRARFSGSPIKRIGRDRFVRNVCYAIGNSGDKTLIGPVQRLIHDPDPAVADAARWAVGRLSDP

SEQ ID NO: 80491 - protein, 346 aa, Rhodovulum robiginosum
  misc_feature (1)..(346): tr|A0A3R9MGD3|A0A3R9MGD3_9RHOB Epoxyqueuosine reductase OS=Rhodovulum robiginosum OX=68292 GN=queG PE=3 SV=1
MGAGLKSRLLTQAGAEGFAKCRVCRPDAIPQAAGRLAAFVGGGRHGQMAWMEQRMGWRGDPAALWPEARSVVMLAELYTPEADPLAVLERRDRGAISVYAQNRDYHDIVKKRLKRLGRWLIEAAPGAEIKVFVDTAPVMEKPLAEAAGLGWQGKHTNLLARDLGNWFFLGAIFTTVEIAPDAPEGEHCGTCTACLDICPTDAFPAPFQLDARRCISYLTIEHKGPVDEALRPGLGNRIYGCDDCLAVCPWNKFAMTAREARYAARPDLVAPPLAELAALDDAGFRARFSGSPIKRIGRGRFVRNVCYAIGNSDDPGLIGAVRALVDDADPAVADAARWAVRRLGSG

SEQ ID NO: 80492 - protein, 346 aa, Rhodovulum sp.
  misc_feature (1)..(346): tr|A0A2E2JVK4|A0A2E2JVK4_9RHOB Epoxyqueuosine reductase OS=Rhodovulum sp. OX=34009 GN=queG PE=3 SV=1
MMERLKERLAAKAVEEGFSAMRVTRPDAIPEAMGRLQAFLEAGHHGQMSWMADRVHWRGDPAALWPEARSVIMLAEAYTPEHDPREVVGMPDRAAISVYAQNRDYHDLVKKRLKRVGRWLIDQAPEAEIKVFVDTAPVMEKPLAEAAGLGWQGKHTNLLSRELGNWFFLGSIFTTVELPVDAPEVSHCGSCRACLDACPTGAFPAPYQLDARRCISYLTIEHHGPVDPALRPALGNRIYGCDDCLAACPWNKFAVEAREMRYLARPEFVAPKLAELVALDDAAFRALFSGSPIKRIGRDRFVRNVLYAIGNSGDASLRDAAGALVDDPDEAVADAARWAVGRLTNL

SEQ ID NO: 80493 - protein, 392 aa, Rhodovulum sp.
  misc_feature (1)..(392): tr|J6UGG8|J6UGG8_9RHOB Epoxyqueuosine reductase OS=Rhod ovulum sp. PH10 OX=1187851 GN=queG PE=3 SV=1
MTDQSALLSASCEKTGAEPDLVAALREKAAALGFDAVAIAPPDLPPETGARLRDFLVQGLHGDMGWLADRPERRTSPCGLWADVRAVVMLGANYGPGHDPRALQAQKDRAAISVYARGDDYHDVIKPRLKELARWLIGSAGGDAKVFVDTAAVMEKPLAMRAGLGWQGKHTNLVSRDLGSWLFLGALFTTLPLPPDPPGRDHCGSCKACLDACPTKAFPAPWRLDPRRCVSYLTIEHKGSIPRDLRPLIGNRVYGCDDCLAACPWNKFARMGRDAKLSARDELTGPALAELAKLDDAAFRALFRKTAVKRVGREKFLRNVMIAIGNSGDPSLVPAAEARLTDAAAPVRGAAVWALSKLLPERDLSALAERHRGENDPTVRDEWRAALRSDEG

SEQ ID NO: 80494 - protein, 347 aa, Rhodovulum steppense
  misc_feature (1)..(347): tr|A0A4R1YSC8|A0A4R1YSC8_9RHOB Epoxyqueuosine reductase OS=Rhodovulum steppense OX=540251 GN=queG PE=3 SV=1
MSGALKDRLAAQARAEGFAAMGVCRPDAIPQAPARLAAFVERGWHGQMAWMAERMGWRGDPAALWPAARSVVMLAEPYSPAHDPLAVLDRPDRGAISVYAQNRDYHDVLKARLKRLGRWLIDAAPGAEIKVFVDTAPVMEKPLAQAAGLGWQGKHTNLLGQGLGNWFFLGAIFTTVELPPDAAGQEHCGSCTACLEACPTGAFPAPFQLDARRCISYLTIEHKGPVDEGLRPLMGNRIYGCDDCLGVCPWNKFAAAAREVKYAARPDLVAPRLADLAGLDDAGFRALFAGSPIKRIGRDRFVRNVCYAIGNSGDRALIGPVQRLVCDPDPTVAEAARWAVARLSRAQ

SEQ ID NO: 80495 - protein, 346 aa, Rhodovulum sulfidophilum
  misc_feature (1)..(346): tr|A0A1Q9QS65|A0A1Q9QS65_RHOSU Epoxyqueuosine reductase OS=Rhodovulum sulfidophilum OX=35806 GN=queG PE=3 SV=1
MTAALKDRLAARAREEGLAAMGVCRPDAIPEAAGRLAEFVAKERHGQMGWMAERMSWRGNPAALWPEARSVVMFAEPYTQAHDPLAALDRPDRAAISVYAQNRDYHDVLKKRLKRLGRWFLDQAPGHEIKVFVDTAPVMEKPLAQAAGLGWQGKHTNLLGRNLGNWFFLGVIFTTVELPVDAPETGHCGNCTACLDACPTGAFPAPFQLDARRCISYLTIEHKGPVDPELRPLLGNRIYGCDDCLGICPWNKFAVAATETKYAARPDLIEPPLAELAGLDDAAFRARFSGSPIKRIGRGRFVRNVCYAIGNSGDSRLRDAVARLSEDADPVVAEAARWAVARLSRG

SEQ ID NO: 80496 - protein, 346 aa, Rhodovulum sulfidophilum
  misc_feature (1)..(346): tr|A0A0D6B7J6|A0A0D6B7J6_RHOSU Epoxyqueuosine reductase OS=Rhodovulum sulfidophilum OX=35806 GN=queG PE=3 SV=1
MTAALKDRLAARAREEGLAAMGVCRPDAIPEAAGRLAEFVAKERHGQMGWMAERMSWRGNPAALWPEARSVVMFAEPYTQAHDPLAALDRPDRAAISVYAQNRDYHDVLKKRLKRLGRWFLDQAPGHEIKVFVDTAPVMEKPLAQAAGLGWQGKHTNLLGRNLGNWFFLGVIFTTVELPADAPETGHCGNCTACLDACPTGAFPAPFQLDARRCVSYLTIEHKGPVDPELRPLLGNRIYGCDDCLGSCPWNKFAVAATETKYAARPDLIEPPLAELAGLDDAAFRARFSGSPIKRIGRGRFVRNVCYAIGNSGDSRLRGAVARLAEDADPVVAEAARWAVARLSRG

SEQ ID NO: 80497 - protein, 346 aa, Rhodovulum visakhapatnamense
  misc_feature (1)..(346): tr|A0A4R8FQN9|A0A4R8FQN9_9RHOB Epoxyqueuosine reductase OS=Rhodovulum visakhapatnamense OX=364297 GN=queG PE=3 SV=1
MSAALKDRLAARARDEGLAAMGVCRPDAIPEAAGRLAEFVARGRHGQMGWMAERMGWRGDPAALWPEVRSVVMVAEPYTQTHDPLAALDRPDRAAISVYAQNRDYHDVLKKRLKRLGRWLLDEAPGHRIKVFVDTAPVMEKPLAQAAGLGWQGKHTNLLGRSLGNWFFLGAIFTTIELPPDAPETQHCGQCTACLDACPTGAFPAPFQLDARRCISYLTIEHKGPVDPALRPLLGNRIYGCDDCLGVCPWNKFAVAATEAKYAARPDLVEPPLADLAALDDTAFRERFSGSPIKRIGRDRFVRNVCYAIGNSGDPVLAAAVGPLTDDPDATVAEAARWALARLKDA

SEQ ID NO: 80498 - protein, 315 aa, Richelia intracellularis
  misc_feature (1)..(315): tr|M1WTN3|M1WTN3_9NOST Epoxyqueuosine reductase OS=Rich elia intracellularis HH01 OX=1165094 GN=queG PE=3 SV=1
MNFYSDLVKQKALELGFHLVGIAAVEGLDVNNQERLAKWIALGFHASMGWMDSPKRHSPELIMPEVQSVICVALNYYTPHQHSQEDEYGKISRYAWGRDYHKIMHKSLKALTNWLESLEPGIKGRYYADTGPVQDKVWAQRAGIGWISKNSNLITRKYGSWVFLGEVLTNLRLAPDKPHTQHCGSCNLCLQACPTNAITQPFIVDANRCIAYHTIENQDEQLPEMIIPHLHGWVAGCDICQDVCPWNQRFAQETNVVDFQPYAGNLAPKLEELASISDKDWDRQFTASALRRVKPKMLRRNARANIKKSSNTSKT

SEQ ID NO: 80499 - protein, 265 aa, Richelia intracellularis
  misc_feature (1)..(265): tr|M1X3Y3|M1X3Y3_9NOST Iron-sulfur cluster-binding prot ein OS=Richelia intracellularis HM01 OX=1165095 GN=RINT HM_7480 PE=4 SV=1
MESPKRYSPELIMPEVQSVICVALNYYTPHQHSQEDEYGKISRYAWGRDYHKIMHKSLKALTNWLESLEPGIKGRYYADTGPVQDKVWAQKAGIGWISKNSNLITRKYGSWVFLGEVLTNLRLAPDKPHTQHCGSCNLCLQACPTNAITQPFIVDANRCIAYHTIENQDEQLPEMIIPHLHGWVAGCDICQDVCPWNQRFAQETNVVDFQPYTGNLAPKLEELASISDKDWDRQFTASALRRVKPKMLRRNARANIKKSSNTSET

SEQ ID NO: 80500 - protein, 318 aa, Richelia sp.
  misc_feature (1)..(318): tr|A0A3B9F5P6|A0A3B9F5P6_9NOST Epoxyqueuosine reductase OS=Richelia sp. OX=2053605 GN=queG PE=3 SV=1
MTIVNFYSDLVKQKALELGFHLVGIAAVEGLDVNNQERLAKWIALGFHASMGWMDSPKRHSPELIMPEVQSVICVALNYYTPHQHSQEDEYGKISRYAWGRDYHKIMHKSLKALTNWLESLEPGIKGRYYADTGPVQDKVWAQRAGIGWISKNSNLITRKYGSWVFLGEVLTNLRLAPDKPHTQHCGSCNLCLQACPTNAITQPFIVDANRCIAYHTIENQDEQLPEMIIPHLHGWVAGCDICQDVCPWNQRFAQETNVVDFQPYAGNLAPKLEELASISDKDWDRQFTASALRRVKPKMLRRNARANIKKSSNTSKT

SEQ ID NO: 80501 - protein, 368 aa, Rickettsiales bacterium
  misc_feature (1)..(368): tr|A0A2E4WSS9|A0A2E4WSS9_9RICK tRNA epoxyqueuosine(34) reductase QueG OS=Rickettsiales bacterium OX=2026788 GN =queG PE=4 SV=1
  misc_feature (182)..(182): Xaa can be any naturally occurring amino acid
  misc_feature (193)..(193): Xaa can be any naturally occurring amino acid
  misc_feature (216)..(216): Xaa can be any naturally occurring amino acid
  misc_feature (218)..(218): Xaa can be any naturally occurring amino acid
  misc_feature (226)..(226): Xaa can be any naturally occurring amino acid
  misc_feature (237)..(237): Xaa can be any naturally occurring amino acid
  misc_feature (239)..(239): Xaa can be any naturally occurring amino acid
  misc_feature (241)..(241): Xaa can be any naturally occurring amino acid
  misc_feature (246)..(246): Xaa can be any naturally occurring amino acid
  misc_feature (249)..(249): Xaa can be any naturally occurring amino acid
  misc_feature (256)..(256): Xaa can be any naturally occurring amino acid
  misc_feature (258)..(259): Xaa can be any naturally occurring amino acid
  misc_feature (268)..(268): Xaa can be any naturally occurring amino acid
  misc_feature (274)..(275): Xaa can be any naturally occurring amino acid
  misc_feature (277)..(277): Xaa can be any naturally occurring amino acid
  misc_feature (289)..(289): Xaa can be any naturally occurring amino acid
  misc_feature (305)..(305): Xaa can be any naturally occurring amino acid
  misc_feature (309)..(309): Xaa can be any naturally occurring amino acid
  misc_feature (333)..(333): Xaa can be any naturally occurring amino acid
MRNLKKIIEDKILSTGFDVVGFSDTCVDKNTKENYFNFLKKNHHGDMKWLESHYEKKINPKKVWDEVQTIVMIGMNYCPKQNPLQYNNYQNTSNISVYAKNEDYHNVIKKKLLILQKWFENCLSIKSKIFVDTSPILEKYFAEKCGIGWQGKHTNLVSKDYGSWLFLSGIFLPLKLSFNSKXKENCGKCIKCXDICPTNAIISENEIDARKCISYXTXEYKGPFPXSLRKSIGNKIXGXDXCLAIXPWXKFSNPTXNXXFIQTENDKXLNFFLXXDXIKFKNYFKNSPXKRIGYTSFIRNVLIAXGNSXHQGLKKNIYAYLKNPDPIIRGASXWSLGQLLDKNDKKILKNTLKNTEKNKYVLYELNLL

SEQ ID NO: 80502 - protein, 350 aa, Rickettsiales bacterium
  misc_feature (1)..(350): tr|A0A1Z9TFN7|A0A1Z9TFN7_9RICK Epoxyqueuosine reductase OS=Rickettsiales bacterium TMED269 OX=1986872 GN=queG PE=3 SV=1
  misc_feature (8)..(8): Xaa can be any naturally occurring amino acid
  misc_feature (12)..(12): Xaa can be any naturally occurring amino acid
  misc_feature (35)..(35): Xaa can be any naturally occurring amino acid
  misc_feature (45)..(45): Xaa can be any naturally occurring amino acid
  misc_feature (54)..(54): Xaa can be any naturally occurring amino acid
  misc_feature (75)..(75): Xaa can be any naturally occurring amino acid
  misc_feature (85)..(85): Xaa can be any naturally occurring amino acid
  misc_feature (194)..(195): Xaa can be any naturally occurring amino acid
  misc_feature (226)..(226): Xaa can be any naturally occurring amino acid
  misc_feature (236)..(236): Xaa can be any naturally occurring amino acid
  misc_feature (245)..(245): Xaa can be any naturally occurring amino acid
  misc_feature (276)..(276): Xaa can be any naturally occurring amino acid
  misc_feature (302)..(302): Xaa can be any naturally occurring amino acid
  misc_feature (322)..(322): Xaa can be any naturally occurring amino acid
  misc_feature (326)..(326): Xaa can be any naturally occurring amino acid
  misc_feature (345)..(345): Xaa can be any naturally occurring amino acid
MTNLKKLXNDIXKWSLELGFDQMGVSGIEIKDDEXRLIEWLKNNXHGSMKYMEXHGKKRARPDELINGALRVISXRMTYHFFDKXLSERKLNNSHNAYIANYALGRDYHKTIRSKLKRLITRISQHSNIKEKNYFVDSAPVLERALARNAGLGWIGKNTNLINKKDGSWFFIAEIITDIELEIDPPATNHCGTXXECIDVCPTSAIIAPYELDARKCISYLTIENXNSIPEEMRKXIGNRIFGCXDCQIFCPWNKFAKKPVIDDFKPRDEFEDASXESLFKWSEEEWDEKTRGSAIRRTGYXGWLRNIAVALGNSKKERSTXDLLXSRKGQTGSMVDEHIDWALXQQLSD

SEQ ID NO: 80503 - protein, 312 aa, Riemerella anatipestifer
  misc_feature (1)..(312): tr|A0A3T0TLC6|A0A3T0TLC6_RIEAN Epoxyqueuosine reductase OS=Riemerella anatipestifer OX=34085 GN=queG PE=3 SV=1
MNKKAHYTQLIKNKAKAFGFQSCGISQAAFLEEESPRLEVWLKKGYHGKMSYMENHFDKRLDPRLLVEGSRSVISLSYNYFPQEELPTIDNFKISKYAYGRDYHEVIKDILRDMVAELQEEIGAFGFRVFVDSAPVLERAWAKKSGIGWVGKNANLISKKSGSFFFLAEIICDLELEPDAPTTDHCGRCTRCIDACPTNAIVNEKIIDGSRCISYATIELKEEIPAAFRSNMQDWMFGCDICQEVCPWNRFSKPHNQPLFNPNPALKNFTKREWRELTQDLFSEIFRKSPVKRTKFAGLQRNISFLDQELSD

SEQ ID NO: 80504 - protein, 312 aa, Riemerella anatipestifer
  misc_feature (1)..(312): tr|J9R396|J9R396_RIEAN Epoxyqueuosine reductase OS=Riem erella anatipestifer RA-CH-1 OX=1228997 GN=queG PE=3 SV =1
MNKKAHYTQLIKNKAKAFGFQSCGISQAAFLEEEAPRLEAWLKKGYHGKMSYMENHFDKRLDPRLLVEGSRSVISLSYNYFPQEELPTIDNFKISKYAYGRDYHEVIKDILRDMVAELQEEIGAFGFRVFVDSAPVLERAWAKKSGIGWVGKNANLISKKSGSFFFLAEIICDLELEPDAPTTDHCGRCTRCIDACPTNAIVNEKIIDGSRCISYATIELKEEIPVAFRSNMQDWMFGCDICQEVCPWNRFSKPHNQPLFNPNPALKNFTKKEWRELTQELFSEIFRKSPVKRTKFAGLQRNISFLDQELPD

SEQ ID NO: 80505 - protein, 312 aa, Riemerella sp.
  misc_feature (1)..(312): tr|A0A496P2S0|A0A496P2S0_9FLAO Epoxyqueuosine reductase OS=Riemerella sp. OX=2382126 GN=queG PE=3 SV=1
MGQNAKKYSEIIKQKAEKYGFQGCGISKAGFLEEEAPAFERWLKAGFNGEMGYMENYFDKRLDPTLLVEGAKSVISLSYNYYPEYKLNTENNFKISKYAYGEDYHEVIKDILREMIVELQEEIGEFGFRVFTDSAPILERAWARKSGIGWVGKNANLITKKHGSFFFLCEIICDLELEEDGATTDHCGKCTKCIDACPTQAIVGDRVIDGSKCISYATIELKSQIPDFFEGKMDDWIFGCDVCQDVCPWNRFSAPHSQPKFALKEQLSELRKPEWRELTQELFSEVFRKSPVKRTKFAGLMRNIKFIEENKK

SEQ ID NO: 80506 - protein, 315 aa, Riemerella sp.
  misc_feature (1)..(315): tr|A0A496P1M4|A0A496P1M4_9FLAO Epoxyqueuosine reductase OS=Riemerella sp. OX=2382126 GN=queG PE=3 SV=1
MAQTAEKYAKIIKQKAEKFGFQGCGISKAGFLEEDATALEKWLKAGYNGEMAYMENYFDKRTDPRLLVEGAKSVISLSYNYFPQYKLETENNFKISKYAYGEDYHDVIKDILRQMIAELQEEIGEFGFRVFTDSAPVLDRAWARKSGIGWVGKNANLITKKHGSFFFLAEIICDLELEEDGATTDHCGSCRKCIDACPTQAIVNERIIDGSKCISYATIELKNEIPDYFEGKMDDWIFGCDVCQDVCPWNRFAAPNTEPKFALKEFSQLRKPDWQDLTQEIFSEIFRKSPVKRTKFSGLMRNIKFLEKTKLDSED

SEQ ID NO: 80507 - protein, 328 aa, Rikenella microfusus
  misc_feature (1)..(328): tr|A0A379MNF4|A0A379MNF4_9BACT Epoxyqueuosine reductase OS=Rikenella microfusus OX=28139 GN=queG PE=4 SV=1
MGSAGTGEESPGNSRNIGMYGLQEIVEREYRACGFSAAGVAAFALLEEEKERFVQWLGQGYGADMGYLERSAGYRHDLRRLFPAVRSVVVTLTSYRRPPEVRQPDGAPRIARFAWGDDYHDVLKRNLRRLLEAIRGYEGFGAAKGRPVTDSAPAFERAWAVRAGLGWIGRSSMLIHPRLGSFTLIGMLLLDMPLPDGCLPAQRVPDGCGNCRRCMEACPTKAIVAPRVVNAGRCLSYQTIERPGAVESAVRPFLDGRIFGCDRCMEVCPYNNRPDMPLAPENAGLEAVAERLELTADGWREMTGEEFEARFARSPLLRAGLEKIKSSL

SEQ ID NO: 80508 - protein, 315 aa, Rikenellaceae bacterium
  misc_feature (1)..(315): tr|A0A3D0F391|A0A3D0F391_9BACT tRNA epoxyqueuosine(34) reductase QueG OS=Rikenellaceae bacterium OX=2049048 GN =queG PE=4 SV=1
MSPDELHIKINDLANRLGFAGYGAVAVEKMSAERAHLESFVSKSYHGSMRYLAANMDIREDPSLLLDSAKSIMVLLVPYKPLQRQQEHYPKISSYAYGLDYHYFIKSRLRVLAESIKELYPQMSYRVFTDSAPIFERALAVKAGLGFIGKNTFLISKTQGLHTLIGIIITDIPLKYNQQKVSNGCGKCTRCMEACPNGALTAPFVLDARRCISYNTIESPVGERLCDFSVLREDNIFGCEICLDVCPWSGKGETTSWQEFLPIETKQGRSSIEIAAREWLQMEEEEFKIYFSKSPLSRAGLSKIKESVTCVNLKK

SEQ ID NO: 80509 - protein, 314 aa, Rikenellaceae bacterium
  misc_feature (1)..(314): tr|A0A359H1Z2|A0A359H1Z2_9BACT tRNA epoxyqueuosine(34) reductase QueG OS=Rikenellaceae bacterium OX=2049048 GN =queG PE=4 SV=1
MNTDKFHEIICDLSLKAGFIDYGAAPVKKLTADCKYLNEYIRKGHNAGMNYMARNISLREDPGLLVEDAKSVLCFLAPYKPSENQESSLPQISSYAFGLDYHHVIKEKLYKILEEIISLMPDAKARVFTDSAPVFERAWAARAGLGFIGKNTFLISKSHGLHTLIGLIILNKEVKYGKQVSQGCGNCTKCLDCCPTGALYRPFGLDARKCISYHTIESKPDSHEEFMVDLNNSIFGCEICLRACPWSGKGKPGEWPEFMPLNIVGYSKKITELSSADWENMDEKTFNLNFSDSPLFRAGLRKIKISLGTKKDSL

SEQ ID NO: 80510 - protein, 311 aa, Rippkaea orientalis
  misc_feature (1)..(311): tr|B7JV32|B7JV32_RIPO1 Epoxyqueuosine reductase OS=Ripp kaea orientalis (strain PCC 8801) OX=41431 GN=queG PE=3 SV=1
MTPSQWTGIIKQKALELGFHKVGIADVDDNFDDRATNHLNTWLALGYHSDMAWMANPKRFNIRDCWPEVKSVICVALNYYTPHQHPQGQEYGKISRYGWGRDYHKVMGKKLKALSQWLESQDNSIKTRYYVDTGPIQDKVWAQRSGIGWIAKNSNVITREYGSWVFLGEVLTNLSLIPDKPHTQHCGTCKSCLDACPTRAIPQPFVVDANRCIAYHTIENKADTLPEPIAAKLEGWVAGCDICQEVCPWNQRFAQETDVADFQPYPDNIAPKLRDLANMSLEEWDRRFRGSALRRIKLERWQRNANANLEK

SEQ ID NO: 80511 - protein, 373 aa, Rivibacter subsaxonicus
  misc_feature (1)..(373): tr|A0A4Q7V9U7|A0A4Q7V9U7_9BURK Epoxyqueuosine reductase OS=Rivibacter subsaxonicus OX=457575 GN=queG PE=3 SV=1
MHAVPLAPSPRDFDPATNGEVLVAQLRLWARSLGFSQIGIAGVDLAAAEPGLQAWLEAGFHGSMDYMAAHGLKRARPAELVPGTLRVVTARMDYLPAAMPEGWQAIGFERLQRPDAASVSLYARGRDYHKVLRSRLQKLADQLADVVGPFGHRVFTDSAPVLEVELAQRSGIGWRGKHTLVLSREAGSMFFLGEIYVDLALPETAPVVAHCGTCSACIDVCPTQAIVAPYRLDARRCISYLTIEHDGPIPEPLRAAIGNRIYGCDDCQLVCPWNKYAQRATLADFDVRETLAEPTLLQLWAWSEADFLRLTEGSAIRRIGYGRWRRNLAVALGNAWRDSGDERIAQALTGARDAATPLVQEHIDWALAQREVD

SEQ ID NO: 80512 - protein, 358 aa, Rivicola pingtungensis
  misc_feature (1)..(358): tr|A0A318KMV2|A0A318KMV2_9NEIS Epoxyqueuosine reductase OS=Rivicola pingtungensis OX=1054498 GN=queG PE=3 SV=1
MLPEPAQNRDYPELARQIKAWARDLGFSGATIGRAELPVEVGQRLLDWLAAGHHGEMDYMVRHGLLRARPAELVPGALSVVSVRLPYRDPAARDMHAVLADGDKAAIARYALGRDYHKTVRNRLQKLADRLHAAAGPLGYRVFSDSAPLMEVALAAQSGLGWRGKHTLLIHRDEGSFFFLGELLTDLPLPADAPVDAHCGRCTRCLDVCPTQAIVAPYQVDARRCISYLTIELAGAIPEPLRPLIGNRVYGCDDCQLVCPWNRFAVPTAEADFAVRHGLDDASLVSLFAWEADEFAQRMAGSPIYRIGHERWLRNLAVGLGNAPSSQAVTAALLARREHPSALVREHVAWALARHGVL

SEQ ID NO: 80513 - protein, 313 aa, Rivularia sp.
  misc_feature (1)..(313): tr|K9R7T4|K9R7T4_9CYAN Epoxyqueuosine reductase OS=Rivu laria sp. PCC 7116 OX=373994 GN=queG PE=3 SV=1
MNQSSSLCSTQIKEKALELGFHKVGITTANVTDKQAQRLQAWLALGYHADMEWMRNPKRQNIKLVMPEVRSLICVALNYYTPHQRSEQKEYGKISRYAWGRDYHKVVQKKLKALSIWLQSLDEKIKTRHYIDTGPIQDKVWAQQAGIGWIAKNGNLITREYGSWVFLGEILTNLELTPDIPHTQHCGSCTKCIESCPTDAITEPFVIDANRCIAYHTIENRDEKLPPHIASKLDGWVAGCDICQDVCPWNQRFAKTTDVEEFQPYPGNISPKLIELSRITDENWDKQFPASALRRIKPQMLRRNARANLEASP

SEQ ID NO: 80514 - protein, 469 aa, Robbsia sp.
  misc_feature (1)..(469): tr|A0A494XFJ2|A0A494XFJ2_9BURK Epoxyqueuosine reductase OS=Robbsia sp. DHC34 OX=2419776 GN=queG PE=3 SV=1
MNPLNTESALDPCAVETGHAPHAALDADALATLAARIRQWGRELGFDAVGITDTDLSDAEQALQAWLAAGFHGEMDYMAKHGLKRARPAELVPGTLRVISLRMAYLPVDLTASDASGAGPERAETTRRPPGQPRSGWRAAQLARAERPGDAVVSVYARGRDYHKVLRNRLQKLSERIATEIGPFGYRVFTDSAPVLEVALAARADIGWRGKHTLLLERDAGSFFFLGEIFVDLPLPVDSADREPHARDASRLSATAAEPAPQTTAQTLVSNGAGATAASPTPATSDDVATVASGGRVARAPASGHCGSCTRCIDVCPTQAIIAPYTLDARRCISYLTIELAGSIPEPLRPLIGNRIYGCDDCQLVCPWNKFAQPARVDDFETRNGLDRATLLELWQWTSRDFEDRLAGTAIRRIGYERWVRNLAVGLGNAVRATAHGAQRDAYIEALRSRADDASPLIREHVEWALREA

SEQ ID NO: 80515 - protein, 312 aa, Robertkochia marina
  misc_feature (1)..(312): tr|A0A4S3M394|A0A4S3M394_9FLAO Epoxyqueuosine reductase OS=Robertkochia marina OX=1227945 GN=queG PE=3 SV=1
MGKAEKYSRIIKEEAKRLGFLSCGISRAGFLEEEAPRLESWLNANMHGEMGYMANHFDKRLDPTLLVDGARSVVSMLLNYYPAEGQKDPEAPKLSKYAYGTDYHFVIKDKLKSLLQFIRDEIGEINGRAFVDSAPVLDKAWAARSGLGWIGKNANLLTKQQGSFYFIAELIIDLELEYDTPVTDHCGSCTACIDACPTEAIVSPYVVDGSKCISYLTIELKNELPGQFRDQMDNWMFGCDVCQDVCPWNRFARPHQEKAFEPHPELLDMTREDWFELTEETFKKVFKKSAVKRTKYSGLRRNLDFLLPPEKE

SEQ ID NO: 80516 - protein, 318 aa, Robiginitalea biformata
  misc_feature (1)..(318): tr|A4CG98|A4CG98_ROBBH Epoxyqueuosine reductase OS=Robi ginitalea biformata (strain ATCC BAA-864 / HTCC2501 / K CTC 12146) OX=313596 GN=queG PE=3 SV=1
MGADAHAKLIKAEAKRLGFLSCGISRAGFLEEEAPRLERWLKAGMHGEMGWMENHFDKRLDPTLLVPGAKSVVSLLLNYYPAEQQPESTYQVSKYAYGEDYHRVIKDRLRELLHVIRTEIGEVEGRAFVDSAPVLDKAWAARSGLGWMGKHSNLLTKEVGSYYFIAELILDLELPPDAPVTDHCGTCTACIDACPTQAITEPYVVDGSKCISYYTIELKSEIPASASGQWADWIFGCDICQDVCPWNRFATPHSEPRFNAHPELMEMTRADWEELTEEVFRQVFPKSAVKRTKFSGLKRNIAFLSDGDTASENDFERE

SEQ ID NO: 80517 - protein, 309 aa, Robiginitalea myxolifaciens
  misc_feature (1)..(309): tr|A0A1I6FTG3|A0A1I6FTG3_9FLAO Epoxyqueuosine reductase OS=Robiginitalea myxolifaciens OX=400055 GN=queG PE=3 SV=1
MSNGGKYAVLIKAEAKRLGFLSCGISRADFLEEEAPRLEQWLKHGMHGEMAYMENHFDKRLDPRKLVPGAQSVISLLYNYYPSEELSAEGYKISKYAYGEDYHKVIKDKLRELMVIIQEEIGEVGGRIFVDSAPVLDKAWAARSGLGWIGKHSNLLTQQVGSFYFIAELILDLELPEDSPVTDHCGSCTACLDACPTQAIVAPYVVDGSKCISYYTIELKNEIPPEMSGAWDDWIFGCDVCQDVCPWNRFSKPHGEPRFQPSEALKGMRREDWQELTEEVFRQVFPKSAVKRTKFSGLQRNIQFLEPGT

SEQ ID NO: 80518 - protein, 347 aa, Robiginitomaculum sp.
  misc_feature (1)..(347): tr|A0A2G2FV17|A0A2G2FV17_9RHOB Epoxyqueuosine reductase OS=Robiginitomaculum sp. OX=2030823 GN=queG PE=3 SV=1
MPTLISKTEIDAFAREAGFTAMGVCRPDAIPQAAERLATYVDEGRHGQMGWMAERMAWRGNPAALWPDARSVIMLAEAYTPEHDPLAVLDQPSKGAVSVYAQGRDYHDIVKKRLKRVGRWLIEQAPEAQIKVFVDTAPVMEKPLAAAAGLGWQGKHTNLVGRDLGNWVFLGAIFTTLELEPDKPARDNCGNCSACLDICPTKAFVAPYQLDARRCISYLTIEHNGPVPEELRPALGNRIYGCDDCLAICPWNKFAKQAHEMRYIGSGEAPDLAALAGLDDAAFRLWFAGSPVKRTGRDRMMRNVLYAIGNSGRQELVAPAQALLDDPDAVVVDAARWALARLSAAKG

SEQ ID NO: 80519 - protein, 344 aa, Robiginitomaculum sp.
  misc_feature (1)..(344): tr|A0A2G2GJ48|A0A2G2GJ48_9RHOB tRNA epoxyqueuosine(34) reductase QueG OS=Robiginitomaculum sp. OX=2030823 GN=q ueG PE=4 SV=1
MFALSKNLQTRIQKLGFSTFGIVDLGDVGKQNGAWLNEFINNQYHGTMDWMKETAFRRAHPHNLWPEARSALVLGFNYGPDTDPMASLSQTDKATISVYARNKDYHSLIKGKLKEVAGLLARDTTKDVKVFVDTAPLMEKPLAAMSGIGWQGKHTNLVSREFGSWLFLGVILSEEQLTPTILKTGDCGSCTACLDVCPTDAFPAPYKLDARLCISYLTIEHKDPIPKNLRAKLGNRIYGCDDCLSVCPWNKFAQAASEQKLIARPDLNAPDLAMLAKLTDQNFRTHFSGSPIKRIGLPRFLRNVLYAIGNSGDANFGDIISPHLSHSDPVVRDAAEWALAQISN

SEQ ID NO: 80520 - protein, 342 aa, Robinsoniella peoriensis
  misc_feature (1)..(342): tr|A0A4U8QAG0|A0A4U8QAG0_9FIRM Epoxyqueuosine reductase OS=Robinsoniella peoriensis OX=180332 GN=queG PE=4 SV= 1
MITAEELVNQAINLGYDKCGIIPLDALSGYTEKLTKRILRFPETTGRYQKLFQLANPKESFPWAKAVVVCSFYYGKYRIPQNLQGYIARYYLTDSRKNTLTEGYQTSVDFERFLCSQGFQIAFDRDFGIVPLRWAAVEAGLGIFRKNNFFYTEKGSWQHIEAFLIDQPLVYQNTHSLRPCSNACTLCATACPTASLCAPYAMNRNTCISDLTTWSGWDLDKEPLNKMMGDWIYGCDACQDVCPYNKHAWTGEKESKSLEMIAPGISLIKLIEAEYSWLEQVLNPLLWYIPKNKCWRYKTNALNAMRNSWKPEYMPAVRRACQDEKAQVRRMARWVSNLVSQE

SEQ ID NO: 80521 - protein, 340 aa, Robinsoniella sp.
  misc_feature (1)..(340): tr|A0A0J1GA44|A0A0J1GA44_9FIRM Uncharacterized protein OS=Robinsoniella sp. RHS OX=1504536 GN=RHS_1650 PE=4 SV =1
MITAEELVNQAINLGYDKCGIIPLDALSGYTEKLTKRILRFPETTGRYQKLFQLANPKESFPWARAVVVCSFYYGKYRIPQNLQGYIARYYLTDSRKNTLTEGYQTSVDFERFLCSQGFQIAFDRDFGIVPLRWAAVEAGLGIFRKNNFFYTEKGSWQHIEAFLIDQPLVYRNTHSLRPCSDACTLCATACPTASLCAPYAMNRNTCISDLTTWSGWDLDKEPLNKMMGDWIYGCDACQDVCPYNKHAWTGEKESKSLEMIAPGISLIKLVEAEYSWLEEVLNPLLWYIPKNKCWRYKTNALNAMRNSWKPEYMATVRRACQDEKAQVRRMARWVSNLVS

SEQ ID NO: 80522 - protein, 299 aa, Romboutsia hominis
  misc_feature (1)..(299): tr|A0A2P2BUJ8|A0A2P2BUJ8_9FIRM Epoxyqueuosine reductase OS=Romboutsia hominis OX=1507512 GN=FRIFI_2522 PE=4 SV =1
MNKEKLKEYFKSLGLDTVGITGVNVNYELEKKLKERIEKEHITGMEEPILENRINPKNIMKDAKSIIVCAFPYHIDNEKESNLSRYCRGLDYHIVAKELLQKVCDYLDENIEGFEYKIFVDNGPLVDRELAYLSGIGYFGINNNIITDKYGSYVFIGYIINNYEFSLDKPLDKECMKCGKCVKYCPGNALLGNYDMNPRKCLSYITQKKEELSLEEVKAIKNSGKIFGCDICQEVCPHNKNIKETHIEEFMKDLILNLDFEEIDEISNKEFKRRYGNRAFSWRGKKIIKRNIEIILEKS

SEQ ID NO: 80523 - protein, 301 aa, Romboutsia ilealis
  misc_feature (1)..(301): tr|A0A1V1I3X0|A0A1V1I3X0_9FIRM Iron-sulfur cluster prot ein OS=Romboutsia ilealis OX=1115758 GN=CRIB_2206 PE=4 SV=1
MKKEELKDFCKSIGIDCVGIAGVGPYYDLEKIIKQRLLNGYITGMEEPIIENRVNPKETMENVKSIIVCAFPYYIGDFDECNLSKYCYGEDYHIVVKDMLQQICNYLSDNIDNFEYKIFADNGPLVDRYLAYLSGIGYFGINNNIITDEYGSYVFIGYIMSNYEFKSDTPLEKTCIKCGKCVKYCPGNAILGNYEMNPKRCLSYITQKKGELEEEEEKILKENKKVFGCDICQDICPHNKNIPITSIERFKQEAIFKLDIEEINDISNKEFKRKYGNRAFSWRGKNIIKRNINIVSEEPNE

SEQ ID NO: 80524 - protein, 301 aa, Romboutsia lituseburensis
  misc_feature (1)..(301): tr|A0A1G9R1W5|A0A1G9R1W5_9FIRM Epoxyqueuosine reductase OS=Romboutsia lituseburensis DSM 797 OX=1121325 GN=SAM N04515677_10645 PE=4 SV=1
MNKKELKEFCASLGLKCVGIAGVGPYDTLEKIIKHRLSNGHTTGMEEPILEKRINPKLTMENAKSIIVCAFPYYVEDDRDSNLSKYCRGKDYHIITKEFLQKICNYLEKSIKGFEYKIFVDNGPLVDRHLAQISGVGYFGINNNIITDEYGSYVFIGYIINNYEFYPDEPLPKTCINCGECVKYCPANALLGNYEMNPKRCISYLTQKKETLSDEEKESIRNNGKVFGCDVCQDVCPHNKNISKTEIEGFMKDLIYNLEYETISLMSNKEFKRTYGERAFSWRGKNLIKRNLEIVNDLEQS

SEQ ID NO: 80525 - protein, 302 aa, Romboutsia maritimum
  misc_feature (1)..(302): tr|A0A255HY79|A0A255HY79_9FIRM tRNA epoxyqueuosine(34) reductase QueG OS=Romboutsia maritimum OX=2020948 GN=qu eG PE=4 SV=1
MNNEKLIEFCKSIGLKCVGIAGIGPYDNLKKIIKNKLVNGHFTGMEEEVIENRIEPKLIMEDAKSIIVCAFPYYTGEINDSNISKYCYGKDYHIVVKEILQQICDYISNELDGFKYKIFADNGPLVDRHLAYLAGIGYFGINNNIITDEYGSYIFIGYIINNFEFNVNEPSPKTCIKCNKCVKYCPGNAILGNYELNPKRCLSYITQKKGDLSEEETRILKENKKVFGCDICQEVCPHNRKIPITDIKEFKENLITNLDYKEIESISNKEFKRRYNDRAFSWRGKNIIKRNIEIILEESDHI

SEQ ID NO: 80526 - protein, 301 aa, Romboutsia weinsteinii
  misc_feature (1)..(301): tr|A0A371IZW9|A0A371IZW9_9FIRM tRNA epoxyqueuosine(34) reductase QueG OS=Romboutsia weinsteinii OX=2020949 GN= queG PE=4 SV=1
MDNKKLKEFCHSIGIKCVGIAGIGPYHNLEKIIKNKLANGHFTGMEEAIVENRIDPRKTMENVKSIIVCAFPYYIGENERSNLSKYCQVKDYHIVVKEYLQKICNHIESSVENFEYKIFADNGPLVDRHLAYLAGIGYFGINNNIITDEYGSYIFIGYIMSNYEFKTDEPLPRTCIKCGKCVKYCPGNALLGNYEMNPRRCLSYMTQKKGELSEEEIKLINKNKKVFGCDICQEVCPHNKKVPITNLEEFREDVIDELDYEEINSISNKEFKRRYSDRAFNWRGRPLIKRNMEIILEKPIE

SEQ ID NO: 80527 - protein, 354 aa, Roseateles aquatilis
  misc_feature (1)..(354): tr|A0A246JHI7|A0A246JHI7_9BURK Epoxyqueuosine reductase OS=Roseateles aquatilis OX=431061 GN=queG PE=3 SV=1
MVEVRAWAHGLGFSQIGVAHVDLSDAEAGLQAWLDAGFHGDMQYMAAHGLKRARPAELVPGTISILTARMDYLPGSVGPDWQDREWAAMRDPARAQVSLYARGRDYHKVLRQRLQQLADRIQAAVGPMGHRVFTDSAPVLEVELASRSGIGWRGKHTLTLHRDSGSMFFLGEIYLDLELPPSEPVTAHCGQCRACIDACPTGAIVGPYRLDARRCISYLTIEQDGPIPLEFREAIGNRIYGCDDCQLACPWNKFARTNALPDFDWREPLGQASLLELWAWDEATFLRRTEGSAIRRIGHQRWRRNIAVAMGNALRQDLAPSLRARMRAALTAELAGATAMVAEHIDWALSQGVE

SEQ ID NO: 80528 - protein, 352 aa, Roseateles depolymerans
  misc_feature (1)..(352): tr|A0A2W5D946|A0A2W5D946_9BURK Epoxyqueuosine reductase OS=Roseateles depolymerans OX=76731 GN=queG PE=3 SV=1
MRGWARELGFSQIAVAGIDLSSAEPGLLAWLDAGHHGSMQYMAAHGLKRARPAELVPGTLSIITARMDYLPRDTGPDWRAVEWSGLAQPGQAQLSLYARGRDYHKVLRQRLQKLAERLADEVGPLGHRVFTDSAPVLEVELAARSGLGWRGKHTLALHREAGSMFFLGEIFVDLALPPTEPVSSHCGACNACSDACPTGAITAPYRVDARRCVSYLTIEHDGPIPEDLRPLLGNRIYGCDDCQLACPWNKFAQPAVLADFDARPGLAGSRIEQLLGWSEAEFLRRTEGSAIRRIGFERWQRNLAVAAGNALRSRDDAALRAALMRAGEGASVLVREHVEWALSAPAEPDALS

SEQ ID NO: 80529 - protein, 374 aa, Roseateles depolymerans
  misc_feature (1)..(374): tr|A0A0U3N5Z8|A0A0U3N5Z8_9BURK Epoxyqueuosine reductase OS=Roseateles depolymerans OX=76731 GN=queG PE=3 SV=1
MESLLNASDRTPDSLHALTGQIRTWALELGFSQIGVAHVDLGDAEAGLQAWLDAGFHGEMQYMAAHGMKRARPAELVPGTLCVLTARMDYLPPSLQADWQQREYDALADPARAQVSLYARGRDYHKVLRQRLQQLADRIQSAVGPLGHRVFTDSAPVLEVELASRSGIGWRGKHTLTLHREAGSMFFLGEIYLDLPLPPSEPVSAHCGQCRACLDACPTQAIVAPYRLDARRCISYLTIEQDGPIPEALRPAMGNRIYGCDDCQLACPWNKFARRQALPDFDWREPLGHASLLQLWAWDEPTFLKRTEGSAIRRIGHARWRRNLAVAMGNALRQPLAPSLRRELREALCAVQHTASPLLAEHIDWALRQTCDHT

SEQ ID NO: 80530 - protein, 374 aa, Roseateles sp.
  misc_feature (1)..(374): tr|A0A1H7FLD3|A0A1H7FLD3_9BURK Epoxyqueuosine reductase OS=Roseateles sp. YR242 OX=1855305 GN=queG PE=3 SV=1
MESLLNAPDRTPEALNALPGQIRAWALELGFSQIGVAHVDLADAEAGLQAWLDAGFHGEMHYMAAHGMKRARPAELVPGTICVLTARMDYLPATLAADWQQQELAALADPARAQVSLYARGRDYHKVLRQRLQQLADRIQAAVGPLGHRVFTDSAPVLEVELASRSGIGWRGKHTLTLHREVGSMFFLGEIYLDLALPPSEPVTAHCGQCRACLDACPTGAIVAPYRLDARRCISYLTIEQDGPIPEALRPAMGNRIYGCDDCQLACPWNKFAQRNALPDFDWREPLGHATLLDLWAWDEAAFLKRTEGSAIRRIGHARWRRNIAVAIGNALRQTLPADLRADLRAALTTALPDASPLLAEHIEWALRQSCDHT

SEQ ID NO: 80531 - protein, 385 aa, Roseiarcus fermentans
  misc_feature (1)..(385): tr|A0A366F5F2|A0A366F5F2_9RHIZ Epoxyqueuosine reductase OS=Roseiarcus fermentans OX=1473586 GN=queG PE=3 SV=1
MIEPARSRTIASSLALKARALGFDVCRVASAEPPPEMAGRLAAWLGAGAHGEMAWMADTAERRSDPRALMGDAKSLVMLGLNYGPEEDPLAATRRRDRGAISVYARHRDYHDVVKGKLKALAAHLAAAARPEKPDVKVFVDTAPLMEKPFAARAGIGWQGKHTNLVSRRFGSWLFLGAILTNLDLEPDAPERDHCGTCRACLDACPTGAFPAPYRLDARRCVSYLTIELKGPIPPELRAAIGNRIYGCDDCLAACPWNRFAEAGREAKLAARADLNAPPLAELARLDDAAFRARFAGSPIKRIGRARFVRNVLIAIGNSGDAELIVAARERLDDDAPIVRGAAVWALARLVSGPEFAAVADARARDEPDVGVAQEWRSGLGASDR

SEQ ID NO: 80532 - protein, 343 aa, Roseibaca calidilacus
  misc_feature (1)..(343): tr|A0A0P7X245|A0A0P7X245_9RHOB Epoxyqueuosine reductase OS=Roseibaca calidilacus OX=1666912 GN=queG PE=3 SV=1
MAENLTSELRATALVYGFTACAITHPGAIPQAPERLGAFVKAGYHGQMGWMAERMGWRGNPAALWPEARSIIMLAEAYTPDHNPLDLLDLRESAVISAYAQGRDYHDVVKKRLKRLGRWLIDRAGGEIKVFVDTAPVMEKPLAQAAGLGWQGKHTNLLSRELGNWFFLGAIFTTHALTPDAPAVGHCGSCRACLDICPTNAFPAPYQLDARRCISYLTIEHHGPVPEEFRANMGNRIYGCDDCLAVCPWNKFAAEAREAKYAARDGMIAPDLGELAQLDDAAFRARFSGSPIKRIGRGRFVRNVLYAIGNSGSARLRAVAQGLCDDADPVVADAARWAVARLA

SEQ ID NO: 80533 - protein, 343 aa, Roseibaca ekhonensis
  misc_feature (1)..(343): tr|A0A3B0M4I4|A0A3B0M4I4_9RHOB Epoxyqueuosine reductase OS=Roseibaca ekhonensis OX=254356 GN=queG PE=3 SV=1
MPEDLKSELLNRAREFGFTACAVTRPDAIPHAPERLRAFVEAGHHGQMGWMAERMHWRGDPTALWPEARSVIMLAEAYTPDHNPLDLLALRDRGVVSAYAQGRDYHDVVKKRLKRLGRWLIETAGGEIKVFVDTAPVMEKPLAEAAGLGWQGKHTNLLSRELGNWFFLGAIFTTHALPPDAPAEERCGSCRACLDVCPTNAFPAPYQLDARRCISYLTIEHHGPVPEELRSKMGNRIYGCDDCLAVCPWNKFAAEAREVKYAARDGMIAPDLAELAGLDDAAFRARFSGSPIKRIGRGRFVRNVLYAIGNSGTPRLQPVAQGLCEDADPVVADAAKWAVAQLG

SEQ ID NO: 80534 - protein, 354 aa, Roseibacillus sp.
  misc_feature (1)..(354): tr|A0A2D6DUH1|A0A2D6DUH1_9BACT tRNA epoxyqueuosine(34) reductase QueG OS=Roseibacillus sp. OX=2024856 GN=queG PE=4 SV=1
MDPVIAKRNVKFIATKLGFDDCRVAPARRARHADEFLRWAAEGKAGDMKWLERDPERRTDPRNILPGAQAVVCLALNYYPGPADPNPAYQIARYSWNEDYHDIIEEKLRDLDLAMKELGGTQRYYVDTGPVLERDMATESGLGWNGKSCVQIHRRLGAWFFLAELITTLPLEPDTPTQNYCGKCIACIDTCPTNAITRPHHVDAPRCISYLTIEHKGSIPEELRPLIGNRLYGCDDCLAVCPWNRFAKASRDIRFHARTEVFEHQLRDFLALTDEQFRSLFRKSPIKRIKRNRFLRNVCVVLGNVGDSGDLPALEAAVETEDPLIAEHAAWAISQIKERMDPTTCTSGARNLPA

SEQ ID NO: 80535 - protein, 354 aa, Roseibacillus sp.
  misc_feature (1)..(354): tr|A0A424HZM9|A0A424HZM9_9BACT tRNA epoxyqueuosine(34) reductase QueG OS=Roseibacillus sp. TMED18 OX=1986590 G N=queG PE=4 SV=1
  misc_feature (54)..(54): Xaa can be any naturally occurring amino acid
  misc_feature (104)..(104): Xaa can be any naturally occurring amino acid
  misc_feature (142)..(142): Xaa can be any naturally occurring amino acid
  misc_feature (314)..(314): Xaa can be any naturally occurring amino acid
  misc_feature (333)..(333): Xaa can be any naturally occurring amino acid
  misc_feature (338)..(338): Xaa can be any naturally occurring amino acid
  misc_feature (346)..(346): Xaa can be any naturally occurring amino acid
  misc_feature (350)..(350): Xaa can be any naturally occurring amino acid
MDPVIAKRNVKFIATKLGFDDCRVAPARRARHADEFLRWAAEGKAGDMKWLERXPERRTDPRNILPGAQAVICLALNYYPGPVDPNPAYQIARYSWNEDYHDIXEEKLRDLDLAMQELGGTQRYYVDTGPVLERDMATESGXGWNGKSCVQIHRRMGAWFFLAELITTLPLEPDKPTQNYCGKCTACIDTCPTNAITRPHHVDAPRCISYLTIEHKGSIPEELRPLIGNRLYGCDDCLAVCPWNRFAKASRDIRFHARAEVFEHQLRDFLALTDEEFRSLFRKSPIKRIKRNRFLRNVCVVLGNVGDSGDLSAXEAAVETEDSLIAEHASWAXSQIKXRMDPTKYXSGAXNLPA

SEQ ID NO: 80536 - protein, 345 aa, Roseibacterium elongatum
  misc_feature (1)..(345): tr|W8RQN2|W8RQN2_9RHOB Epoxyqueuosine reductase OS=Rose ibacterium elongatum DSM 19469 OX=1294273 GN=queG PE=3 SV=1
MTDLKTALAAEARAAGFAAMGVCRPDAIPQAADRLAAFVEQGRHGQMQWMAERMAWRGNPAALWPEARSVVMLAEPYTPAQDPLEALTHRDRAAISVYAQNRDYHDIVKKRLKRVGRWLLEQRPEHAIKVFVDTAPVMEKPLAQAAGLGWQGKHTNLLSRDLGNWFFLGAIFTTVELAPDPPEAEHCGSCTACLDICPTRAFPAPFQLDARRCISYLTIEHKGPVDPALRDGLGNRIYGCDDCLAVCPWNKFATEARELRYAARPEFLCAPLETLAMLDDAEFRAMFSGSPIKRIGRDRFVRNVLYAIGNSGEARLCAVAQRLLDDPDAAVADAAAWAMEKLRCA

SEQ ID NO: 80537 - protein, 338 aa, Roseibium hamelinense
  misc_feature (1)..(338): tr|A0A562T223|A0A562T223_9RHOB Epoxyqueuosine reductase OS=Roseibium hamelinense OX=150831 GN=JM93_02362 PE=4 SV=1
MAWMEETADRRSAPKDLWPEVRSVLMLAMNYGQGPAPEDAPLYNLDKPERAEISVYARHRDYHDVIKGRLKELAGYLISRAPHDLRPDVKVFVDTAPVMEKPLAQAAGLGWQGKHTNLVSRDIGSWFFLGAIFTTLELPLSQTETDHCGSCRACLDNCPTHAFPAPYQLDARRCISYLTIEHPGPIPHEFREAIGNRIYGCDDCLAACPWNKFARTANEAKLLARDDLKSPALADLLTLDDAAFRNLFSGSPIKRIGRNRFVRNVLIAAGNSGSDRLADKVRHLLSDPDETVRSSAVWAFSKLAAASDFQSERNERLAGETSSQVRQEWFLTADSQSS

SEQ ID NO: 80538 - protein, 384 aa, Roseibium sp.
  misc_feature (1)..(384): tr|E2CEW5|E2CEW5_9RHOB Epoxyqueuosine reductase OS=Rose ibium sp. TrichSKD4 OX=744980 GN=queG PE=3 SV=1
MSSDRSDKKRQKLVNALRSRAEQLGFDGLEITTPDAIPHAPDRLRQFLNEGYHASMEWMAQTEDRRAAPLVLWPEVRSVIMLAMNYGPDEGVDPLSHLSAPDTGGISVYARHRDYHDVIKGRLKELASFLVSWAKDFAEPDVKVFVDTAPVMEKPLAAAAGLGWQGKHTNLVSRDLGSWFFLGSIFTTLDLPEGTEEADHCGSCRACLDGCPTDAFPAAYQLDARRCISYLTIEHTGPIPAEFREKMGNRIYGCDDCLAACPWNKFARAAKEAKLKAREDLISPKLADFLVLDNKTFRSLFSGSPIKRIGRNRFLRNVLIAAGNSGDESLSVLVKPHLSDLDPMVRGAAVWALSRLLSDTDYAELKRSLLQTETDEFVRLEWGP

SEQ ID NO: 80539 - protein, 348 aa, Roseicitreum antarcticum
  misc_feature (1)..(348): tr|A0A1H2QUK8|A0A1H2QUK8_9RHOB Epoxyqueuosine reductase OS=Roseicitreum antarcticum OX=564137 GN=queG PE=3 SV= 1
MDPAALKTQIAAQARLEGFASMGVCRPDAIPQAPAQLKAFVDAGYHGQMGWMAERMTWRSDPAALWPDARSVIMLAEPYTPDHNPLDALALRDRAAISVYAQHRDYHDVAKKRLKRLGRWLIDTAGGEIKVFVDTAPVMEKPLAAAAGLGWQGKHTNLLSRDLGNWFFLGALFTTHALPPDTPGAEACGSCTACLDICPTNAFPAPFQLDARRCISYLTIEHHGPVDPELRALMGNRIYGCDDCLAICPWNKFAVEASEAKYHARPDLQAPPLAELALLDDAGFRARFSGSPIKRIGRNRFVRNVLYAIGNSARPDLRATAQGLCNDPDETVRDAARWAALRLDGAGA

SEQ ID NO: 80540 - protein, 343 aa, Roseicyclus mahoneyensis
  misc_feature (1)..(343): tr|A0A316GM67|A0A316GM67_9RHOB Epoxyqueuosine reductase OS=Roseicyclus mahoneyensis OX=164332 GN=queG PE=3 SV= 1
MSDLKAALLTEARAAGFAKMGVCRPDAIPQAAGRLAGFVEGGRHGQMGWMAERMGWRGDPAALWPEARSVIMLAEVYTPDADPLEALTHRDRATISVYAQNRDYHDLVKKRLKRVGRWLLDQAPGHQIKVFVDTAPVMEKPLAEAAGLGWQGKHTNLLSRDLGNWFFLGAIFTTVDLPPDTPEAEHCGSCTACLDICPTDAFPAPFQLDARRCISYLTIEHKGPVDADLRPLMGNRIYGCDDCLAVCPWNKFAQTATEMRYAARPELVSPRLVDLARLDDAGFRALFAGSPIKRIGRDRFVRNVLYAIGNSADAGLAPVAQSLTEDADATVADAARWAVERLR

SEQ ID NO: 80541 - protein, 379 aa, Roseimaritima ulvae
  misc_feature (1)..(379): tr|A0A5B9QVQ0|A0A5B9QVQ0_9PLAN Epoxyqueuosine reductase OS=Roseimaritima ulvae OX=980254 GN=queG PE=4 SV=1
MTDDRRALTEWLREQARELGFHLFGVAPAVTPQGFHHLVQWIDSGYHAQMDYIPDRLTAYQHPSGVMEGVCSLVMLGFPYRTVEPPPSQPLHGRVARYAWGAADYHDLIHGRFKQLKRDLRERAPQVKARGVVDSAPLLEREFARLAGLGWSGKNTLTINKLEGSYFFLACLLLDIDLPADAPHVSDHCGTCTRCLDACPTDAFVSPGVLDSRRCISYLTIEHRDPIPIELRQPIGDWLFGCDVCQDVCPWNRRGSPATDASLNPPPQSLPTDLPSLFDLDEDAFRQRFRKTPLWRTRRRGILRNAAIVLGNQRDPHSIAALLKGLHDEEALVRGASAWALGQIAGSDALHALDKRLTVEEDSIVQAEITAALRSAETA

SEQ ID NO: 80542 - protein, 349 aa, Roseimicrobium gellanilyticum
  misc_feature (1)..(349): tr|A0A366HTF3|A0A366HTF3_9BACT Epoxyqueuosine reductase OS=Roseimicrobium gellanilyticum OX=748857 GN=DES53_10 1360 PE=4 SV=1
MNSLLKAELQALAAQLGFSDCRIAPALPAAHRHLYAQWVAEGKYGDMAWMARNLDRRSDPRVVLPGAQSVVMFAMNYFQGAEEPGELEGRIARYAWNDDYHDMIEKKLREVDAFLISRGGSQRFYVDTGPVLERDFASESGLGWNGKSTMQIHRKLGTWFFLADILTTLELPPDTPAHDLCGKCTRCIDACPTNAITGPRRMDARRCISYLTIESKGSIPLEFRKAIGDHLYGCDDCLNACPWNRFAQVSREATFAARESVFSMKLREMLALTDEQFRALFSKSPIKRIKRPAFLRNVCVVLGNIGTEEDLPALRIAEADEHPIISEHAQWAIAEIEARVGDGFSRSAV

SEQ ID NO: 80543 - protein, 358 aa, Roseinatronobacter monicus
  misc_feature (1)..(358): tr|A0A543KF56|A0A543KF56_9RHOB Epoxyqueuosine reductase OS=Roseinatronobacter monicus OX=393481 GN=queG PE=3 S V=1
MTADLKSELIRQAREMGFDACAITRPDAIAQAPERLRAFVDQGRHGQMGWMAERMHWRANPAALWPQARSIIMLAESYTPDYNPLDLLAQRENGVISAYALGRDYHDVVKKRLKRLGRWLIDHAGGEIKVFVDTAPVMEKPLAAAAGLGWQGKHTNLLSRDLGNWMFLGSIFTTLDLPPDAPAQENCGSCTACLDICPTDAFPAPFQLDARRCISYLTIEHHGPVPLELRAKMGNRIYGCDDCLAVCPWNKFARDASEVKYAARDGMVAPDLAELATLDDAGFRARFSGSPVKRIGRNRFVRNVLYAIGNSGATRLLPVARGLTDDPDPTVAEAASWAVQRLDATPEAGPGAPARPRS

SEQ ID NO: 80544 - protein, 360 aa, Roseinatronobacter thiooxidans
  misc_feature (1)..(360): tr|A0A2W7PP41|A0A2W7PP41_9RHOB Epoxyqueuosine reductase OS=Roseinatronobacter thiooxidans OX=121821 GN=queG PE =3 SV=1
MGMTDDLKSELVHEARAMGFDACALTRPDAIPFAPERLRAFVEGGRHGQMGWMAERMTWRANPAALWPQARSVIMLAESYTPEYNPLDLLDQRENGVISAYALGRDYHDVVKKRLKRLGRWLIDRAGGEIKVFVDTAPVMEKPLAAAAGLGWQGKHTNLLSRDLGNWFFLGSIFTTLELAPDAPAQENCGSCRACLDICPTDAFPAPFQLDARRCISYLTIEHHGPVPLDLREKMGNRIYGCDDCLAVCPWNKFARDASEVKYAARDGMVAPDLAELAGLDDAAFRARFSGSPIKRIGRNRFVRNVLYAIGNSGAARLLPAAQALLADPDAPVADAAQWAAQRLVAPPATGAGAAPRPRS

SEQ ID NO: 80545 - protein, 349 aa, Roseisalinus antarcticus
  misc_feature (1)..(349): tr|A0A1Y5TSJ2|A0A1Y5TSJ2_9RHOB Epoxyqueuosine reductase OS=Roseisalinus antarcticus OX=254357 GN=queG PE=3 SV= 1
MDPLKERLREFAIEAGFSAMGICRPDAIPESAGRLAAFVADGRHGQMGWMAERMGWRGDPTALWPEARSVVMLAEAYTPEHDPLAVLDRPELGAISVYAQGRDYHDLVKKRLKRVGRWLLEQADQDAESAHQIKVFVDTAPVMEKPLAQAAGLGWQGKHTNVLGRELGNWVFLGAIFTTIDLPPDEAEAEHCGTCTRCLDICPTEAFPAPFQLDARRCISYLTIEHRGPVAEDLREKMGNRIYGCDDCLAVCPWNKFATEAREMRYLRQDGPPALAELAALDDAAFRARFSGSPIKRIGIARFLRNVLYAIGNSGDPGLLPAARAHLASDDATVTDAARWAVARLRNHM

SEQ ID NO: 80546 - protein, 386 aa, Roseitalea porphyridii
  misc_feature (1)..(386): tr|A0A4V1A3J2|A0A4V1A3J2_9RHIZ Epoxyqueuosine reductase OS=Roseitalea porphyridii OX=1852022 GN=queG PE=3 SV=1
MPHAVRQRPTDAEIARDALERDLKTLGFDAVGFAPADGIDRAAEGLARFLAEGRHGMMGWMEETRARRADPQTLWPAARTAIMVAMNYGPGDDYDPLAALDRPDRATISCYAHNRDYHDVIKGRLKQAAGRFAAKTGADVKVFVDTAPLMEKPLAERAGLGWQGKHTNLLSRELGSWFFLGSILTDMVLPTDAPETDHCGSCRACLDICPTDAFPAPYQLDARRCISYLTIEHKGPIPHPFREPIGNRIYGCDDCLAVCPWNKFARTAREAKLRARDDMISPPLAELLDLDDAAFRVRFSGSPIKRIGRARFVRNCLIAAGNSGAPALIGPVEALLDDVEPVVRGAAVWALGRLAPDRIADARAARYGREPDISVREEWDRIDGGH

SEQ ID NO: 80547 - protein, 309 aa, Roseivirga echinicomitans
  misc_feature (1)..(309): tr|A0A150XUG7|A0A150XUG7_9BACT Epoxyqueuosine reductase OS=Roseivirga echinicomitans OX=296218 GN=queG PE=3 SV =1
MQNISKNTAIIKQTAHKLGFDFCGISKAEFLADEAPRLEAWLKRGNHGEMSYMENHFDKRLDPSKLVPGAKSVVSLLYNYYPEKDLSEEHPAHLKLAKYAYGEDYHFVIKDRLKTFMSVLKEEIGEVEGRVFVDSAPVMERQWAAKSGLGWLGKNTLLINKGQGSYFFLAELIIDLELEPDGPIKDYCGTCTRCIDACPTDAITPYEVNANKCISYLTIELKDQIPDSFQGKMGNWIFGCDICQEVCPWNRFSKPHSEAAFRPKNELLELFNNNWQDLTEEVFRVVFKGSAVKRTKIEGLKRNIKMAKK

SEQ ID NO: 80548 - protein, 309 aa, Roseivirga ehrenbergii
  misc_feature (1)..(309): tr|A0A150XNA8|A0A150XNA8_9BACT Epoxyqueuosine reductase OS=Roseivirga ehrenbergii OX=279360 GN=queG PE=3 SV=1
MHNITANTTIVKQTAQKLGFDFCGISKAEFLADEAPRLEAWLKKGNHGEMRYMENHFDKRLDPSKLVPGAKSVVSLLYNYYPEKDLAEEHPDHLKLAKYAYGEDYHFVIKDRLKTFISILKEEIGDVEGRVFVDSAPVMERQWAAKSGLGWLGKNTLLINKGQGSYFFLAELIIDLELEPDGPIKDYCGTCTRCIDACPTDAITPYEVDANKCISYLTIELKDQIPDTFQGKMNNWIFGCDICQEVCPWNRFSKPHSEPTFHPKNELLELFNNNWQDLTEEVFRSVFKGSAVKRTKLEGLKRNIIMAKK

SEQ ID NO: 80549 - protein, 309 aa, Roseivirga seohaensis
  misc_feature (1)..(309): tr|A0A150XL60|A0A150XL60_9BACT Epoxyqueuosine reductase OS=Roseivirga seohaensis OX=1914963 GN=queG PE=3 SV=1
MQNINTNTTIVKQTAQKLGFDFCGISKAEFLADEAPRLEAWLKKGNHGEMHYMENHFDKRLDPSKLVPGAKSVVSLLYNYYPEKDLAEQHPDHLKLAKYAYGEDYHFVIKDRLKTFMSILKEEIGDVEGRVFVDSAPVMERQWAAKSGLGWLGKNTLLINKGRGSYFFLAELIIDLELESDGPIKDYCGTCTRCIDACPTDAITPYEVNANKCISYLTIELKDQIPDTFQGKMDNWVFGCDICQEVCPWNRFSKPHSEPAFHPKNELLELFNNNWQDLTEEVFRSVFKGSAVKRTKLEGLKRNIIMAKK

SEQ ID NO: 80550 - protein, 309 aa, Roseivirga seohaensis
  misc_feature (1)..(309): tr|A0A0L8AMZ7|A0A0L8AMZ7_9BACT Epoxyqueuosine reductase OS=Roseivirga seohaensis subsp. aquiponti OX=1566026 G N=queG PE=3 SV=1
MQNINTNTTIVKQTAQKLGFDFCGISKAEFLADEAPRLEAWLKKGNHGEMCYMENHFDKRLDPSKLVPGAKSVVSLLYNYYPEKDLAEQHPDHLKLAKYAYGDDYHFVIKDRLKTFMSTLKEEIGEVEGRVFVDSAPVMERQWAAKSGLGWLGKNTLLINKGQGSYFFLAELIIDLELEPDGPIKDYCGTCTRCIDACPTDAITPYEVDANKCISYLTIELKDQIPDSFQGKMDNWVFGCDICQEVCPWNRFSKPHSEPAFHPKNELLELFNNNWQDLTEEVFRSVFKGSAVKRTKLEGLKRNIKMAKK

SEQ ID NO: 80551 - protein, 311 aa, Roseivirga sp.
  misc_feature (1)..(311): tr|A0A316K9V7|A0A316K9V7_9BACT Epoxyqueuosine reductase OS=Roseivirga sp. XM-24bin3 OX=2133949 GN=queG PE=3 SV =1
MNPSVSKNTQLLKQMAQNHGFDFCGISKAEFLEEEAPRLESWLKKGAHGKMSYMENHFDKRLDPTKLVSGAKSVVSLLYNYYPETDLAKTHPNQSKIAKYAYGKDYHFVIKDKLKTLLLDLQKEIGEIEGRVFVDSAPVMERQWAEKSGLGWTGKNTLLITKNQGSFFFLAELIIDLELEADGPIKDYCGTCTRCVDACPTDAITPYEVDASKCISYLTIELKEGIPEEFKGKMENWAFGCDICQDVCPWNRFSKPHQEEAFLPPKELLELLNNNWQDLTDEVFGKAFRKSAVKRTKLQGLERNLEFLKNI

SEQ ID NO: 80552 - protein, 311 aa, Roseivirga spongicola
  misc_feature (1)..(311): tr|A0A150XHW1|A0A150XHW1_9BACT Epoxyqueuosine reductase OS=Roseivirga spongicola OX=333140 GN=queG PE=3 SV=1
MNPSVSKNTQLLKQMAKNHGFDFCGISKAEFLEDEAPRLESWLKKGAHGKMSYMENHFDKRLDPTKLVPGAKSVISLLYNYYPETDLAKTYPNQSKIAKYAYGKDYHFVIKDKLKTLLLDLQKEIGEIEGRAFVDSAPVMERQWAEKSGLGWTGKNTLLITKNQGSFFFLAELIIDLELEADGPIKDYCGTCTRCVDACPTDAITPYEVDASKCISYLTIELKEGIPEEFKGKMENWAFGCDICQDVCPWNRFSKPHQEEAFLPPKELLELLNNNWQDLTEEVFGKAFRKSAVKRTKLKGLERNLEFLKNI

SEQ ID NO: 80553 - protein, 353 aa, Roseivivax halodurans
  misc_feature (1)..(353): tr|X7EHL5|X7EHL5_9RHOB Epoxyqueuosine reductase OS=Rose ivivax halodurans JCM 10272 OX=1449350 GN=queG PE=3 SV= 1
MADDARAALKDRLESAAGAEGFALMRVCRPWDVPLVPERLRAFLAEGRHGQMGWLAERVHWREAPQVLWPEAQSVIMLGESYTPGYDPLELLERRERGAVSVYAQNKDYHDVLKKKLKRLARWLIAEGGGEVKVFVDTAPVPEKPLGEAAGLGWQGKHTNLVSRDMGSWFFIGSIFTTLDLPADQAEGDHCGSCRKCLDICPTEAFPAPYQLDARRCISYLTIEHRGPVDHELRAKMGNRIYGCDDCLAVCPWNKFAAEAREARYHARDDLVAPDLAELAELDDAGFRARFSGSPIKRIGRDRFVRNVLYAIGNSGSERLRPVAQGLAEDADETVREAARWAAERLPSGRAPG

SEQ ID NO: 80554 - protein, 347 aa, Roseivivax halotolerans
  misc_feature (1)..(347): tr|A0A1I5US75|A0A1I5US75_9RHOB Epoxyqueuosine reductase OS=Roseivivax halotolerans OX=93684 GN=queG PE=3 SV=1
MSLTARLKAEAEAAGFTMCRICGPGDIPKVPERLGAFLEKGRHGQMGWLEDRASWRGDPQVLWPEARSIIMLGESYTPDHDPMAILGAPERAAISVYAQNRDYHDIVKKRLKRLGRWLIAEAEAAGEEAEIKVFVDTAPVAEKPLGEAAGLGWQGKHTNLVSREMGSWFFLGSIFTTLDLERDAPETDHCGSCRRCLDICPTDAFPAPYQLDARRCISYLTIEHRGPVPEELREGLGNRIYGCDDCLAVCPWNKFAAEASDIRYAAREDLLAPDLAELASLDDAGFRARFSGSPIKRIGRDRFVRNVAYAIGNSGSARLRPAAAALAEDPDETVRDAALWALARLPA

SEQ ID NO: 80555 - protein, 350 aa, Roseivivax isoporae
  misc_feature (1)..(350): tr|X7FC44|X7FC44_9RHOB Epoxyqueuosine reductase OS=Rose ivivax isoporae LMG 25204 OX=1449351 GN=queG PE=3 SV=1
MDAGDEAARLKERLVAQAEAEGFARARICRPWDVPEVPERLRAFLAAGYHGQMDWLADRVAWREAPQVLWPEARSVLMLGESYTPGHDPRAVLARREAGAVSVYAQHRDYHDVLKKKLKRLARWLVAEGGGAVKVFVDTAPVPEKPLGQAAGLGWQGKHTNLVSRQMGSWFFLGSVFTTLDLPADAAETDHCGSCRACLDICPTDAFPEPYRLDARRCISYLTIEHRGPVDEALRPALGNRIYGCDDCLAVCPWNKFAAEAREAKYHAREDLLAPDLAELARLDDAGFRARFSGSPIKRIGRDRFVRNVLYAIGNSGSARLAAVARTLCEDADPAVRDAARWAVARLGAA

SEQ ID NO: 80556 - protein, 352 aa, Roseivivax jejudonensis
  misc_feature (1)..(352): tr|A0A1X7A2T2|A0A1X7A2T2_9RHOB Epoxyqueuosine reductase OS=Roseivivax jejudonensis OX=1529041 GN=queG PE=3 SV= 1
MDGDADRLKAGLVAEAGAAGFAMARICRPWDVPQVPARLRDFLDRGRHGQMAWLAERVAWREAPQVLWPEARSVLMLGESYTPDHDPLEALAARERGTVSVYAQNRDYHDVLKKKLKRLARWLVAEGGGDVKVFVDTAPVPEKPLGEAAGLGWQGKHTNLVSRQMGSWFFLGSVFTTLDLPVDRAESDHCGSCRACLDICPTDAFPAPYQLDARRCISYLTIEHRGPVAPELRAKMGNRIYGCDDCLAVCPWNKFAAEAREARYHARDDLRAPDLAALATLDDAGFRARFSGSPIKRIGRDRFVRNVLYAIGNSGAARLRPVAQDLCEDPDATVRDAARWAAARLPSGREPG

SEQ ID NO: 80557 - protein, 346 aa, Roseivivax lentus
  misc_feature (1)..(346): tr|A0A1N7K784|A0A1N7K784_9RHOB Epoxyqueuosine reductase OS=Roseivivax lentus OX=633194 GN=queG PE=3 SV=1
MDLTQRLKAEAEAVGFTACRITGPDAIPEVPERLRAFLDKGYHGQMGWLADRAAWRGDPQALWPEARSVIMLGEAYTPGHDPLAVLETPDRAAISVYAQNRDYHNVVKKRLKRLGRWLIDAAEGAPEIKVFVDTAPVAEKPLGQAAGLGWQGKHTNLVSREMGSWFFLGAIFTTLDLARDAPEDDHCGSCRACLDICPTDAFPAPYRLDARRCISYLTIEHKGPVAEDLRAKMGNRIYGCDDCLAVCPWNKFAAEAREVKYHARPDLLAPDLAELAALDDAGFRARFSGSPIKRIGRDRFVRNVLYAIGNSGRPDLRRAAAALADDPDATVRDAASWALGQLPQTE

SEQ ID NO: 80558 - protein, 355 aa, Roseivivax marinus
  misc_feature (1)..(355): tr|W4HL55|W4HL55_9RHOB 4Fe-4S ferredoxin OS=Roseivivax marinus OX=1379903 GN=ATO8_05451 PE=4 SV=1
MSQTDTDPGELRARLVAQAEAEGFALARTCRPWDVPQVPHRLTEFLARDRHGQMNWLADRAHWRGAPQVLWPEARTVLMLGESYTPDTDPLAALERCESGTVSVYAQNRDYHDVLKKKLKRIARWLIAEAGGEVKVFVDTAPVPEKPLGEAAGLGWQGKHTNLVSRDMGSWFFIGSIFTTLDLPVDAAERDHCGSCRACLDICPTNAFPAPYQLDARRCISYLTIEHHGPVDPELRPALGNRIYGCDDCLAVCPWNKFAAEAREAKYHARPDLVSPDLGELAMLDDARFRARFSGSPIKRIGRNRFVRNVLYAIGNSGSERLRAVAQGLCEDPDETVADAARWAVARLSSGPAAR

SEQ ID NO: 80559 - protein, 351 aa, Roseivivax pacificus
  misc_feature (1)..(351): tr|A0A2T6AZE5|A0A2T6AZE5_9RHOB Epoxyqueuosine reductase OS=Roseivivax pacificus OX=1267769 GN=queG PE=3 SV=1
MERLKARLVARAAEEGFDDCRICRPGDVPQVMARLQQFLREGYHGQMGWLAERSHWRGDPTALWPEARSVIMLAENYGPTHDPLEVLDHPDRAAISVYAQNRDYHDVVKKRLKRLGRWLIGEAEKQGEAPEIKVFVDTAPVPEKPLAQAAGLGWQGKHTNLLSRRLGSWFFLGSIFTTLELPTDAPEGEHCGSCRACLDICPTEAFPAPFQLDATRCISYLTIEHRGPVDEELRAKMGNRIYGCDDCLAVCPWNKFASEAREVKYHAREDLLAPPLEELAGLDDAGFRARFSGSPIKRIGRDRFVRNVLYAIGNSGKARLRPVAQGLCEDGDETVRDAARWAAIRLPEGDV

SEQ ID NO: 80560 - protein, 346 aa, Roseivivax roseus
  misc_feature (1)..(346): tr|A0A1H9UK73|A0A1H9UK73_9RHOB Epoxyqueuosine reductase OS=Roseivivax roseus OX=641238 GN=queG PE=3 SV=1
MSADLKARLDAEARQAGFAAMGVTTPDAVPQAAGRLEAFVGAGRHGQMQWMAERMGWRGDPAALWPAARSVVMLAESYTPERDPLAVLGQRERGAVSVYAQGKDYHDLVKKRLKRVGRWLLEQCPEAEIKVFVDTAPVMEKPLAQAAGLGWQGKHTNLLGRGIGNWVFLGAIFTTVELPPDPAEGEHCGSCTRCLDVCPTDAFPAPFQLDARRCISYLTIEHRGPVDEALRGKMGNRIYGCDDCLAVCPWNKFAAEARETRYAARDDLRAPPLEELAALDDAGFRARFSGSPIKRIGRDRMVRNVLYAIGNSGAARLRPVAQGLTGDADPAVADAARWAALRLEAA

SEQ ID NO: 80561 - protein, 348 aa, Roseivivax sediminis
  misc_feature (1)..(348): tr|A0A1I2AXW9|A0A1I2AXW9_9RHOB Epoxyqueuosine reductase OS=Roseivivax sediminis OX=936889 GN=queG PE=3 SV=1
MDAVKAALVREAQEIGFAQARICRPWDVPQVPARLRAFLAQGRHGQMGWLAERAHWREAPQVLWPAARSVIMLGESYTPGHDPLAVLEEREAGAVSVYAQNRDYHDVLKKKLKRLARWLIAEAGGEVKVFVDTAPVPEKPLGEAAGIGWQGKHTNLVSRSMGSWFFIGSIFTTLDLPADAAEGDHCGSCRACLDICPTDAFPAPYQLDARRCISYLTIEHRGPVEEELRGKMGNRIYGCDDCLAVCPWNKFAAEAREAKYHAREDLVAPDLAGLAGLDDAGFRARFSGSPIKRIGRDRFVRNVLYAIGNSGLARLRPVAQARAEDADETVRDAARWAAARLPSGGPAG

SEQ ID NO: 80562 - protein, 347 aa, Roseobacter denitrificans
  misc_feature (1)..(347): tr|Q16DZ9|Q16DZ9_ROSDO Epoxyqueuosine reductase OS=Rose obacter denitrificans (strain ATCC 33942 / OCh 114) OX= 375451 GN=queG PE=3 SV=1
MSGLKEKLVARALEEGFIACRICRPDAVPDVAARLKAFVDAGHHGQMTWMADRIHWRGDPTQLWPQARSVIMLAESYGPEHDPMAVLQQPERGAISVYAQGRDYHDVVKKRLKRLARWLMAEAADADLQVKVFVDTAPVPEKALGQAAGLGWQGKHTNLLSREWGNWAFLGAVFTTLDIAPDAPEVDHCGSCRACLDVCPTDAFPAPYQLDARRCISYLTIEHKGPVPTDLRPLLGNRIYGCDDCLAVCPWNKFATTARDMRLSARPELTAPRLADLAALDDAAFRALFSGSAVKRIGRNRFVRNVLYAIGNSGEASLRQTASELMDDPDDAVADAARWAVAQLGRK

SEQ ID NO: 80563 - protein, 346 aa, Roseobacter litoralis
  misc_feature (1)..(346): sp|F7ZDR3|QUEG_ROSLO Epoxyqueuosine reductase OS=Roseob acter litoralis (strain ATCC 49566 / DSM 6996 / JCM 212 68 / NBRC 15278 / OCh 149) OX=391595 GN=queG PE=3 SV=1
MSGLKEKLVARALEEGFIACRICRPDAVPDVAARLKAFVDAGYHGQMTWMADRMHWRGDPTQLWPQARSVIMLAESYGPEHDPMAVLQQPERGAISVYAQGRDYHDVVKKRLKRLARWLMAEAADADPQVKVFVDTAPVPEKALGQAAGLGWQGKHTNLLSREWGNWAFLGAVFTTLDIAPDAAEVDHCGSCRACLDVCPTDAFPAPYKLDARRCISYLTIEHKGPVPTDLRPLLGNRIYGCDDCLAVCPWNKFATAARDMRLSARPELTAPRLADLAALDDAAFRALFSGSAVKRIGRNRFVRNVLYAIGNSGEASLRQIASELTDDPDDAVADAARWAVAQLGG

SEQ ID NO: 80564 - protein, 344 aa, Roseobacter sp.
  misc_feature (1)..(344): tr|A0A2E9YXJ6|A0A2E9YXJ6_9RHOB tRNA epoxyqueuosine(34) reductase QueG OS=Roseobacter sp. OX=1907202 GN=queG PE =4 SV=1
MDTAGLKDRLVSQASIEGFVSCRVCRPWDVPDVPARLAAFVDAGYHGQMEWMADRMAWRGDPAALWPEAKSVIMLAESYTPLYDPTSVLDETENAAVSVYAQGRDYHDIVKKRLKRLARWLIEQQPCEVKVFVDTAPVPEKALGQAAGLGWQGKHTNLVSRDWGNWAFLGAIFTTLDLDVDRAEKDHCGSCRSCLAACPTDAFPAPYRLDARRCISYLTIEHSGPVDPELRSKLGNRIYGCDDCLAACPWNKFAVQASDMRYHGGVGSPPLAELATLDDAAFRARFSGSPIKRIGRNRFIRNVLYAIGNSGQADLVPTAQGLVGDPDPTIVEAAQWAIEQLAGK

SEQ ID NO: 80565 - protein, 348 aa, Roseobacter sp.
  misc_feature (1)..(348): tr|A4ET76|A4ET76_9RHOB Epoxyqueuosine reductase OS=Rose obacter sp. SK209-2-6 OX=388739 GN=queG PE=3 SV=1
MTRELKDRLVTQALEEGFVSCRICRPWDVPQVPDRLQQFLDAGLHGQMGWMADRSHWRGDPSVLWPEARSVIMLAESYTPDADPMEVVGCPDRGAVSVYARNKDYHDLVKKRLKRLARWLIDQAKKQGEEAQVKVFVDTAPVPEKPLGMAAGLGWQGKHTNLVSRDWGNWAFLGSIFTTLDLPADSAEPDRCGSCSSCLSACPTEAFLAPYQLDARRCISYLTIEHKGPIDEELRSKLGNRIYGCDDCLAACPWNKFAVAASDMRYAARDELQAPRLAELAQLDDAAFRAFFSGSPIKRIGRDRFVRNVLYAIGNSNLPELRSIAQDLIDDPDPTVADAALWAVQQLS

SEQ ID NO: 80566 - protein, 347 aa, Roseococcus sp.
  misc_feature (1)..(347): tr|A0A4R0YC43|A0A4R0YC43_9PROT Epoxyqueuosine reductase OS=Roseococcus sp. SYP-B2431 OX=2496640 GN=queG PE=3 S V=1
MNRPPNEATEAVRAEAIAQGFDVARFTQALLPETARARLDAFLDAGAHGSMGWLEGRRAQRAQPRMLWPEAVSVIALGLNYGPAYDPLASLAERGRATISAYAQGRDYHDLVKKRLKALGGWMVRRFKGSELKVFVDTAPVMEKPLAAQAGLGWQGKHTNLVSRTHGSWLFLGEIYTTLDLAPDRPETDHCGNCRACLESCPTAAFPAPYRLDARRCISYLTIEHHGPIPHEFREAMGNRIYGCDDCLAACPWNKFARASAEMQLAPRSEIAPPLSVLAALDDAAFRARYSGSPIKRIGRDRFTRNVLNAIGNSGDAALLPTARALCEDADPTVAEAARWAVERLQA

SEQ ID NO: 80567 - protein, 317 aa, Roseofilum reptotaenium
  misc_feature (1)..(317): tr|A0A1L9QPL6|A0A1L9QPL6_9CYAN Epoxyqueuosine reductase OS=Roseofilum reptotaenium AO1-A OX=1925591 GN=queG PE =3 SV=1
MSEESTTLTSEKVKEKAIDLGFSQAGIAVFDRAIAQQGTQGLQNWLAQGYHADMDWMANPKRQDIRRAFPQVASIISLSLNYYTPYSQPQASEYGKISRYAWGRDYHRVIGKKLRVFTVWLQEQGQDIQLKAYLDTGPVQDKLWAQTAGLGWVGKNGNLITRKFGSWVFLAEILTNLTLEPDKPHREHCGTCQRCIQACPTGAIAKPFVVDANRCIAYHTIENRAEELPEAIAENLNGWVAGCDICQEVCPWNQRFAQPTHIQEFHPYPENLAPKLIDLANLSEQEWDRRFRASALRRIKPQMWRRNARANQLKIKN

SEQ ID NO: 80568 - protein, 340 aa, Roseomonas aestuarii
  misc_feature (1)..(340): tr|A0A2U1VAC7|A0A2U1VAC7_9PROT Epoxyqueuosine reductase OS=Roseomonas aestuarii OX=568898 GN=queG PE=3 SV=1
MRDQALALGFDAVGFAPAHLGPEVRARLDAFLAAGMQGEMGWLAERAEQRAHPRALWPEAVSVIALGMNYGPAEDPLALLERRDRGAISVYARNRDYHDIVKKRLKALARWMVERWQDSALKVFVDTAPVAEKPLAQAAGLGWQGKHSNLVSRAHGSWLFLGEVYTTLDLAPTGAEADHCGRCTRCLTACPTDAFAAPYRLDARRCISYLTIEHHGPIPHEFRAAMGNRIYGCDDCLAVCPWNKFAAAAREPGLMPREDLTAPRLAELAVLDDAGFRALFSGSPIKRIGRDRFVRNVLNAIGNSGDATLRPVAEALRADPSAVVAEAAAWAAERLAGTAG

SEQ ID NO: 80569 - protein, 363 aa, Roseomonas cervicalis
  misc_feature (1)..(363): tr|D5RRW0|D5RRW0_9PROT Epoxyqueuosine reductase OS=Rose omonas cervicalis ATCC 49957 OX=525371 GN=queG PE=3 SV= 1
MLLFLQKKKESEIDTPSTRAAAIRDEALRLGFDAVGFAPARLGPEVRARLDAFLAAGMQGEMGWLADRAEQRAHPQALWPEAVSVIALGMNYGPDHDPRDLQAQREVGAISVYARHKDYHDIVKKRLKALARWMVERWRGSELKVFVDTAPVAEKPLAQQAGLGWQGKHTNLVSRSHGSWLFLGEVYTTLDLAPSTPGQDHCGGCTRCLSACPTAAFPAPYRLDARRCISYLTIEHKGPIPEEFRAAIGNRIYGCDDCLAACPWNKFAQAAREPGLIPREDLTAPRLAELAALDDAGFRALFSGSPIKRIGRDRFLRNVLIAIGNSAEPALRPVAERLCADPSEIVAEAARWALARLPAAAST

SEQ ID NO: 80570 - protein, 342 aa, Roseomonas deserti
  misc_feature (1)..(342): tr|A0A1V2GX91|A0A1V2GX91_9PROT Epoxyqueuosine reductase OS=Roseomonas deserti OX=1817963 GN=queG PE=3 SV=1
MAAAIRDQALALGFDAVGFAPAHLGPEVRARLDAFLSAGMQGEMGWLADRVEQRAHPQSLWPAAVSVIALGMNYGPELDPLSVLEQRDRAAISVYARNRDYHDIVKKKLKALARWMAESWRGSDVKVFVDTAPVSEKPLGQAAGLGWQGKHSNLVSRDFGSWLFLGEVFTTLDLTPTGAEVDHCGRCSRCLSACPTQAFVGPYKLDARRCISYLTIEHKGPIPEEFRVAMGNRIYGCDDCLAVCPWNKFASVTAEPGLVARDDLTAPRLAELAVLDDAAFRALFSGSPIKRIGRDRFVRNVLNAIGNSGDASLLPVAARLMGDEAEVVADAARWAVSRLSAF

SEQ ID NO: 80571 - protein, 344 aa, Roseomonas gilardii
  misc_feature (1)..(344): tr|A0A1L7AK94|A0A1L7AK94_9PROT Epoxyqueuosine reductase OS=Roseomonas gilardii OX=257708 GN=queG PE=3 SV=1
MRDEALRLGFDAVGFARAHLGPEVRERLAAFLGAGMHGEMGWMAERAEQRSHPRALWPEAVSVISLGMNYGPEDDPLASLSRPDRGTISVYARHRDYHDVVKKRLKALARWMMARFAGGEAAMELKVFVDTAPVAEKPLAQQAGIGWQGKHSNLVSRQHGSWLFLGEVYTTLDLAPDAAETDHCGQCRRCLDACPTGAFLGPYRLDARRCVSYLTIEHKGPVPEALRPRLGNRIYGCDDCLAACPWNKFAHTATEPALIGREDLAAPRLAELAALDDATFRAHFSGSPIKRIGRDRFVRNVLYAIGNSADPALLPEARRLAGDPDPVVAEAAAWAVSRLENITP

SEQ ID NO: 80572 - protein, 364 aa, Roseomonas gilardii
  misc_feature (1)..(364): tr|A0A379NB24|A0A379NB24_9PROT Epoxyqueuosine reductase OS=Roseomonas gilardii subsp. rosea OX=243956 GN=queG PE=3 SV=1
MSATLATSRPGTAPACPPDAARDAIRDEALRLGFDAVGFARAHLGPEVRERLAAFLEAGMHGEMGWMAERAEQRSHPRALWPEAVSVISLGMNYGPEDDPLASLSRPDRGTISVYARHRDYHDVVKKRLKALARWMVERFAGTELKVFVDTAPVAEKPLAQQAGIGWQGKHSNLVSRAHGSWLFLGEVYTTLDLAPDAAETDHCGQCRRCLDACPTGAFLGPYRLDARRCVSYLTIEHKGPVPEALRPRLGNRIYGCDDCLAACPWNKFAHAATEPALIGREDLAAPRLAELAALDDATFRALFSGSPIKRIGRDRFVRNVLYAIGNSADPALLPEARRLAGDPDPVVAEAAAWAVSRLENITP

SEQ ID NO: 80573 - protein, 367 aa, Roseomonas mucosa
  misc_feature (1)..(367): tr|A0A379N403|A0A379N403_9PROT Epoxyqueuosine reductase OS=Roseomonas mucosa OX=207340 GN=queG PE=3 SV=1
MPVTLAPSRPAAAPPAPDAARDAIRNEALRLGFDAVGFARAHLGPEVRERLAAFLEAGMHGEMGWMAERAEQRSHPRALWPEAVSVVSLGMNYGPEDDPLASLSRPDRGTVSVYARHRDYHDVVKKRLKALARWMVDRFAGGESAMALKVFVDTAPVAEKPLAQQAGIGWQGKHSNLVSRAHGSWLFLGEVYTTLDLAPDRPETDHCGQCRRCLDACPTGAFLGPYRLDARRCVSYLTIEHKGPVPEALRPRLGNRIYGCDDCLAACPWNKFAHTATEPALIGREDLAAPRLAELAALDDATFRALFSGSPIKRIGRDRFVRNVLYAIGNSADPALLPEARRLAGDPDPVVAEAAAWAVSRLEDITP

SEQ ID NO: 80574 - protein, 367 aa, Roseomonas mucosa
  misc_feature (1)..(367): tr|A0A1S8D960|A0A1S8D960_9PROT Epoxyqueuosine reductase OS=Roseomonas mucosa OX=207340 GN=queG PE=3 SV=1
MPVTLAPSRPAAAPPAPDAARDAIRNEALRLGFDAVGFARAHLGPEVRERLAAFLEAGMHGEMGWMAERAEQRSHPRALWPEAVSVVSLGMNYGPEDDPLASLSLPDRGTVSVYARHRDYHDVVKKRLKALARWMVDRFAGGESAMALKVFVDTAPVAEKPLAQQAGIGWQGKHSNLVSRAHGSWLFLGEVYTTLDLAPDRPETDHCGQCRRCLDACPTGAFLGPYRLDARRCVSYLTIEHKGPVPEALRPRLGNRIYGCDDCLAACPWNKFAHTATEPALIGREDLAAPRLAELAALDDATFRALFSGSPIKRIGRDRFVRNVLYAIGNSADPALLPEARRLAGDPDPVVAEAAAWAVSRLEDITP

SEQ ID NO: 80575 - protein, 352 aa, Roseomonas nepalensis
  misc_feature (1)..(352): tr|A0A502FQW7|A0A502FQW7_9PROT Epoxyqueuosine reductase OS=Roseomonas nepalensis OX=1854500 GN=queG PE=3 SV=1
MTDPRAPIRDEALRLGFDAVGFARAELGPEVRDRLADFLAAGLHGEMGWMEGRAEQRAHPRALWPEALSVVSLGLSYAPADDPLASLAQPDRGTISVYARHRDYHDLVKSRLKALARWMVARFDAPGVKVFVDTAPVSEKPLAQQAGLGWQGKHTNLVSRAHGSWLFLGEIYTTLALEPDAPHADRCGRCTRCQVACPTDAFPAPYRLDARRCVSYLTIEHRGPIPEELRPRLGNRIYGCDDCLAVCPWNRFATPTAVPGLVAREDLVAPRLAELAALDDAAFRARFSGSPIKRVGRGRFVRNVLNAIGNSGDASLLPLARSLADDEDPVVADSARWAAARLASAPQVSSTA

SEQ ID NO: 80576 - protein, 357 aa, Roseomonas oryzae
  misc_feature (1)..(357): tr|A0A5B2TG91|A0A5B2TG91_9PROT Epoxyqueuosine reductase OS=Roseomonas oryzae OX=1608942 GN=queG PE=3 SV=1
MEAGPASPAPSPDAASAAIRDEALRLGFDAVGFAPAHLGPEVRQRLDAFLAAGMQGGMGWLADRAEQRAHPRALWPEAVSVIALGMNYGPEEDPLSILGQRDRAAISVYARNKDYHDIVKKRLKALARWMVDRWRGSELKVFVDTAPVAEKPLAQQAGLGWQGKHSNLVSRTHGSWLFLGEIYTTLDLAPSAPEVDHCGRCTRCLSACPTDAFVGPYRLDARRCVSYLTIEHKGPIPEEFRAAMGNRIYGCDDCLAVCPWNKFAQAAREPGLMPREDLNTPRLAALAALDDAAFRALFSGSPVKRIGRDRFVRNVLIAIGNSGDAGLRPVAKQLTADPDPVVAEAAQWAVRRLNTPA

SEQ ID NO: 80577 - protein, 382 aa, Roseomonas rhizosphaerae
  misc_feature (1)..(382): tr|A0A2C6Y645|A0A2C6Y645_9PROT Epoxyqueuosine reductase OS=Roseomonas rhizosphaerae OX=1335062 GN=queG PE=3 SV =1
MRRRASGCPPRTCRTTVGAGKKALPSAATTPEGRAAEIRDAALALGFDAVGFAPAHLGPEVRARLDAFLAAGMQGEMGWLAERVEQRAHPQGLWPEAVSVIALGMNYGPEDDPLALLERRDRGAISVYARNRDYHDIVKKRLKALARWMVERWKGSELKVFVDTAPVAEKPLAQAAGLGWQGKHSNLVSREHGSWLFLGEIYTTLDLAPSGAEVDHCGRCTRCLSACPTDAFTGPYRLDARRCISYLTIEHHGPIPHEFRAAMGNRIYGCDDCLAVCPWNKFAHAAREPGLMPREDLSAPRLAELARLDDAGFRALFSGSPIKRIGRDRFVRNVLNAIGNSGDPALLDVAAALRADPSPVVAEAAEWAARRMDEAARQQGSR

SEQ ID NO: 80578 - protein, 354 aa, Roseomonas rosea
  misc_feature (1)..(354): tr|A0A1M6LVD4|A0A1M6LVD4_9PROT Epoxyqueuosine reductase OS=Roseomonas rosea OX=198092 GN=queG PE=3 SV=1
MTEGARAAIRDEALRLGFDAVGFARADLGPEVRDRLADFLAQGLHGEMGWMETRAEQRAHPQALWPEALSVISLGLSYAPEDDPLSYLQMPDRGTISVYARHRDYHDLVKSRLKALARWMVARFAGSQAEAPGVKVFVDTAPVSEKPLAQQAGLGWQGKHTNLVSRSHGSWLFLGEVYTTLALEPDAPHADRCGSCTRCQTACPTDAFPAPYQLDPRRCVSYLTIEHRGPIPEDLRPRLGNRIYGCDDCLAVCPWNRFATPTTIPGLIAREDLVAPRLAELAELDDAAFRAHFSGSPIKRIGRNRFVRNVLNAIGNSGDPNLLPVALRLRDDEDPVVADSARWAASRLQAISTA

SEQ ID NO: 80579 - protein, 346 aa, Roseomonas sp.
  misc_feature (1)..(346): tr|A0A317F7L7|A0A317F7L7_9PROT Epoxyqueuosine reductase OS=Roseomonas sp. CQN31 OX=2184016 GN=queG PE=3 SV=1
MTASSPRELIRAQALALGFDAVGFARAHLAEEVRERLAAFLAEGHHGSMGWMQDRAAQRAHPRALWPEAVSVISLGVNYAPERDPLATLARRDSATISVYARNRDYHDVVKGRLKRLGQWMAHRFKGTELKVFVDTAPVMEKPLAQQAGLGWQGKHTNLVSRAHGSWLFLGEIFCTLELEPDGAESDHCGSCDACLRICPTDAFPAPYRLDARRCISYLTIEHRGPIPEGLRARMGNRIYGCDDCLAVCPWNKFAHAHEEPAFAPRAALQAPKLAELAALDDAGFRALFSGSPIKRIGRDRFVRNVLVAIGNSGDPSLKPAAQALCEDADPVVADCARWAAARLPA

SEQ ID NO: 80580 - protein, 371 aa, Roseomonas sp.
  misc_feature (1)..(371): tr|A0A3A9JMU5|A0A3A9JMU5_9PROT Epoxyqueuosine reductase OS=Roseomonas sp. Z24 OX=2382222 GN=queG PE=3 SV=1
MSSGRRARHRPACGFRRRTCPTTVAAADTTALIRAKALEIGFDAVGFAPAHLGPEVRARLDAFLAAGMQGEMGWLADRAEQRAHPQALWPEAASVIALGMNYGPEEDPLSILSQPDRGGISVYARHKDYHDIVKKRLKVLGRWMMDQWREQQIKVFVDTAPVAEKPLAQQAGLGWQGKHSNLVSREFGSWLFLGEIYTTLDLAPDAAEVDHCGKCTRCLRACPTDAFVGPYRLDARRCISYLTIEHKGPIPEEFRAKMGNRIYGCDDCLSVCPWNKFAQHGREPGLIAREDLTAPRLAELAVLDDTAFRALFSGSPVKRIGRDRFVRNVLIAIGNSGIPALRDVAAGLCEDPAEVVADAARWAVARLETRE

SEQ ID NO: 80581 - protein, 346 aa, Roseomonas stagni
  misc_feature (1)..(346): tr|A0A1I4C8G9|A0A1I4C8G9_9PROT Epoxyqueuosine reductase OS=Roseomonas stagni DSM 19981 OX=1123062 GN=queG PE=3 SV=1
MGGAEARDAIRARALALGFDAVGFARAALAAEARERLGAFLAAGHHGSMGWMEARADQRADPKALWPEAVSVISLGLNYGPDRDPMESLGWRDRGTISVYARNRDYHDLVKGRLKQLGGWIAGRFKGSGIKVFVDTAPVMEKPLAQQAGIGWQGKHTNLVSRDFGSWLFLGEVFTTLDLVPDEAERDHCGRCDACLRACPTEAFPAPYRLDARRCISYLTIEHHGPIPAELRARMGNRIYGCDDCLAVCPWNKFARAHEEPAFAPRAALTAPRLAELAALDDAGFRALFSASPIKRIGRNRFVRNVLVAIGNSGDPALRATAQGLCDDADESVAECARWASERLLG

SEQ ID NO: 80582 - protein, 349 aa, Roseovarius aestuarii
  misc_feature (1)..(349): tr|A0A1X7BTS7|A0A1X7BTS7_9RHOB Epoxyqueuosine reductase OS=Roseovarius aestuarii OX=475083 GN=queG PE=3 SV=1
MDELKQQLVAQAISEGFDLARICRPWDVPQVPERLVAFLDKGYHGQMSWLAERTHWRGAPEVLWPEAKSVIMLGESYAPGFDPLATLSRADVGTVSVYARNRDYHDTVKKRLKRLARWLIDQAGGEVKVFVDTAPVPEKPLGQAAGLGWQGKHTNLVSRDLGSWFFIGSIFTTLELETDSAETDHCGNCRACLDVCPTDAFPAPYQLDARRCISYLTIEHHGPVDEDLRRLMGNRIYGCDDCLAVCPWNKFAVAAREVKYHARDNLMAPRLVELAALDDAAFRAFFSGSPIKRIGRNRFVRNVLYAIGNSEDAGLLPVVQRLCDDPDATVADAARWAVQQLKSAANGLV

SEQ ID NO: 80583 - protein, 217 aa, Roseovarius albus
  misc_feature (1)..(217): tr|A0A1X6ZUI1|A0A1X6ZUI1_9RHOB Epoxyqueuosine reductase OS=Roseovarius albus OX=1247867 GN=queG_2 PE=4 SV=1
MATVSKTVTYAAAEAAAKLNGLGIMGALHEDGSTILLLGPGKEFWEIFKLSPELNDGAEDPFNRWSERIIGHMADTLGAKARFPFGGPPYEPFLRWAMDSGRAWQSPVGMLVHDEAGMMISFRGALHFSYEIDLPAPPAASPCETCETQPCVSACPVGALSDQHFYKIDACHAYLDTPAGQSCMSHGCIARRACPVSQSFDRNPAQSAIHMRYFHRS

SEQ ID NO: 80584 - protein, 351 aa, Roseovarius albus
  misc_feature (1)..(351): tr|A0A1X6YR39|A0A1X6YR39_9RHOB Epoxyqueuosine reductase OS=Roseovarius albus OX=1247867 GN=queG_1 PE=3 SV=1
MESLKQALVAQALSEGFDACRVCRPWDVPRVPERLAEFLKQGYQGQMGWLEERSHWRGDPSMLWPEARSVIVLGESYTPNEDPMATVDQPDIGTISVYARNKDYHDLVKKRLKRLARWLIAEGGGEVKVFVDTAPVPEKPLGQAAGLGWQGKHTNLVSRHLGSWFFIGSVFTTLEVPTDRSEVDHCGRCRACLDACPTDAFPAPYQLDARRCISYLTIEHKGPIDPKLRSLMGNRIYGCDDCLAACPWNKFAVEARELRYHAREDLIAPELADLVQLDDTAFRAKFSGSPIKRIGRDRFVRNVLYAIGNSGRADLRRFAQDLCEDPDETIADAARWAVLRLENDAKGMESP

SEQ ID NO: 80585 - protein, 349 aa, Roseovarius atlanticus
  misc_feature (1)..(349): tr|A0A0T5NXZ1|A0A0T5NXZ1_9RHOB Epoxyqueuosine reductase OS=Roseovarius atlanticus OX=1641875 GN=queG PE=3 SV=1
MDGLKQRLVAQALAEGFDLCRVCRPGDVPQVPARLAAFLDRGYHGQMNWLADRAHWRGAPDVLWPEARSVIMLGESYTPQSDPMATLDDPEVGTVSVYARNRDYHDVVKKRLKRLARWLIAEAGGEVKVFVDTAPVPEKPLGEAAGLGWQGKHTNLVSRDMGSWFFIGSVFTTLEIDTDPAEVDHCGSCRACLDVCPTDAFPAPYQLDARRCISYLTIEHKGPVDEDLRAKMGNRIYGCDDCLAVCPWNKFAVKATELRYHARDDLVAPPLAELAQLDDAGFRARFSGSPIKRIGRDRFVRNVLYAIGNSGRPALRPVAQDLCDDPDATVADAAHWAVKRLSDAANGRE

SEQ ID NO: 80586 - protein, 343 aa, Roseovarius azorensis
  misc_feature (1)..(343): tr|A0A1H7K3N8|A0A1H7K3N8_9RHOB Epoxyqueuosine reductase OS=Roseovarius azorensis OX=1287727 GN=queG PE=3 SV=1
MENGLKQRLVEQARAEGFDACRLCRPWDVGHVPERLAAFLGHGYHGQMGWLAERSHWRGAPQVLWPEARTVIVLGESYTPEDDPLAVLGQKDRGNISVYARGRDYHDTVKKRLKRLARWLIAEGGGEVKVFVDTAPVPEKPLGQAAGLGWQGKHTNLVSRDLGSWFFIGSVFTTLELETDPAESDHCGSCRACLDICPTDAFPAPYRLDARRCISYLTIEHDGPVDEALRPLLGNRIYGCDDCLAVCPWNKFAVAAREVKYHAREDLIAPRLAELAALDDAAFRARFSGSPIKRIGRNRFLRNVLYAIGNSGDMSLREVAQRHCGDPDATVADAARWAVGRLA

SEQ ID NO: 80587 - protein, 349 aa, Roseovarius gaetbuli
  misc_feature (1)..(349): tr|A0A1X7A5K4|A0A1X7A5K4_9RHOB Epoxyqueuosine reductase OS=Roseovarius gaetbuli OX=1356575 GN=queG PE=4 SV=1
MITLKQRLVQQAMFEGFDACKLCRPWDVSQVPERLVAFIDRGYHGQMSWLGERQAWRGNPAALWPEARTVIMLGESYTPEGDPMATLAQKDVGTVSVYARNKDYHDTVKKRLKRLARWLIAEGGGEVKVFVDTAPVPEKPLGQAAGLGWQGKHTNLVSRDLGSWFFIGSVFTTLDLESDPAEIDHCGSCRACLDVCPTDAFPAPYQLDARRCISYLTIEHKGPVDDDLRALMGNRIYGCDDCLAVCPWNKFAVEAREVKYHARDDLMAPKLADLAVLDDAAFREKFSVSPIKRIGRDRFVRNVLYAVGNSGDPTLSAVAGDLCNDPDPTVAEAARWAMKRLKDAANGLA

SEQ ID NO: 80588 - protein, 349 aa, Roseovarius halotolerans
  misc_feature (1)..(349): tr|A0A1X6Z4W1|A0A1X6Z4W1_9RHOB Epoxyqueuosine reductase OS=Roseovarius halotolerans OX=505353 GN=queG PE=3 SV= 1
MDMLKDKLIAQARAEGFDMARICRPWDVRHVPPRLQAFLDKGYHGQMGWLAERSHWRGDPSVLWPEARSVIVLGESYTPDSDPRATLAQVDVGTVSVYARNKDYHDIVKKRLKRLARWLIAEAGGEVKVFVDTAPVPEKPLGQAAGLGWQGKHTNLVSRDLGSWFFIGSVFTTLDLEADMAETDHCGSCRACLDVCPTDAFPAPYQLDARRCISYLTIEHKGPVDPELRPLMGNRIYGCDDCLAVCPWNKFAQEASEVRYHARDDLEAPKLADLAALDDAGFRAMFSGSPIKRIGRDRFVRNVLYAIGNSGDPALRDVAQGLRDDPDETVADAARWAAMRLAHDANGMD

SEQ ID NO: 80589 - protein, 352 aa, Roseovarius indicus
  misc_feature (1)..(352): tr|A0A0T5PE82|A0A0T5PE82_9RHOB Epoxyqueuosine reductase OS=Roseovarius indicus OX=540747 GN=queG PE=3 SV=1
MKNGLKQRLVSQALAEGFDACRVCRPWDVPQVPGRLAEFLDKGRHGQMGWLAERSHWRGAPQVLWPEARSVIVLGESYTPDVNPMATLGQPEVGTVSVYARNKDYHDTVKKRLKRLARWLIAEGGGDVKVFVDTAPVPEKPLGQAAGLGWQGKHTNLLSRELGNWFFIGSVFTTLELETDPAESDHCGSCRACLDVCPTEAFPAPYQLDARRCISYLTIEHKGPVDEELRAKMGNRIYGCDDCLAVCPWNKFAVEAREVRYHAREDLTAPRLAELAVLDDAAFRERFSGSPIKRIGRDRFVRNVLYAIGNSGVPGLRPVAQDLCEDPDATVADAARWAVGRLADAANGMDRG

SEQ ID NO: 80590 - protein, 349 aa, Roseovarius litoreus
  misc_feature (1)..(349): tr|A0A1M7B6J0|A0A1M7B6J0_9RHOB Epoxyqueuosine reductase OS=Roseovarius litoreus OX=1155722 GN=queG PE=3 SV=1
MPGLKDRLVARALEEGFDLARLCRPWDVGHVPERLKAFLDKGYHGQMGWLAERAEWRGDPSVLWPEARAIVMLGESYTPEEDPLACLGQGDVGAVSVYARNRDYHDLVKKRLKRLARWLIAEAGGEVKVFVDTAPVPEKALGQAAGLGWQGKHTNLVSRDLGSWFFIGSIFTTLDLEPDPAEIDHCGSCRACLDICPTDAFPAAYQLDARRCISYLTIEHKGPVDLGLRGLMGNRIYGCDDCLAVCPWNKFAREAREVRYHARDDLKAPKLAELAGLDDAAFRARFSGSPIKRIGRDRFVRNVLYAIGNSGMPGLRPVAQSLCEDPDPTVADAARWAVLRLDGDANGMA

SEQ ID NO: 80591 - protein, 349 aa, Roseovarius lutimaris
  misc_feature (1)..(349): tr|A0A1I4ZXX2|A0A1I4ZXX2_9RHOB Epoxyqueuosine reductase OS=Roseovarius lutimaris OX=1005928 GN=queG PE=3 SV=1
MITLKQRLVQQAMSEGFDACKLCRPWDVPQVPGRLKAFVDKGYHGQMDWLAERQNWRGNPAALWPEARSVIMLAESYTPKDDPMAMLAERDIGTVSVYARNKDYHDTVKKRLKRLARWLIGEGGGEVKVFVDTAPVPEKPLGQAAGLGWQGKHTNLVSRDLGSWFFIGSVFTTLDLEPDPAEIDHCGSCRACLDICPTDAFPAPHQLDARRCISYLTIEHKGPVDEELRARMGNRIYGCDDCLAVCPWNKFAVEAREVKYHARDDLKAPKLADLAMLDDTAFRARFSGSPIKRIGRDRFVRNVLYAIGNSGEPSLWSVAQGLCEDPDPTVADAARWAAKRLENAANRLA

SEQ ID NO: 80592 - protein, 349 aa, Roseovarius marisflavi
  misc_feature (1)..(349): tr|A0A1M6XUA0|A0A1M6XUA0_9RHOB Epoxyqueuosine reductase OS=Roseovarius marisflavi OX=1054996 GN=queG PE=3 SV=1
MATLKQRLVQQAMSEGFDACKLCRPWDVPLVPERLAAFIDRGYHGQMDWLAERQTWRANPAALWPEARTVIMLAESYTPKDDPMATLGQRDVGTVSVYAQNKDYHDTVKKRLKRLARWLIAEAGGEVKVFVDTAPVPEKPLGQASGLGWQGKHTNLVSRDLGSWFFIGSVFTTLDLETDPAEVDHCGSCRACLDICPTDAFPAPHQLDARRCISYLTIEHKGPVDEDLRTRMGNRIYGCDDCLAVCPWNKFAVEAREVKYHARDDLKAPKLADLAMLDDAAFREKFSGSPIKRIGRDRFVRNVLYAVGNSGDPTLSAVAGELCNDPDPTVAEAARWAVKRLRDAANGLA

SEQ ID NO: 80593 - protein, 350 aa, Roseovarius mucosus
  misc_feature (1)..(350): tr|A0A1V0RPC9|A0A1V0RPC9_9RHOB Epoxyqueuosine reductase OS=Roseovarius mucosus OX=215743 GN=queG PE=3 SV=1
MNIGLKQRLIDQALAEGFDACRMCRPWDVGHVPERLAAFLGQGYHGQMGWLAERSEWRGAPEALWPEARTVIMLGESYTPEEDPLAGLKRPECGNISVYARNRDYHDTVKKRLKRLARWLIDAGGGEVKVFVDTAPVPEKPLGQAAGLGWQGKHTNLVSRALGSWFFLGSVFTTLDLETDPAEIDHCGSCRACLDICPTDAFPAPYQLDARRCISYLTIEHKGPVDEALRPGLGNRIYGCDDCLAVCPWNKFAVTAREVKYHARDDLVAPRLAELAMLDDTAFRARFSGSPIKRIGRDRFLRNVLYAIGNSADPSLRAVAQSQCEDADAAVADAARWAVKRLDRDANGLA

SEQ ID NO: 80594 - protein, 350 aa, Roseovarius mucosus
  misc_feature (1)..(350): tr|A0A0A0HNX1|A0A0A0HNX1_9RHOB Epoxyqueuosine reductase OS=Roseovarius mucosus DSM 17069 OX=1288298 GN=queG PE =3 SV=1
MTIGLKQRLIAQAKAEGFDACRLCRPWDVGHVPERLAAFLGRGYHGQMGWLAERSAWRGAPDLLWPEARTVIMLGESYTPEEDPLAGLKRPDCGNISVYARNRDYHDTVKKRLKRLARWLIEAGGGEVKVFVDTAPVPEKPLGQAAGLGWQGKHTNLVSRNLGSWFFIGSVFTTLEIETDPAEVDHCGSCRACLDVCPTRAFPAPYQLDARRCISYLTIEHKGPVDEELRPGLGNRIYGCDDCLAVCPWNKFAVAAREVKYHARDDLLAPRLADLAALDDTAFRERFSGSPIKRIGRDRFLRNVLYAIGNSGDGSLRRVAQGHCDDPDAAVADAARWAVLRLDRDANGLE

SEQ ID NO: 80595 - protein, 353 aa, Roseovarius nanhaiticus
  misc_feature (1)..(353): tr|A0A1N7EG73|A0A1N7EG73_9RHOB Epoxyqueuosine reductase OS=Roseovarius nanhaiticus OX=573024 GN=queG PE=3 SV=1
MDDIKSRLIAHAQAEGFDLARICRPGDVPQVPARLSEFLDKGRHGQMGWLAERSHWRADPTALWPEARSVIMLGESYTPEHDPLEVLERPALGAISVYAQNKDYHDLVKKRLKRVARWLIAETGQDTEVKVFVDTAPVPEKPLGEAAGLGWQGKHTNLVSRDLGSWFFIGSIFTTLEIETDTGESDHCGSCRACLDICPTAAFPAPYQLDARRCISYLTIEHHGPVDPDLRALMGNRIYGCDDCLAVCPWNKFAQEARETRYHARDDLRAPPLAELAQLDDAAFRTKFSGSPIKRIGRNRFLRNVLYAIGNSGQPDLAEAARPHVNDPDETVVDAARWALERLQDAAKGMEQP

SEQ ID NO: 80596 - protein, 304 aa, Roseovarius nubinhibens
  misc_feature (1)..(304): tr|A0A348WA59|A0A348WA59_9RHOB tRNA epoxyqueuosine(34) reductase QueG (Fragment) OS=Roseovarius nubinhibens OX =314263 GN=queG PE=4 SV=1
MDALKHKLIAQAEAEGFDLLRVCRPGDVPQVPARLAEFLAEGRHGQMGWLAERSHWRGDPAALWPEARSVIMLGESYTPEEDPTATLEQPEIGTVSVYARNRDYHDLVKKRLKRLARWLIAEAEKAGVETPQVKVFVDTAPVPEKPLGEAAGLGWQGKHTNLVSRDLGNWFFIGSVFTTLEIDPDRAEKDHCGSCRACLDACPTDAFPAPYQLDARRCISYLTIEHHGPVDEELRPLLGNRIYGCDDCLAACPWNKFAVTAREARYHARADLIAPPLADLAALDDAGFRARFSGSPIKRIGRDR

SEQ ID NO: 80597 - protein, 358 aa, Roseovarius nubinhibens
  misc_feature (1)..(358): tr|A3SLF3|A3SLF3_ROSNI Epoxyqueuosine reductase OS=Rose ovarius nubinhibens (strain ATCC BAA-591 / DSM 15170 / ISM) OX=89187 GN=queG PE=3 SV=1
MDALKHKLIAQAEAEGFDLLRVCRPGDVPQVPARLAEFLAEGRHGQMGWLAERSHWRGDPAALWPEARSVIMLGESYTPEEDPTATLEQPEIGTVSVYARNRDYHDLLKKRLKRLARWLIAEAEKAGVETPQVKVFVDTAPVPEKPLGEAAGLGWQGKHTNLVSRDLGNWFFIGSVFTTLEIDPDTAEKDHCGSCRACLDACPTDAFPAPYQLDARRCISYLTIEHHGPVDEELRPLLGNRIYGCDDCLAACPWNKFAVTAREARYHARADLIAPPLADLAALDDAGFRARFSGSPIKRIGRDRFLRNVLYAIGNSARPDLLPAARAHLDDPDPTVADAARWSVARLEIAANRLDSDA

SEQ ID NO: 80598 - protein, 349 aa, Roseovarius pacificus
  misc_feature (1)..(349): tr|A0A1M7DVM4|A0A1M7DVM4_9RHOB Epoxyqueuosine reductase OS=Roseovarius pacificus OX=337701 GN=queG PE=3 SV=1
MGSLKDKLVARAIEEGFDLARVCRPWDVGHVPDRLAAFLGKAYHGQMGWLAERSHWRGDPHALWPEARSILMLGESYTPADDPTATLAQGDVGTVSVYARNRDYHDVLKKRLKRLARWLIAEAGGEVKVFVDTAPVPEKPLGQAAGLGWQGKHTNLVSRDLGSWFFIGSIFTTLELETDPAEIDHCGSCRACLDACPTDAFPAPYQLDARRCISYLTIEHKGPVDEELRARMGNRIYGCDDCLAACPWNKFAVAAREVKYHAREDLIAPKLAELAVLDDAGFRARFSGSPIKRIGRDRFVRNVLYAIGNSGDPALSDVAQGLCEDANETVADAARWAVLRLRHAANGMD

SEQ ID NO: 80599 - protein, 358 aa, Roseovarius sp.
  misc_feature (1)..(358): tr|A0A2E2S3Z3|A0A2E2S3Z3_9RHOB Epoxyqueuosine reductase OS=Roseovarius sp. OX=1486281 GN=queG PE=3 SV=1
MDALKHKLIAQAEAEGFDLLRVCRPGDVPQVPARLAEFLAEGRHGQMGWLAERSHWRGDPAALWPEARSVIMLGESYTPEEDPTATLEQPEIGTVSVYARNRDYHDLVKKRLKRLARWLIAEAEKSGGETPQVKVFVDTAPVPEKPLGEAAGLGWQGKHTNLVSRDLGNWFFIGSVFTTLEIDPDLAEKDHCGSCRACLDACPTDAFPAPYQLDARRCISYLTIEHHGPVDEALRPLLGNRIYGCDDCLAACPWNKFAVTAREARYHARADLIAPPLDELAALDDAGFRARFSGSPIKRIGRDRFLRNVLYAIGNSARPDLLPAARAHLDDPDPTVADAARWSVARLEIAANRLDSDA

SEQ ID NO: 80600 - protein, 350 aa, Roseovarius sp.
  misc_feature (1)..(350): tr|A6E4R6|A6E4R6_9RHOB Epoxyqueuosine reductase OS=Rose ovarius sp. TM1035 OX=391613 GN=queG PE=3 SV=1
MNVGLKQRLIDQALAEGFDACRMCRPWDVGHVPERLAAFLGQGYHGQMGWLAERSEWRGAPEALWPEARTVIMLGESYTPEEDPLAGLKRSDCGNISVYARNRDYHDTVKKRLKRLARWLIDAGGGEVKVFVDTAPVPEKPLGQAAGLGWQGKHTNLVSRELGSWFFLGSVFTTLDLETDPAEIDHCGSCRACLDICPTDAFPAPYQLDARRCISYLTIEHKGPVDEALRPGLGNRIYGCDDCLAVCPWNKFAVAAREVKYHARDDLVAPRLAELAMLDDTAFRARFSGSPIKRIGRDRFLRNVLYAIGNSADPSLRAVAQSQCEDADAAVADAARWAVKRLDRDANGLA

SEQ ID NO: 80601 - protein, 350 aa, Roseovarius tolerans
  misc_feature (1)..(350): tr|A0A0L6CYZ5|A0A0L6CYZ5_9RHOB Epoxyqueuosine reductase OS=Roseovarius tolerans OX=74031 GN=queG PE=3 SV=1
MKNGLKQRLVAQARAEGFDACRLCRPWDVGHVPERLAAFLEQGYHGQMGWLEERAHWRGAPEVLWPEARTVIVLGESYTPEEDPLAGLAQRDRGNVSVYARGRDYHDTVKKRLKRLARWLISEAGGEVKVFVDTAPVPEKPLGEAAGLGWQGKHTNLVSRDLGSWFFIGSVFTTLDLETDPAEIDHCGSCRACLDICPTDAFPAPYQLDARRCISYLTIEHKGPVDEALRPLLGNRIYGCDDCLAVCPWNKFAVEAREVKYHARDDLVAPKLADLAALDDAGFRARFSGSPIKRIGRDRFLRNVLYAIGNSGDASLCAVAQGHCEDADEAVADAARWAVKRLDRDANGLE

SEQ ID NO: 80602 - protein, 350 aa, Roseovarius tolerans
  misc_feature (1)..(350): tr|A0A1H7WJU8|A0A1H7WJU8_9RHOB Epoxyqueuosine reductase OS=Roseovarius tolerans OX=74031 GN=queG PE=3 SV=1
MKNGLKQRLVAQARAEGFDACRLCRPWDVGHVPERLAAFLQKGYHGQMGWLEERAHWRGAPEVLWPEARTVIVLGESYTPEEDPLAGLAQRDRGNVSVYARGRDYHDTVKKRLKRLARWLISEAGGEVKVFVDTAPVPEKPLGEAAGLGWQGKHTNLVSRDLGSWFFIGSVFTTLNLETDPAEIDHCGSCRACLDICPTNAFPAPYQLDARRCISYLTIEHKGPVDEALRPLLGNRIYGCDDCLAVCPWNKFAVEAREVKYHARDDLVAPELAELAALDDAGFRARFSGSPIKRIGRDRFLRNVLYAIGNSGDASLCAVAQGHCEDPDEAVADAARWAVKRLDRDANGLE

SEQ ID NO: 80603 - protein, 385 aa, Rouxiella badensis
  misc_feature (1)..(385): tr|A0A1X0WEB3|A0A1X0WEB3_9GAMM Epoxyqueuosine reductase OS=Rouxiella badensis OX=1646377 GN=queG PE=3 SV=1
MTHLLDLDQLAQHIKQWGQSLGFQQVGICDTDLSAEEPKLQEWLDKQYHGEMDWMARHGMMRARPHELLPGTLRVISVRMNYLPAKAAFAKTLNNPMLGYVSRYALGRDYHKVLRQRLKKLGDMIQTYCTEAQPDSALSFRPFVDSAPIMERPLAEKAGLGWVGKHSLILNRESGSWFFLGELLIDLPLPVDKPQEEQCGRCVACITTCPTGAIVAPYQVDARRCISYLTIELEGAIPEEFRPLMGNRIYGCDDCQLICPWNRYSQLTDEDDFSPRAALHAPQLVELFNWKEEKFLRITEGSPIRRIGYLRWLRNISVALGNAPYDESIVLALESRKGENSMLDEHIEWAIAQQLTRRSEHQIEVQSSQKKRLIRAVEKGLPRDA

SEQ ID NO: 80604 - protein, 385 aa, Rouxiella silvae
  misc_feature (1)..(385): tr|A0A1X0VYM0|A0A1X0VYM0_9GAMM Epoxyqueuosine reductase OS=Rouxiella silvae OX=1646373 GN=queG PE=3 SV=1
MTHLLDLEQLAQHIKQWGQSLGFQQVGICDTDLSAEEPKLQAWLDKQYHGEMEWMARHGMLRARPHELLPGTLRVISVRMNYLPAKAAFAKTLNNPTLGYVSRYALGRDYHKVLRQRLKKLGDMIQTFCTESQPDLALSFRPFVDSAPIMERPLAEKAGLGWVGKHSLILNRESGSWFFLGELLIDLPLPVDKPQEEQCGRCVACITICPTGAIVAPYQVDARRCISYLTIELEGAIPEEFRPLMGNRIYGCDDCQLICPWNRYSQLTDEDDFSPRAALHAPELIALFNWKEEKFLRITEGSPIRRIGHLRWLRNISVALGNAPYDENIVLTLQSRKGENSMLDEHIEWAIAQQLARRSEHQVEVQSSQKKRLIRAVEKGLPRDA

SEQ ID NO: 80605 - protein, 355 aa, Rubellimicrobium mesophilum
  misc_feature (1)..(355): tr|A0A017HJJ4|A0A017HJJ4_9RHOB Epoxyqueuosine reductase OS=Rubellimicrobium mesophilum DSM 19309 OX=442562 GN= queG PE=3 SV=1
MDARPLKERLAEEARAAGFAAMGICRPDAIPEAMGRLQAFLAEERHGQMEWMADRAHWRGDPTALWPEARSVIMLADSYAPEHDPLDVLGHPDRAAVSVYAQGRDYHDSVKPRLKRVLRWLLEQEPGAQGKVFVDTAPVMEKPLAQAAGLGWQGKHTNLLGRDFGNWVFLGAIFTTVDLPPDAPEVSHCGSCRRCLDACPTGAFPAPYRLDATRCISYLTIEHKGPIPEELRGKLGNRIYGCDDCLAACPWNKFAVQASELRYLRQDGPPRLAELATLDDATFRARFPGSPVKRIGIARFLRNVLYAIGNSGDPALLPAAQGHLNAEDPTVAEAAAWACSRLARADVGGRDMPTP

SEQ ID NO: 80606 - protein, 367 aa, Rubellimicrobium roseum
  misc_feature (1)..(367): tr|A0A5C4NIE1|A0A5C4NIE1_9RHOB Epoxyqueuosine reductase OS=Rubellimicrobium roseum OX=687525 GN=queG PE=3 SV=1
MRTSTSDRGRGASPPPAHLHEVDGPALKARLAEEARAAGFAALGICRPDAIPEAMGRLRTFLAEGRHGQLDWMADRAHWRGDPAALWPEARSVVMLADSYAPAQDPLDVLRHPDRGAVSVYAQGKDYHDTVKPRLKRLLRWLLEQVPEAQGKVFVDTAPVMEKPLAQAAGLGWQGKHTNLLGRDFGNWVFLGAIFTTVDLPPDAPEVSHCGSCRRCLDACPTDAFPAPYQLDARRCISYLTIEHRGPVPEEFRPALGNRIYGCDDCLAVCPWNKFAVAASELRYLRQDEAPALADLAALDDATFRARFAGSPVKRIGLARFLRNVLYAIGNSGDPALLPSAQAHLEAGDPAVADAAAWAVSRLREGT

SEQ ID NO: 80607 - protein, 363 aa, Rubellimicrobium sp.
  misc_feature (1)..(363): tr|A0A5C4MX98|A0A5C4MX98_9RHOB Epoxyqueuosine reductase OS=Rubellimicrobium sp. YIM 131921 OX=2585369 GN=queG PE=3 SV=1
MRTSTSERPDGAALKARLAEEARAAGFAAMGVCRPDAIPEAMGRLRTFLDEGRHGQLDWMADRAHWRGDPSALWPEARSVVMLVDSYAPEHDPLEVLAHPDRGGVSVYAQGKDYHDTVKPRLKRVLRWMLEQAPGEQGKVFVDTAPVMEKPLAQAAGLGWQGKHTNLLGRDFGNWVFLGAIFTTLDLPPDAPEVSHCGSCRRCLDACPTAAFPAPYQLDARRCISYLTIEHKGPVPEEFRAALGNRIYGCDDCLAVCPWNKFAVAASELRYLRDEEAPRLADLAALDDPAFRARFAGSPVKRIGLARFLRNVLYAIGNSGDPALIPSARAHLGAEDPAVAEAAAWACSRLARADVEGRAATVR

SEQ ID NO: 80608 - protein, 351 aa, Rubellimicrobium thermophilum
  misc_feature (1)..(351): tr|S9QNZ5|S9QNZ5_9RHOB Epoxyqueuosine reductase OS=Rube llimicrobium thermophilum DSM 16684 OX=1123069 GN=queG PE=3 SV=1
MRISTSEAEALKAGLRAEAEAAGFAAMGVCRPDAIPQAGERLRVFLEAGMHGTMGWMADRASWRASPAALWPAARSVVMLADSYAPRTDPLAVLARRDHAAISVYAKGRDYHDSVKPRLKRLLRWLLAQAPGAEGKVFVDTAPVMEKPLAQAAGLGWQGKHTNLLGRGFGNWVFLGAIMTTLELPPDRPERDHCGSCTRCLDSCPTRAFPAPFRLDARRCLSYLTIEHRGAWPEEFRLATGNRIFGCDDCLAVCPWNKFAVAARELRYRPDAPAPPLAELAALDEAGFRARFAGTPVKRIGHARFLRNVLYAIGNSGDPALIPAAAAHRDAADPVVADAAAWALSRLHKAM

SEQ ID NO: 80609 - protein, 326 aa, Rubidibacter lacunae
  misc_feature (1)..(326): tr|U5DH20|U5DH20_9CHRO Epoxyqueuosine reductase OS=Rubi dibacter lacunae KORDI 51-2 OX=582515 GN=queG PE=3 SV=1
MLVDATAVKAKARALGFHLVGIAAISSDNDGAAEHLQAWLALGYHADMAWMASPKRLDARACLPGARSVICVALNYYTPHAHPEGRDRAKISRYGWGRDYHRELHKRLKALALWLEACGHDIHTRYYADTGPVQDKVWAQRAGLGWIAKNGNLISRDFGSWIFLGEVLTDLELTPDTPHAQHCGTCTRCLDACPTDAIVAPFVVDANRCIAYHTIENRAEELPDAIAANLNGWVAGCDICQDVCPWNQRFARPTDIAAFAPYPDNRAPSLDDLATLDDTEWNRRFPASALRRIKPAMWRRNARANLRSIQRRAERAARPYSPPADA

SEQ ID NO: 80610 - protein, 376 aa, Rubinisphaera brasiliensis
  misc_feature (1)..(376): tr|F0SP23|F0SP23_RUBBR 4Fe-4S ferredoxin-type domain-co ntaining protein OS=Rubinisphaera brasiliensis (strain ATCC 49424 / DSM 5305 / JCM 21570 / NBRC 103401 / IFAM 1448) OX=756272 GN=Plabr_3529 PE=4 SV=1
MELAEAVRRRAIEIGFDLCGITSALTPTTLPQFHDWLDAGHAGEMGYLERRRDAYDHPERVLPSVRSVIMCGVCYDPERSHPVVENETASPVGRIARYARIAGDYHDSVKKMLRELASVLHELQPGCQSRAVVDTAPLLERDAARQAGLGWFGKNTMLINKGRGSYFFLGGVLTSVELSPDEPHKTDHCGTCTRCLEVCPTDALIEPHQLDARRCISYLTIELRERPIPRELRSGMQDWMFGCDLCQEVCPWNRHAPQPAAEKFQTQWSPSHAAEMLMLSEEEFREQYRKTPLSRPGRVGMARNAAIVLGNSGDAQFVPVLEQATWDSSPLVRGAAIWALGELVDAQSSRRLVELRQTETDSGVVEELDAIFASRI

SEQ ID NO: 80611 - protein, 385 aa, Rubinisphaera sp.
  misc_feature (1)..(385): tr|A0A2E9VJC7|A0A2E9VJC7_9PLAN tRNA epoxyqueuosine(34) reductase QueG OS=Rubinisphaera sp. OX=2024857 GN=queG PE=4 SV=1
MSESLTEQIKKSARELGFELVGIAPAISPVSLPHFESWVEAGYAGDMKYIPGRREAYQHPRHILPVVRSVIMTAMCYDPQRNVKQNESRIGQIARYARGEKDYHDVMKVSLKTLAQQIHEEVPDSKTRAVVDTTPLLERDFAQQAGLGWFGKNTMLLNKSIGSYFFLGALLTDVELTPDEPHNTSHCGTCTICLDACPTDAFVQPYILNATRCISYYTIEMRDQSIPEEIRPGLKDWMFGCDICQEVCPWNRKAPPTREEKFESQTDLPDAIEFLTMSPETFKAKFRGTPLERTGRNALARNAAIVIGNSGSRATVQLLIEALQDESPLVREAVVWALGKLGNAKIKADLQSQLSDEKEELVVNQLKTSISQLDRNSYEIDSEAV

SEQ ID NO: 80612 - protein, 337 aa, Rubricoccus marinus
  misc_feature (1)..(337): tr|A0A259U1M9|A0A259U1M9_9BACT Epoxyqueuosine reductase OS=Rubricoccus marinus OX=716817 GN=queG PE=3 SV=1
MTASGVRSCLSREVKAQALRLGFDLVGIARAERLDAEARRLEAWLDAGRHGGEAGAMPWMDQNFDKRIDPRELVPGAKSVVSVAHTYLAHAPEPLADADALARGVGKVSRYAWGDDYHDVLKEKLAELFDWLDTASGGAGGRAFVDSAPVMDKAWAQRAGIGWIGKNTNLLTRSHGSFVFLGELIVDVDLEPDDPFAADHCGSCTRCLDACPTDALDQPYQIDATRCISYHTIEQRGAAWPPQAQELAKEFGPWIFGCDICQDVCPWNKFARETRDARFQARPEVAETPLATWQEMDLEAFRQRLRKSPLKRTTPEGMARNAANAEANARRWREQNG

SEQ ID NO: 80613 - protein, 372 aa, Rubrimonas cliftonensis
  misc_feature (1)..(372): tr|A0A1H4C5P2|A0A1H4C5P2_9RHOB Epoxyqueuosine reductase OS=Rubrimonas cliftonensis OX=89524 GN=queG PE=3 SV=1
MAAPDLRAALEAEARSLGFAGFGVCAPEATRPAGEALRAWVGAGLHGEMAWMAERLAWRADASALWPEARSVVMLAEPYPPGDDPMVALVMRDRAAISVYAQGADYHDVVKRKLKRLGRWLIDRAGGDIKVFVDTAPVMEKPLAEAAGLGWRGRHTNLVSRELGSWFFLGALFTTLELARDAPHADRCGSCRACLDICPTAAFPASGVLDARRCVSYLTIELKGPIPREMRPLIGNRIYGCDDCLAVCPWNKFAGRAREIAYAARPELARPRLADLAALDDAAFREVFAGSPVKRIGRDRFLRNVLVAIGNSSDPDLAESACARLADASALVRGAAVWALWRLWPAARLAALRADDPDPDVAAEWAAALGPS

SEQ ID NO: 80614 - protein, 373 aa, Rubripirellula obstinata
  misc_feature (1)..(373): tr|A0A5B1CI11|A0A5B1CI11_9PLAN Epoxyqueuosine reductase OS=Rubripirellula obstinata OX=406547 GN=queG PE=4 SV= 1
MDPNDAASLIREAVYQEGFDLCGIAPAVTSSGYHQLVQWIDAGYAAGMNYFAERRDAYQHPSGVLAGAKSIVVMSFPYPSESENSVSAGHGKIARYAWPGDDYHDVIHPKLKRICRLIKSSFPESNCRGVVDTAPIMEREIAELAGLGWRGKNTLLLNKKRGSYFLLACVLVDIELPADQPHPSDHCGTCTACLDACPTDAFPKPGVLDASRCISYLTIEHRDSIDVELRPKMADWFFGCDVCQEVCPWNRKPSRSPMVKANELATIDLHELFQLDDEQFRERFRKTPLWRTRRRGVLRNAAIVLGNQGSSESLSHLKIGLADEDPLVRGTSAWAIGKIGGDQASSILTTRLSIESDAEVIQEIQQASSALGR

SEQ ID NO: 80615 - protein, 342 aa, Rubritalea profundi
  misc_feature (1)..(342): tr|A0A2S7U2R3|A0A2S7U2R3_9BACT tRNA epoxyqueuosine(34) reductase QueG OS=Rubritalea profundi OX=1658618 GN=BSZ 32_12775 PE=4 SV=1
MELTPETTKNNIQLIANRLGFSDCRIARVKRATHADRYLDWVEQGCAGEMSWLERNKDKRVHPGEVLEGAQSIITLALNYFPGSQAADSDYKIARYAWNDDYHDIIEGKLKDFDLALSDMGGKQRYYVDTGPILERDFANDAGLGWNGKSTVQIHKGFGTWFFICELISTLKIEADQPSADHCGKCTRCIDHCPTQAITGPREMDARRCISYLTIEHAGSIPFELRPMMGDRIYGCDVCLEVCPWNRFAKLSRETKLHARSEIFDHKLRDFLNMDIESFRKTFAKSPIKRIKHNRFIRNVCVAIGNTGTTEDIQLLEPFATGDDPLIAEHAQWAIDEIQRRS

SEQ ID NO: 80616 - protein, 346 aa, Rubritalea squalenifaciens
  misc_feature (1)..(346): tr|A0A1M6RI17|A0A1M6RI17_9BACT Epoxyqueuosine reductase OS=Rubritalea squalenifaciens DSM 18772 OX=1123071 GN= queG PE=3 SV=1
MQPNADILKSNIQHIAKQLGFSDCRIAAAKTATHADDYLQWVEDGCAGDMAWLERNQHRRVDPREVLPGAKSIVTLALNYYPGDQPAEHDFKIARYSWNEDYHDIIDEKLRDLNLAMEEMGGQQRYYVDTGPVLERDFATDAGLGWNGKSTVQIHRKFGTWFFLCELITTLDLTPDSPFGDHCGKCTRCIDNCPTGAITGPHRVDARKCISYLTIEHLGSIPQDLRPLMGNRIYGCDVCLEVCPWNRFAQISRHTQLHAKQEIFQHSLRDLVQIDEDDFRRIFAKSPIKRIKHPRFIRNVCIALGNTGTEADIDLLRPLAQGDNELVSEHATWAIEQIKKRTQAKA

SEQ ID NO: 80617 - protein, 324 aa, Rubrivirga marina
  misc_feature (1)..(324): tr|A0A271IXZ5|A0A271IXZ5_9BACT Epoxyqueuosine reductase OS=Rubrivirga marina OX=1196024 GN=queG PE=3 SV=1
MPGYDPARLARDLKAEARRIGFDGVGIARAEKLDTEARRLEAWLEAGRHGGSDGAMTWMERNFDKRVDPRELVPGAESVVSVFVSYFQPGRRPGGGNAEAAKISRYAWGDDYHDVLKEKLAELFDWLDRRTGGAGGRAFVDSAPVLDKAWAQRAGLGWQGKNTNLLTRTHGSFVFLGELIVDVPLEPDEPFRADHCGSCTRCLDACPTGALDAPYQIDGSRCISYWTIEHRGPDLPEDLAAEFGTWAFGCDICQDVCPWTKFSQPTRDARFLPRPGVTNTPAREWAEIDVEAWRGRFRRSPVKRTKVEGFLRNMENAALNADRA

SEQ ID NO: 80618 - protein, 318 aa, Rubrivirga sp.
  misc_feature (1)..(318): tr|A0A271J7I9|A0A271J7I9_9BACT Epoxyqueuosine reductase OS=Rubrivirga sp. SAORIC476 OX=1961794 GN=queG PE=3 SV =1
MYDSARLARDLKAQARRIGFDGVGIARAERLDVEARRLEAWLTAGRHGGSDGAMTWMERNVEKRVDPRELVPGAESVVSVFVSYVQPGRRPGEDGGAKISRYAWGDDYHDVLKEKLAELFDWLDTRTGGAGGRAFVDSAPVMDKAWAQRAGLGWQGKNTNLLTTTHGSFVFLGELIVDVPLEPDVPFQADHCGSCTRCLDACPTGALDAPYQIDATRCISYWTIEHRGPDLPEIASEFGAWAFGCDICQDVCPWTKFSQPTRDARFLPRPGVTDTPAREWAEIDIEAWRERFRRSPVKRVKYEGFLRNMENAARNATS

SEQ ID NO: 80619 - protein, 357 aa, Rubrivivax benzoatilyticus
  misc_feature (1)..(357): tr|F3LRY9|F3LRY9_9BURK Iron-sulfur cluster-binding prot ein OS=Rubrivivax benzoatilyticus JA2 = ATCC BAA-35 OX= 987059 GN=RBXJA2T_12302 PE=4 SV=1
MADIDLASAEPGLLAWLEAGFHGSMAYMAAHGLKRARPAELVPGTVRVITARMDYLPRDLAQDWREAEQRRLAAPGEAVISVYARGRDYHKVLRTRLQRLADRLAAEIGPFGHRVFVDSAPVLEVELASRSGIGWRGKHTLTLSREAGSTFFLGEIYVDLALPVTAPEAPHCGSCTACLDACPTRAIVAPWRVDARRCISYLTIETDDPVPVELRPALGQRIYGCDDCQTACPWNKYARRASLPDFDWRADLAAPTLLSLWSWGEADFLKRTEGSPIRRIGWRRWRRNLAVAAGNSLRVADDPVLAAALATGRDAAGEIVAEHVDWALAQRSAASAASASGSPAIATSVDSVTRPAT

SEQ ID NO: 80620 - protein, 375 aa, Rubrivivax gelatinosus
  misc_feature (1)..(375): tr|A0A4R2M7Z7|A0A4R2M7Z7_RUBGE Epoxyqueuosine reductase OS=Rubrivivax gelatinosus OX=28068 GN=queG PE=3 SV=1
MLARLRIWAHEAGFSQIGVADIDLTSAEPGLLAWLAAGFHGSMAYMAAHGLKRARPAELVPGTVRVITARMDYLPRGLADDWRDAEQRRLATAGEAVISVYARGRDYHKVLRTRLQRLADRLSAEIGPFGHRVFVDSAPVLEVELASRSGIGWRGKHTLTLSREAGSTFFLGEIYVDLALPVTAPEAPHCGNCTACVDACPTRAIVAPYRVDARRCISYLTIETDEPIPVELRPALGQRVYGCDDCQTACPWNKYARRAELADFDWRADLAAPSLLALWSWSEAEFLKRTEGSPIRRIGWQRWRRNLAVAAGNSLRAADDPALAAALAAGRDAAGDVAAEHVDWALAQRSAASAASASGSPAIATSVDSVTRPAT

SEQ ID NO: 80621 - protein, 386 aa, Rubrivivax gelatinosus
  misc_feature (1)..(386): tr|I0HP85|I0HP85_RUBGI Epoxyqueuosine reductase OS=Rubr ivivax gelatinosus (strain NBRC 100245 / IL144) OX=9839 17 GN=queG PE=3 SV=1
MRTERHVDGPSVLARLRTWAHEVGFSQIGVADIDLASAEPGLLAWLEAGFHGSMAYMAAHGLKRARPAELVPGTVRVITARMDYLPRDLAEDWRDAERRRLATPGEAVVSVYARGRDYHKVLRTRLQRLADRLAAEIGPFGHRVFVDSAPVLEVELASRSGIGWRGKHTLTLSREAGSTFFLGEIYVDLALPVTAPEAPHCGSCTACLDACPTQAIVAPYRVDARRCISYLTIETDDPVPVELRPALGLRVYGCDDCQTACPWNKYARRATVPDFDWRPELAAPSLLSLWAWTETEFLKRTEGSPIRRIGWRRWRRNLAVAAGNSLRAADDPALAAALAAGRDAAGEIVAEHVDWALAQRSAASAASASGSPAIATSVDSVTRPAT

SEQ ID NO: 80622 - protein, 359 aa, Rubrivivax sp.
  misc_feature (1)..(359): tr|A0A519ZD69|A0A519ZD69_9BURK Epoxyqueuosine reductase OS=Rubrivivax sp. OX=50259 GN=queG PE=3 SV=1
MKIALDTAQLVSQIQAWGQELAFSQIGVADVDLSSAEPGLQAWLSAGWHGDMAYMAAHGMKRARPAELVPGTVSVITARMDYLPRDTPEGWQALEFARLERPREAVVSMYARGRDYHKVLRHRLQTLADRIQAAVGPLGHRVFTDSAPVLEVELAQRSGQGWRGKHTLVLNREGGSMFFLGEIYVDLGLPPTPAVSEHCGACSACIDVCPTQAITAPQRLDARRCISYLTIEHAGAIPEALRPLMGNRIYGCDDCQLICPWNKFAQRSPLADFDAREGLGGATLATLFAWSETEFLRRTEGSPIRRIGHERWLRNIAVALGNALRAGSDADLRGVLQTRAGHPSALVREHVAWALSQAV

SEQ ID NO: 80623 - protein, 382 aa, Rubrivivax sp.
  misc_feature (1)..(382): tr|A0A1E4IAH5|A0A1E4IAH5_9BURK Epoxyqueuosine reductase OS=Rubrivivax sp. SCN 71-131 OX=1660138 GN=queG PE=3 S V=1
MSHSRDIDGPRLVQQLRAWAHELGFSQIGIAGIDLASAEPGLQAWLDAGFHGRMGYMAAHGLKRARPAELVPGTLSVITLRMDYLPAATPDGWQARERQRLQEPARAQVSLYARGRDYHKVVRPRLQQLADRLQAEVGAIGHRAFCDSAPVLEVELASRSGNGWRGRHTLALHRDAGSMFFLGELFVDVALPPTAPVTAHCGQCRACIDACPTHAIVAPYRVDARRCISYLTIENDGPIPVELRADIGNRVYGCDDCQLACPWNKYARRALLPDFEPRPWLAEAPLLELWAWSEGEFLNRTEGNPIRRIGWSRWRRNLAVGLGNAWRASGDAAIAEALVAARPGADDMVREHIDWALAQGAAATPAASAVDTSSRGDPLKAC

SEQ ID NO: 80624 - protein, 381 aa, Rubrobacter radiotolerans
  misc_feature (1)..(381): tr|A0A023X741|A0A023X741_9ACTN TIGR00276: epoxyqueuosin e reductase OS=Rubrobacter radiotolerans OX=42256 GN=Rr adSPS_2733 PE=4 SV=1
MTPALKTSPKENRETVLRLARAAGFDLVGVTSAEPLEKGGERLRRWQEAGMSADLGYMQRPVELLSNPKKLQKSARSVISLGVSYYGGDHPENIGAGHVARYAWGRDYHDSIKERLLRLRGDIEAELGTRVKARAFTDAVPLLERSAAQRAGLGFFGRNACLISREVGSYFFIADLIIDLDIEPDAPGEGTCGRCSRCMDACPTGAIREPGVVDARLCISYLTIENRGDIPPDLRERIGDRAFGCDICQEVCPYNKTKARKTGWSDFLPEAGAGPYLDLREVIAVRTEEEFERRFGGTALTRPGRAGLVRNCCVVAGNLRLGSVLPALEEALRSDDSPVVRGHAAWALGRIDGGRRALTEALEEEPDGGVREEIEAALGRS

SEQ ID NO: 80625 - protein, 386 aa, Rubrobacter taiwanensis
  misc_feature (1)..(386): tr|A0A4R1B9S7|A0A4R1B9S7_9ACTN tRNA epoxyqueuosine(34) reductase QueG OS=Rubrobacter taiwanensis OX=185139 GN= queG PE=4 SV=1
MSGSAKEIIAEKARALGFDLVGVSRAEPLEAGGERLREWQAAGMAGEMAYMNRPVELLSDPRKLQKSARSVISLGVSYYPGEHPENPGSGGRVARYAWGRDYHEVIKERLFRLRRELEEELGVKIKARAFTDAVPLLERSAAQRAGLGFFGRNSCLINGEIGSYFFIADLIVDLELEPDEPGSGTCGRCTRCMSACPTGAIKAPGVVDARLCISYLTIENRGEIPRKLRPLVGDWAFGCDVCQEVCPYNKRKAQKSRWPEFSAEAGAGEYLDLLEVLEIRDEEAFERHFAGTPLTRPGRAGLVRNCCVVAGNLRLEAAVPALIRCLTEDESPVVRAHAAWALGEIGGAAAGAALRRAAEAEGDPRCREEIRAAETSCAKKSAPRSP

SEQ ID NO: 80626 - protein, 402 aa, Rubrobacter xylanophilus
  misc_feature (1)..(402): tr|A0A510HKL6|A0A510HKL6_9ACTN Epoxyqueuosine reductase OS=Rubrobacter xylanophilus OX=49319 GN=queG PE=4 SV=1
MRLYTRGGPATHAPGILEAVETAEPAREHRKVVEELARAAGFELVGVTSAEPLAGGGERLRRWQEAGMAGEMGYMRRPPELLSDPRRLQKSARSVISLGVSYYPGEHPENPGDGGRVARYAWGRDYHRVIKERLFGLRRELEEALGCRIRARAFTDAVPLLERSAAQRAGLGFFGRNSCLINPAMGSYFFIAELLVDLKIEPNLPGEGTCGRCTRCIDRCPTGAIKAPGVVDARLCISYLTIENRGEIPRSLRPLVGDWAFGCDLCQEVCPYNRRKARKSRWPEFSAEAGAGPYLKIAEVLAIRSEEEFERRFAGTPLTRPGRAGLLRNCCVVAGNLRLEEAVPALVGCLREDPSPLVRGHAAWALGEIGGAEEELSGAAHRERDPWCRREMELALSRATVG

SEQ ID NO: 80627 - protein, 380 aa, Rubrobacter xylanophilus
  misc_feature (1)..(380): tr|Q1AR96|Q1AR96_RUBXD Uncharacterized protein OS=Rubro bacter xylanophilus (strain DSM 9941 / NBRC 16129) OX=2 66117 GN=Rxyl_3176 PE=4 SV=1
MEDPARARRVVEELARAAGFELVGVTGAEPLAEGGERLRRWQEAGMAAGMGYMRRPAELLCDPRRLQKSARSVISLGVSYYPGEHPENPGDGGRVARYAWGRDYHRAIKQRLLGLRRDLEARLGCRVRARAFTDAVPLLERSAAQRAGLGFFGRNSCLINRDMGSYFFIAELLVDLELEPDGPGEGTCGRCTRCMDRCPTGAIKAPGVVDARLCISYLTIENRGEIPRPLRPLVGDWAFGCDLCQEVCPYNRRKAKRSRWPEFSAEAGAGPYLEITEVLGIRSEEEFERRFAGTPLTRPGRAGLLRNCCVAAGNLRLEAAVPALAGCLREDPSPLVRGHAAWALGEIGGAERELSEAARREADPWCRREIELALARAGVG

SEQ ID NO: 80628 - protein, 348 aa, Ruegeria arenilitoris
  misc_feature (1)..(348): tr|A0A238KLL2|A0A238KLL2_9RHOB Epoxyqueuosine reductase OS=Ruegeria arenilitoris OX=1173585 GN=queG PE=3 SV=1
MGQMNSATALKDRLVAQARAEGFVSCRICRPWDVPEVPARLEAFLAAGYHGQMGWMAERTHWRGDPAQLWPEARSVIMLAESYTPDHDPTEVLGRPDRGAISVYAQNRDYHDLVKKRLKRLARWLIAEAGGEVKVFVDTAPVPEKALGHAAGLGWQGKHTNLVSRDWGNWAFLGSVFTTLNLPADPPEVDHCGSCRACLDACPTDAFPAPYQLDARRCISYLTIEHKGPVDQELRGKLGNRIYGCDDCLAACPWNKFAVAASDIRYAAHQDLMAPPLAELAGLDDLAFRARFSGSPIKRIGRDRFVRNVLYAIGNSGSAELIPVAQALTEDPDPTVADAARWAVEQLS

SEQ ID NO: 80629 - protein, 345 aa, Ruegeria atlantica
  misc_feature (1)..(345): tr|A0A0P1EI03|A0A0P1EI03_9RHOB Epoxyqueuosine reductase OS=Ruegeria atlantica OX=81569 GN=queG PE=4 SV=1
MKSGSGLKEKLVAQALSAGFVSCRICRPWDVPEVPSRLKAFLDAGFHGQMGWMAERTHWRGDPAALWHEARSVIMLAESYTPEHDPTDILNHPDKAAISVYAQNKDYHDLVKKRLKRLARWLIAEAGGEVKVFVDTAPVPEKALGHAAGLGWQGKHTNLVSRDWGNWAFIGSVFTTLDLSADMAETDHCGKCRACLDSCPTDAFPAPYQLDARRCISYLTIEHKGPVNEELRDKLGNRIYGCDDCLAACPWNKFAVAASDVRYAARDDLKAPALAELAVLDDAAFRAKFSGSPIKRIGRDRFVRNVLYAIGNSEQSDLMPVAQSLADDPDPTVADAARWAVKRLS

SEQ ID NO: 80630 - protein, 345 aa, Ruegeria atlantica
  misc_feature (1)..(345): tr|A0A0P1E912|A0A0P1E912_9RHOB Epoxyqueuosine reductase OS=Ruegeria atlantica OX=81569 GN=queG PE=3 SV=1
MKSGSGLKEKLVAQALSEGFVSCRVCRPWDVPDVPSRLQAFLDAGYHGQMGWMAERTHWRGDPAALWPEARSVIMLAESYTPDHDPTEVLQHPDKAAVSVYAQNKDYHDLVKKRLKRLARWLIAEAGGEVKVFVDTAPVPEKALGHAAGLGWQGKHTNLVSRDWGNWAFIGSVFTTLDLPADMAETDHCGNCRACLSACPTEAFPAPYQLDARRCISYLTIEHKGPVDEELRQKLGNRIYGCDDCLAACPWNKFAIAASDVRYAARDDLKAPPLAELAVLDDAAFRAKFSGSPIKRIGRDRFVRNVLYAIGNSEQSDLMPVAQSLADDPDPTVADAARWAVKRLS

SEQ ID NO: 80631 - protein, 345 aa, Ruegeria conchae
  misc_feature (1)..(345): tr|A0A497ZFF4|A0A497ZFF4_9RHOB Epoxyqueuosine reductase OS=Ruegeria conchae OX=981384 GN=queG PE=3 SV=1
MKNGSELKARLVEQALVEGFVACRVCRPWDVPQVPERLEAFLQAGYHGQMGWMAERSHWRGDPSVLWPEARSVIMLAESYTPEHDPTEVLSYPELGAISVYAQNKDYHDLVKKRLKRLARWLIAEGGGEVKVFVDTAPVPEKSLGEAAGLGWQGKHTNLVSQDWGNWAFLGSVFTTLDLPTDVAEVDHCGSCRACLNACPTNAFPAPYQLDARRCISYLTIEHKGPVDEELRGLLGNRIYGCDDCLAACPWNKFAVAASDIRYAAREELKAPSLAELAMLDDTAFRAMFSGSPIKRIGRDRFVRNVLYAIGNSGVPALLPVAQTLTDDPDPTVTDAARWAASRLS

SEQ ID NO: 80632 - protein, 345 aa, Ruegeria denitrificans
  misc_feature (1)..(345): tr|A0A0P1II94|A0A0P1II94_9RHOB Epoxyqueuosine reductase OS=Ruegeria denitrificans OX=1715692 GN=queG PE=3 SV=1
MKSGSSLKDKLVTQALSEGFVSCRICRPWDVPQVPPRLEAFLQAGFHGQMGWMAERTHWRGDPTALWPEAQSVIMLAESYAPEHDPTEVLDYPDRAAISVYAQNKDYHDLVKKRLKRLARWLIAEAGGEVKVFVDTAPVPEKALGHAAGLGWQGKHTNLVSRDWGNWAFIGSIFTTLDLPADMAEVDHCGSCRACLDSCPTNAFPAPYQLDARRCISYLTIEHKGPVDEELRAKLGNRIYGCDDCLAACPWNKFAVAASDIRYAARDDFKAPSLAELAVLDDAAFRAKFSGSPIKRIGRDRFVRNVLYAIGNSGMASLRPVAQGLVEDPDPTVADAARWAVKQLS

SEQ ID NO: 80633 - protein, 345 aa, Ruegeria faecimaris
  misc_feature (1)..(345): tr|A0A521FDV2|A0A521FDV2_9RHOB Epoxyqueuosine reductase OS=Ruegeria faecimaris OX=686389 GN=queG PE=3 SV=1
MKSGSGLKDRLVAQALSEGFVSCRICRPWDVPEVPARLEAFLQAEYHGQMGWMAERTHWRGDPAALWPEAKSVIMLAESYAPEHDPTEILDHPEKGAISVYAQNKDYHDLVKKRLKRLARWLIAEAGGEVKVFVDTAPVPEKALGHAAGLGWQGKHTNLVSRDWGNWAFIGSVFTTLDLPSDQAEVDHCGSCRACLAACPTDAFPAPYQLDARRCISYLTIEHKGPVDEDLRAKLGNRIYGCDDCLAACPWNKFAVTASDMRYAAREDLKAPRLAELAGLDDPEFRTKFSGSPIKRIGRDRFVRNVLYAIGNSGLQGLIPIAQDLTEDPDSAVADAARWAVKQLS

SEQ ID NO: 80634 - protein, 345 aa, Ruegeria halocynthiae
  misc_feature (1)..(345): tr|A0A1H3B2Z9|A0A1H3B2Z9_9RHOB Epoxyqueuosine reductase OS=Ruegeria halocynthiae OX=985054 GN=SAMN05444358_105 18 PE=4 SV=1
MKSGSDLKAKLVEQALSEGFVSCRICHPWDVPQVPARLDAFLQAGYHGQMGWMAERSHWRGDPSVLWPDARSVIMLAESYKPEHNPIEILQHPQLGAISVYAQNKDYHDLVKKRLKRLARWLIAEGGGEVKVFVDTAPVPEKALGQAAGLGWQGKHTNLVSQDWGNWAFLGSVFTTLDLPVDGAEVDHCGSCRACLTACPTDAFPAPYQLDARRCISYLTIEHNGPVAEELRSLLGNRIYGCDDCLAACPWNKFAVAASDLRYAAREELKAPALAELAMLDDTAFRAMFSGSPIKRIGRDRFVRNVLYAIGNAAELALLPVVQELTGDPDPTVADAARWAASRLS

SEQ ID NO: 80635 - protein, 348 aa, Ruegeria intermedia
  misc_feature (1)..(348): tr|A0A1M5AXA5|A0A1M5AXA5_9RHOB Epoxyqueuosine reductase OS=Ruegeria intermedia OX=996115 GN=queG PE=3 SV=1
MGQMNSATALKDRLVAQARAEGFVSCRICRPWDVPEVPARLETFLAAGYHGQMDWMAERTHWRGDPAELWPEARSVIMLAESYTPDHDPTEVLGRPDRGAISVYAQNRDYHDLVKKRLKRLARWLIAEAGGEVKVFVDTAPVPEKALGHAAGLGWQGKHTNLVSREWGNWAFLGSVFTTLDLPTDPPEVDHCGSCRACLDACPTDAFPAPYQLDARRCISYLTIEHKGPVDQELRSKLGNRIYGCDDCLAACPWNKFAVAASDIRYAARQDLMAPPLAELAGLDDAAFRARFSGSPIKRIGRDRFVRNVLYAIGNSGSAALIPVAQALTEDPDPTVADAARWAVEQLS

SEQ ID NO: 80636 - protein, 357 aa, Ruegeria lacuscaerulensis
  misc_feature (1)..(357): tr|D0CSF8|D0CSF8_RUELI Epoxyqueuosine reductase OS=Rueg eria lacuscaerulensis (strain DSM 11314 / KCTC 2953 / I TI-1157) OX=644107 GN=queG PE=3 SV=1
MGQFTPEDILGQMNSAAALKDRLVAQARAEGFVSCRICRPWDVPEVPARLEAFLAAGYHGQMGWMAERTHWRGNPAELWAEARSVIMLAESYTPDHDPTEVLGRPDRGAISVYAQNRDYHDLVKKRLKRLARWLIAEAGGEVKVFVDTAPVPEKALGHAAGLGWQGKHTNLVSREWGNWAFLGSVFTTLDLPADSSEVDHCGSCRACLDACPTDAFPAPYQLDARRCISYLTIEHKGPVDQELRGKLGNRIYGCDDCLAACPWNKFAVAASDIRYAARQDLMAPPLAELAGLDDAAFRARFSGSPIKRIGRDRFVRNVLYAIGNSGSAALIPVAQALTEDPDPTVADAARWAVEQLS

SEQ ID NO: 80637 - protein, 345 aa, Ruegeria litorea
  misc_feature (1)..(345): tr|A0A1Y5TQX8|A0A1Y5TQX8_9RHOB Epoxyqueuosine reductase OS=Ruegeria litorea R37 OX=1200284 GN=queG PE=3 SV=1
MTTDPDLKQRLTQQALDEGFVSCRICRPWDIPQVPERLAAFVEAGYHGQMGWMGERMHWRGNPAALWPEAQSVIMLAESYAPDHDPRAILDHPDKGAISVYAQNKDYHDLVKKRLKRLARWLIAEGGGEVKVFVDTAPVSEKALGQAAGLGWQGKHTNLVSRDWGNWAFIGSVFTTLDLPADAPEIDHCGSCRSCLAACPTDAFPAPYQLDARRCISYLTIEHKGPVDEELRGKLGNRIYGCDDCLAACPWNKFAVAASDMRYAAREELKAPGLAELATLDDTTFRAFFSGSPIKRIGRDRFVRNVLYAIGNSGDAALMPTAQGLTEDADATVADAARWAVEQLQ

SEQ ID NO: 80638 - protein, 353 aa, Ruegeria marina
  misc_feature (1)..(353): tr|A0A1G7C2B4|A0A1G7C2B4_9RHOB Epoxyqueuosine reductase OS=Ruegeria marina OX=639004 GN=queG PE=3 SV=1
MSRELKQKLVAMALQEGFVACRICRPWDVPEVPARLASFVAAGYHGQMGWMAERMEWRGNPAALWPEARSVIMLAESYTPQEDPMAVVGRPDRGAISVYARNRDYHDLVKKRLKRLARWLIAEAGGEVKVFVDTAPVPEKPLGQAAGLGWQGKHTNLVSRDWGNWAFLGSVFTTLDLPADEPERDNCGSCRACLDVCPTGAFPAPYRLDARRCISYLTIEHKGPVDEELREKLGNRIYGCDDCLAVCPWNKFAVAASDLRHAAREELTAPRLAALVQLDDAGFRAMFSGSPIKRIGRDRFVRNVLYAIGNSGMAELLPAAQGLTGDPDATVADAARWAVEKLKQVPQTGGTCR

SEQ ID NO: 80639 - protein, 345 aa, Ruegeria marisrubri
  misc_feature (1)..(345): tr|A0A0X3TXL9|A0A0X3TXL9_9RHOB Epoxyqueuosine reductase OS=Ruegeria marisrubri OX=1685379 GN=queG PE=3 SV=1
MKSEMGLKERLVAQALAEGFVACRICRPWDVPQVPERLEAFLAAGYHGQMGWMAERTHWRSDPAALWPEARSVIMLAESYAPEHDPTEILNHPDRGAISVYAQNKDYHDLVKKRLKRLARWLIAEAGGEVKVFVDTAPVPEKALGHAAGLGWQGKHTNLVSRDWGNWAFLGSVFTTLDLPADAPEVDHCGSCRSCLDSCPTEAFPAPYQLDARRCISYLTIEHKGPVAEDLRAKLGNRIYGCDDCLAACPWNKFAVAASDMRYAAREELKAPKLAELAALDDAAFRAVFSGSPIKRIGRNRFVRNVLYAIGNSGLPELLPAARALVDDPDPAVADAARWAVKRLS

SEQ ID NO: 80640 - protein, 345 aa, Ruegeria mediterranea
  misc_feature (1)..(345): tr|A0A2R8C410|A0A2R8C410_9RHOB Epoxyqueuosine reductase OS=Ruegeria mediterranea M17 OX=1200281 GN=queG PE=3 S V=1
MTTDPDLKQRLIQQALDEGFVSCRICRPWDIPQVPDRLAAFVEAGYHGQMGWMAERMHWRGNPAELWPEAKSVIMLAESYAPDHDPRAILDHPDKGAISVYAQNKDYHDLVKKRLKRLARWLIAEGGGEVKVFVDTAPVSEKALGMAAGLGWQGKHTNLVSRDWGNWAFIGSVFTTLDLPADAPEINHCGSCRSCLAACPTDAFPAPYQLDARRCISYLTIEHKGPVDEELRGRLGNRIYGCDDCLAACPWNKFAVAASDMRYAAREELKAPALAELATLDDTAFRAFFSGSPIKRIGRDRFVRNVLYAIGNSGDAALMPTAQGLTKDADATVADAARWAVEQLQ

SEQ ID NO: 80641 - protein, 335 aa, Ruegeria meonggei
  misc_feature (1)..(335): tr|A0A1X6Z6S8|A0A1X6Z6S8_9RHOB Epoxyqueuosine reductase OS=Ruegeria meonggei OX=1446476 GN=queG PE=4 SV=1
MVAQALNEGFVSCRVCRPWDVPEVPDRLEAFLQAGYHGQMGWMAERTHWRGDPAALWPEARSVIMLAESYTPEHDPTAVLDHPECGAISVYAQNKDYHDLVKKRLKRLARWLIGEAGGEVKVFVDTAPVPEKALGHAAGLGWQGKHTNLVSRDWGNWAFIGSVFTTLELPSDMAEVDHCGTCRACLDACPTDAFLAPYQLDARRCISYLTIEHKGPVDEDLRAKLGNRIYGCDDCLAACPWNKFAVAASDLRYAARDDLKAPALAELAALDDAAFRAKFSGSPIKRIGRDRFVRNVLYAIGNSGAQGLKPVAQGLAEDSDPTVADAARWAVKQLS

SEQ ID NO: 80642 - protein, 346 aa, Ruegeria pomeroyi
  misc_feature (1)..(346): tr|Q5LM00|Q5LM00_RUEPO Epoxyqueuosine reductase OS=Rueg eria pomeroyi (strain ATCC 700808 / DSM 15171 / DSS-3) OX=246200 GN=queG PE=3 SV=1
MSGELKDRLVARALEEGFVSCRVCRPWDVPEMPARLGAFVEAGYHGQMGWMAERMEWRGDPAALWPEARSVIMLAESYAPDTDPMEVVGQPDRGAISVYARGKDYHDLVKKRLKRLARWLIEAGGGEVKVFVDTAPVPEKALGQAAGLGWQGKHTNLVSRDWGNWAFLGSVFTTLDLPSDPVGRDNCGSCSACLTACPTDAFPAPYRLDARRCISYLTIEHKGPVDEELRAKLGNRIYGCDDCLAACPWNKFAVAASDLRYGARPELSAPALADLARLDDAGFREMFSGSPIKRIGRDRFVRNVLYAIGNSGLPALRPVAQDLAQDSDPTVADAARWAAAKLAMSR

SEQ ID NO: 80643 - protein, 345 aa, Ruegeria profundi
  misc_feature (1)..(345): tr|A0A0X3TH32|A0A0X3TH32_9RHOB Epoxyqueuosine reductase OS=Ruegeria profundi OX=1685378 GN=queG PE=3 SV=1
MTNGSSLKDKLVAQALTEGFVSCRVCRPWDVPEVPARLEAFLEAEYHGQMGWMAERTHWRGDPAALWPDARSVIMLAESYTPEHDPTEVLNHPDKAAISVYAQNKDYHDLVKKRLKRLARWLISEAGGEVKVFVDTAPVPEKALGHAAGLGWQGKHTNLVSRDWGNWAFIGSVFTTLDLPADMAEVDHCGSCRACLDACPTDAFPAPYRLDARRCISYLTIEHKGPVDEELRSKLGNRIYGCDDCLAACPWNKFAVAASDIRYAARDDLKAPSLAELAALDYTAFRAKFSGSPIKRIGRDRFVRNVLYAIGNSDTAELLPVAQELTNDPDPAVADAARWAVKQLL

SEQ ID NO: 80644 - protein, 347 aa, Ruegeria sp.
  misc_feature (1)..(347): tr|Q1GCS8|Q1GCS8_RUEST Epoxyqueuosine reductase OS=Rueg eria sp. (strain TM1040) OX=292414 GN=queG PE=3 SV=1
METAAELKTRLIAQAKAEGFVSVRLCRPWDVPEVPERLRAFLEAGYHGQMKWMAERINWRENPAALWPEARSVIMLAESYTPDEDPMAVVGLPDRAAISVYARGKDYHDLVKKRLKRLARWLIEEAPDEAQVKVFVDTAPVPEKALGQASGLGWQGKHTNLVSRDWGNWAFLGSIFTTLDLPVDAPEPDRCGSCRACLTACPTDAFPAPYQLDARRCISYLTIEHKGPIEEELRTKLGNRIYGCDDCLAACPWNKFAVEASDMRYAAREGTIAPPLAELSQLDDAAFRARFSGSPIKRIGRDRFVRNVLYAIGNSGDAGLHVFAQALCDDPDPTVAEAARWAAARLP

SEQ ID NO: 80645 - protein, 350 aa, Ruegeria sp.
  misc_feature (1)..(350): tr|B7QTK9|B7QTK9_9RHOB Epoxyqueuosine reductase OS=Rueg eria sp. R11 OX=439497 GN=queG PE=3 SV=1
MTDHSSLKDQLVAQALAEGFVSCRICRPWDVPEVPDRLQAFLDAGYHGQMAWMEERSHWRGDPAQLWPEARSVIMLAESYTPDVDPMEIVGQPDRGAISVYARNKDYHDLVKKRLKRLARWLIAEAQKLGHEAEVKVFVDTAPVPEKPLGQAAGLGWQGKHTNLVSRDWGNWAFIGSVFTTLDLPADPAERDHCGSCRSCIAACPTDAFPAPYQLDARRCISYLTIEHKGPIDEELRSKLGNRIYGCDDCLAACPWNKFAVAASDIRYEARPEFTAPKLAELATLDDAAFRALFSGSPIKRIGRDRFVRNVLYAIGNSAQPELRAVAQSLTTDPDPTVADAARWAAAQLA

SEQ ID NO: 80646 - protein, 323 aa, Rufibacter immobilis
  misc_feature (1)..(323): tr|A0A3M9N770|A0A3M9N770_9BACT Epoxyqueuosine reductase OS=Rufibacter immobilis OX=1348778 GN=queG PE=3 SV=1
MFNLAPKHTQLIKQKAQELGFMYCGVSKADFLEEEAPRLENWLNQNMHGQMHYMANHFDKRLDPRLLVDGAKSVVSLLLNYYPEETQPEDTFKISKYAYGQDYHFVIKDKLKTLFQYIQEEIGEVGGRVFVDSAPVMDKVWAKKSGLGWVGKNSNLIRPGVGSFFFIAELILDLELEPDGPIKDYCGTCTKCMDACPTDAISEPYVVDGSKCISYFTIELKDQIPQEVEGKFGNWVFGCDICQDVCPWNRFSKPHREPAFAPHPELLHLSSSDWLELTQEVFGHIFKKSAVKRTGFAGLTRNLQFVAEEPAALGGHHVPEDLV

SEQ ID NO: 80647 - protein, 324 aa, Rufibacter sp.
  misc_feature (1)..(324): tr|A0A5B6T923|A0A5B6T923_9BACT Epoxyqueuosine reductase OS=Rufibacter sp. NBS58-1 OX=2595005 GN=queG PE=3 SV=1
MFNLAPKHTHLIKQKAQELGFMYCGVSKADFLEEEAPRLEHWLNQNMHGQMHYMANHFDKRLDPRLLVDGAKSVVSLLLNYFPEETQAEDTFKISKYAYGQDYHFVIKDKLKTLFNYIQEEIGEVGGRVFVDSAPVMDKVWAKKSGLGWVGKNSNLIRPGVGSFFFIAELILDLELEPDGPIKDYCGTCTKCMDACPTDAISQPYVVDGSKCISYFTIELKDQIPQEVEGKFGNWVFGCDICQDVCPWNRFSKAHREPAFAPHPELLHLSKSDWLELTQDVFKDVFRKSAVKRTGFDGLTRNLHFVAKEPAAFLGSEDVAEDLI

SEQ ID NO: 80648 - protein, 324 aa, Rufibacter sp.
  misc_feature (1)..(324): tr|A0A3M9MK32|A0A3M9MK32_9BACT Epoxyqueuosine reductase OS=Rufibacter sp. R-22-1c-1 OX=2487040 GN=queG PE=3 SV =1
MFNLAPKHTHLIKQKAQELGFMYCGVSKADFLEEEAPRLESWLNQNMHGQMHYMANHFDKRLDPRLLVEGAKSVVSLLLNYFPEETQAEDTFKISKYAYGQDYHFVIKDKLKTLFNYIQEEIGEVGGRVFVDSAPVMDKVWAKKSGLGWVGKNSNLIRPGVGSFFFIAELILDLELEPDGPIKDYCGTCTKCMDACPTDAISEPYVVDGSKCISYFTIELKDQIPQEVEGKFGNWVFGCDICQDVCPWNRFSKAHREPAFAPHPELLHLSQNDWMELTQEVFQEVFRKSAVKRTGFQGLTRNLQFVVNEPSALRGDQHVTEDLI

SEQ ID NO: 80649 - protein, 323 aa, Rufibacter tibetensis
  misc_feature (1)..(323): tr|A0A0P0CWE4|A0A0P0CWE4_9BACT Epoxyqueuosine reductase OS=Rufibacter tibetensis OX=512763 GN=queG PE=3 SV=1
MFNLAPKHTQIIKQKAQELGFMYCGVSKAEFLEEEAPRLESWLNQNMHGQMHYMANHFDKRLDPRLLVDGAKSVVSLLLNYFPEETQPEDTFKISKYAYGQDYHFVIKDKLKTLFQYIQEEIGEVGGRVFVDSAPVMDKVWAKKSGLGWVGKNSNLIRPGVGSFFFIAELILDLELEPDGPIKDYCGTCTKCMDACPTDAISAPYVVDGSKCISYFTIELKDQIPQEVEGKFGNWVFGCDICQDVCPWNRFSKAHREPAFAPHPELLHLTSNDWVELTQEVFRDIFRKSAVKRTGFEGLTRNLRFVANEPADLSSDRVSEDLV

SEQ ID NO: 80650 - protein, 377 aa, Rugamonas rubra
  misc_feature (1)..(377): tr|A0A1I4I0D0|A0A1I4I0D0_9GAMM Epoxyqueuosine reductase OS=Rugamonas rubra OX=758825 GN=queG PE=3 SV=1
MSLSESKLAELAVRIKQWGVELGFAELRVADIDLSAQEAGLQAWLDAGMHGEMDYMASHGMKRARPDELVPGTVRVICARMNYLPKDVAGGGAKAATATDAATVGDWRAAEAARLADPGAAVISVYARGRDYHKVLRARLQQLADRIRAECGEFGYRVFTDSAPVMELPLAQKAGLGWRGKHTLLINRDGGSLFFMGEILVDIPLPVDEPVGAHCGGCDACITACPTQAILGPGRLDARRCISYLTIESKSAIPVELRPLIGNRVYGCDDCQSVCPWNKFAQRAVLPDFDERHGLGSASMVELFAWSEEEFNRKMEGSPIRRIGHVSWLRNLAVGMGNAAAAGVKGDAAIVAALLSRRAHESELVREHVEWALACHE

SEQ ID NO: 80651 - protein, 359 aa, Rugosibacter aromaticivorans
  misc_feature (1)..(359): tr|A0A0C5JBR2|A0A0C5JBR2_9RHOO Epoxyqueuosine reductase OS=Rugosibacter aromaticivorans OX=1565605 GN=queG PE= 3 SV=1
MMRIMHDQWHTVKENIRRWGRELGFDAIGFSRAETGEAAAQLAAWLAAGFHGEMDYMAAHVSEVGAKRALPTELVPGTQSIITVRMNYRPASADAEEVLADTQRAYISRYALGRDYHKVMRPRLQALVDRMTEAQGEFVHRVFTDSAPVMEVQLAKQSGLGWRGKHTLLLDRAVGSYFFLGEIYSELPLPPDTPVTDHCGSCTACIDSCPTEALVAPYQLDARRCISYLTIELKNSIPEPLRESLGNRIYGCDDCQLACPWNRFSPLTREADFAPRHALDEATLVELFAWTEDEFAERMAGSAIRRIGYVRWLRNIAVALGNAPTCDDVVRALRARENDSSALVREHVAWALARHQSSR

SEQ ID NO: 80652 - protein, 359 aa, Rugosibacter sp.
  misc_feature (1)..(359): tr|A0A522YBA9|A0A522YBA9_9RHOO Epoxyqueuosine reductase OS=Rugosibacter sp. OX=1914450 GN=queG PE=3 SV=1
MMRIMHDQWHTVKENIRRWGRELGFDAIGFSRAETGEAAAQLAAWLAAGFHGEMDYMAAHVSEVGAKRALPTELVPGTQSIITVRMNYRPASADAEEVLADTQRAYISRYALGRDYHKVMRLRLQALVDRMTEAQGEFVHRVFTDSAPVMEVQLAKQSGLGWRGKHTLLLDRAVGSYFFLGEIYSELPLPPDTPVTDHCGSCTACIDSCPTEALVAPYQLDARRCISYLTIELKNSIPEPLRESLGNRIYGCDDCQLACPWNRFSPLTREADFAPRHALDEATLVELFAWTEDEFAERMAGSAIRRIGYVRWLRNIAVALGNAPTCDDVVRALRARENDSSALVREHVAWALARHQSSR

SEQ ID NO: 80653 - protein, 355 aa, Rugosibacter sp.
  misc_feature (1)..(355): tr|A0A522XLX7|A0A522XLX7_9RHOO Epoxyqueuosine reductase OS=Rugosibacter sp. OX=1914450 GN=queG PE=3 SV=1
MRIMHDQWHTVKENIRRWGRELGFDAIGFARAETGDAPAQLAAWLAAGFHGEMDYMAAHVSEVGAKRALPTELVPGTQSIITVRMNYRPASADAKEALADTHCAYISRYALGRDYHKVMRARLQALADRMTETLGEFAHRVFTDSAPVMEVQLAKQGGLGWRGKHTLLLDREVGSYFFLGEIYSELPLPPDTPVTDHCGSCTACIDSCPTEAIVAPYQLDARRCISYLTIELKNSIPEPLREHLGNRIYGCDDCQLACPWNRFSPLTREADFAPRHALDEATLVELFAWTEDEFTERMAGSAIRRIGYERWLRNIAVALGNAPTCEGVIHALRARASDHSAMVREHVAWALARHQ

SEQ ID NO: 80654 - protein, 317 aa, Ruminiclostridium cellobioparum
  misc_feature (1)..(317): tr|S0FLT9|S0FLT9_RUMCE Putative Fe-S protein OS=Ruminic lostridium cellobioparum subsp. termitidis CT1112 OX=11 95236 GN=CTER_0694 PE=4 SV=1
MVERILEYLQKKGYAARIISVKHLKEFQNEIEKLNEAKYLDAGMYKLFNDFHNFNIPASANPIKSIFIVASSSPIVKINFNYNGVRFPALIPPTYTEYYKKPEEIKQHLNEMLESCGYNAVRVARLPEKLIAVRSGLAKYGANNITYIPEFGSFFLLSAFYSDLPCTGTDETWSDIRVMDVCKNCHACISKCPTAAITGDRFLIKAERCLTYYNEFKGTPEFPDWIAPESHNCLVGCLRCQLPCPLNREQIEKVEVLAEIDEAETSLILENRGFEELPPALAAKLEELNISMYYHHLSSNLKALINSKYRLPQNNIM

SEQ ID NO: 80655 - protein, 234 aa, Ruminiclostridium hungatei
  misc_feature (1)..(234): tr|A0A1V4SN53|A0A1V4SN53_RUMHU Epoxyqueuosine reductase OS=Ruminiclostridium hungatei OX=48256 GN=queG_1 PE=4 SV=1
MTLSEELRSGLSDRGACVVGYADLSGVPEESRWGYGYGIIIAVELTPCIISGIENGPTPEYYDEYLRVNTLLNSLGEYAEGLLKNKGFEALALTQKVVEIHPETKSTRLPHKTVATRAGIGWIGKNAMLITRERGSAIRLTSVLTNCPLEAGIPINGSRCGSCTVCRDSCPGGAITGREWNVEMERAELYDAFKCRKTARERSRRIGVDESLCGLCILKCPWTQRHLEKLQHKT

SEQ ID NO: 80656 - protein, 288 aa, Ruminiclostridium hungatei
  misc_feature (1)..(288): tr|A0A1V4SHU7|A0A1V4SHU7_RUMHU Epoxyqueuosine reductase OS=Ruminiclostridium hungatei OX=48256 GN=queG_2 PE=4 SV=1
MGTRKSSRTDIPLFERKELTNKLKLIINERSSGIGIVGVASIDRFENSPKGHGPRDFISDANAVVVLGLPILDGVADYANYEMKDSEIVTDEDIYVGKDGIKRIYNPRLALQNQVNLRSAHEALNMEIQILSIYAGAFLENEGYKSLVMPTTYGTTFSWQMNVDKDYPRNVKGIGQFSHRHAAVAAGLGSFGLNNLLLTPNWGPRNRFTTIITRAPLIADELTNISSCLGEKCSKCIDSCCAKAFGDVFEFEASGVKQKMAKFDHLKCEGAYGLCKRACISSCPVGSF

SEQ ID NO: 80657 - protein, 309 aa, Ruminiclostridium sp.
  misc_feature (1)..(309): tr|A0A3B8J3K5|A0A3B8J3K5_9FIRM 4Fe-4S ferredoxin-type d omain-containing protein OS=Ruminiclostridium sp. OX=20 53608 GN=DCE11_00570 PE=4 SV=1
MFADTVIEQMRELGYIARVVSIEHIKGIGDELNALDDRKVLDADLLSILRNFYICDYSNVPFDVKSVIVTASQCRIGKAFFNYRGKKIPVTIPPTYVEYKSDPAKIEKCLQKILAAENYHAQIAYRLPGKIIAAKCGLSLYGKNNICYVTGMGSFVLLSTYYSDLPCEDGNWGEARMMECCEACDACMNSCPTGAISSQSFLIKAERCITYHNEFSNTPDFPEWISPSAHNSIVGCMHCQTCCPANRNYLNRIVGLEEFSEDETERILQGTDKSGLSGETVEKLERLNLMVYYDKLARNIRVLLEPVKQ

SEQ ID NO: 80658 - protein, 313 aa, Ruminiclostridium sp.
  misc_feature (1)..(313): tr|A0A4U7JL10|A0A4U7JL10_9FIRM 4Fe-4S ferredoxin-type d omain-containing protein OS=Ruminiclostridium sp. MA18 OX=2488810 GN=EHE19_02125 PE=4 SV=1
MEDTFMIEALKQEALLHGNKLQVVPIKHLQTLKKEIDLFKENDELNGFHEFIIQNMYSFDLPKVDFTIKSIILVAIPHPTYAKLEFERQGKKCSAYGIVASDFENTGKYLSDFLVPKNYHIEPVYSIPMKRMAAQCGLAVYGRNNICYIDGMGSNFGLAAYFSDIPCEEDNWNKMSYADACTDCMACVNNCPTGAIRTDRFLIDNDKCLSCLNEGVEEFPEWLPKSAHHCLYDCLKCQLICPMNEGCENNVMSPIKFDEKETNMLLDGIPYSEYSDELKMKAKILGMAEWPDITKAIPRNLRVLFEISEEKED

SEQ ID NO: 80659 - protein, 286 aa, Ruminococcaceae bacterium
  misc_feature (1)..(286): tr|A0A357WY86|A0A357WY86_9FIRM Uncharacterized protein OS=Ruminococcaceae bacterium OX=1898205 GN=DEB10_13335 PE=4 SV=1
MCVKLRKDMVFMQGSDKRKIIDDILDDCSLTLHEYCRFDALSDSLLPCRAASSLDSGFSPSSPPKTVIAVLFPYRFNDRPGNLSHYARVPDYHTAAGNALKRAAQALTCALPEHGFVSFIDNSPIPEVLAAALAGLGCVGDHGLLINPIYGSWVFIGTIVTDLDLAPHRQTVKSCSHCGVCTSSCPGSCIGDSRETCVSKISQTKGVLSLEQQAILKKSKMAWGCDRCQEVCPMNVDALIDPHPCFEGVLFEPSLQSKHLTDLRGKAYGWRGAEVLKRNLKLIDEL

SEQ ID NO: 80660 - protein, 279 aa, Ruminococcaceae bacterium
  misc_feature (1)..(279): tr|A0A417HPC8|A0A417HPC8_9FIRM DUF1730 domain-containin g protein OS=Ruminococcaceae bacterium AM28-23LB OX=229 2269 GN=DW741_02855 PE=4 SV=1
MDGVEKIKEILESWSGGWGITEAQPVLGRTREEKRKKALEQVPGLSALLCCVLPYYAGEEEGNLSLYARGEDYHQVAGRHLEESCKQLEELFPGHTFRGYADISPYPEVYACARSGLGKIGQNGLLITPQWGSYVFCCLIACDLPLTGGKEPEPCRGCGLCRAACPGGALTEEGKLMESRCLSALTQSRGELSPWQEDLIARSKRIWGCDICQQVCPENKGVKTSYIAEFTENITKSIKKQDLEGFSDRAFRKKYAGKAFSFRGIKPLKRNLELKEKKE

SEQ ID NO: 80661 - protein, 269 aa, Ruminococcus sp.
  misc_feature (1)..(269): tr|A0A355V0J6|A0A355V0J6_9FIRM tRNA epoxyqueuosine(34) reductase QueG OS=Ruminococcus sp. OX=41978 GN=DD392_08 250 PE=4 SV=1
MTNADFHKVIKDCMNRHDIRIYGFCSFENILPLNECRAKARLPENSQTVIVCAFPYLIKEKSARNLSYYACVRDYHITVMNILKNAAAELSELTGFIFEPFSDNSPIREVSAAVKAGIGVLGDNGLLITEKYGSYVFLGEFVTDMKIDAPVYNKSCLHCGMCQKKCRGNALENGKVNEDKCISAITQKKGELSSEETELILENGLAWGCDGCQTVCPMNRNAEETYISDFIDSAHHYLKADEVNERIKTSAYNWRGKKTILRNLDIFSF

SEQ ID NO: 80662 - protein, 196 aa, Ruminococcus sp.
  misc_feature (1)..(196): tr|R5PWF5|R5PWF5_9FIRM Putative iron-sulfur cluster-bin ding protein OS=Ruminococcus sp. CAG:724 OX=1262966 GN= BN766_00301 PE=4 SV=1
  misc_feature (161)..(162): Xaa can be any naturally occurring amino acid
MIKKVFSDENIEFFAALPFDKCEVMRPDFISRRGIDIAEVKSAVMFLVPYIAGDDGDGNISLYARSLDYHSYCDSLFSRICARLEECYGRHFWGFADKSPLSETYTAACAGLGIIGDNHLLINEKYGSFVFIGEILSEVPAEELGYDGREPVTGGCLHCGXXRLPALRQMQSRLPDDGKRHGLPFRRNTEKRRADA

SEQ ID NO: 80663 - protein, 378 aa, Rummeliibacillus sp.
  misc_feature (1)..(378): tr|A0A3N5ZT76|A0A3N5ZT76_9BACL tRNA epoxyqueuosine(34) reductase QueG OS=Rummeliibacillus sp. TYF005 OX=205821 4 GN=queG PE=4 SV=1
MNMTELKQEFIAYAQIIGVDKIGFTSASPFMELKNHLRRQQELGYQSGFEESDIEKRTEPKLLLENAASIIAIAIAYPSKMQNAPQGKKGARRGIFCRASWGIDYHTVLREKLALLEAFLQEKVPECKIRSMVDTGELSDRAVAERAGIGWSGKNCAVITPEYGSYVYLGEMITDLPFESDEPMEDQCGECRLCLDVCPTGALVQGGQLNSQKCVAYLTQTKGFLPDEYRAKIGNRIYGCDTCQTVCPKNKGKSNWIHEAFKPDPEVAKPLLEPLLAISNRDFKETYGHISGSWRGKKPIQRNAIIALAHFKEVSALPTLIEVFQKDERPVIRGTAAWAIGKIGGKEVEEVLREGLIREKDEEVQLEIQKGLAFISGQ

SEQ ID NO: 80664 - protein, 379 aa, Rummeliibacillus stabekisii
  misc_feature (1)..(379): tr|A0A511C0C9|A0A511C0C9_9BACL Epoxyqueuosine reductase OS=Rummeliibacillus stabekisii OX=241244 GN=queG PE=4 SV=1
MKPLQLQQELIAYAKSIGVDKIGFTSAAPFSDLKNKLRIQQELGYQSGFEESDIEKRTEPKLLLEDAASIIAIAVAYPSKMKNAPQGKRGARRGIFCRASWGTDYHTVLREKLALIEAFLKEKAPGCRIRSMVDTGELSDRAVAERAGIGWSGKNCAIITPEFGSYVYLGELITDLPFMPDEPIEDQCGDCTLCLDVCPTGALVQGGQLNAQKCVAFLTQTKGFLPDEYRGKIGNRIYGCDTCQTVCPKNKGKINWLHDAFQPDPEIAKPLLEPLLTISNREFKERFGHISGSWRGKKPIQRNAIIALAHFKEEAALPTLIKVFQQDERPVIRGTAAWAIGKIGGDGAKEVLEKGALIEEDEEVQFEIQKGLDLLLAQK

SEQ ID NO: 80665 - protein, 379 aa, Rummeliibacillus stabekisii
  misc_feature (1)..(379): tr|A0A143HEG4|A0A143HEG4_9BACL Epoxyqueuosine reductase OS=Rummeliibacillus stabekisii OX=241244 GN=ATY39_1076 0 PE=4 SV=1
MKPLQLQQELIAYAKSIGVDKIGFTSAAPFRDLKNKLRIQQELGYQSGFEESDIEKRTEPKLLLEDAASIIAIAVAYPSKMKNAPQGKRGARRGIFCRASWGTDYHTVLREKLALIEAFLKEKVPGCRIRSMVDTGELSDRAVAERAGIGWSGKNCAIITPEYGSYVYLGELITDLPFMPDEPIEDQCGDCTLCLDVCPTGALVQGGQLNAQKCVAFLTQTKGFLPDEYRGKIGNRIYGCDTCQTVCPKNKGKINWLHDAFQPDPEIAKPLLEPLLTISNREFKEKFGHISGSWRGKKPIQRNAIIALAHFKEEAALPTLIKVFQQDERPVIRGTAAWAIGKIGGDGAKEVLEKGALIEKDEEVQFEIQKGLDLLLAQK

SEQ ID NO: 80666 - protein, 316 aa, Runella sp.
  misc_feature (1)..(316): tr|A0A3C0UL46|A0A3C0UL46_9BACT Epoxyqueuosine reductase OS=Runella sp. OX=1960881 GN=queG PE=3 SV=1
MTSNDFVQQERSRLIKAKAQELGFDFCGISTATFLEEEAPRLEQWLLKNHHGQMHYMGNHFDKRLDPRKLVEGAKSVISILLNYYPEQQLDESDNALKLSKYAYGTDYHFVLKDKLKALVDEIQIEIGEVNGRIFVDSAPVMDKVWAAKSGLGWVGKHTNLINRQMGSFFFIGEIISDLELWPDASIKDYCGTCTRCVDACPTDAITEPYVVDGSKCISYFTIELKEAIPEEVRGKFKNWIFGCDICQDVCPWNRFSRPHQTPEFNLHPDLAQFTRNDWEEITQEVFQEVFRRSPVKRTKLEGLKRTISFVTTPKE

SEQ ID NO: 80667 - protein, 314 aa, Runella sp.
  misc_feature (1)..(314): tr|A0A369I2C9|A0A369I2C9_9BACT Epoxyqueuosine reductase OS=Runella sp. YX9 OX=2282308 GN=queG PE=3 SV=1
MTTDDFVRQQRSQTIKAKATELGFDFCGISTATFLEEEAPRLEHWLNQHRHGQMHYMANHFDKRLDPRKLVEGAKSVISVLLNYYPEQRLPEGKNDLKLSKYAYGTDYHFVLKDKMKELVAQLQEEIGEINGRIFVDSAPVMDKVWAAKSGLGWIGKHSNLLNRDMGSFFFIGEIICDLDLWPDGPVRDYCGTCTRCVDACPTDAIVEPYVVDGSRCISYFTIELKEAIPAEVKGTFENWIFGCDICQDVCPWNRFSKPHQTPEFNLHPELAEFTNGDWKEITQEVFQEIFRRSAVKRTKLEGIQRNVAFVREE

SEQ ID NO: 80668 - protein, 654 aa, Saccharibacillus sp.
  misc_feature (1)..(654): tr|A0A209DI62|A0A209DI62_9BACL Methylated-DNA--protein- cysteine methyltransferase OS=Saccharibacillus sp. O16 OX=1978120 GN=queG PE=3 SV=1
MEKRAGGEGTHTASWEALKQEIIEAAPSLGIDDIGFAAADPFLSLRVRLEQHRAKGYESGFEEPDLDKRTYPALSHEDPQSLIAIAVAYPSKLENAPKSEPGRTRGMMARSAWGRDYHHVLREAMQRLIAFIKERVPWANVVDMVDTGVLSDRAVAHRAGIGFQGKNCMIISPKYGSWIYLGELITNIPFAPDQEVQEDCGDCTRCIDACPTGALVGPGELNAQRCVSFLTQTKGLLTEEFMMKIGNRLYGCDTCQIVCPKNKGKHWPHHDQLQPDPEKAKPLLLPLLDLSNRQFKEQFGETAAAWRGRGPIQRNAVIALGNFKDEAALPKLIEVLGSDPRPVMRGTAAWSIGRIGGSAAEEALLAAQTLEQDEEVLERISLALSEVREGRRPRPAKGDPSRRGRASEPDVRLGGSEAGAGADEVAQGEAGAGADEVAQGEAGAGADEVAQGEAGSGADEVAPTQALRAAAPPAPALLVAEPLVYDEMQSPIGPLVLTASGSGLCRVDFGTFDDVSAKLTLWAKRWFGRGAEIVRRPDSIKPYKKQLFEYLTGRREGFDLPLDLRGTPFQVEVWRALGQIGYGEKVSYKHIAEAVGRPTAVRAVGGANNRNPLPLILPCHRVVGTNGKLVGYAGGLDIKEKLLAIEERVLNSRI

SEQ ID NO: 80669 - protein, 688 aa, Saccharibacillus sp.
  misc_feature (1)..(688): tr|A0A254NGQ7|A0A254NGQ7_9BACL Methylated-DNA--protein- cysteine methyltransferase OS=Saccharibacillus sp. O23 OX=2009338 GN=queG PE=3 SV=1
MEKRTSSAGTNRASWETLKREIIEAAPSLGIDDIGFAAADPFLSLRVRLEQHRAKGYESGFEEPDLDKRTYPALSHEDPQSLIAIAVAYPSKLENAPKSEPGRTRGMMARSAWGRDYHHVLREAMKRLIAFIQERVPWANVVDMVDTGVLSDRAVAHRAGIGFQGKNCMIISPKYGSWIYLGELITNIPFSPDEEVQEDCGDCTRCIDACPTGALVGPGELNAQRCVSFLTQTKGLLSEEFMMKIGNRLYGCDTCQIVCPKNKGKHWPHHDQLQPDPEKAKPLLLPLLDLSNRQFKEQFGETAAAWRGRGPIQRNAVIALGNFKDETALPKLAEVLGSDPRPVMRGTAAWSIGRIGGSAAEEALLAAQALEQDAEVLERISLALSEAREGRKPRPAKGDPSRRGRVSEPDVRLGGGGADSGADIVAQSGAHSGADVVAQGGADGADSGADAVAQGEAYSSADAVAPPQGEAAIFAAESTARTAQAGGAALAVEVPAQQAGASPAPVTAEHLVYDEMQSPIGPLVLTKSGSGLCRIDFGTFEAVSAKLAPWAKRWFESAEIVRRPEAIKPYKKQLFEYLTGRRETFDLPLDLRGTPFQVEVWRALEKIGYGETASYKRIAEAVGRPAAVRAVGGANNRNPLPLILPCHRVVGADGKLVGYAGGVEVKEKLLAIEARVLGNRTLTERDDA

SEQ ID NO: 80670 - protein, 314 aa, Saccharicrinis carchari
  misc_feature (1)..(314): tr|A0A521C493|A0A521C493_9BACT Epoxyqueuosine reductase OS=Saccharicrinis carchari OX=1168039 GN=queG PE=3 SV= 1
MQLLKTAYSDLIRQKALELGFDACGFAKAEELVPEKEILSDWLSNQMHGNMHYMANHFDKRVDPSKLVEGAKTVIVLLSNYTPKIKQSDPEAPIIARYAFGKDYHFVIKDQLKTLFGYIQEEIYPSLEGRYFVDSAPVLERSLAARAGLGWIGKNTHLIHKKLGSYVFISELIVNLDLPKGEPIKDACGGCTRCIDACPTEALLPGRTLDARKCISYLTIENKEAIPEHFVGKMENRVFGCDICQEVCPWTWKSRPHVNENMQPVAKVMQLTKKQWQHLSQEEFSAVFSKSAVKRAKFSGLRRNIDFLLSKSIK

SEQ ID NO: 80671 - protein, 312 aa, Saccharicrinis fermentans
  misc_feature (1)..(312): tr|W7XYC7|W7XYC7_9BACT Epoxyqueuosine reductase OS=Sacc haricrinis fermentans DSM 9555 = JCM 21142 OX=869213 GN =queG PE=3 SV=1
MDVLKGTYSQLIESKAKDLGFDACGFTQAEELTAEKEILKKWLDNHMHGNMHYMANHFEKRVNPSKLVEGAKTVIVLLTNYTPKEKQSHPDAPIIARYAYGQDYHYVIKDQLKQLYSYIKDEIYPSLEGRYFVDSAPVLERSLAVRAGLGWIGKNTHLIHKKLGSYVFISELIINLTLPPSEPIKEACGGCTRCIDACPTQALTSPQTLDARKCISYLTIENKESIPQEFSGKMENRVFGCDICQEVCPWTWKSRPHTNEKLKAVTKILELTKERWQELTAEEFSEIFRKSAVKRAKYTGLKRNIEFLLSKK

SEQ ID NO: 80672 - protein, 369 aa, Saccharophagus degradans
  misc_feature (1)..(369): tr|Q21H96|Q21H96_SACD2 Epoxyqueuosine reductase OS=Sacc harophagus degradans (strain 2-40 / ATCC 43961 / DSM 17 024) OX=203122 GN=queG PE=3 SV=1
MNQPLHTLAQLIKEWSRELGFQQAGITDTDLSNQEDRFRAWLAAGYQGSMEWMAEHADLRLDPEKLHPGACRIISVRLDYLPPDTNQIKILKSADTAYVSRYALGRDYHKLIRKRLATLAKKIEAWAVENQIDVPLSQRPFVDSAPVMERPLAEKAGLGWTGKHTLIINRHAGSYFFLGELFTNLPLPVETQTAENLCGDCTACLKVCPTDAFPTPYTLDAKRCISYLTIENKGPIPEEFREPIGNRVFGCDDCQAICPWNKYATPTDEKDFHPRHGLEAAKLNTLFSWDEATFLKNTEGSAIRRIGFEKWQRNLAVGIGNGPSSPETIDILKQKLHTSTPLVAEHIHWAIKQLQNPDRKRKRKIKAQA

SEQ ID NO: 80673 - protein, 367 aa, Saccharospirillum sp.
  misc_feature (1)..(367): tr|A0A2T6E3E0|A0A2T6E3E0_9GAMM Epoxyqueuosine reductase OS=Saccharospirillum sp. MSK14-1 OX=1897632 GN=queG PE =3 SV=1
MSVSASRIDALDLSALAERIKAEARALGFQAVHIGSANTEAHRPAYEDWLAEGYNGDMKWMERNLDKRFDGAQLHPGSERAISVRLDYRPDGPMQAILDDPNKAYISRYALGRDYHKVMRKRLTQLGRTIESWVGEHGFRAFVDSAPVMERQLAQQAGMGWLGKNSLLLNNTAGSWFFLGELFTNLPLPIDPPFETEHCGSCDRCMTACPTDAFVAEGVLDARRCISYLTIEHSGSIDPALRPLMGNRIYGCDDCQMVCPFNSFSQTTQESDFEPRHNLDQADLLTLFQWSEAEFFEYTEGSAIRRIGYQQWLRNLAVALGNAPTQPAIVEALMARRNEVSDLVREHLDWALERHGVNPPESVSRPD

SEQ ID NO: 80674 - protein, 335 aa, Saccharothrix saharensis
  misc_feature (1)..(335): tr|A0A543JKY9|A0A543JKY9_9PSEU Epoxyqueuosine reductase QueG OS=Saccharothrix saharensis OX=571190 GN=FHX81_58 86 PE=4 SV=1
MRIEDHPTARRVRANPGTPTPPPTTAWLRDLARRAGADDVGFVPVDLPELAVDRDHARTALPNARTYIAFCVRMNRDNVRSPLRSIANTEFHHTLDDADAVGHRLAKALQQAGHRAVHPASAFPQEMDDFPGRGWVISHKLVAQAAGLGRIGIHRNLIHPKFGNFVLLGTVVVDFEVDEHSTPLDFNPCLECKLCVAACPVGAISKDGAFNVLDCYTHNYREFMSGFTDWVENVADSTDREDYRRRVSPSESASMWQSLAFRPNYKAAYCMAACPAGEDVIGPFLDDRRAFLADVVKPLQDKEEPVYVVPGSPAEAHVRKRFPHKTVRQVSNGLH

SEQ ID NO: 80675 - protein, 351 aa, Sagittula sp.
  misc_feature (1)..(351): tr|A0A2K8W9D3|A0A2K8W9D3_9RHOB Epoxyqueuosine reductase OS=Sagittula sp. P11 OX=2009329 GN=queG PE=3 SV=1
MQDLTAALKREAAEVGFSDCRVARVADLPEVMSRLQAFVGAGYHGQMGWLAERMHWRGDPAALWPEARSVVMLAEDYGPDEDPLAVLDRPERGAVSVYARHRDYHDVVKKRLKRLGRWLIEAAEAEGTAGPEIKVFVDTAPVMEKPLGQAAGLGWQGKHTNLVSRRLGSWFFLGCIFTTLDLTPDGAEADHCGSCRRCLDVCPTDAFPAPYRLDARRCISYLTIEHRGPVDEALRPGLGNRIYGCDDCLAVCPWNKFAGVAQEVKYHARDDLRAPPLADLAALDDAGFRARFSGSPIKRIGRDRMVRNVMYAVGNSGRAALEPVAQGLCDDPDEAVRDAARWAVGRLRGKG

SEQ ID NO: 80676 - protein, 351 aa, Sagittula stellata
  misc_feature (1)..(351): tr|A3K538|A3K538_9RHOB Epoxyqueuosine reductase OS=Sagi ttula stellata E-37 OX=388399 GN=queG PE=3 SV=1
MQDLTAALKRQAAEVGFSECRVARVADLPEVMSRLQAFVDAGYHGQMGWLAERMHWRGDPAALWPEARSVVMLAEDYGPDEDPLAVLQQPDCGAVSVYARHRDYHDVVKKRLKRLGRWLIESAEAEGTTGPEIKVFVDTAPVMEKPLGQAAGLGWQGKHTNLVSRRLGSWFFLGCIFTTLDLSPDGAEVDHCGSCRRCLDVCPTDAFPAPYKLDARRCISYLTIEHKGPVDEALRPGLGNRIYGCDDCLAVCPWNKFAGVAQEVKYHARDDLLAPPLADLAALDDAGFRARFSGSPIKRIGRDRMVRNVMYAVGNSGRAALEPVAQRLCDDPDPGVQDAARWAVKRLRGSG

SEQ ID NO: 80677 - protein, 309 aa, Salegentibacter agarivorans
  misc_feature (1)..(309): tr|A0A1I2MXI9|A0A1I2MXI9_9FLAO Epoxyqueuosine reductase OS=Salegentibacter agarivorans OX=345907 GN=queG PE=3 SV=1
MKDTLKEAYTKLIKSEAERLGFLSCGISKAEFLEKEAPRLEEFLKKNRHGEMRWMENNFDKRLDPTKLVEGSKSVISLLLNYYPEETQRNDSYKISKYAYGRDYHFVIKDKLKQLLQFMQDEIGEIDGRAFVDSAPVMDKVWAAKSGLGWIGKHSNLLSKQTGSFYFIAELIVDLELEYDTPVTDHCGSCTACIDACPTDAIVEPYKVDGSKCISYFTIELKDELPNSYKNQFEDWMFGCDICQDVCPWNRFSKPHNEPLLNPHPELLEKDKQGWEELTKETFNEIFRKSAVKRTKFEGLKRNIEFISK

SEQ ID NO: 80678 - protein, 308 aa, Salegentibacter echinorum
  misc_feature (1)..(308): tr|A0A1M5HB13|A0A1M5HB13_9FLAO Epoxyqueuosine reductase OS=Salegentibacter echinorum OX=1073325 GN=queG PE=3 S V=1
MYENKAKYTNLIKTEAKRLGFLSCGISKAEFLEEEAPRLEAYLNKNWQGEMHYLENYFDKRLDPTKLVPGSKSVISLLLNYYPQEKQREDTYQVSKYAYGRDYHFVIKDKLKDLLNTMRDEIGDIEGRAFVDSAPVLDKAWAARSGLGWIGKHSNLLSKQTGSFYFIAELIVDLDLEYDTPVTDHCGSCTACIDACPTDAIVEPYKVDGSRCISYFTIELKDELPNSYKNQFEDWMFGCDICQDVCPWNRFSKPHNEPLFNPHPELLEKDRKGWEELTRETFNEIFRKSAVKRTKFQGLRRNIDFLKD

SEQ ID NO: 80679 - protein, 308 aa, Salegentibacter flavus
  misc_feature (1)..(308): tr|A0A1I4XNR3|A0A1I4XNR3_9FLAO Epoxyqueuosine reductase OS=Salegentibacter flavus OX=287099 GN=queG PE=3 SV=1
MSNLKERYTSLIKAEAKRLGFLSCGVSKAEFLEEEAPRLEKYLQKGMHGEMKYMENHFDKRLDPTKLVEGSKSVISLLLNYYPQQIQNQDSYKISKYAYGRDYHFVIKDKLKDLMQFMQNEIGEIEGRAFVDSAPVLDKAWAAKSGLGWIGKHSNLLSKQTGSFYFIAELIVDLELEYDTPVTDHCGSCTACIDACPTQAIVEPYKVDGSRCISYFTIELKDELPNSFKGQFEDWMFGCDICQDVCPWNRFSKPHNEPLFNPHPGLLENDKKDWEEITKETFNEIFRKSAVKRTKFEGLKRNIDFLKK

SEQ ID NO: 80680 - protein, 307 aa, Salegentibacter holothuriorum
  misc_feature (1)..(307): tr|A0A1T5BIW2|A0A1T5BIW2_9FLAO Epoxyqueuosine reductase OS=Salegentibacter holothuriorum OX=241145 GN=queG PE= 3 SV=1
METRSKYTNMIKSEAERLGFLSCGISKAEFLEKEAPRLEEFLNKNRHGEMRWMENNFDKRLDPTKLVEGSKSVISLLLNYYPGETQREDSYKISKYAYGRDYHFVIKDKLKQLLQFMQDEIGEIEGRAFVDSAPVMDKVWAAKSGLGWIGKHSNLLSKQTGSFYFIAELIVDLDLEYDTPVTDHCGSCTACIDACPTDAIIDAYKVDGSKCISYFTIELKDELPNSYKNQFEDWMFGCDICQDVCPWNRFSKPHNEPLFNPHPELLEKDKKGWEELTKETFNEIFRKSAVKRTKFEGLKRNIEFLRD

SEQ ID NO: 80681 - protein, 309 aa, Salegentibacter mishustinae
  misc_feature (1)..(309): tr|A0A0Q9ZH85|A0A0Q9ZH85_9FLAO Epoxyqueuosine reductase OS=Salegentibacter mishustinae OX=270918 GN=queG PE=3 SV=1
MKDTLKEAYTNMIKSEAERLGFLSCGISKAEFLEEEAPRLEEFLKKNRHGEMRWMENNFDKRLDPTKLVEGSKSVISLLLNYYPGETQREDSYKISKYAYGRDYHFVIKDKLKQLLQFMQDEIGEIDGRAFVDSAPVMDKVWAAKSGLGWIGKHSNLLSKQTGSFYFIAELIVDLELEYDTPVTDHCGSCTACIDACPTDAIVDPYKVDGSKCISYFTIELKDELPNSYKNQFEDWMFGCDICQDVCPWNRFSKPHNEPLFNPHPELLEKDKKGWEELTKETFNEIFRKSAVKRTKFEGLKRNIQFLND

SEQ ID NO: 80682 - protein, 309 aa, Salegentibacter salarius
  misc_feature (1)..(309): tr|A0A2N0TZ17|A0A2N0TZ17_9FLAO Epoxyqueuosine reductase OS=Salegentibacter salarius OX=435906 GN=queG PE=3 SV= 1
MKDTLKEAYTSMIKSEAERLGFLSCGISKAEFLEEEAPRLEEFLKKNRHGEMRWMENNFDKRLDPTKLVEGSKSVISLLLNYYPGETQREDSYKISKYAYGRDYHFVIKDKLKQLLQFMQDEIGEIDGRAFVDSAPVMDKVWAAKSGLGWIGKHSNLLSKQTGSFYFIAELIVGLELEYDTPVTDHCGSCTACIDACPTDAIVDPYKVDGSKCISYFTIELKDELPNSYKNQFEDWMFGCDICQDVCPWNRFSKPHNEPLFNPHPELLEKDKKGWEELTKETFNEIFRKSAVKRTKFEGLKRNIQFLKD

SEQ ID NO: 80683 - protein, 309 aa, Salegentibacter salegens
  misc_feature (1)..(309): tr|A0A1M7MW87|A0A1M7MW87_9FLAO Epoxyqueuosine reductase OS=Salegentibacter salegens OX=143223 GN=queG PE=3 SV= 1
MKDTLKEAYTNLIKSEAERLGFLSCGISKAEFLEEEAPRLEEFLKKNHQGEMRWMENNFDKRLDPTKLVEGSKSVISLLLNYYPGETQREDSYKISKYAYGRDYHFVIKDKLKQLLQFMQDEIGEISGRAFVDSAPVMDKVWAAKSGLGWIGKHSNLLSKQTGSFYFIAELIVDLELEYDTPVTDHCGSCTACIDACPTDAIIDPYKVDGSKCISYFTIELKDELPNSYKNEFEDWMFGCDICQDVCPWNRFSKPHNEPLFNPHPELLEKDKKGWEELTKETFNEIFRKSAVKRTKFEGLKRNIEFLKD

SEQ ID NO: 80684 - protein, 308 aa, Salegentibacter salinarum
  misc_feature (1)..(308): tr|A0A2N0TRY7|A0A2N0TRY7_9FLAO Epoxyqueuosine reductase OS=Salegentibacter salinarum OX=447422 GN=queG PE=3 SV =1
MYENKSKYTQLIKTEASRLGFLSCGISKAEFLEAEAPRLEEFLKKNRHGEMRWMENNFDKRLDPTKLVEGSKSVISLLLNYYPKETQREDSYKISKYAYGRDYHFVIKDKLKQLLQVMQDEIGEINGRAFVDSAPVMDKAWAAKSGLGWIGKHSNLLSKQTGSFYFIAELIVDLDLEYDAPVTDHCGSCTACIDACPTDAIVEPYKVDGSKCISYFTIELKDELPNSYKNQFEDWMFGCDICQDVCPWNRFSKPHNEPLFNPHPELLEKDKKGWEELTKETFNEIFRKSAVKRTKFEGLKRNIEFLQK

SEQ ID NO: 80685 - protein, 292 aa, Salegentibacter sp.
  misc_feature (1)..(292): tr|A0A4V3BWP2|A0A4V3BWP2_9FLAO Epoxyqueuosine reductase OS=Salegentibacter sp. 24 OX=2183986 GN=queG PE=3 SV=1
MRLGFLSCGVSKAEFLEAEAPRLEEFLNKNRHGEMRWMENNFDKRLDPTKLVEGSKSVISLLLNYYPEETQREDSYKISKYAYGRDYHFVIKNKLKQLLQFMQDEIGEISGRAFVDSAPVMDKAWAAKSGLGWIGKHSNLLSKQTGSFYFIAELIVDLELEYDTPVTDHCGSCTACIDACPTEAIVEPYKVDGSKCISYFTIELKDELPNSFKNQFEDWMFGCDICQDVCPWNRFSKPHNEPLFNPHPELLEKDKQGWEELTKETFNEIFKKSAVKRTKFEGLKRNIEFLKG

SEQ ID NO: 80686 - protein, 309 aa, Salegentibacter sp.; identical to SEQ ID NO: 80677
  misc_feature (1)..(309): tr|A0A1L6R1I6|A0A1L6R1I6_9FLAO Epoxyqueuosine reductase OS=Salegentibacter sp. T436 OX=1729720 GN=queG PE=3 SV =1

SEQ ID NO: 80687 - protein, 378 aa, Salibacterium halotolerans
  misc_feature (1)..(378): tr|A0A1I5UK48|A0A1I5UK48_9BACI Epoxyqueuosine reductase OS=Salibacterium halotolerans OX=1884432 GN=queG PE=3 SV=1
MTGVELKEKIIAYSKEIGIDKIGFASTDPFLTLKDRLIEQQRLQYQSGFEEPDIEKRTEPERLLPEAKTIISIALAYPSKMKNEPKSRKGDRRGLFCRASWGQDYHNVLKDRLQKLEDYIADIAPEARNQSMVDTGELSDRAVAERAGIGWSGKNCAIITPEFGSYVYLGEMITTLSLEPDKEITDQCGTCNKCVDACPTGALVQGGQLDSSKCIAFLTQTKGSLPERFRKKIGNRIYGCDTCQTVCPENKGMDHHQNEEFEPDPEVVKPRLEPLLTISNREFKEVYGPMAGSWRGKKPIQRNAVLALGTYKAEEALDSLTHVLHRDPRPVIRGSAAWSLGQIGTEEALQALYEAEQHETDESVQEEIANAKAPHFVP

SEQ ID NO: 80688 - protein, 378 aa, Salibacterium qingdaonense
  misc_feature (1)..(378): tr|A0A1I4J8P6|A0A1I4J8P6_9BACI Epoxyqueuosine reductase OS=Salibacterium qingdaonense OX=266892 GN=queG PE=3 S V=1
MTGAELKEKIAAYSKEIGIDKIGFASTDPFLTLKDRLIEQQRLQYHSGFEEPDIEKRTEPERLLPEAKTIISIALAYPSKMENEPKSRKGDRRGMFCRASWGVDYHNVLKDRLQKLEDYIQEIAPEARNQSMVDTGELSDRAVAERAGIGWSGKNCAIITPEFGSYVYLGEMITTLSLEPDKEITDQCGTCNKCVDACPTGALVQGGQLDAGKCIAYLTLTKGSLPERFRKKIGNRLYGCDTCQTVCPENKGMDHHQHEEFEPDPEVVKPSLEPLLTISNREFKNTFGPIAGSWRGKKPIQRNAVLALGTYKAEEALDSLVHVLHRDPRPVIRGSAAWSLGQIGTKEAVEALYEAEQHESEEDVQEEIASAKAPHAVP

SEQ ID NO: 80689 - protein, 378 aa, Salimicrobium flavidum
  misc_feature (1)..(378): tr|A0A1N7JCP4|A0A1N7JCP4_9BACI Epoxyqueuosine reductase OS=Salimicrobium flavidum OX=570947 GN=queG PE=3 SV=1
MLDFHQLKQETIDYSKEIGIDKIGFASADVFGELKSRLIRQEQLGYQSGFEKGDPEERAEPERLLPTSQSIISIALAYPSKMKNPPKNEKGARRGQFARASWGEDYHTVLKEKLQLLGAFLQERMPDIDLKWMVDTGELSDRAVAERAGIGFSGKNCAIITPEFGSYVYLGEIVTNVPFEPDEPIQEGCGDCNICVDACPTDALVQGGQLNANRCIAFLTQTKGFLEDEYRTKIGNRVYGCDTCQTVCPINRGKDFHHHEEFEPDPEKVKPKLRPLLRISNREFKERFGRMAGSWRGKKPIQRNAILALGHYKETEAVDDLIHLMKNDPRPVIRGTAAYSLGKIGTPESYEAIAEALASEKDEEVTEEMEKGLDFQVT

SEQ ID NO: 80690 - protein, 378 aa, Salimicrobium halophilum
  misc_feature (1)..(378): tr|A0A1G8TIL2|A0A1G8TIL2_9BACI Epoxyqueuosine reductase OS=Salimicrobium halophilum OX=86666 GN=queG PE=3 SV=1
MLDVHQLKEDIIAYSKDIGIDKIGFASADVFGELKSRLIRQEQLGYQSGFEKGSVEERTEPERLLPTSQSIISIALAYPSKMKNPPKNEKGARRGQFARASWGEDYHTVLREKLQLLGTFLQEKVPDVDLKWMVDTGELSDRAVAERAGIGFSGKNCAIITPEYGSYVYLGELVTNVPFVPDEPIQDGCGDCNICVDACPTDALVQGGQLDANRCIAFLTQTKGFLEEEYRTKIGNRLYGCDTCQTVCPINRKKDFHNHEDFEPDPEKVKPKLRPLLRISNREFKERFGRMAGSWRGKKPIQRNAILALGHYKEVEAVDDLIFLMENDPRPVIRGTAAYSLGKIGTSRCYEAITEALDKEKEEEVKEEMEKGLAFQVS

SEQ ID NO: 80691 - protein, 377 aa, Salimicrobium jeotgali
  misc_feature (1)..(377): tr|K2GJK1|K2GJK1_9BACI Epoxyqueuosine reductase OS=Sali microbium jeotgali OX=1230341 GN=queG PE=3 SV=1
MDAEQLKRETIAYSKEIGIDKIGFASADVFGELKSRLIRQEQLGYHSGFEKGSPEERTEPERLLPSSQSIISIALAYPSKMENPPKNEKGARRGQFARASWGEDYHTVLREKLQLLGSFLREKVPEVELKLMVDTGELSDRAVAERAGIGFSGKNCAIITPEFGSYVYLGELVTNLPFAPDEPIQEGCGDCNICVDSCPTDALVQGGQLNANRCIAFLTQTKGFLEDEYRTKIGNRVYGCDTCQTVCPFNRKKDFHLHEEFEPDPEKVKPVLRPILRISNREFKEKFGRMAGSWRGKKPIQRNAILALGHYREIEAVEDLVHLMKNDPRPVIRGTAAYSLGKIGTPECFEELEMARGDETDEKVKEEMEKGLAFQMN

SEQ ID NO: 80692 - protein, 377 aa, Salimicrobium salexigens
  misc_feature (1)..(377): tr|A0A1N7J4H3|A0A1N7J4H3_9BACI Epoxyqueuosine reductase OS=Salimicrobium salexigens OX=908941 GN=queG PE=3 SV= 1
MDAEQLKRETIAYSKEIGIDKIGFASADVFGELKSRLIRQEQLGYHSGFEKGSPEERTEPERLLPSSQSIISIALAYPSKMENPPKNEKGARRGQFARASWGEDYHTVLREKLQLLGSFLREKVPEVELKLMVDTGELSDRAVAERAGIGFSGKNCAIITPEFGSYVYLGELVTNLPFAPDEPIQEGCGDCNICVDSCPTDALVQGGQLNANRCIAFLTQTKGFLEDEYRTKIGNRVYGCDTCQTVCPFNRKKDFHLHEEFEPDPEKVKPVLRPILRISNREFKEKFGRMAGSWRGKKPIQRNAILALGHYREIEAVEDLVYLMKNDPRPVIRGTAAYSLGKIGTPECFEELEVARGDETDEKVKEEMEKGLAFQVN

SEQ ID NO: 80693 - protein, 377 aa, Salimicrobium sp.
  misc_feature (1)..(377): tr|A0A2A3A7E7|A0A2A3A7E7_9BACI tRNA epoxyqueuosine(34) reductase QueG OS=Salimicrobium sp. WN024 OX=2029857 GN =queG PE=4 SV=1
MDAEQLKKETIAYSKEIGIDKIGFASADVFGELKSRLIRQEQLGYHSGFEKGSPEERTEPERLLPSSQSIISIALAYPSKMENPPKNEKGARRGQFARASWGEDYHTVLREKLQLLGSFLREKVPEVELKLMVDTGELSDRAVAERAGIGFSGKNCAIITPEFGSYVYLGELVTNLPFAPDEPIQEGCGDCNICVDSCPTDALVQGGQLNAGRCIAFLTQTKGFLEDEYRTKIGNRVYGCDTCQTVCPFNRKKDFHLHEEFEPDPEKVKPVLRPILRISNREFKEKFGRMAGSWRGKKPIQRNAILALGHYRETEAVEDLVYLMKNDPRPVIRGTAAYSLGKIGTPECFEELEVARGHETDEKVKEEMEKGLAFQMN

SEQ ID NO: 80694 - protein, 330 aa, Salinarimonadaceae bacterium
  misc_feature (1)..(330): tr|A0A0P7Y3T3|A0A0P7Y3T3_9RHIZ Epoxyqueuosine reductase QueG OS=Salinarimonadaceae bacterium HL-109 OX=1653334 GN=queG PE=4 SV=1
MDWMAETAPRRADPKTLWPEVRSIILLGMNYGPDCDPLEDLDKRDRATISVYARNRDYHDVIKGRLKELAGFLVARAGGDVKVFVDTAPVMEKPLAEAAGLGWQGKHTVLVSREFGSWLFLGAIFTTAELPPDAPESDHCGSCRRCLDICPTNAFPAPYQLDARRCISYLTIEHKGHIDRDLRPGIGNRIFGCDDCLAVCPWNKFAQDAREAKLRQREDLARLPLAELASLDDTAFRARFAGTPIKRTGRDRFLRNVLIAIGNSGMPALAQPARERLGDDSPLVRAMAIWALSRLLPRADFIALAARYIDGESDAAVQAEWRMGCEEKTV

SEQ ID NO: 80695 - protein, 381 aa, Salinarimonas sp.
  misc_feature (1)..(381): tr|A0A5B2VVW0|A0A5B2VVW0_9RHIZ Epoxyqueuosine reductase OS=Salinarimonas sp. BN140002 OX=1638099 GN=queG PE=3 SV=1
MTGAGLKALLQERARALGFDACRIASPDAIPEARERLDAWLAAGHHGTMAWMSENVDRRADPRALWAEVRSVVLLAVNYGPETDPLATLSRPERASISVYARNRDYHEVIKGRLKELAGVLASRAGADVKVFVDTAPVMEKPLAQAAGLGWQGKHTVLVSRDYGNWLFLGAIFTTAELPVDGPAEESCGSCRRCLDVCPTNAFPAPFRLDARRCVSYLTIEHKGHIDPALRAGIGNRVFGCDDCLAVCPWNKFAKAGREAKLRQRDDLAALPLAELAALDDAAFRARFAGTPVKRTGRDRFVRNVLIAIGNSGEPVLAAAAEPRLDDASPLVRAMAVWACGRLLTREHAADLARARLPAETDPDVRGEWAALGLAPIEETA

SEQ ID NO: 80696 - protein, 379 aa, Salinibacillus kushneri
  misc_feature (1)..(379): tr|A0A1I0AL41|A0A1I0AL41_9BACI Epoxyqueuosine reductase OS=Salinibacillus kushneri OX=237682 GN=SAMN05421676_1 02191 PE=4 SV=1
MYDELKQDVMKQSKGIGIDKIGFASVDVFTTLKERLKVQQENQYQSGFEKGTIEERTTPRKLMPEAQSIISIALAYPSKLENAPRSTKGDRRGQFCRASWGTDYHHILREKLEQLGEYLKEKHPDTQYKIMVDTGELSDKEVAVRAGIGFTGKNTVLITPEFGSYVYLGEMITNIPFEPDQPLEEDCGNCNLCVDTCPTGALIQGGQLNAQKCIAFLTQTKDFLPDDYRKKIGNRLYGCDTCQVVCPRNKGKNFHLHEEMEPDPEVVKPRLKPLLRISNREFKETFGPMAGSWRGKKPIQRNAIIALANYKDETAVDELIDVMKHDPRLVIRGTAAWALGKIGSESGKTAILEAKEKETDESVLAEMEKGLEFFTAPLS

SEQ ID NO: 80697 - protein, 327 aa, Salinibacter sp.
  misc_feature (1)..(327): tr|A0A2P6C1F9|A0A2P6C1F9_9BACT Epoxyqueuosine reductase OS=Salinibacter sp. 10B OX=1923971 GN=queG PE=3 SV=1
MPGFDATSQERLAQATKLEATRLGFDACGISKAEPLDEEAIRLEQWLLEGRHGTMDWMERNFDKRIDPTKLVDGAESVISVLHNYYQPTDHPDDPEVGKISRYAWGTDYHEVMKEKLYLLYQWLQEAVDAEINGRAFVDSAPVMDKAWAKRSGLGWQGKHSNVLNRETGSFFFLGELIVSVPMDTDDPMADYCGSCTRCIDACPTDAIYEPYAVDANRCISYLTIEHGPDDVPDGLQPDVGNWLFGCDICQDVCPWNKFSQPTDEERYLPREGVTDTALEDWAEMNLDEFERRFEASPVKRATFDGFKRNVRNAIQNALNRRADDSS

SEQ ID NO: 80698 - protein, 377 aa, Salinicoccus alkaliphilus
  misc_feature (1)..(377): tr|A0A1M7A668|A0A1M7A668_9STAP Epoxyqueuosine reductase OS=Salinicoccus alkaliphilus DSM 16010 OX=1123231 GN=S AMN02745189_00040 PE=4 SV=1
MDRNEFKQKVIDYAHSIGIDDIGFTHAEPFLEYKAKLIDYLDKGYASGFEKGSVEERTNPKASLPGAKSIIAIAVGYPNKLPDAPKGRKGSRRGMFARASWGMDYHELLNRRLDKLEAYIKSIDPGIETKSMVDTGVLSDREVARRSGLGYIGKNGFVINPELGTYTYLGEMIVSYPFPPDEELIDSCGDCNICVDRCPTGALVGNGQLDSNKCISFLTQIKGWMPDEYRHKIGNRLYGCDTCQQVCPRNKGINTDHHEDIVLEPEILKPELEPLLEISNREFKEKYGHLAGVWRGKKPIQRNAIIALAHFKEESAVDTLKRVAENDPRPVIKGTAYWAIGQIQGSDAAGYIHERYPHEQDAEVKEEMLKGIQEVSH

SEQ ID NO: 80699 - protein, 376 aa, Salinicoccus halodurans
  misc_feature (1)..(376): tr|A0A0F7HLG0|A0A0F7HLG0_9STAP Iron-sulfur cluster-bind ing protein OS=Salinicoccus halodurans OX=407035 GN=AAT 16_09615 PE=4 SV=1
MERSEFKQKVIDYAHSIGIDEIGFTHSEPFLEFREKLIDYHKKGYASGFEKGSVEERTEPKRSLESANSIISIAVGYPNKLPDAPKSRKGARRGLFARASWGVDYHTLLNDRLDKLEQFIKSLDPDIETKSMVDTGVLSDREVARRSGLGYIGKNGFMINPNLGTYSYLGEMITSYPFPPDEELIDSCGDCNLCVDRCPTGALVGNGQLDSQKCISFLTQTKGFLPDEYRSKIGNRLYGCDTCQQVCPRNKGINTDHHEDIVLEPEILKPELTSLLEISNRDFKETYGHLAGVWRGKKPIQRNAIIALAHFKEVDSAEVLKRVAENDARPVIKGTAYWAIGRILENDALEYINERYKIETDEQVKEEMLKGIQEAV

SEQ ID NO: 80700 - protein, 377 aa, Salinicoccus kekensis
  misc_feature (1)..(377): tr|A0A285UCC4|A0A285UCC4_9STAP Epoxyqueuosine reductase OS=Salinicoccus kekensis OX=714307 GN=SAMN05878391_093 0 PE=4 SV=1
MDRREFKQKVIDYAHSIGIDDIGFTHAEPFLEYKAKLIDYLDKGYASGFEKGSVEERTNPKASLPSAKSIIAIAVGYPNKLPDAPKGRKGSRRGMFARASWGMDYHELLNRRLDKLEAYIKSIDPGIETKSMVDTGVLSDREVARRSGLGYIGKNGFVINPELGTYTYLGEMIVSYPFPPDEELIDSCGDCNICVDRCPTGALVGNGQLDSNKCISFLTQIKGWMPDEYRYKIGNRLYGCDTCQQVCPRNKGINTDHHEDIVLEPEILKPELEPLLEISNREFKEKYGHLAGVWRGKKPIQRNAIIALAHFKEESAVDTLKRVAENDPRPVIKGTAYWAIGQIQGSDAAGYIHERYPHEQDAEVKAEMLKGIQETSQ

SEQ ID NO: 80701 - protein, 377 aa, Salinicoccus qingdaonensis
  misc_feature (1)..(377): tr|A0A1G9HSS6|A0A1G9HSS6_9STAP Epoxyqueuosine reductase OS=Salinicoccus qingdaonensis OX=576118 GN=SAMN0521621 6_12612 PE=4 SV=1
MDRYEFKQKVIDYAHSIGIDEIGFTHAEPFVEYKAKLMDYLDKGFASGFEKGSVEERTNPKASLPNAQSIIAIAVGYPNKLPDAPKGRKGSRRGIFARASWGMDYHTLLNRRLNKLEAYIKSLNPDVETKSMVDTGVLSDREVARRSGLGFIGKNGFVINPELGTYSYLGEMIVSYPFAPDEELIDSCGDCNICVDRCPTGALVGNGQLDSNKCISFLTQIKGSMPDEYRFKIGNRLYGCDTCQQVCPRNKGINTDHHEDIVLEPEILKPELEPLLEISNRDFQDKYGHLAGVWRGKKPIQRNAIIALAHFKEESSIDTLKRVAENDPRPMIKGTAYWAIGQIQGSEAAPYINERYPVEQDTEVREEMLKGIQEVSH

SEQ ID NO: 80702 - protein, 376 aa, Salinicoccus roseus
  misc_feature (1)..(376): tr|A0A3N4THU9|A0A3N4THU9_9STAP Epoxyqueuosine reductase OS=Salinicoccus roseus OX=45670 GN=EDC33_0035 PE=4 SV= 1
MERSEFKKKVVDYAHSIGIDQIGFTHAEPFTEFREKLIDYHRRGYASGFEKGSVDERTEPRLSLGSARSIISIAVGYPNRLPDAPKSRKGERRGMFARASWGVDYHTLLNRRLARLEDYIKSLDPSIECRSMVDTGVLSDREVARRSGLGYIGKNGFVINPELGTYSYLGEMITSYPFPPDEELIDSCGDCNLCVDRCPTGALVGNGQLDSQKCISFLTQTKGFLPDEYRGKIGNRLYGCDTCQQVCPRNKGINTDHHADIVLEPEILKPELTGLLEISNRDFKETYGHLAGVWRGKKPIQRNAIIALAHFREESAVDTLKRVAENDPRPVIKGTAYWAIGRILGDRALDYISERYKMETDEAVRDEMLKGVQEVA

SEQ ID NO: 80703 - protein, 376 aa, Salinicoccus roseus
  misc_feature (1)..(376): tr|A0A265E809|A0A265E809_9STAP tRNA epoxyqueuosine(34) reductase QueG OS=Salinicoccus roseus OX=45670 GN=queG PE=4 SV=1
MERSEFKKKVVDYAHSIGIDQIGFTHAEPFTEFREKLIDYHRRGYASGFEKGSVDERTEPRLSLGSARSIISIAVGYPNRLPDAPKSRKGERRGMFARASWGVDYHTLLNRRLARLEDYIKSLDPSIECRSMVDTGVLSDREVARRSGLGYIGKNGFVINPELGTYSYLGEMITSYPFPPDEELIDSCGDCNLCVDRCPTGALVGNGQLDSKKCISFLTQTKGFLPDEYRGKIGNRLYGCDTCQQVCPRNKGINTDHHADIVLEPEILKPELTGLLEISNKDFKETYGHLAGVWRGKKPIQRNAIIALAHFREESAVDTLKRVAENDPRPVIKGTAYWAIGRILGDRALDYISERYKMETDEAVRDEMLKGVQEVA

SEQ ID NO: 80704 - protein, 376 aa, Salinicoccus sediminis
  misc_feature (1)..(376): tr|A0A0M2SMI8|A0A0M2SMI8_9STAP Iron-sulfur cluster-bind ing protein OS=Salinicoccus sediminis OX=1432562 GN=WN5 9_03535 PE=4 SV=1
MERSEFKQKVIDYARSIGIDEIGFTHAEPFLEFKEKLIDYHKRGYASGFEKGSVGERTEPRRSLGSAKSIISIAVGYPNRLPDAPKSRKGERRGLFARASWGMDYHTLLNNRLEKLEEYIKSLDPDVKTRSMVDTGVLSDREVARRSGLGYIGKNGFMINPKLGTYSYLGEMITSYPFPPDEELIDSCGDCNLCVDRCPTGALTGTGQLDSQKCISFLTQTKGFLPEEYRGKIGNRLYGCDTCQQVCPRNKGINTDHHEDIVLEPEILKPELTGLLEISNRDFKETYGHLAGVWRGKKPIQRNAIIALAHFKEKESVEVLKRVAENDQRPVIKGTAYWAIGRIMGNDALEYINERFQIETDGQVKEEMLNGIQEAV

SEQ ID NO: 80705 - protein, 376 aa, Salinicoccus sp.
  misc_feature (1)..(376): tr|A0A558AZX2|A0A558AZX2_9STAP tRNA epoxyqueuosine(34) reductase QueG OS=Salinicoccus sp. CT19 OX=2493691 GN=q ueG PE=4 SV=1
MNRHEFKQKVIDYAHSIGIDEIGFTHAEPFHELREKLIDYHAKGYASGFEKGTIDERTDPKLSLSSAESIISIAVGYPNRLPDAPKSRKGERRGLFARASWGVDYHTLLNRRLEKLEAYIKSLDPDIETKSMVDTGVMSDREVARRSGLGYIGKNGFVINPELGTYSYLGEMLTSYPFPPDEELIDSCGDCNLCVDRCPTGALVGNGQLNSQKCISFLTQTKGFLPDEYRGKIGNRLYGCDTCQQVCPRNKGINTDHHDDIVLEPEILKPELAGLLEISNREFKETYGHLAGVWRGKKPIQRNAIIALAHFKETSAVDLLKRVAENDPRPVIKGTAYWAVGQIEGDRALDYINERFRMETDEAVRDEMLKGIQEVV

SEQ ID NO: 80706 - protein, 363 aa, Salinicola socius
  misc_feature (1)..(363): tr|A0A1Q8SSK6|A0A1Q8SSK6_9GAMM Epoxyqueuosine reductase OS=Salinicola socius OX=404433 GN=queG PE=3 SV=1
MSQPSSIDLNALASRIKQWGRELGFQAIGITDTDLSSHERYLQRWLEAGHHGEMHYMAKHGSKRTRPQELVPGTLRVISARMDYLPPEVETTRILGQPEKAYVSRYALGRDYHKLIRKRLDQLARQIEDEVGQIGYRAFVDSAPVMERALAQKAGLGWFGKNAMLLNPQAGSLFFLGELYTDLPLPVDPPFEREHCGSCSSCQTACPTNAIIDDKVIDARRCISYLTIELHGSIPTEFRRAMGNRVYGCDDCQLFCPFTRFTRASTEPDFAPRHDLDRAELIDLFAWSETEFLKRTEGSPIRRIGYERWLRNLAIGLGNAPWSERVESALRARLAYPSDLVREHVRWALEEQRTRREARIAST

SEQ ID NO: 80707 - protein, 363 aa, Salinicola sp.
  misc_feature (1)..(363): tr|A0A2D8NXE3|A0A2D8NXE3_9GAMM Epoxyqueuosine reductase OS=Salinicola sp. OX=1978524 GN=queG PE=3 SV=1
MSQRSSVDFNDLASRVKQWGRELGFQAIGITDTDLQTHERYLQRWLAAGHHGEMHYMARHGSKRTRPQQLVPGTLRVISARMDYLPPEVETTRTLGQPHKAYVSRYALGRDYHKLIRKRLDQLARKIENEVGQIGYRAFVDSAPVMERALAQKAGLGWFGKNAMLLDPQAGSLFFLGELYTDLPLPVDPPFEREHCGSCSSCQTACPTDAIIDDKVIDARRCISYLTIELHGNIPLEFRRAMGNRVYGCDDCQLFCPFTRFTRASAEPDFAPRHELDRAELIDLFAWGESEFLKRTEGSPIRRIGYERWLRNLAIGLGNAPWSERVEHALRARLAYPSDLVREHVRWALEEQRIKREARIASA

SEQ ID NO: 80708 - protein, 363 aa, Salinicola sp.
  misc_feature (1)..(363): tr|A0A1S2DB18|A0A1S2DB18_9GAMM Epoxyqueuosine reductase OS=Salinicola sp. MIT1003 OX=1882734 GN=queG PE=3 SV=1
MSQPSSIDFDELASCIKQWGRELGFQAIGITDTDLQTHERYLQRWLDAGHHGEMHYMAKHGSKRTRPQELVPRTLRVISARMDYLPPEVETTRILGQPQKAYVSRYALGRDYHKLIRKRLDQLARRIEDEVGPIGYRAFVDSAPVMERALAQKAGLGWFGKNAMLLNPQAGSLFFLGELYTDLPLPVDPPFEREHCGSCSSCQTACPTDAIIDDKVIDARRCISYLTIELHGSIPLEFRRAMGNRVYGCDDCQLFCPFTRFTRASAEPDFAPRHDLDRAELIELFAWSETEFLKRTEGSPIRRIGYERWLRNLAIGLGNAPWSERVESALRARLAYPSDLVREHVRWALEEQRRKREARIASA

SEQ ID NO: 80709 - protein, 346 aa, Salinihabitans flavidus
  misc_feature (1)..(346): tr|A0A1H8QZZ9|A0A1H8QZZ9_9RHOB Epoxyqueuosine reductase OS=Salinihabitans flavidus OX=569882 GN=queG PE=3 SV=1
MSADFKARLIAEAEAIGFDRVRLCRPDAVGHVAADLAGFLDKGYHGQMSWLERRSEWRGDPSALWPEARTVIMLGESYTPEHDPREILSQSDKGAISVYAQNRDYHDTVKKRLKRLARWLIAQEGGEVKVFVDTAPVPEKPLGEASGLGWQGKHTNLVSRELGSWFFIGSVFTTLELPVDAPEVDHCGSCRACLDICPTGAFPAPYKIDARRCISYLTIEHHGPVDPELRPLMGNRIYGCDDCLAACPWNKFAVEAREIRYHARGDLLAPDLEELAALDDAGFRAFFSGSPIKRIGRDRFVRNVLYAIGNSGQPRFLPRARALCADEDATVRDAAEWAVKRLEDAG

SEQ ID NO: 80710 - protein, 299 aa, Salinimicrobium catena
  misc_feature (1)..(299): tr|A0A1H5H8F5|A0A1H5H8F5_9FLAO Epoxyqueuosine reductase OS=Salinimicrobium catena OX=390640 GN=queG PE=3 SV=1
MIKAEAKSLGFLSCGISKAEFLEEEAPRLENYLKKNMHGEMKYMENHFDKRLDPTKLVEGSKSVISLLLNYYPEERQREDSYKISKYAYGTDYHFVIKDKLKDLLRFIQEEIGEVEGRAFVDSAPVLDKAWAAKSGLGWIGKNSNLLSKQTGSFFFVAELIVDLDLEYDTPVTDHCGSCTACIDACPTNAIIEPYKVDGSKCISYFTIELKDQLPQEMKGKFDEWMFGCDVCQDVCPWNRFSKPHNEPLFDPHPDLLSMSKKDWEEITEDTFRKVFKKSAVKRTKFSGLTRNIDFLKED

SEQ ID NO: 80711 - protein, 308 aa, Salinimicrobium sediminis
  misc_feature (1)..(308): tr|A0A285X0S1|A0A285X0S1_9FLAO Epoxyqueuosine reductase OS=Salinimicrobium sediminis OX=1343891 GN=queG PE=3 S V=1
MDKKCQYSQLIKAEANRLGFLSCGISKAEFLEEEAPRLEEYLKKQRHGKMSFLENYFDKRLDPTKLVEGSKSVISLLLNYYPEETQREDTYKISKYAYGTDYHFVIKDKLKSLLEFIQQEIGEVEGRAFVDSAPVMDKAWAAKAGLGWVGKHTLLLSKQKGSFFFVAELIVDLELEYDTPVTDHCGSCTACIDACPTNAIVEPYKVDGSKCISYFTIELKDELPQEMKGKFEDWAFGCDICQDVCPWNRFSKPHNEPLFNPHPELLSMSKKDWEEITEETFRKVFKKSAVKRTKYSGLTRNISFLKEE

SEQ ID NO: 80712 - protein, 396 aa, Salinimonas sediminis
  misc_feature (1)..(396): tr|A0A346NR63|A0A346NR63_9ALTE Epoxyqueuosine reductase OS=Salinimonas sediminis OX=2303538 GN=queG PE=3 SV=1
MSVSSISSVDLVKLTDDIKAWGQALGFQQVGISDIDLKQHEAALQQWLDNGYHGQMNYMEDRGMMRARPAELVPGTVRVISVRMDYLPPDASFARHLKDNHIAYISRYALGRDYHKVLRKRLKQLGEKITAALADTQYRPFVDSAPVLEHAIAEKAGLGWTGKHSLTLNRQAGSWFFLGELFINLPLPVDQPVEEGCGSCNACITMCPTGAIVAPYQVDARKCISYLTIEYDGVIPLALRPLMGNRIYGCDDCQLVCPWNRFASVTTETDFQPRKMLHGQSLLTLFEWDEAQFLRYTEGSPIRRIGYQKWQRNLAVALGNARPSLIILSALQKALPHAAALVATHLEWAIECQQEGLQEAGSGPPETATAVAKTAPQQRKTARLTRVIEKGLPRDA

SEQ ID NO: 80713 - protein, 379 aa, Salinimonas sp.
  misc_feature (1)..(379): tr|A0A5B7Y9E5|A0A5B7Y9E5_9ALTE Epoxyqueuosine reductase OS=Salinimonas sp. KX18D6 OX=2572577 GN=queG PE=3 SV=1
MSGIHSIDLGRLADDIKAWGRALGFQQVGISDIDLSKHEAHLQQWLDNGYHGEMDYMAAHGMKRARPAELLPGTLRVISVRMDYLPPDASFATHLRNDQVGYISRYALGRDYHKVLRKKLKQLGQKITETFSDTQFRPFVDSAPVLEHAIAEKAGLGWTGKHSLTLNRDAGSWFFLGELFVNLPLPTDSPVEEGCGTCNACITMCPTGAIVAPYQVDARKCISYLTIEHDGLIPESLRPLMGNRIYGCDDCQLVCPYNRFADITEQEDFHPRKVLHGQSLVTLFNWDEDTFLKNTEGSPIRRIGHAKWQRNIAVAMGNAKYDADIVKALEAARPVADALVKPHIEWALSRQKESASHQNDNRQLARLTRVVEKGLPRDA

SEQ ID NO: 80714 - protein, 353 aa, Saliniradius amylolyticus
  misc_feature (1)..(353): tr|A0A2S2E6N3|A0A2S2E6N3_9ALTE Epoxyqueuosine reductase OS=Saliniradius amylolyticus OX=2183582 GN=queG PE=3 S V=1
MGISDVDLSQHEAHLQAWLDRQMHGEMDYMAAHGMKRARPAELEPGTVRVVSVRMNYLPPDASFARTLKDPQKGYVSRYAVGRDYHKLLRKRLKQLGQKIQQHCEALNFRPFVDSAPVLEHAIAEKAGIGWTGKHSLTLSKDAGSWFFLGELFISLPLPVDQPVEEACGNCTACLTACPTGAIVEPYVVDARKCISYLTIELKGAIPEQYRPLLGNRIYGCDDCQLICPWNRYGQLTDEGDFHPRQNLHQQELLDLFAWDEETFLSKTQGSPIRRIGHESWQRNIAVALGNASYSIDITEALEQARPRSSELVREHIDWALAQQERRRYQATPVSRQQQRLIRSIEKGLPRDA

SEQ ID NO: 80715 - protein, 392 aa, Salinispira pacifica
  misc_feature (1)..(392): tr|V5WKB3|V5WKB3_9SPIO Epoxyqueuosine (OQ) reductase Qu eG OS=Salinispira pacifica OX=1307761 GN=L21SP2_2265 PE =4 SV=1
MSDTGGKNQSNTVNRISDNERLGELIREQGIQYWGVCDADDGPQDLKAAAARDYQHWIAEGRHGSMQFLEVHEPMKFEPSAILPGTRSIISLALGYFPGRKRSRRKIDSAAAEEAAGEGGSAEGISAEGGRISLYARGRDYHKEFGRRIKKIAAALSTEYPGHNFRAFTDTAPLHERFYAEKAGMTFTGRNTLSLHRELGSYFFLGEILSTRRFVPTDVQPEARSHCPSGCTRCVDVCPTAALEAPYRINASTCISYLTIEHKGMIDPGLMEKMGTWIFGCDLCQDVCPFNIRAKITDVENFLNPITAGDVELKSILELKDHEEFTAMFAGTPVMRAGRVGMIRNAIIAAANGGRTDLLPLILERCSDGDEIISGTAKWAAARLTDGAAGKI

SEQ ID NO: 80716 - protein, 384 aa, Salinivibrio kushneri
  misc_feature (1)..(384): tr|A0A4P8H747|A0A4P8H747_9GAMM Epoxyqueuosine reductase OS=Salinivibrio kushneri OX=1908198 GN=queG PE=3 SV=1
MSQPKSDASIDFDHLAQRIKQWGQALGFQQVGITDVDLKQHEAQLQRWLDNGYHGEMAWMARHGMMRARPDELVPGTVRVISVRMNYLPPNAGFAHTLAHPELGYISRYSLGRDYHKLIRNRLKKLGQQIEQAVGPYGYRPFVDSAPVLERPLAEKAGLGWTGKHSLILNDETGSWFFLGELLVDLPLPVDTPVENQCGKCVACMTSCPTQAIIAEGVVDARRCISYLTIEYDGVIPLEFRHAIGNRIYGCDDCQLVCPFNREAELTLEADFHCRPSLDQQPLTTLFNWDEDTFLSLTQGSAVRRIGIKKWRRNLAIAMGNAPFDQAIIDSLKARLGEDELVDEHIHWALSEQEKKRQRIDVKTLPTGTRRLVRIIEKGLPRDA

SEQ ID NO: 80717 - protein, 384 aa, Salinivibrio kushneri
  misc_feature (1)..(384): tr|A0A1V3GK66|A0A1V3GK66_9GAMM Epoxyqueuosine reductase OS=Salinivibrio kushneri OX=1908198 GN=queG PE=3 SV=1
MSQPKSDASIDFDHLAQRIKQWGQALGFQQVGITDVDLKQHEAQLQRWLDNGYHGEMAWMARHGMMRARPYELVPGTVRVISVRMNYLPPNAGFAHTLAHPELGYISRYSLGRDYHKLIRNRLKKLGQQIEQAVGPYGYRPFVDSAPVLERPLAEKAGLGWTGKHSLILNDETGSWFFLGELLVDLPLPVDTPVENQCGKCVACMTSCPTQAIIAEGVVDARRCISYLTIEYDGVIPLEFRHAIGNRIYGCDDCQLVCPFNREAELTLEADFHCRPSLDQQPLTTLFNWDEDTFLSLTQGSAVRRIGIKKWRRNLAIAMGNAPFEQAIIDSLKARLGEDELVDEHIHWALSEQEKKRQRIDVKTLPTGTRRLVRIIEKGLPRDA

SEQ ID NO: 80718 - protein, 384 aa, Salinivibrio sharmensis
  misc_feature (1)..(384): tr|A0A1V3GYZ0|A0A1V3GYZ0_9GAMM Epoxyqueuosine reductase OS=Salinivibrio sharmensis OX=390883 GN=queG PE=3 SV=1
MSQPKSDASIDFDHLAQRIKQWGQALGFQQVGITDVDLKQHEAQLQRWLDNGYHGEMEWMARHGMMRARPDELVPGTVRVISVRMNYLPPNAGFAHTLAHPELGYISRYSLGRDYHKLIRNRLKKLGQQIEQAVGPYGYRPFVDSAPVLERPLAEKAGLGWTGKHSLILNDETGSWFFLGELLVDLPLPVDTPVENQCGKCVACMTSCPTQAIVADGVVDARRCISYLTIEYDGVIPLEFRHAIGNRIYGCDDCQLVCPFNREAELTLEADFHCRPSLDQQPLTTLFNWDEDTFLSLTQGSAVRRIGIKKWRRNLAIAMGNAPFNQDIIDSLKARLGEDELVDEHIHWALSEQEKKRQRIDVKTLPTGTRRLVRIIEKGLPRDA

SEQ ID NO: 80719 - protein, 384 aa, Salinivibrio sp.
  misc_feature (1)..(384): tr|A0A1N6I1Z4|A0A1N6I1Z4_9GAMM Epoxyqueuosine reductase OS=Salinivibrio sp. ES.052 OX=1882823 GN=queG PE=3 SV= 1
MSQPTPDASIDFDQLAQRIKQWGQALGFQHVGITDVDLKQHEAQLQRWIDNGYHGEMDWMERHGMMRARPHELLPGTVRVISVRMNYLPPEAGFAKTLANPKLGYVSRYSLGRDYHKLIRNRLKKLGQQIEAEVGPYGYRPFVDSAPILERPLAEKAGLGWTGKHSLILNEDTGSWFFLGELLVDLPLPIDTPVDNQCGKCVACMTSCPTQAIVAEGVVDARRCISYLTIEYDGVIPMEFRHAIGNRIYGCDDCQLVCPFNREAEITLESDFQCRPSLEQQSLTTLFDWDEDTFLSLTQGSAIRRIGIKKWRRNLAIAMGNAPYDENIVTSLKARQGEDALVDEHIEWALKEQKNKQQRINIEPLPTGTRRLVRIIEKGLPRDA

SEQ ID NO: 80720 - protein, 384 aa, Salinivibrio sp.
  misc_feature (1)..(384): tr|A0A2A4GKF8|A0A2A4GKF8_9GAMM Epoxyqueuosine reductase OS=Salinivibrio sp. YCSC6 OX=2003370 GN=queG PE=3 SV=1
MSHPTPDASIDFNQLAQRIKQWGQALGFQHVGITDVDLTQHEAQLQRWLDLGYHGEMDWMARHGMMRARPQELVPGTVRVISVRMNYLPPNAGFATTLANPTLGYVSRYSLGRDYHKLIRNRLKKLGQQIEAEVGPFGYRPFVDSAPVLERPLAEKAGLGWTGKHSLILNKETGSWFFLGELLVDLPLPVDTPVENQCGKCVACMTSCPTQAIVAEGVVDARRCISYLTIEYDGVIPLEFRHAIGNRIYGCDDCQLVCPFNRDAELTLEADFHCRPSLEQQPLTTLFNWDEDTFLSLTQGSAIRRIGIRKWRRNLAIAMGNAPYDEDIVNSLSARLGEDALVDEHIQWALGEQEKKRLQIDVQLLPTGTKRLVRIIEKGLPRDA

SEQ ID NO: 80721 - protein, 309 aa, Salinivirga cyanobacteriivorans
  misc_feature (1)..(309): tr|A0A0S2I2S9|A0A0S2I2S9_9BACT Epoxyqueuosine reductase OS=Salinivirga cyanobacteriivorans OX=1307839 GN=queG PE=4 SV=1
MEKYSEDIKNKAIELGFHAAGFVDLSQISRELKKFYDTWLAKDFHGDMAYLKKNAAQRFQPDLLLHNAKSAIVVLAPYNHGKPRLASHYKISRYAVGVDYHFVVKQKLAELLSFIKSIDPKTEGRAFTDTAPVPERFLAAQAGLGFIGKNGMLINPELGSYVFIGELYINATLKYDKPLEGYSCGECTRCMQACPNNAIVAPGEVDSRRCISYKTIEHKGEFEAEANLSKHIFGCDICQNVCPFNKNAPKIGWQEFRGKPEILNLSDEEWKQIGSSKFKKQFGNTVLFRTGLRRLRRNMNRIEKQKPDK

SEQ ID NO: 80722 - protein, 329 aa, Salinivirgaceae bacterium
  misc_feature (1)..(329): tr|A0A2N5ZMX8|A0A2N5ZMX8_9BACT 4Fe-4S ferredoxin-type d omain-containing protein OS=Salinivirgaceae bacterium O X=2053305 GN=C0599_09870 PE=4 SV=1
MPFQNQHTTQTIDKAIEIGFHAASIVDLTNTDPEFENFYKSWLQKGYHGEMTYMEKNAQQRFKPDMLLENAKSAIVVLASYNHEKPDLKSRYKISRYALGVDYHFILKQKLNTLLEYVKTIDPEINGRAFTDSAPVPERYLAVKSGLGFIGKNGMLINEKIGSMMFIGVLYLDKTINSADVIGRVNSTKEKGKLQYESRELGTSDFSHCTDCDLCMRACPNGAIIEPGIVDSNKCISYKTIEYKGEFADNDRLAGYIFGCDICQQECPYNKDVSITGMAELAPRKEITELTDDDWHQMGSSQFKRLFSDTVLFRTGLKRLRRNIEKNIK

SEQ ID NO: 80723 - protein, 391 aa, Salipaludibacillus aurantiacus
  misc_feature (1)..(391): tr|A0A1H9X8S8|A0A1H9X8S8_9BACI Epoxyqueuosine reductase OS=Salipaludibacillus aurantiacus OX=1601833 GN=queG P E=3 SV=1
MANTQLKKELIAYSKLIGIDKIGFASADPFVTLKSRLEVQQKSGFESGFEKGTIKERTEPDQLLPEAKTIIAIALAYPSKMKEAPKSKKGERRGIFCRASWGEDYHHILRRKLKLLEEFIQKRVPSSRNVSMVDTGELSDRAVAERAGIGWSGKNCAIITPEFGSYVYLGELITTVDIPDDQPLTDQCGTCNKCVDACPTGALVQGGQLDSNKCIAFLTQTKDFLPEQYRKKIGNRLYGCDTCQVVCPENKGKDTHNHPEMEPDPEVVKPKLEPLLTMSNREFKKTFGNISGAWRGKKPIQRNAIIALAHYKEHSALPLLYKLIREDPRPVIRGTAAWAAAEISQDNETLSELKRAKERENDSEAEFEIDNALKKLKMDSNRLGKHEKSSV

SEQ ID NO: 80724 - protein, 383 aa, Salipaludibacillus keqinensis
  misc_feature (1)..(383): tr|A0A323TIH7|A0A323TIH7_9BACI tRNA epoxyqueuosine(34) reductase QueG OS=Salipaludibacillus keqinensis OX=2045 207 GN=queG PE=4 SV=1
MANTQLKKDLIAYSKLIGIDKIGFATADPFVTLKSRLKDQQKLAYQSGFEKGTLTERTEPDHLLPEAKTIISIALAYPSKMKNPPKSVKGDRRGIFCRASWGEDYHHILKRKLKLLEEYLQQAEPTARSKSMVDTGELADRAVAERAGIGWSGKNCAIITPEFGSYVYLGEMITTIDLPEDQPMFDQCGTCNKCVDACPTGALIQGGQLDSNKCIAFLTQTKEILPDKYRKKLGNRLYGCDTCQVVCPENKGKDTHHHPEMEPDPEVVKPRLLPILTMSNRDFKETFGQISGSWRGKKPIQRNAIIALAHYKEIESLPTLFNLLHEDPRPVIRGTAAWAVAEISQEEEVLKHLMTAKERERSPEVREEINKSLQKLKVQSGLV

SEQ ID NO: 80725 - protein, 387 aa, Salipaludibacillus neizhouensis
  misc_feature (1)..(387): tr|A0A3A9K2V9|A0A3A9K2V9_9BACI Epoxyqueuosine reductase OS=Salipaludibacillus neizhouensis OX=885475 GN=queG P E=3 SV=1
MMNAQLKNELIAYSKHVGIDKIGFTSADPFVTLKSRLKQQQELGYQSGFEKGSLKERTEPQMLLPEASTIISIALAYPSKMKNAPKSKRGDRRGIFCRASWGEDYHHVLRRKLNLLVEFIEKKVPGSKSTAMVDTGELSDRAVAERAGIGWSAKNCAIITPEFGSYVYLGEMITTVDIPEDQPLLDQCGSCNKCVDACPTDALIQGGQLDSNKCIAFLTQTKGMLPERYRKKIGNRLYGCDTCQVVCPKNKGKDAHNHPEMEPDPETVKPTLIPLLTISNREFKEKYGKMSGSWRGKKPIQRNAIIALGFFKEKEALETLYTLLLEDPRPVIRGTSAWAISQITSSNEAETKLKEAKKKENDLEAEAEIDKALKSQDKERGPLRTER

SEQ ID NO: 80726 - protein, 348 aa, Salipiger aestuarii
  misc_feature (1)..(348): tr|A0A327Y2J9|A0A327Y2J9_9RHOB Epoxyqueuosine reductase OS=Salipiger aestuarii OX=568098 GN=ATI53_102361 PE=4 SV=1
MSLKQALMDEAIAVGFSACRVCRPGDVPQAAGRLADFLAAGHHGQMGWMAERTGWRGDPTALWPEARSVIMLAENYAPDQDPMQIVGQAERGAISVYAQNRDYHDVVKKKLKRLGRWLIDAAARSGESAPQIKVFVDTAPVMEKPLGQAAGLGWQGKHTNLVSRDLGSWFFLGAIFTTLTLPVDGAGRDACGSCRACLDACPTDAFPVPYRLDARRCISYLTIEHAGPVPEDMRPLLGNRIYGCDDCLAACPWNKFAQQAAEIKYHARPELVGPSLASLAALDDAAFRALFSGSPVKRIGRNRFLRNVCYAIGNSADASLRPSVQALCDDPDAALADAARWAVARLGA

SEQ ID NO: 80727 - protein, 344 aa, Salipiger bermudensis
  misc_feature (1)..(344): tr|Q0FR31|Q0FR31_SALBH Epoxyqueuosine reductase OS=Sali piger bermudensis (strain DSM 26914 / JCM 13377 / KCTC 12554 / HTCC2601) OX=314265 GN=queG PE=3 SV=1
MKRKLVAEAAEVGFASCKVCRPGDVPQLAERLAAFLEAGRHGQMGWMAERTHWRGDPKALWPEARSVIMLAENYGPGHDPMAVLEQRDRAAISVYAQNRDYHDVVKKRLKRLGRWLIAEAEREGGGAEIKVFVDTAPVMEKPLGQAAGLGWQGKHTNLVSRELGSWFFLGAIFTTLELEPDGAERDHCGSCRACLDVCPTDAFPAPYQLDARRCISYLTIEHHGPVDEALRPGLGNRIYGCDDCLAACPWNKFAVQAQEMKYHARDELLAPELAELAALDDAAFRALFSGSPIKRIGRDRFVRNVCYAIGNSGDPALRSAVQALCEDGCETVRDAARWAVARLS

SEQ ID NO: 80728 - protein, 353 aa, Salipiger marinus
  misc_feature (1)..(353): tr|A0A1G8SA34|A0A1G8SA34_9RHOB Epoxyqueuosine reductase OS=Salipiger marinus OX=555512 GN=queG PE=3 SV=1
MNEQGQHDDLKARLVEEARAVGFSSCRICRPGDVPQVAERLAEFLAAGRHGQMGWMAERTGWRGDPTALWPEARSVIMLAENYGPDHDPRAVLARPERAAVSVYAQNRDYHDVVKKRLKRLGRWLMAAAEAEAPQIKVFVDTAPVMEKPLGQAAGLGWQGKHTNLVSRDLGSWFFLGSIFTTLALPVDGAERDHCGSCRACLDACPTDAFPAPYQLDARRCISYLTIEHAGPVAEDLRPLLGNRIYGCDDCLAACPWNKFAEQAAEIKYHARDDLRAPALADLARLDDAGFRALFSGSPIKRIGRDRFVRNVLYAIGNSGRGDLREVAQGLCADADDTVRDAAHWAVARLAQG

SEQ ID NO: 80729 - protein, 344 aa, Salipiger mucosus
  misc_feature (1)..(344): tr|S9R4P3|S9R4P3_9RHOB Epoxyqueuosine reductase OS=Sali piger mucosus DSM 16094 OX=1123237 GN=queG PE=3 SV=1
MQELKDRLVAEAGAVGFSACRVCRPGDVPQVAERLRSFLEAGQHGQMGWMADRAQWRGDPTALWPEARSVIMLAENYGPGHDPLEVLERRERAAISVYAQNRDYHDVVKKRLKRLGRWLIEAAGGAPEIKVFVDTAPVMEKPLGEAAGLGWQGKHTNLVSRELGSWFFLGCIFTTLELPVDGAEADHCGSCRACLEVCPTDAFPAPYRLDARRCISYLTIEHRGPVDEELRGKLGNRIYGCDDCLAVCPWNKFAREASEAKYHARPDLVDPPLEELAQLDDAGFRARFSGSPIKRIGRDRFLRNVLYAIGNSGEGRLRAAAQAHCEDPDPAVADAARWAVARLG

SEQ ID NO: 80730 - protein, 347 aa, Salipiger profundus
  misc_feature (1)..(347): tr|A0A1U7D4S6|A0A1U7D4S6_9RHOB Epoxyqueuosine reductase OS=Salipiger profundus OX=1229727 GN=queG PE=3 SV=1
MSLKARLVAEAEAVGFSACRVCRPGDTPQVAARLAQFLEAGRHGQMGWMAERTAWRGDPTALWPEARSVIMLAENYGPDHDPLAVLEQHDRAAISVYAQNRDYHDVVKKKLKRLGRWLIAEAERDGPAPEIKVFVDTAPVMEKPLGEAAGLGWQGKHTNLVSRSLGSWFFLGAIFTTLPLAPDEAERDHCGSCRACLDVCPTNAFPAPYQLDARRCISYLTIEHKGPVDEALRPGLGNRIYGCDDCLAVCPWNKFARASREVKYHARPDLLGPPLAELAALDDAGFRARFSGSPIKRIGRDRFVRNVCYAIGNSGDARLRPAVQALCEDVDDAVRDAARWAAARLPA

SEQ ID NO: 80731 - protein, 345 aa, Salipiger sp.
  misc_feature (1)..(345): tr|A0A4Q3Z337|A0A4Q3Z337_9RHOB Epoxyqueuosine reductase OS=Salipiger sp. IMCC34102 OX=2510647 GN=queG PE=3 SV= 1
MKDLGARLRAFAQEAGFVKVGICRPDAVPDAGARLGAFVEAGHHGQMAWMGERMAWRGDPRALWPEARSIIMLAESYSPEHDPLEILERRDRAAISVYAQGRDYHDVVKKRLKRVGRWLIEQSPGAEIKVFVDTAPVMEKPLAQAAGLGWQGKHTNLLGRDLGNWVFLGAIFTTLELAPDAPEVEHCGSCRKCLDVCPTNAFPAPFKLDARRCISYLTIEHRGPIPEEFRAALGNRIYGCDDCLAVCPWNKFAVEARDQRLTARDDLRAPALADLAALDDAAFRERFSGSPIKRIGRDRFVRNVAYAIGNSGNPDLAAALAPLRDDSDPAVADAASWALSQLKRI

SEQ ID NO: 80732 - protein, 349 aa, Salipiger thiooxidans
  misc_feature (1)..(349): tr|A0A1G7ECE2|A0A1G7ECE2_9RHOB Epoxyqueuosine reductase OS=Salipiger thiooxidans OX=282683 GN=SAMN04488105_105 261 PE=4 SV=1
MSLKERLVAEAGATGFAASRVCRPGDVPQAAGRLAAFLDAGRHGQMGWMAERTAWRGNPAALWPEARSVIMLAENYGPEGDPLAVLEQRDRAAISVYAQNRDYHDVVKKKLKRLGRWLLAAAEKELGLAAEIKVFVDTAPVMEKPLGQAAGLGWQGKHTNLVSREIGSWFFLGAIFTTLELAPDGAERDHCGSCRACLDICPTGAFPAPYQLDARRCISYLTIEHGGPVDEELRPLLGNRIYGCDDCLAVCPWNKFAHRAGEAKYHARPELLAPELSELAGLDDAGFRVLFSGSPIKRIGRDRFVRNVCYAIGNSGDAALRPAAQALCDDPDPALRDAARWAVERLDGV

SEQ ID NO: 80733 - protein, 391 aa, Salisediminibacterium haloalkalitolerans
  misc_feature (1)..(391): tr|A0A1H9TME3|A0A1H9TME3_9BACI Epoxyqueuosine reductase OS=Salisediminibacterium haloalkalitolerans OX=1464123 GN=SAMN05444126_11090 PE=4 SV=1
MKNADIKQEIIDFSESIGIDKIGFASADPFVTMKARLADQQANDYQSGFEKGTIEERTEPERLLPEAKSIISIALAYPSKMTSPPRSKKGERRGIFCRASWGEDYHHILRRKLEQLQTFIAERFPDESSTYMVDTGELPDRAVAERAGIGWSGKNCAIITPGFGSYVYLGELITTVDFAADTPLFDQCGTCNKCVDACPTGALIQGGQLDSGKCIAYLTQTKDVLPEQYRKKIGNRLYGCDTCQVVCPENKGVDVHHHPEMEPDPEVVKPLLVPLLTMSNREFKQKFGAISGAWRGKKPIQRNALIALGNFKDETALDAVFDRLENDPRPVIRATAAWAAAEISSEKLTAERIQTALEQEEDETAVTEMTNVLNRLKHETGEKRKSAESKA

SEQ ID NO: 80734 - protein, 381 aa, Saliterribacillus persicus
  misc_feature (1)..(381): tr|A0A368Y430|A0A368Y430_9BACI Epoxyqueuosine reductase OS=Saliterribacillus persicus OX=930114 GN=queG PE=3 S V=1
MAAYDDLKQELIKYSEEIGIDKIGFTSADVFSELKARLEIQQEKGYQSGFEKGLIEERTEPVRLLPGAESIVSIALAYPSRMKNPPKSKKGERRGMFARASWGEDYHLVLKEKLNLLATFLSERVEGFSAKIMVDTGELSDRAVAERAGVGFSGKNCAIITPEFGSYVYLGEMIINIPFTPDEPIDDGCGECTKCIDACPTGALVGPGQLNAQQCMAFLTQTKGYMPEEHRDKLGNIIYGYDTCQVVCPYNKGIDSHQHEEFEPDPDLVKPPLIEFLSISNREFKEKFGYMAGSWRGKKPLQRNAILALAHYKEKSAVPALIDVLTQDPRPVLRGTAGWALGKIGTEEAFQALQKAVEKEEDVQALEEINKGLQFFDNNFM

SEQ ID NO: 80735 - protein, 384 aa, Salmonella abony
  misc_feature (1)..(384): tr|A0A5H6T4Q8|A0A5H6T4Q8_SALAB tRNA epoxyqueuosine(34) reductase QueG OS=Salmonella abony OX=29482 GN=queG PE= 4 SV=1
MLWSIMSKPLDLNQLAQNIKQWGLELGFQQVGITDTDLRASEPALQAWLDKQYHGEMAWMARHGMMRARPHELLPGTLRVISVRMNYLPANAAFASTLKDPTLGYVSRYALGRDYHKLLRSRLKKLGEQIQQYCGSLNFRPFVDSAPILERPLAEKAGLGWTGKHSLILNREAGSFFFLGELLIDLPLPVDQPVEEGCGKCVACMTICPTGAIVEPYTVDARRCISYLTIELEGAIPEAFRPLIGNRIYGCDDCQLICPWNRYSQLTDEADFSPRKALHNPDLLELFSWSEAQFLKVTEGSAIRRIGHLRWLRNVAVALGNAPWSNAVITALESRKGEHPLLDEHIEWAIAQQIEKRNACIIEVQLPKKQRLVRVIEKGLVRDA

SEQ ID NO: 80736 - protein, 384 aa, Salmonella agona
  misc_feature (1)..(384): tr|B5F381|B5F381_SALA4 Epoxyqueuosine reductase OS=Salm onella agona (strain SL483) OX=454166 GN=queG PE=3 SV=1
MLWSIMSKPLDLNQLAQNIKQWGLELGFQQVGITDTDLRASEPALQAWLDKQYHGEMAWMARHGMMRARPHELLPGTLRVISVRMNYLPANAAFASTLKDPTLGYVSRYALGRDYHKLLRSRLKKLGEQIQQYCGSLNFRPFVDSAPILERPLAEKAGLGWTGKHSLILNREAGSFFFLGELLIDLPLPVDQPVEEGCGKCVACMTICPTGAIVEPYTVDARRCISYLTIELEGAIPEAFRPLIGNRIYGCDDCQLICPWNRYSQLTDEADFSPRKALHNPDLVELFSWSEAQFLKVTEGSAIRRIGHLRWLRNVAVALGNAPWSNAVITALESRKGEHPLLDEHIEWAIAQQIEKRNACIIEVQLPKKQRLVRVIEKGLVRDA

SEQ ID NO: 80737 - protein, 384 aa, Salmonella anatum; identical to SEQ ID NO: 80736
  misc_feature (1)..(384): tr|A0A2T8MAI9|A0A2T8MAI9_SALAN Epoxyqueuosine reductase OS=Salmonella anatum OX=58712 GN=queG PE=3 SV=1

SEQ ID NO: 80738 - protein, 384 aa, Salmonella anatum; identical to SEQ ID NO: 80735
  misc_feature (1)..(384): tr|A0A3Y5SF25|A0A3Y5SF25_SALAN Epoxyqueuosine reductase OS=Salmonella anatum OX=58712 GN=queG PE=3 SV=1

SEQ ID NO: 80739 - protein, 384 aa, Salmonella arizonae
  misc_feature (1)..(384): tr|A9MFP6|A9MFP6_SALAR Epoxyqueuosine reductase OS=Salm onella arizonae (strain ATCC BAA-731 / CDC346-86 / RSK2 980) OX=41514 GN=queG PE=3 SV=1
MLWSIMSEPLDLNQLAQNIKQWGLELGFQQVGITDTDLSASEPALQAWLDKQYHGEMAWMARHGIMRARPHELLPGTLRVISVRMNYLPANAAFASTLKNPTLGYVSRYALGRDYHKLLRSRLKKLGERIQQHCGSLNFRPFVDSAPILERPLAEKAGLGWTGKHSLILNRDAGSFFFLGELLIDLPLPVDQPIEEGCGKCVACMTICPTGAIVEPYTVDARRCISYLTIELEGAIPVAFRPLIGNRIYGCDDCQLICPWNRYSQLTDEDDFSPRKALRAPELIDLFRWSETQFLKVTEGSAIRRIGHLRWLRNVAVALGNAPWSDAVIAALESRKGEHPLLDEHIEWAVAQQIEKRNACINEVQLPKKQRLVRVIEKGLVRDA

SEQ ID NO: 80740 - protein, 384 aa, Salmonella berta
  misc_feature (1)..(384): tr|A0A3U8PE19|A0A3U8PE19_SALBE Epoxyqueuosine reductase OS=Salmonella berta OX=28142 GN=queG PE=3 SV=1
MLWSIMSKPLDLNQLAQNIKQWGLELGFQQVGITDTDLRASEPALQAWLDKQYHGEMAWMARHGMMRARPHELLPGTLRVISVRMNYLPANAAFASTLKDPTLGYVSRYALGRDYHKLLRSRLKKLGEQIQQYCGSLNFRPFVDSAPILERPLAEKAGLGWTGKHSLILNREAGSFFFLGELLIDLPLPVDQPVEEGCGKCVACMTICPTGAIVEPYTVDARRCISYLTIELEGAIPEAFRPLIGNRIYGCDDCQLICPWNRYSQLTDEADFSPRKALHNPDLVELFSWSEAQFLKVTEGTAIRRIGHLRWLRNVAVALGNAPWSNAVITALESRKGEHPLLDEHIEWAIAQQIEKRNACIIEVQLPKKQRLVRVIEKGLVRDA

SEQ ID NO: 80741 - protein, 384 aa, Salmonella blockley; identical to SEQ ID NO: 80735
  misc_feature (1)..(384): tr|A0A5H8H750|A0A5H8H750_SALBL tRNA epoxyqueuosine(34) reductase QueG OS=Salmonella blockley OX=57741 GN=queG PE=4 SV=1

SEQ ID NO: 80742 - protein, 379 aa, Salmonella bongori
  misc_feature (1)..(379): tr|A0A447MBE8|A0A447MBE8_SALBN Epoxyqueuosine reductase OS=Salmonella bongori OX=54736 GN=yjeS PE=3 SV=1
MSEPLDLNQLAQNIKQWGLELGFQQVGITDTDLSASEPALQAWLAKQYHGEMEWMARHGMMRARPHELLPGTLRVISVRMNYLPANAAFASTLKNPTLGYVSRYALGRDYHKLLRSRLKKLGEQIQQHCGSLNFRPFVDSAPVLERPLAEKAGLGWTGKHSLILNREAGSFFFLGELLLDLPLPIDKPVGEGCGKCVACMTICPTGAIVEPYTVDARRCISYLTIELEGAIPEAFRPLIGNRIYGCDDCQLICPWNRYSQLTNEEDFSPRKPLHAPALIDLFSWSEAQFLKVTEGSAIRRIGHLRWLRNVAVALGNAPWSDAIITALQSRQGEHPLLDEHIEWAIAQQIEKRNACIIEVQLPKKQRLVRVIEKGLPRDA

SEQ ID NO: 80743 - protein, 384 aa, Salmonella bongori
  misc_feature (1)..(384): tr|A0A248KF92|A0A248KF92_SALBN Epoxyqueuosine reductase OS=Salmonella bongori serovar 66:z41:- str. SA19983605 OX=1243617 GN=queG PE=3 SV=1
MLWSIMSEPLDLNQLAQNIKQWGLELGFQQVGITDTDLSASEPALQAWLAKQYHGEMEWMARHGMMRARPHELLPGTLRVISVRMNYLPANAAFASTLKNPTLGYVSRYALGRDYHKLLRSRLKKLGEQIQQHCGSLNFRPFVDSAPVLERPLAEKAGLGWTGKHSLILNREAGSFFFLGELLLDLPLPIDKPVGEGCGKCVACMTICPTGAIVEPYTVDARRCISYLTIELEGAIPEAFRPLIGNRIYGCDDCQLICPWNRYSQLTNEEDFSPRKPLHAPALIDLFSWSEAQFLKVTEGSAIRRIGHLRWLRNVAVALGNAPWSDAIITALQSRQGEHPLLDEHIEWAIAQQIEKRNACIIEVQLPKKQRLVRVIEKGLPRDA

SEQ ID NO: 80744 - protein, 395 aa, Salmonella choleraesuis
  misc_feature (1)..(395): tr|Q57GM5|Q57GM5_SALCH Epoxyqueuosine reductase OS=Salm onella choleraesuis (strain SC-B67) OX=321314 GN=yjeS P E=3 SV=1
MECGILTGFFFMLWSIMSKPLDLNQLAQNIKQWGLELGFQQVGITDTDLRASEPALQAWLDKQYHGEMAWMARHGMMRARPHELLPGTLRVISVRMNYLPANAAFASTLKDPTLGYVSRYALGRDYHKLLRSRLKKLGEQIQQYCGSLNFRPFVDSAPILERPLAEKAGLGWTGKHSLILNREAGSFFFLGELLIDLPLPVDQPVEEGCGKCVACMTICPTGAIVEPYTVDARRCISYLTIELEGAIPEAFRPLIGNRIYGCDDCQLICPWNRYSQLTDEADFSPRKALHNPDLLELFSWSEAQFLKVTEGSAIRRIGHLRWLRNVAVALGNAPWSNAVITALESRKGEHPLLDEHIEWAIAQQIEKRNACIIEVQLPKKQRLVRVIEKGLVRDA

SEQ ID NO: 80745 - protein, 384 aa, Salmonella derby
  misc_feature (1)..(384): tr|A0A4Z8VXM0|A0A4Z8VXM0_SALDE Epoxyqueuosine reductase OS=Salmonella derby OX=28144 GN=queG PE=3 SV=1
MLWSIMSKPLDLNQLAQNIKQCGLELGFQQVGITDTDLRASEPALQAWLDKQYHGEMAWMARHGMMRARPHELLPGTLRVISVRMNYLPANAAFASTLKDPTLGYVSRYALGRDYHKLLRSRLKKLGEQIQQYCGSLNFRPFVDSAPILERPLAEKAGLGWTGKHSLILNREAGSFFFLGELLIDLPLPVDQPVEEGCGKCVACMTICPTGAIVEPYTVDARRCISYLTIELEGAIPEAFRPLIGNRIYGCDDCQLICPWNRYSQLTDEADFSPRKALHNPDLVELFSWSEAQFLKVTEGSAIRRIGHLRWLRNVAVALGNAPWSNAVITALESRKGEHPLLDEHIEWAIAQQIEKRNACIIEVQLPKKQRLVRVIEKGLVRDA

SEQ ID NO: 80746 - protein, 384 aa, Salmonella derby; identical to SEQ ID NO: 80735
  misc_feature (1)..(384): tr|A0A3V6WBZ7|A0A3V6WBZ7_SALDE Epoxyqueuosine reductase OS=Salmonella derby OX=28144 GN=queG PE=3 SV=1

SEQ ID NO: 80747 - protein, 369 aa, Salmonella diarizonae
  misc_feature (1)..(369): tr|A0A379U4L3|A0A379U4L3_SALDZ Epoxyqueuosine reductase OS=Salmonella diarizonae OX=59204 GN=yjeS PE=3 SV=1
MSKPLDLNQLAQNIKQWGLELGFQQVGITDTDLRASEPVLQAWLDKQYHGEMAWMARHGMMRARPHELLPGTLRVISVRMNYLPANAAFASTLKNPTLGYVSRYALGRDYHKLLRNRLKKLGEQIQQHCGSLNFRPFVDSAPILERPLAEKAGLGWTGKHSLILNREAGSFFFLGELLIDLPLPVDQPIEEGCGKCVACMTICPTGAIVEPYTVDARRCISYLTIELEGAIPEAFRPLIGNRIYGCDDCQLICPWNRYSQLTDEADFSPRKALHAPELLELFSWSEAQFLKVTEGSAIRRIGHLRWLRNVAVALGNAPWSNAVIAALESRKGEHPLLDEHIEWAVAQQIESGTPASLKCSYRKNNVWSG

SEQ ID NO: 80748 - protein, 384 aa, Salmonella diarizonae
  misc_feature (1)..(384): tr|A0A2I5HP88|A0A2I5HP88_SALDZ Epoxyqueuosine reductase OS=Salmonella diarizonae OX=59204 GN=queG PE=3 SV=1
MLWSIMSKPLDLNQLAQNIKQWGLELGFQQVGITDTDLRASEPVLQAWLDKQYHGEMAWMARHGMMRARPHELLPGTLRVISVRMNYLPANAAFASTLKNPTLGYVSRYALGRDYHKLLRNRLKKLGEQIQQHCGSLNFRPFVDSAPILERPLAEKAGLGWTGKHSLILNREAGSFFFLGELLIDLPLPVDQPIEEGCGKCVACITICPTGAIVEPYTVDARRCISYLTIELEGAIPEAFRPLIGNRIYGCDDCQLICPWNRYSQLTDEADFSPRKALHAPELLELFSWSEAQFLKVTEGSAIRRIGHLRWLRNVAVALGNAPWSNAVIAALESRKGEHPLLDEHIEWAVAQQIEKRNACIIEVQLPKKQRLVRVIEKGLVRDA

SEQ ID NO: 80749 - protein, 384 aa, Salmonella dublin; identical to SEQ ID NO: 80736
  misc_feature (1)..(384): tr|A0A3T3IKF8|A0A3T3IKF8_SALDU Epoxyqueuosine reductase OS=Salmonella dublin OX=98360 GN=queG PE=3 SV=1

SEQ ID NO: 80750 - protein, 379 aa, Salmonella enterica
  misc_feature (1)..(379): tr|A0A3F3J2N7|A0A3F3J2N7_SALER Epoxyqueuosine reductase OS=Salmonella enterica OX=28901 GN=queG PE=3 SV=1
MSKPLDLNQLAQNIKQWGLELGFQQVGITDTDLRASEPVLQAWLDKQYHGEMAWMARHGMMRARPHELLPGTLRVISVRMNYLPANAAFASTLKNPTLGYVSRYALGRDYHKLLRNRLKKLGEQIQQHCGSLNFRPFVDSAPILERPLAEKAGLGWTGKHSLILNREAGSFFFLGELLIDLPLPVDQPIEEGCGKCVACMTICPTGAIVEPYTVDARRCISYLTIELEGAIPEAFRPLIGNRIYGCDDCQLICPWNRYSQLTDEADFSPRKALHAPELLELFSWSEAQFLKVTEGSAIRRIGHLRWLRNVAVALGNAPWSNAVIAALESRKGEHPLLDEHIEWAVAQQIEKRNACIIEVQLPKKQRLVRVIEKGLVRDA

SEQ ID NO: 80751 - protein, 384 aa, Salmonella enterica
  misc_feature (1)..(384): tr|A0A5I3NV98|A0A5I3NV98_SALER tRNA epoxyqueuosine(34) reductase QueG OS=Salmonella enterica subsp. salamae st r. CFSAN000559 OX=1299293 GN=queG PE=4 SV=1
MLWSIMSKPLDLNQLAQNIKQWGLELGFQQVGITDTDLRASEPALQAWLDKQYHGEMAWMARHGMMRARPHELLPGTLRVISVRMNYLPANAAFASTLKDPSLGYVSRYALGRDYHKLLRSRLKKLGEQIQQYCGSLNFRPFVDSAPILERPLAEKAGLGWTGKHSLILNREAGSFFFLGELLIDLPLPVDQSVEESCGKCVACMTICPTGAIVEPYTVDARRCISYLTIELEGAIPEAFRPLIGNRIYGCDDCQLICPWNRYSQLTDETDFSPRKALHAPELLELFSWSEAQFLKVTEGSAIRRIGHLRWLRNVAVALGNAPWSNAVIAALESRKGEHPLLDEHIEWAVAQQIEKRNACIIEVQLPKKQRLVRVIEKGLARDA

SEQ ID NO: 80752 - protein, 373 aa, Salmonella enteritidis
  misc_feature (1)..(373): tr|A0A5F1JFE8|A0A5F1JFE8_SALEN tRNA epoxyqueuosine(34) reductase QueG (Fragment) OS=Salmonella enteritidis OX= 149539 GN=queG PE=3 SV=1
MLWSIMSKPLDLNQLAQNIKQWGLELGFQQVGITDTDLRASEPALQAWLDKQYHGEMAWMARHGMMRARPHELLPGTLRVISVRMNYLPANAAFASTLKDPTLGYVSRYALGRDYHKLLRSRLKKLGEQIQQYCGSLNFRPFVDSAPILERPLAEKAGLGWTGKHSLILNREAGSFFFLGELLIDLPLPVDQPVEEGCGKCVACMTICPTGAIVEPYTVDARRCISYLTIELEGAIPEAFRPLIGNRIYGCDDCQLICPWNRYSQLTDEADFSPRKALHNPDLVELFSWSEAQFLKVTEGTAIRRIGHLRWLRNVAVALGNAPWSNAVITALESRKGEHPLLDEHIEWAIAQQIEKRNACIIEVQLPKKQRLV

SEQ ID NO: 80753 - protein, 379 aa, Salmonella enteritidis
  misc_feature (1)..(379): tr|A0A1X8W8Q9|A0A1X8W8Q9_SALEN Epoxyqueuosine reductase OS=Salmonella enteritidis OX=149539 GN=queG PE=3 SV=1
MSKPLDLNQLAQNIKQWGLELGFQQVGITDTDLRASEPALQAWLDKQYHGEMAWMARHGMMRARPHELLPGTLRVISVRMNYLPANAAFASTLKDPTLGYVSRYALGRDYHKLLRSRLKKLGEQIQQYCGSLNFRPFVDSAPILERPLAEKAGLGWTGKHSLILNREAGSFFFLGELLIDLPLPVDQPVEEGCGKCVACMTICPTGAIVEPYTVDARRCISYLTIELEGAIPEAFRPLIGNRIYGCDDCQLICPWNRYSQLTDEADFSPRKALHNPDLVELFSWSEAQFLKVTEGTAIRRIGHLRWLRNVAVALGNAPWSNAVITALESRKGEHPLLDEHIEWAIAQQIEKRNACIIEVQLPKKQRLVRVIEKGLVRDA

SEQ ID NO: 80754 - protein, 384 aa, Salmonella gallinarum
  misc_feature (1)..(384): tr|A0A3V9NJJ5|A0A3V9NJJ5_SALGL Epoxyqueuosine reductase OS=Salmonella gallinarum OX=594 GN=queG PE=3 SV=1
MLWSIMSKPLDLNQLAQNIKQWGLELGFQQVGITDTDLRASEPALQAWLDKQYHGEMAWMARHGMMRARPHELLPGTLRVISVRMNYLPANAAFASTLKDPTLGYVSRYALGRDYHKLLRSRLKKLGEQIQQYCGSLNFRPFVDSAPILERPLAEKAGLGWTGKHSLILNREAGSFFFLGELLIDLPLPVDQPVEEGCGKCVACMTICPTGAIVEPYTVDARRCISYLTIELEGAIPEAFRPLIGNRIYGCDDCQLICPWNRYSQLTDEADFSPRKTLHNPDLVELFSWSEAQFLKVTEGTAIRRIGHLRWLRNVAVALGNAPWSNAVITALESRKGEHPLLDEHIEWAIAQQIEKRNACIIEVQLPKKQRLVRVIEKGLVRDA

SEQ ID NO: 80755 - protein, 379 aa, Salmonella gallinarum
  misc_feature (1)..(379): tr|B5R9B3|B5R9B3_SALG2 Epoxyqueuosine reductase OS=Salm onella gallinarum (strain 287/91 / NCTC 13346) OX=55053 8 GN=yjeS PE=3 SV=1
MSKPLDLNQLAQNIKQWGLELGFQQVGITDTDLRASEPALQAWLDKQYHGEMAWMARHGMMRARPHELLPGTLRVISVRMNYLPANAAFASTLKDPTLGYVSRYALGRDYHKLLRSRLKKLGEQIQQYCGSLNFRPFVDSAPILERPLAEKAGLGWTGKHSLILNREAGSFFFLGELLIDLPLPVDQPVEEGCGKCVACMTICPTGAIVEPYTVDARRCISYLTIELEGAIPEAFRPLIGNRIYGCDDCQLICPWNRYSQLTDEADFSPRKTLHNPDLVELFSWSEAQFLKVTEGTAIRRIGHLRWLRNVAVALGNAPWSNAVITALESRKGEHPLLDEHIEWAIAQQIEKRNACIIEVQLPKKQRLVRVIEKGLVRDA

SEQ ID NO: 80756 - protein, 384 aa, Salmonella hadar; identical to SEQ ID NO: 80735
  misc_feature (1)..(384): tr|A0A3V2W0W2|A0A3V2W0W2_SALHA Epoxyqueuosine reductase OS=Salmonella hadar OX=149385 GN=queG PE=3 SV=1

SEQ ID NO: 80757 - protein, 384 aa, Salmonella houtenae
  misc_feature (1)..(384): tr|A0A2K0JKA5|A0A2K0JKA5_SALHO Epoxyqueuosine reductase OS=Salmonella houtenae OX=59205 GN=queG PE=3 SV=1
MLWSIMSKPLDLNQLAQNIKQWGLELGFQQVGITDTDLRASEPALQAWLDKQYHGEMSWMARHGMMRARPHELLPGTLRVISVRMNYLPANAAFASTLKNPMLGYVSRYALGRDYHKLLRSRLKKLGEQIQQHCGSLNFRPFVDSAPILERPLAEKAGLGWTGKHSLILNRDAGSFFFLGELLIDLPLPIDQPVEEGCGKCVACMTICPTGAIVEPYTVDARRCISYLTIELEGAIPETFRPLIGNRIYGCDDCQLICPWNRYSHLTDEEDFSPRKALHAPALIDLFSWSETQFLKVTEGSAIRRIGHLRWLRNVAVALGNAPWSNAIIAALESRKGEHPLLDEHIEWAVAQQIEKRNACIIEVQPPKKQRLVRAIEKGLVRDA

SEQ ID NO: 80758 - protein, 384 aa, Salmonella houtenae
  misc_feature (1)..(384): tr|A0A3Y1X3M7|A0A3Y1X3M7_SALHO Epoxyqueuosine reductase OS=Salmonella houtenae OX=59205 GN=queG PE=3 SV=1
MLWSIMSKPLDLNQLAQNIKQWGLELGFQQVGITDTDLRASEPALQAWLDKQYHGEMSWMARHGMMRARPHELLPGTLRVISVRMNYLPANAAFASTLKNPMLGYVSRYALGRDYHKLLRSRLKKLGEQIQQHCGSLNFRPFVDSAPILERPLAEKAGLGWTGKHSLILNRDAGSFFFLGELLIDLPLPIDQPVEEGCGKCVACMTICPTGAIVEPYTVDARRCISYLTIELEGAIPETFRPLIGNRIYGCDDCQLICPWNRYSQLTDEEDFSPRKALHAPALIDLFSWSETQFLKVTEGSAIRRIGHLRWLRNVAVALGNAPWSNAIIAALESRKGEHPLLDEHIEWAVAQQIEKRNACIIEVQPPKKQRLVRAIEKGLVRDA

SEQ ID NO: 80759 - protein, 384 aa, Salmonella infantis; identical to SEQ ID NO: 80736
  misc_feature (1)..(384): tr|A0A5F1J881|A0A5F1J881_SALIN Epoxyqueuosine reductase OS=Salmonella infantis OX=595 GN=queG PE=3 SV=1

SEQ ID NO: 80760 - protein, 384 aa, Salmonella infantis
  misc_feature (1)..(384): tr|A0A3V5LB96|A0A3V5LB96_SALIN Epoxyqueuosine reductase OS=Salmonella infantis OX=595 GN=queG PE=3 SV=1
MLWSIMSKPLDLNQLAQNIKQWGLELGFQQVGITDTDLRASEPALQAWLDKQYHGEMAWMARHGMMRARPHELLPGTLRVISVRMNYLPANAAFASTLKDPTLGYVSRYALGRDYHKLLRSRLKKLGEQIQQYCGSLNFRPFVDSAPILERPLAEKAGLGWTGKHSLILNRQAGSFFFLGELLIDLPLPVDQPVEEGCGKCVACMTICPTGAIVEPYTVDARRCISYLTIELEGAIPEAFRPLIGNRIYGCDDCQLICPWNRYSQLTDEADFSPRKALHNPDLLELFSWSEAQFLKVTEGSAIRRIGHLRWLRNVAVALGNAPWSNAVITALESRKGEHPLLDEHIEWAIAQQIEKRNACIIEVQLPKKQRLVRVIEKGLVRDA

SEQ ID NO: 80761 - protein, 384 aa, Salmonella montevideo; identical to SEQ ID NO: 80735
  misc_feature (1)..(384): tr|A0A3U8JG56|A0A3U8JG56_SALMO Epoxyqueuosine reductase OS=Salmonella montevideo OX=115981 GN=queG PE=3 SV=1

SEQ ID NO: 80762 - protein, 384 aa, Salmonella montevideo
  misc_feature (1)..(384): tr|A0A3Y0EE27|A0A3Y0EE27_SALMO Epoxyqueuosine reductase OS=Salmonella montevideo OX=115981 GN=queG PE=3 SV=1
MLWSIMSKPLDLNQLAQNIKQWGLELGFQQVGITDTDLRASEPALQAWLDKQYHGEMAWMARHGMMRARPHELLPGTLRVISVRMNYLPANAAFASTLKDPTLGYVSRYALGRDYHKLLRSRLKKLGEQIQQYCGSLNFRPFVDSAPILERPLAEKAGLGWTGKHSLILNREAGSFFFLGELLIDLPLPVDQPVEEGCGKCVACMTICPTGAIVEPYTVDARRCISYLTIELEGAIPEAFRPLIGNRIYGCDDCQLICPWNRYSQLTDEADFSPRKALHNPDLLELFSWSEAQFLKVTEGSAIRRIGHLRWLRNVAVALGNAPWSNAVITGLESRKGEHPLLDEHIEWAIAQQIEKRNACIIEVQLPKKQRLVRVIEKGLVRDA

SEQ ID NO: 80763 - protein, 384 aa, Salmonella moscow; identical to SEQ ID NO: 80740
  misc_feature (1)..(384): tr|A0A5H7LJK8|A0A5H7LJK8_SALMC tRNA epoxyqueuosine(34) reductase QueG OS=Salmonella moscow OX=28146 GN=queG PE =4 SV=1

SEQ ID NO: 80764 - protein, 384 aa, Salmonella muenchen
  misc_feature (1)..(384): tr|A0A3Z3HZT2|A0A3Z3HZT2_SALMU tRNA epoxyqueuosine(34) reductase QueG OS=Salmonella muenchen OX=596 GN=queG PE =3 SV=1
MLWSIMSKPLDLNQLAQNIKQWGLELGFQQVGITDTDLRASEPALQAWLDKQYHGEMAWMARHGMMRARPHELLPGTLRVISVRMNYLPANAAFASTLKDPTLGYVSRYALGRDYHKLLRSRLKKLGEQIQQYCGSLNFRPFVDSAPILERPLAEKAGLGWTGKHSLILNREAGSFFFLGELLIDLPLPVDQPVEEGCGKCVACMTICPTGAIVEPYTVDARRCISYLTIELEGAIPEAFRPLIGNRIYGCDDCQLICPWNRYSQLTDEADFSPRKALHNPDLVELFSWSEAQFLKVTEGSAIRRIGHLRWLRNVAVALGNAPCSNAVITALESRKGEHPLLDEHIEWAIAQQIEKRNACIIEVQLPKKQRLVRVIEKGLVRDA

SEQ ID NO: 80765 - protein, 384 aa, Salmonella muenchen; identical to SEQ ID NO: 80736
  misc_feature (1)..(384): tr|A0A3T3ER12|A0A3T3ER12_SALMU Epoxyqueuosine reductase OS=Salmonella muenchen OX=596 GN=queG PE=3 SV=1

SEQ ID NO: 80766 - protein, 384 aa, Salmonella muenster
  misc_feature (1)..(384): tr|A0A5J1ASF5|A0A5J1ASF5_SALMS tRNA epoxyqueuosine(34) reductase QueG OS=Salmonella muenster OX=82689 GN=queG PE=4 SV=1
MLWSIMSKPLDLNQLAQNIKQWGLELGFQQVGITDTDLRASEPALQAWLDKQYHGEMAWMARHGMMRARPHELLPGTLRVISVRMNYLPANAAFASTLKDPTLGYVSRYALGRDYHKLLRSRLKKLGEQIQQYCGSLNFRPFVDSAPILERPLAEKAGLGWTGKHSLILNREAGSFFFLGELLIDLPLPVDQPVEEGCGKCVACMTICPTGAIVEPYTVDARRCISYLTIELEGAIPEAFRPLIGNRIYGCDDCQLICPWNRYSQLTDEADFSPRKALHNPDLVELFSWSEAQFLKVTEGSAIRRIGHLRWLRNVAVALGNAPWSNAVITALESRKGEHPLLDEHIKWAIAQQIEKRNACIIEVQLPKKQRLVRVIEKGLVRDA

SEQ ID NO: 80767 - protein, 384 aa, Salmonella muenster; identical to SEQ ID NO: 80735
  misc_feature (1)..(384): tr|A0A5J1PSN3|A0A5J1PSN3_SALMS tRNA epoxyqueuosine(34) reductase QueG OS=Salmonella muenster OX=82689 GN=queG PE=3 SV=1

SEQ ID NO: 80768 - protein, 384 aa, Salmonella newport
  misc_feature (1)..(384): tr|A0A3Y6VAV3|A0A3Y6VAV3_SALNE tRNA epoxyqueuosine(34) reductase QueG OS=Salmonella newport OX=108619 GN=queG PE=3 SV=1
MLWSIMSKPLDLNQLAQNIKQWGLELGFQQVGITDTDLRASEPALQAWLDKQYHGEMAWMARHGMMRARPHELLPGTLRVISVRMNYLPANAAFASTLKDPTLGYVSRYALGRDYHKLLRSRLKKLGEQIQQYCGSLNFRPFVDSAPILERPLAEKAGLGWTGKHSLILNRETGSFFFLGELLIDLPLPVDQPVEEGCGKCVACMTICPTGAIVEPYTVDARRCISYLTIELEGAIPEAFRPLIGNRIYGCDDCQLICPWNRYSQLTDEADFSPRKALHNPDLLELFSWSEAQFLKVTEGSAIRRIGHLRWLRNVAVALGNAPWSNAVITALESRKGEHPLLDEHIEWAIAQQIEKRNACIIEVQLPKKQRLVRVIEKGLVRDA

SEQ ID NO: 80769 - protein, 384 aa, Salmonella newport; identical to SEQ ID NO: 80735
  misc_feature (1)..(384): tr|A0A0H3BKX9|A0A0H3BKX9_SALNS Epoxyqueuosine reductase OS=Salmonella newport (strain SL254) OX=423368 GN=queG PE=3 SV=1

SEQ ID NO: 80770 - protein, 384 aa, Salmonella oranienberg
  misc_feature (1)..(384): tr|A0A3V8YWK7|A0A3V8YWK7_SALON Epoxyqueuosine reductase OS=Salmonella oranienberg OX=28147 GN=queG PE=3 SV=1
MLWSIMSKPLDLNQLAQNIKQWGLELGFQQVGITDTDLRASEPALQAWLDKQYHGEMAWMARHGMMRARPHKLLPGTLRVISVRMNYLPANAAFASTLKDPTLGYISRYALGRDYHKLLRSRLKKLGEQIQQYCGSLNFRPFVDSAPILERPLAEKAGLGWTGKHSLILNREAGSFFFLGELLIDLPLPVDQPVEEGCGKCVACMTICPTGAIVEPYTVDARRCISYLTIELEGAIPEAFRPLIGNRIYGCDDCQLICPWNRYSQLTDEADFSPRKALHNPDLLELFSWSEAQFLKVTEGSAIRRIGHLRWLRNVAVALGNAPWSNAVITALESRKGEHPLLDEHIEWAIAQQIEKRNACIIEVQLPKKQRLVRVIEKGLVRDA

SEQ ID NO: 80771 - protein, 384 aa, Salmonella oranienberg
  misc_feature (1)..(384): tr|A0A4S3DY66|A0A4S3DY66_SALON Epoxyqueuosine reductase OS=Salmonella oranienberg OX=28147 GN=queG PE=3 SV=1
MLWSIMSKPLDLNQLAQNIKQWGLELGFQQVGITDTDLRASEPALQAWLDKQYHGEMAWMARHGMMRARPHELLPGTLRVISVRMNYLPANAAFASTLKDPTLGYISRYALGRDYHKLLRSRLKKLGEQIQQYCGSLNFRPFVDSAPILERPLAEKAGLGWTGKHSLILNREAGSFFFLGELLIDLPLPVDQPVEEGCGKCVACMTICPTGAIVEPYTVDARRCISYLTIELEGAIPEAFRPLIGNRIYGCDDCQLICPWNRYSQLTDEADFSPRKALHNPDLLELFSWSEAQFLKVTEGSAIRRIGHLRWLRNVAVALGNAPWSNAVITALESRKGEHPLLDEHIEWAIAQQIEKRNACIIEVQLPKKQRLVRVIEKGLVRDA

SEQ ID NO: 80772 - protein, 384 aa, Salmonella paratyphi
  misc_feature (1)..(384): tr|A0A5H9MZD9|A0A5H9MZD9_SALPT tRNA epoxyqueuosine(34) reductase QueG OS=Salmonella paratyphi A OX=54388 GN=qu eG PE=4 SV=1
MLWSIMSKPLDLNQLAQNIKQWGLELGFQQVGITDTDLRASEPALQAWLDKQYHGEMAWMARHGMMRARPHELLPGTLRVISVRMNYLPANAAFASTLKDPTLGYVSRYALGRDYHKLLRSRLKKLGEQIQQYCGSLNFRPFVDSAPILERPLAEKAGLGWTGKHSLILNREAGSFFFLGELLIDLPLPVDQPVEEGCGKCVACMTICPTGAIVEPYTVDARRCISYLTIELEGAIPEAFRPLIGNRIYGCDDCQLICPWNRYSQLTDEADFSPRKALHNPDLLELFSWSEAQFLKVTEGSAIRRIGHLRWLRNVAVALGNAPWSNAVITALESRKGEHPLLDEHIEWAIAQQIEKRNSCIIEVQLPKKQRLVRVIEKGLVRDA

SEQ ID NO: 80773 - protein, 384 aa, Salmonella paratyphi; identical to SEQ ID NO: 80735
  misc_feature (1)..(384): tr|C0Q6C4|C0Q6C4_SALPC Epoxyqueuosine reductase OS=Salm onella paratyphi C (strain RKS4594) OX=476213 GN=yjeS P E=3 SV=1

SEQ ID NO: 80774 - protein, 384 aa, Salmonella potsdam
  misc_feature (1)..(384): tr|A0A5I6S0F0|A0A5I6S0F0_SALPO tRNA epoxyqueuosine(34) reductase QueG OS=Salmonella potsdam OX=597 GN=queG PE= 4 SV=1
MLWSIMSKPLDLNQLAQNIKQWGLELGFQQVGITDTDLRASEPALQAWLDKQYHGEMAWMARHGMMRARPHELLPGTLRVISVRMNYLPANAAFASTLKDPTLGYVSRYALGRDYHKLLRSRLKKLGEQIQQYCGSLNFRPFVDSAPILERPLAEKAGLGWTGKHSLILNREAGSFFFLGELLIDLPLPVDQPVEEGCGKCVACMTICPTGAIVEPYTVDARRCISYLTIELEGAIPEAFRPLIGNRIYGCDDCQLICPWNRYSQLTDEADFSPRKALHNPDLLELFSWSEAQFLKVTEGSAIRRIGHLRWLRNVAVALGNAPWSNAIITALESRKGEHPLLDEHIEWAIAQQIEKRNACIIEVQLPKKQRLVRVIEKGLVRDA

SEQ ID NO: 80775 - protein, 384 aa, Salmonella potsdam; identical to SEQ ID NO: 80735
  misc_feature (1)..(384): tr|A0A5H6BZK7|A0A5H6BZK7_SALPO tRNA epoxyqueuosine(34) reductase QueG OS=Salmonella potsdam OX=597 GN=queG PE= 4 SV=1

SEQ ID NO: 80776 - protein, 384 aa, Salmonella rubislaw; identical to SEQ ID NO: 80735
  misc_feature (1)..(384): tr|A0A3V7IQE9|A0A3V7IQE9_SALRU Epoxyqueuosine reductase OS=Salmonella rubislaw OX=598 GN=queG PE=3 SV=1

SEQ ID NO: 80777 - protein, 384 aa, Salmonella rubislaw; identical to SEQ ID NO: 80736
  misc_feature (1)..(384): tr|A0A5J2JV42|A0A5J2JV42_SALRU tRNA epoxyqueuosine(34) reductase QueG OS=Salmonella rubislaw OX=598 GN=queG PE =4 SV=1

SEQ ID NO: 80778 - protein, 384 aa, Salmonella schwarzengrund; identical to SEQ ID NO: 80736
  misc_feature (1)..(384): tr|A0A0N1QY86|A0A0N1QY86_SALSV Epoxyqueuosine reductase OS=Salmonella schwarzengrund (strain CVM19633) OX=4398 43 GN=queG PE=3 SV=1

SEQ ID NO: 80779 - protein, 384 aa, Salmonella senftenberg
  misc_feature (1)..(384): tr|A0A3U8RPI6|A0A3U8RPI6_SALSE Epoxyqueuosine reductase OS=Salmonella senftenberg OX=28150 GN=queG PE=3 SV=1
MLWSIMSKPLDLNQLAQNIKQWGLELGFQQVGITDTDLRASEPALQAWLDKQYHGEMAWMARHGMMRARPHELLPGTLRVISVRMNYLPANAAFASTLKDPTLGYVSRYALGRDYHKLLRSRLKKLGEQIQQYCGSLNFRPFVDSAPILERPLAEKAGLGWTGKHSLILNREAGSFFFLGELLIDLPLPVDQPVEEGCGKCVACMTICPTGAIVEPYTVDARRCISYLTIELEGAIPEAFRPLIGNRIYGCDDCQLICPWNRYSQLTDEADFSPRKALHNPDLVELFSWSEAQFLKVTEGSAIRRIGHLRWLRNVAVALGNAPWSNAVITALESRKGEHPLLDEHIEWAIAQQIEKRNACIIEVQLPKKQRLVRAIEKGLVRDA

SEQ ID NO: 80780 - protein, 384 aa, Salmonella senftenberg; identical to SEQ ID NO: 80736
  misc_feature (1)..(384): tr|A0A3V9FI67|A0A3V9FI67_SALSE Epoxyqueuosine reductase OS=Salmonella senftenberg OX=28150 GN=queG PE=3 SV=1

SEQ ID NO: 80781 - protein, 379 aa, Salmonella sp.
  misc_feature (1)..(379): tr|A0A1F2JXK3|A0A1F2JXK3_9ENTR Epoxyqueuosine reductase OS=Salmonella sp. HMSC13B08 OX=1581094 GN=queG PE=3 SV =1
MSEPLDLNQLAQNIKQWGLELGFQQVGITDTDLSASEPKLQAWLDKQYHGEMDWMARHGMMRARPHELLPGTLRVISVRMNYLPANAAFASTLKNPSLGYVSRYALGRDYHKLLRNRLKKLGERIQQHCVSLNFRPFVDSAPILERPLAEKAGLGWTGKHSLILNREAGSFFFLGELLIDLPLPIDTPVEEGCGKCVACLTICPTGAIVEPYTVDARRCISYLTIELEGAIPEALRPLMGNRIYGCDDCQLICPWNRYSQLTDEEDFSPRKHLHAPELIELFGWSEAWFLKVTEGSAIRRIGHLRWLRNIAVALGNAPWDNAVITALESRRGEHPLLDEHIEWAIAQQIEKRNACVVEVQLPKKQRLVRVIEKGLPRDA

SEQ ID NO: 80782 - protein, 379 aa, Salmonella sp.
  misc_feature (1)..(379): tr|A0A509CQS9|A0A509CQS9_9ENTR Epoxyqueuosine reductase OS=Salmonella sp. NCTC 6947 OX=2583581 GN=yjeS PE=3 SV =1
MSKPLDLNQLAQNIKQWGLELGFQQVGITDTDLRASEPALQAWLDKQYHGEMAWMARHGMMRARPHELLPGTLRVISVRMNYLPANAAFASTLKDPTLGYVSRYALGRDYHKLLRSRLKKLGEQIQQYCGSLNFRPFVDSAPILERPLAEKAGLGWTGKHSLILNREAGSFFFLGELLIDLPLPVDQPVEEGCGKCVACMTICPTGAIVEPYTVDARRCISYLTIELEGAIPEAFRPLIGNRIYGCDDCQLICPWNRYSQLTDEADFSPRKALHNPDLVELFSWSEAQFLKVTEGSAIRRIGHLRWLRNVAVALGNAPWSNAVITALESRKGEHPLLDEHIEWAIAQQIEKRNACIIEVQLPKKQRLVRVIEKGLVRDA

SEQ ID NO: 80783 - protein, 384 aa, Salmonella thompson
  misc_feature (1)..(384): tr|A0A3V3FZ86|A0A3V3FZ86_SALTH Epoxyqueuosine reductase OS=Salmonella thompson OX=600 GN=queG PE=3 SV=1
MLWSIMSKPLDLNQLAQNIKQWGLELGFQQVGITDTDLRASEPALQAWLDKQYHGEMAWMARHGMMRARPHELLPGTLRIISVRMNYLPANAAFASTLKDPTLGYVSRYALGRDYHKLLRSRLKKLGEQIQQYCGSLNFRPFVDSAPILERPLAEKAGLGWTGKHSLILNREAGSFFFLGELLIDLPLPVDQPVEEGCGKCVACMTICPTGAIVEPYTVDARRCISYLTIELEGAIPEAFRPLIGNRIYGCDDCQLICPWNRYSQLTDEADFSPRKALHNPDLLELFSWSEAQFLKVTEGSAIRRIGHLRWLRNVAVALGNAPWSNAVITALESRKGEHPLLDEHIEWAIAQQIEKRNACIIEVQLPKKQRLVRVIEKGLVRDA

SEQ ID NO: 80784 - protein, 384 aa, Salmonella thompson; identical to SEQ ID NO: 80736
  misc_feature (1)..(384): tr|A0A403SJ68|A0A403SJ68_SALTH Epoxyqueuosine reductase OS=Salmonella thompson OX=600 GN=queG PE=3 SV=1

SEQ ID NO: 80785 - protein, 384 aa, Salmonella typhi
  misc_feature (1)..(384): tr|Q8Z191|Q8Z191_SALTI Epoxyqueuosine reductase OS=Salm onella typhi OX=90370 GN=yjeS PE=3 SV=1
MLWSIMSKPLDLNQLAQNIKQWGLELGFQQVGITDTDLRASEPALQAWLDKQYHGEMAWMARHGMMRARPHELLPGTLRVISVRMNYLPANAAFASTLKDPTLGYVSRYALGRDYHKLLRSRLKKLGEQIQQYCGSLNFRPFVDSAPILERPLAEKAGLGWTGKHSLILNREAGSFFFLGELLIDLPLPVDQPVEEGCGKCVACMTICPTGAIVEPYTVDARRCISYLTIELEGAIPEAFRPLIGNRIYGCDDCQLICPWNRYSQLTDEADFSPRKALHNPDLLELFSWSEAQFLKVTEGSAIRRIGHLRWLRNVAVALGNAPWSNAVITALESRKGEHPLLDENIEWAIAQQIEKRNACIIEVQLPKKQRLVRVIEKGLVRDA

SEQ ID NO: 80786 - protein, 384 aa, Salmonella typhimurium; identical to SEQ ID NO: 80740
  misc_feature (1)..(384): tr|A0A5D3QVK8|A0A5D3QVK8_SALTM Epoxyqueuosine reductase OS=Salmonella typhimurium OX=90371 GN=queG PE=3 SV=1

SEQ ID NO: 80787 - protein, 379 aa, Salmonella typhimurium
  misc_feature (1)..(379): tr|A0A0H3NKS4|A0A0H3NKS4_SALTS Epoxyqueuosine reductase OS=Salmonella typhimurium (strain SL1344) OX=216597 GN =yjeS PE=3 SV=1
MSKPLDLNQLAQNIKQWGLELGFQQVGITDTDLRASEPALQAWLDKQYHGEMAWMARHGMMRARPHELLPGTLRVISVRMNYLPANAAFASTLKDPTLGYVSRYALGRDYHKLLRSRLKKLGEQIQQYCGSLNFRPFVDSAPILERPLAEKAGLGWTGKHSLILNREAGSFFFLGELLIDLPLPVDQPVEEGCGKCVACMTICPTGAIVEPYTVDARRCISYLTIELEGAIPEAFRPLIGNRIYGCDDCQLICPWNRYSQLTDEADFSPRKALHNPDLLELFSWSEAQFLKVTEGSAIRRIGHLRWLRNVAVALGNAPWSNAVITALESRKGEHPLLDEHIEWAIAQQIEKRNACIIEVQLPKKQRLVRVIEKGLVRDA

SEQ ID NO: 80788 - protein, 384 aa, Salmonella virchow; identical to SEQ ID NO: 80735
  misc_feature (1)..(384): tr|A0A5I5YBV0|A0A5I5YBV0_SALVI tRNA epoxyqueuosine(34) reductase QueG OS=Salmonella virchow OX=48409 GN=queG P E=4 SV=1

SEQ ID NO: 80789 - protein, 384 aa, Salmonella virchow
  misc_feature (1)..(384): tr|A0A5H5S9E1|A0A5H5S9E1_SALVI tRNA epoxyqueuosine(34) reductase QueG OS=Salmonella virchow OX=48409 GN=queG P E=4 SV=1
MLWSIMSKPLDLNQLAQNIKQWGLELGFQQVGITDTDLRASEPALQAWLDKQYHGEMAWMARHGMMRARPHELLPGTLRVISVRMNYLPANAAFASTLKDPTLGYVSRYALGRDYHKLLRSRLKKLGEQIQQYCGSLNFRPFVDSAPILERPLAEKAGLGWTGKHSLILNREAGSFFFLGELLIDLPLPVDQPVEEGCGKCVACMTICPTGAIVEPYTVDARRCISYLTIELEGAIPEAFRPLIGNRIYGCDDCQLICPWNRYSQLTNEADFSPRKALHNPDLLELFSWSEAQFLKVTEGSAIRRIGHLRWLRNVAVALGNAPWNNAVITALESRKGEHPLLDEHIEWAIAQQIEKRNACIIEVQLPKKQRLVRVIEKGLVRDA

SEQ ID NO: 80790 - protein, 378 aa, Salsuginibacillus halophilus
  misc_feature (1)..(378): tr|A0A2P8HG78|A0A2P8HG78_9BACI Epoxyqueuosine reductase OS=Salsuginibacillus halophilus OX=517424 GN=queG PE=3 SV=1
MTSAQLKEEIIAYSKDIGIDKIGFASADPFLTLKDRLIRHRENGYESGFEEPDLDKRTEPERLLPKARTIISIALAYPSRMKDAPQSKRGDRRGVFCRASWGRDYHHVLNEKLAQLEAFIAEKVPGAKSTSMVDTGELSDRAVAERAGIGWSAKNCAIITPEFGSYVYLGEMVTTIELPPDTPLEDQCGTCNKCVDACPTGALIQGGQLDSTKCIAYLTQTKTMLPKQYRKKLGNRLYGCDTCQTVCPENKGKDFHHHEAFEPDPENVKPQLLPLLSISNREFKERFGSMAGSWRGKKPIQRNAVIALGHFKEESAVPELGRLLLNDPRPVIRGTAAWALGEIQTSEAVALLEQGEALEEDEQSLKEIHEALNRHEVS

SEQ ID NO: 80791 - protein, 379 aa, Samsonia erythrinae
  misc_feature (1)..(379): tr|A0A4R3VIS3|A0A4R3VIS3_9GAMM Epoxyqueuosine reductase OS=Samsonia erythrinae OX=160434 GN=queG PE=3 SV=1
MSYPYDLNELAQHIKQWGKALGFQQVGICDTDLSAEEPRLQAWLDKQYHGEMEWMARHGMLRARPHELLPGTLRVISVRMNYLPAKAAFASTLKNPQLGYVSRYALGRDYHKLLRQRLKKLGDQIQAYCGDLNFRPFVDSAPIIERPLAAKAGLGWVGKHSLILNRESGSWFFLGELLIDLPLPIDQPQEEQCGRCVACLTTCPTGAIVAPYTVDARRCISYLTIELEGPIPEEFRPLMGNRIYGCDDCQLICPWNRFSQLTDEADFSPRAALHTPELLTLFSWSEEKFLRITEGSAIRRIGHLRWLRNIAVALGNAPYQDNIVLALQARLGENELLDEHIHWALHQQLERRASQEIDIQPAQKKRLTRAVEKGLPRDA

SEQ ID NO: 80792 - protein, 350 aa, Sandaracinobacter sp.
  misc_feature (1)..(350): tr|A0A501XDE2|A0A501XDE2_9SPHN Epoxyqueuosine reductase OS=Sandaracinobacter sp. PAMC 28131 OX=1715348 GN=queG PE=3 SV=1
MTSSISEVLRAEAQALGFAAFGIAPADAAPETGERLRQWLAEGRHGDMLWMESRADERAHPAGLWPDVRSVIALGLPYTPALDPARNLSHPELATISVYALGRDYHDVVKSKLKALARFLAERSGEQVKVFVDTAPVMEKPLAEAAGLGWQGKHSNLLSRKAGNWLFLGAIYTTADLPPFREPGTSASCGSCTACITACPTQAITAPYRVDARRCISYLTIEHKGPIPPEFRAQLGNRIYGCDDCLNACPWNSHAQFPADPAFAPRAELTAPYLADLLALDDPSFRSIFAGSPIKRIGRNRFVRNCLYAAGNSGLADLRTPVSALLNDPDPGVADAAQWALARLSGVGGE

SEQ ID NO: 80793 - protein, 345 aa, Sandaracinus amylolyticus
  misc_feature (1)..(345): tr|A0A0F6W3S4|A0A0F6W3S4_9DELT Epoxyqueuosine (OQ) redu ctase QueG OS=Sandaracinus amylolyticus OX=927083 GN=DB 32_003867 PE=4 SV=1
MTLTDEVKARARELGFARIGIARAEALGPEGERLRAWLAEGRHAAMAWMEQTCEVRVDPRDERMLAGARSVIVMATPYARHEERVGPAPGVVARYARGRDYHNVIGKRAKKLADWLRASGHLARGSTDSTPVFERAWAVRAGLGFIGKNCCLIIPGLGSHVLLATVVTTAELEPDAPMGERCGSCTRCLDACPTRAFVGPRELDARRCISYLTIEHEGAIDEALREGIGDRFLGCDVCQDVCPFTRTAPPDPATTEPFAPDARWRDHDAVSVLRMDEATFDAYSLGSPVRRLKRAGAARNAAIVLGNVGGKVHLPVLRDARERDADDAVRDAAAWAITRIESREK

SEQ ID NO: 80794 - protein, 655 aa, Sandaracinus sp.
  misc_feature (1)..(655): tr|A0A2E0TD94|A0A2E0TD94_9DELT tRNA epoxyqueuosine(34) reductase QueG OS=Sandaracinus sp. OX=2024858 GN=queG P E=4 SV=1
MPACIQDVGSSRVVPSTSRSGECNTSSSSRAAWLFPRSKVRTTTGPIADMSSPKPIVKPGMPSWRLLWLGRIQAASSRRKLLSCICVRSPAPTSTASSSRSTSAMTRSQLASSSTLSRSRSTSGKGGTSGSKRERTVRRSSMAPASAVSRSVGVCFAPGVRVARCPVPFRSATISISSVQPAARRATRMFCSAAPQLMTSSRSSGSTTGSPRLMSAWTSMAPAFVTRKSQGCELCELGAAAPASRIGSRNGGGSPSTGRCVLMGSVTPRDSARTVPAQAAQRREGRSPRAVRGRARGPRSAHPLRVSEALEARVKALARELGFARVGIARAEALEPEGAQLRAFVAKGRHGGMGWLADTVEVRADPRHPGMVPGAESVVVLVAPYARPGGEARVGPAPGRVARYARERDYHNVLRKKVRKIEALLREAGHRARWSVDSRPVLERAWAERAGVGFVGKNCCLIVPGLGSHVFLATVVTTARLEADAPMARRCGACRLCLDRCPTEAFAGPRELDARRCVSYLTIEHEGPVDPALREGLEDWIFGCDACQDVCPYNRTAPPEPSVTEPYAAHGRWEAVDAEGLLAMEEEAFLAWAEGSPARRSGRTRMARNAAYVLGNVGERRHLPVLREAARGHEDEGVREAARWAGERIEERGEE

SEQ ID NO: 80795 - protein, 319 aa, Sandaracinus sp.
  misc_feature (1)..(319): tr|A0A2D9TD50|A0A2D9TD50_9DELT tRNA epoxyqueuosine(34) reductase QueG OS=Sandaracinus sp. OX=2024858 GN=queG P E=4 SV=1
MNDVEALDGEVRRRMEELGFARVGIARAEALEPEGAQLRAWLAAGRQGQMDWMERTADVRADPRHPGMVEGAVSVVVGAFPYAREADRVGPAPGRVARYARGRDYHNVLSKRLRKVVAFLRERGHEARFSVDSRPVLERAWAERAGLGFVGKNSCLIVPGLGSHVFLATVVTTAALRVDAPIKRRCGTCRACLDACPTDAFVGPRELDARRCISYLTIEHEGPIPPEHADQMGDWIFGCDACQDVCPYNRTSLPDPAATEPFAPHRRFQDVDAEALLAMDEPTYLRWAEGSPLRRAGLERMQRNARIVLANGKRRLPVV

SEQ ID NO: 80796 - protein, 342 aa, Sandarakinorhabdus cyanobacteriorum
  misc_feature (1)..(342): tr|A0A255YZV0|A0A255YZV0_9SPHN Epoxyqueuosine reductase OS=Sandarakinorhabdus cyanobacteriorum OX=1981098 GN=q ueG PE=3 SV=1
MIAALKAEAHRQGFADIGICAADAVPEAGQRLRAWLDDGCHGDMIWMEGRSRERASPQGLWPAVKSVIMLGTSYAPALDPLRLAGVGDTGVISVYAWNRDYHDLIKKRLKTLARWLVAQRPEAGVKVFVDTAPVMEKPLAAAAGLGWQGKHANLVSRQHGSWLFLGAIYTTLELPADAPHPDRCGSCTRCQTACPTQAFPAPYRLDARRCLAYLTIEHAGPIPEEFRAPMANRIYGCDDCLSVCPWNRFAQATEEPAFLPRAELTAPKLAELLALDDAAFRALFSGSAIKRIGVKRFLRNCLYAAGNSEEPALIPAVQVYVGSADPVVAEAARWAMTRLAAI

SEQ ID NO: 80797 - protein, 344 aa, Sandarakinorhabdus sp.
  misc_feature (1)..(344): tr|A0A552UFT6|A0A552UFT6_9SPHN Epoxyqueuosine reductase OS=Sandarakinorhabdus sp. LB1R16 OX=2593303 GN=queG PE =3 SV=1
MTPAALRTALEARAHALGFAAFGVAPATAAPLAGARLRQWLSEGRHGDMIWMADTADRRASPQGLWPEVRSVVMLGTSYAPALDPLRHAGNPDTGVISVYAQGKDYHDTIKGRLKQLGNWLGSTGNDLKVFVDTAPVMEKPLAEAAGLGWQGKHTNLVSRAHGSWLFLGSIYTTAELPYDAVHRDLCGSCDRCQRACPTDAFPAPYRLDARRCISYLTIEHKGPIPVEFRAAIGNRIYGCDDCLAVCPWNRFAQASADLAFAARPDLAAPSLAELLALDDTGFRARFAGSPVKRIGRGRFVRNVCIAAGNSGDAALLPVLVGLAEDGDAVVAEAAAWATTQIRA

SEQ ID NO: 80798 - protein, 308 aa, Sanguibacteroides justesenii
  misc_feature (1)..(308): tr|A0A0C3MJG4|A0A0C3MJG4_9PORP Iron-sulfur cluster-bind ing protein OS=Sanguibacteroides justesenii OX=1547597 GN=queG PE=4 SV=1
MVLSSSTLEKYAKETGFDACGVALAGALPREKERLLEWLGEGKHGGMSYMANNIEKRGDPRLLVEGARSVIVTLTNYYPCRRQAEGTPVFARYAYGKDYHFVLKERLHRLFALLKEEANRSVNGRVFVDSAPVFEHEWARRAGLGWIGKNTLLIHRKWGSFCFIGVIISNLEFDTYSSSFESRFCGNCNRCVEACPTGALTAYSLDARRCISYNTIENKGNIPDVVRQRMGMRVFGCDICQEVCPWNRKGIFNEVSEFQPGKEIMEWTKEQWLQLDEKTFETRFKDSPLARAGLNKLRDNLVDTSFYD

SEQ ID NO: 80799 - protein, 363 aa, Sapientia aquatica
  misc_feature (1)..(363): tr|A0A4V3AUW0|A0A4V3AUW0_9BURK Epoxyqueuosine reductase OS=Sapientia aquatica OX=1549640 GN=queG PE=3 SV=1
MINDKYAILARSIKSWGQDLGFSDVRISDIDLSAHEAGLAAWLEAGFHGEMDYMAAHGMKRARPAELVPNAVRAIVVRMDYLAPSTSPNWRAAEQARGQLSDQAVISVYARGRDYHKVLRNRLQQLAQKIEAEVGQFGYRAFTDSAPVMEVALAEKAGLGWRGKHTLLLNREAGSTFFLGEIITDLPLPIDAPISNHCGNCTACLSSCPTQAIIAPYQLDARRCISYLTIELKSSIPEEFRPLIGNRVYGCDDCQTCCPWNKFAQISQEPDFAVRNGLDNSSLIELFSWSEEDFMRRMEGSPIRRIGYVSWLRNLAVGLGNARRARLAQQLDCELIDAALCRHLQHPSDIVREHVSWALRQGA

SEQ ID NO: 80800 - protein, 309 aa, Saprospira grandis
  misc_feature (1)..(309): tr|H6L351|H6L351_SAPGL Epoxyqueuosine reductase OS=Sapr ospira grandis (strain Lewin) OX=984262 GN=queG PE=3 SV =1
MDKYELTAKLRAAALAEGFDNLRIAQARELTEEGRRLEAWLNKGYQGKMQYLENHFEKRIDPRKLVDGAKSVVSLSFNYFPEEQQVEGAPKLAKYAYGEDYHYVLKAKLRHLLALLETELGRPINGRAFVDSAPVLERDWAKHSGLGWIGKNTLLISKQRGSFFFLAELIIDVDLVYDGPIKDYCGRCRRCIDACPTQAISEKGYIMDGSKCISYFTIELRDELPAEYKGQFADWMFGCDICQDVCPWNRFSRPHQEEAFRPKENLLEMRREDWMELTEEVFRKVFKKSAVKRTKYKGLMRNLAFLEEA

SEQ ID NO: 80801 - protein, 309 aa, Saprospira grandis
  misc_feature (1)..(309): tr|J0P062|J0P062_9BACT Epoxyqueuosine reductase OS=Sapr ospira grandis DSM 2844 OX=694433 GN=queG PE=3 SV=1
MDKYELTAKLRSAALAEGFDNLRVAQARELTEEGRRLEAWLNKGYQGKMQYLENHFEKRIDPRKLVDGAKSVVSLSFNYFPEEQQVEGAPKLAKYAYGEDYHYVLKAKLRRLLALLESELGRPINGRAFVDSAPVLERDWAKHSGLGWIGKNTLLISKQRGSFFFLAELIIDIDLVYDGPIKDYCGRCRRCIDACPTQAISEKGYLMDGSKCISYFTIELRDELPAEYKGQFADWMFGCDICQDVCPWNRFSRPHQEEAFRPKENLLEMRREDWMELTEEVFRKVFKKSAVKRTKYKGLLRNLAFLKEE

SEQ ID NO: 80802 - protein, 342 aa, Saprospiraceae bacterium
  misc_feature (1)..(342): tr|A0A521UH06|A0A521UH06_9BACT Epoxyqueuosine reductase OS=Saprospiraceae bacterium OX=2202734 GN=queG PE=3 SV =1
MLQLQPFCGHHFLHHHPIRPRGSALARRQCFKNTALTRQRHSLLIRQEAARLGFSFTGIAKAGPLDEEARHLEEWLHHGFHGQMQYMENNFDTRTDPTKLVPGAKSVIVLLHNYFPKEKQEDPDAPKLARYAYGEDYHFILKRKLKDLLAFIRQEIGEVQGRCFVDSAPVMERDWAKRAGLGWTGKNTLLIHPKAGSYFFLAELILNLELPPDQPMKDYCGTCRRCINACPTAAISPSGYLLDASRCISYLTIELRDETLPDEFRGKMDNWMFGCDVCQEVCPWNRFASPHNEPAFEPKLELMKMKNSEWRELTKEVFQQVFKKSAVKRTKYEGLKRNIDFL

SEQ ID NO: 80803 - protein, 255 aa, Saprospirales bacterium
  misc_feature (1)..(255): tr|A0A3C0HEU5|A0A3C0HEU5_9BACT tRNA epoxyqueuosine(34) reductase QueG (Fragment) OS=Saprospirales bacterium OX =2026790 GN=queG PE=4 SV=1
LRTDPTKLVPGAKTVISLMFNYYNEDTQHDPEAPKLAMYAYGRDYHKVVKKKLKYLMKYVKEEIGDIDGRAFVDSAPILERDWARRSGMGWVGKHSLLLNPKEGSYFFLSEIICDLEIEPDSPIKDHCGTCTRCIEACPTDAISEEGYVMDGSKCISYLTIERKEEIPIEYKDLLGNYMFGCDICQQVCPWNRFAKQHNEPDFQPKAGMLDMSRKDWMEITEEVFDRIFFGSPVKRTGFEGLQRNLRFLNDRPND

SEQ ID NO: 80804 - protein, 312 aa, Saprospirales bacterium
  misc_feature (1)..(312): tr|A0A2E4IBV5|A0A2E4IBV5_9BACT Epoxyqueuosine reductase OS=Saprospirales bacterium OX=2026790 GN=queG PE=3 SV= 1
MNKSQYKFIIQQKARELGFSGVSFAKAEHMDVEALRLEKWLGGGNHGTMGYMENHFELRTDPTKLVPGAKTVISLMFNYYNEDTQHDPEAPKLAMYAYGRDYHKVVKKKLKYLMKYVKEEIGDIDGRAFVDSAPILERDWARRSGMGWVGKHSLLLNPKEGSYFFLSEIICDLEIEPDSPIKDHCGTCTRCIEACPTDAISEEGYVMDGSKCISYLTIERKEEIPIEYKDLLGNYMFGCDICQQVCPWNRFAKQHNEPDFQPKAGMLDMSRKDWMEITEEVFDRIFFGSPVKRTGFEGLQRNLRFLNDRPND

SEQ ID NO: 80805 - protein, 398 aa, Unknown
  misc_feature (1)..(398): tr|G5ZVK0|G5ZVK0_9PROT Uncharacterized Fe-S protein OS= SAR116 cluster alpha proteobacterium HIMB100 OX=909943 GN=HIMB100_00000320 PE=4 SV=1
MILQLPLTRSRRAAIFRRYRVMADHTPQKTRDWLATAGAAEGFDICAVTTADLPSSVAAGLDDYIGAGHHGDMGWLAETRDRRITPSAMWPDARSAVIFGCNYGPDHDPMENLDAASSANISVYARGRDYHDVLKGRLKQLAGRLAARTGWQVKIFVDTAPLMEKPLAARAGLGWQGKHTNLVSRRYGSWLFLGTILTDGLLPADTPASDFCGSCTSCLDICPTDAFPAPYQLDARRCISYLTIEFDGHIPREFRTATGNRVFGCDDCLAVCPWNKFASASADLKLAAQDGRSLPSLQDMLSLDEPAFRQYFSASPVKRTGYIRFMRNCLIAAGNAGDAALIGVIRPYLDHKDARLRAMAVWGLSHYMNRCELAALYPAGETDETVRAEWQTALNQTD

SEQ ID NO: 80806 - protein, 77 aa, Unknown
  misc_feature (1)..(77): tr|A0A2A5YC19|A0A2A5YC19_9PROT tRNA epoxyqueuosine(34) reductase QueG (Fragment) OS=SAR116 cluster bacterium M ED-G05 OX=1986234 GN=CNE92_06510 PE=4 SV=1
MDAARLRSWLDDAGKAAGFADIFVTDARLGDRSGKGLDAFLADQFEGDMAWLRDTAARRRQPAAMWDGARTAIVTVM

SEQ ID NO: 80807 - protein, 420 aa, Unknown
  misc_feature (1)..(420): tr|A0A2A4SI51|A0A2A4SI51_9CHLR tRNA epoxyqueuosine(34) reductase QueG OS=SAR202 cluster bacterium OX=2030829 G N=queG PE=4 SV=1
MPEARQWIFPKGARDLHRWDNRSGASVNNLKQTVTGYALELGFDLVRITSTDDFVQDREIALERLRDGLMDGLPWYHQARVMRGTSPQELLPGARSIICLGLSYYRPVLSDGTAPRSAGKVAQYARLQDYHKVMKTRMRDYVRGLSSQLETPIDARWYVDDGPMLDRAAAARSGLGWFGKNTNILTPTHGSWIFLGQVITDLALEPDPPLKKTCGSCVRCIDACPTGAIVAPYVIDNTRCISYLTIEHRGPIPRELRPKMLDWVFGCDICQDVCPVNRNALTGDSAMWKQGSRGDSHEAKMGTLDLLDLLRITEEEFRQRFKGSPILRAKREGLQRNACVALGNLGDPSAVPALNEALSHSSPLVRGHAAWALGQIGTFDAREALKAIRSNEVDPEVLEEIQAALDDTVGRDPVSVIEHI

SEQ ID NO: 80808 - protein, 385 aa, Unknown
  misc_feature (1)..(385): tr|A0A2N0MKJ5|A0A2N0MKJ5_9CHLR tRNA epoxyqueuosine(34) reductase QueG OS=SAR202 cluster bacterium MP-SInd-SRR3 963457-G1 OX=1926621 GN=BZY84_01760 PE=4 SV=1
MQDLKAHISSYAIQCGFDLVRITSADVFAQDRDAALSRIKAGQMDGLPWFTESRVRRGSDPQELLPGARSIICLGQSYLDPEDEEKAISGTGKVARYARVKDYHRAMKRRMKAFVRGLEEKLDSPVAAKWYVDDGPMLDRAAAARSGLGWFGKNTNILTPSHGSWILLGQVITDLELEPDPPLKKTCGSCVRCIDDCPTGAIVAPYVVDNARCISYQTIENRGIIPLEMRPLIGDLVFGCDICQDVCPVNRRAESPLLPIQKAAAVGPSGQLDLVELLDLTEEEFRDRFQGTSIMRAKRVGMQKNACVALGNNRDESGVPALVATLKESEALVRGHAAWALGQISSPDAIGALEQATTSEVDPYVLEEIGMALAEALQRLTVSKA

SEQ ID NO: 80809 - protein, 439 aa, Unknown
  misc_feature (1)..(439): tr|A0A2D6YND9|A0A2D6YND9_9DELT tRNA epoxyqueuosine(34) reductase QueG OS=SAR324 cluster bacterium OX=2024889 G N=queG PE=4 SV=1
MNKNLKEAQNFNEADIQLREKIRKKGLSLGFDWVGFTGTTENLTHPHYSAWLEQGFAGEMQYLHKHAPQKISSQKVLGNAQTVISVACNYLHDDTSTKKYQDSSRGRFSRYSQGNDYHLILKDRLEEFRKWLLDEKLASGFEQTRVYVDTGPLLERELAWRAGLGWFGKHSNLIHAKLGSWLLLAEVIIDSKIPPDQPFSGIDCGSCTRCIEACPTDAIVSDRKVDARRCLSYLTIELKNTIPKQFRSKFQNWIFGCDICQEVCPWNRKAPKTTDATWKARKGLKDRKLWDWVRLEQEEFSNQFRKSAVKRTKRRGLLRNVVTALSACSHPQALSGLQIGLKDEEELVRQHAAWGLGFRRQRITKSILWRHLRVETVEKVIIEIQEALASKEKLFSKRERACLLTRQVPLALARKHRLGLSGGNHQRSSHNRRTKLLQG

SEQ ID NO: 80810 - protein, 375 aa, Unknown
  misc_feature (1)..(375): tr|A0A432GDU1|A0A432GDU1_9DELT Epoxyqueuosine reductase OS=SAR324 cluster bacterium OX=2024889 GN=queG PE=3 SV =1
MRTPTLTSLIRKKASELGFELIGAIPVSRSKTIDIYNAWLKKGYAGSMDYLERHSVLKEDPRQLLPETISLLALGFNYCTVDPPALVHNPEIGCISRYAWGDDYHELIRTKLRVLENYICQELNAGNLSRSFVDSGPVLEREIAQRAGLGWIGKHSNLINMEKGSWFFLAELLVDVPLETNLPFTRVDCGTCTICIEACPTEAIIADRTVDARLCISYLTIELKGAIPVELRPKMSNMIFGCDICQEVCPWNQNASKSPESGLRPRPENVAPELTELMKLDQSAFKKRFRKSPIKRTKRRGLLRNVAVALGNWAHESAIPALSLGLQDSEPLVRSHAAWALGRISASQAKINLKAAKITEKDPAVLEEIEAALGA

SEQ ID NO: 80811 - protein, 350 aa, Unknown
  misc_feature (1)..(350): tr|A0A2A4X211|A0A2A4X211_9GAMM Epoxyqueuosine reductase OS=SAR86 cluster bacterium OX=2030880 GN=queG PE=3 SV= 1
MTDIDFKQFATDIKDWGVELGFQEVSITDIDLSEYEHHLEDWIGRNYHGAMSYMAENHDKRCHPEQLVPGTIRVVCVRMDYALDSEDSLDSMKNTGKAYVSRYARGRDYHKLIRKRLQKLARRIQDIAGPFGYRAFVDSAPVLERALAEKSGMGWIGKNTMLINKQAGSWFFLGELFTDLPLPVDEQVSDHCGSCSACLDICPTNAFVKPNLLDATRCISYLTIELRSSIPVEFRKPMGNRIFGCDDCQLVCPWNKFSKPSIEKDFTPRHSLDDAQLVDLFGWSEREFLKRTEGSAIRRIGYDCWLRNIAVALGNAPSSKEIVGALQSRLNNVSDMVNEHIEWALLQHES

SEQ ID NO: 80812 - protein, 356 aa, Unknown
  misc_feature (1)..(356): tr|A0A2A4MT57|A0A2A4MT57_9GAMM Epoxyqueuosine reductase OS=SAR86 cluster bacterium OX=2030880 GN=queG PE=3 SV= 1
MNNLNIEQLTEDIHNWSSELGFQQLTISNVDLGEYQPLLESWLKNDYHGDMHYMAKHGEMRSHPEQLLPGTVKIISVRMDYSLDQKNSLEPLKNTSKAYIARYARGRDYHKLMRNRLQKLANKIQTATGSFGYRAFVDSAPVLERALAEKSGMGWIGKNTMLINKKAGSWFFLGELFTDLPLLETLAGDEPIQKHCGSCTACLDICPTQAFVAANTLDARRCISYLTIELRTSIPIELRPLMGNRIFGCDDCQLICPWNKFTQKTGEQDFSPRHQLDDCDLLSLFDWSEAEFYQNTAGSPIRRIGYECWLRNIAVALGNAQKSDAIEFALQEKQNHSSELVREHVQWALLQHTQKG

SEQ ID NO: 80813 - protein, 374 aa, Unknown
  misc_feature (1)..(374): tr|A0A0R2WE17|A0A0R2WE17_9GAMM Epoxyqueuosine reductase OS=SAR92 bacterium BACL16 MAG-120619-bin48 OX=1655625 GN=queG PE=3 SV=1
MTETEKLADLAKNIKAWGETLGFQQVAISKPNLEQASERLLQWLEKGFQGSMQWMGAHGDKRYHIDKLVEKTVRVISVRMDYLTDSNMIAVLKDNNKAYISRYALGRDYHKLIRRRLADLSQKIEAEIMKLELCDLEVFQRPFVDSAPVMEKPIAEQAGLGWIGKNTLLLNDKVGSWFFLGEIYISLELPVDKSDQSNKCGNCRACLKICPTDAFPEPYVLDARRCISYLTIESQDPIPEALRPLMGNRVFGCDDCQIICPWNRYPSTTQEIDFSPRHNLDNADLLTLFEWTEETFERNTQGSPIRRIGYQRWLRNLSVGLGNAPASLDIMAALTKQLDNPSALVREHVQWALNEQQRNHSSAKLWPTEGVKGE

SEQ ID NO: 80814 - protein, 362 aa, Unknown
  misc_feature (1)..(362): tr|A0A2A5W2Z4|A0A2A5W2Z4_9GAMM Epoxyqueuosine reductase OS=SAR92 bacterium MED-G29 OX=1986232 GN=queG PE=3 SV= 1
MHEIETGTDKLQKLAKKIKSWGASYGFQQVSIVEPDLTQASDHLHDWLSKGFQGSMHWMSEHKDKRYVVSKLVDHTVRVISVRMDYLADDNMIAVLKNDQKAYISRYALGRDYHKVIRHRLADLVKKIEGELPELSLSQRPFVDSAPVMEKPIAEQAGLGWIGKNTLLLNESAGSWFFLGEIYTSLKLPVDSSHQENKCGNCRACLTVCPTNAFPEPYVLDARRCISYLTIESKDAIPVELRPLMGNRVFGCDDCQIRCPWNRFSSPTKEDDFSPRNNLDNTSLVSLFNWERSEFLDKTEGSPIRRIGHERWLRNIAVGLGNASGSQEILNQLIKKRNHPSELVREHVNWAIERQKEKLNIA

SEQ ID NO: 80815 - protein, 362 aa, Unknown
  misc_feature (1)..(362): tr|A0A520MNW6|A0A520MNW6_9GAMM Epoxyqueuosine reductase OS=SAR92 clade bacterium OX=2315479 GN=queG PE=3 SV=1
MHEIEGDVENLENLATKIKSWGAAFGFQQVSIIEPDLNNASKRLQEWLAKGFQGSMGWMGEHGDKRYVVDKLVDHTVRVISVRMDYLADTNMIAVLRDDNKAYISRYALGRDYHKVIRNRLAALIKKIEQELPELNLSQRPFVDSAPVMEKPIAEQAGLGWIGKNTLLLNESAGSWFFLGEIYTSLKLPVDNQKQENKCGNCRSCLKVCPTDAFPEPYVLDARRCISYLTIESKDAIPEELRPLMGNRVFGCDDCQIRCPWNRFASLTQEDDFTPRHNLDDPSLVTLFNWDAEDFLEKTQGSPIRRIGHERWLRNIAVGLGNASGSNTILDELKAKANHPSALVREHVEWAIAQQKEKLSLE

SEQ ID NO: 80816 - protein, 361 aa, Unknown
  misc_feature (1)..(361): tr|A0A520LMI5|A0A520LMI5_9GAMM Epoxyqueuosine reductase OS=SAR92 clade bacterium OX=2315479 GN=queG PE=3 SV=1
MPEFAQNKIDLDQLAANIKHWGGNLGFQRVSIIAPDLKYASEKLKTWLDNKYHGSMDWMAKHEEKRCTPEKLVLGTIRVISVRMNYLSDPNMIATLKDDNKAYISRYALGKDYHKIIRKKLGSLTKRIAEEIPKEQFNHRPFVDSAPVLEKPLAEQAGLGWIGKNTLLIDKSVGSWFFLGEIYTSIPLPVDNAKEANLCGKCKACINVCPTNAFPEPYVLDAKKCISYQTIENKGIIPKELRSPMGNRVFGCDDCQIWCPWNRDPAITSEEVFQPRHKLDNASLLELFNWSESEFQEKTLGSPIRRIGYERWLRNLAIGLGNAPGCSNIVKSLKARMVNSSEMLKEHLHWALEEQNRKLNN

SEQ ID NO: 80817 - protein, 366 aa, Schlegelella thermodepolymerans
  misc_feature (1)..(366): tr|A0A2S5T2I9|A0A2S5T2I9_9BURK Epoxyqueuosine reductase OS=Schlegelella thermodepolymerans OX=215580 GN=queG P E=3 SV=1
MHQSKVVDHAALLDDIRQWAHELGFSQIGVSGVDLREAEPGLLAWLAAGFHGSMDYMAAHGLKRARPAELVPGTVSVITARMDYLPRGTPSGWQAVELARLQRPGEAVVSIYARGRDYHKVLRQRLQKLADRIAGRLGPFGHRVFTDSAPVLEVELASRSGLGWRGKHTLALHREAGSMFFLGEIYVDLALPASAATTAHCGSCTACLQACPTQAIVAPYRLDARRCISYLTIEHDGPIPPELRPLIGNRIYGCDDCQLACPWNKYAQVATLPDFDARPALTGRSLLELWAWSEADFLRHTEGSAIRRIGWRRWRRNLAVALGNALRHEPSAAIVQALQAARDDADALVREHVEWALAQRAQPQAS

SEQ ID NO: 80818 - protein, 337 aa, Schlegelella thermodepolymerans
  misc_feature (1)..(337): tr|A0A4R2MQA6|A0A4R2MQA6_9BURK Epoxyqueuosine reductase OS=Schlegelella thermodepolymerans OX=215580 GN=queG P E=3 SV=1
MSGVDLREAEPGLLAWLAAGFHGSMDYMAAHGLKRARPAELVPGTVSVITARMDYLPRGTPSGWQAVELARLQRPGEAVVSIYARGRDYHKVLRQRLQKLADRIAGRLGPFGHRVFTDSAPVLEVELASRSGLGWRGKHTLALHREAGSMFFLGEIYVDLALPASAATTAHCGSCTACLQACPTQAIVAPYRLDARRCISYLTIEHDGPIPPELRPLIGNRIYGCDDCQLACPWNKYAQVATLPDFDARPALTGRSLLELWAWSEADFLRHTEGSAIRRIGWRRWRRNLAVALGNALRHEPSAAIVQALQAARDDADALVREHVEWALAQRAQPQAS

SEQ ID NO: 80819 - protein, 315 aa, Schleiferia sp.
  misc_feature (1)..(315): tr|A0A401XNA3|A0A401XNA3_9FLAO Epoxyqueuosine reductase OS=Schleiferia sp. LA OX=2173829 GN=queG PE=3 SV=1
MYYNSDIKNYLKKRAVELGFNDVRFSKAEFLTEEAPRLERWLKAGYHGEMLWMENHFDKRLDPRKLLDGCKTIAVLSHNYFPSQNLSLEKYKISKYAYGEDYHRVLKDKLHQLMAEVQEKFGSIGFKTFVDSAPVLERAWASRAGIGWVGKHSLMLTKGLGSFYFLATLLLDVALEADDPVTDHCGTCTRCIDACPTQAIVKPYIIDSNRCISYLTIEYRKELPQEYQDKMNGWIFGCDICQDVCPWNRFATPHSEPRFHPSSAIKQTKDEVIEQMEKELFDQLFSKSAVKRTKFQGLKRNIDFAVKGEENTQSL

SEQ ID NO: 80820 - protein, 321 aa, Schleiferia thermophila
  misc_feature (1)..(321): tr|A0A369A2Z5|A0A369A2Z5_9FLAO Epoxyqueuosine reductase OS=Schleiferia thermophila OX=884107 GN=queG PE=3 SV=1
MSNKIKEFIQKSAFKLGFFKIGFARAEFLEKEASLLETWLMRGYHGDMLWMENHFDKRLDPRLLLNGCKTVIMFAHNYYPSEKLKLNRFKISKYAYGEDYHNVLKDKLYKIASETTEKFGSFAYKIFVDSAPVMERAWAERSGIGWVGKHSLLLTKSTGSFYFLATMLVDLDLEPDAPVPDHCGNCTKCIDACPTEAILMPKLVDSNKCISYLTIEYRKELPDEYQSKMNGWIFGCDICQDVCPWNRFSTPHSEERFNPSEQLKQVTDDELYQMEKELYNQIFAKSAVKRTKFQGLRRNIDFIEDEDRKQKSRPDGRLPSL

SEQ ID NO: 80821 - protein, 323 aa, Schleiferia thermophila
  misc_feature (1)..(323): tr|A0A085L0I1|A0A085L0I1_9FLAO Epoxyqueuosine reductase OS=Schleiferia thermophila str. Yellowstone OX=1453500 GN=queG PE=3 SV=1
MSMSNKIKEFIQKSAFKLGFFKIGFARAEFLEKEASLLETWLMRGYHGDMLWMENHFDKRLDPRLLLNGCKTVIMFAHNYYPSEKLKLNRFKISKYAYGEDYHNVLKDKLYKIASETTEKFGSFAYKIFVDSAPVMERAWAERSGIGWVGKHSLLLTKSTGSFYFLATMLVDLDLEPDAPVPDHCGNCTKCIDACPTEAILMPKLVDSNKCISYLTIEYRKELPDEYQSKMNGWIFGCDICQDVCPWNRFSTPHSEERFNPSEQLKQVTDDELYQMEKELYNQIFAKSAVKRTKFQGLRRNIDFIEDEDRKQKSRPDGRLPSL

SEQ ID NO: 80822 - protein, 282 aa, Schwartzia succinivorans
  misc_feature (1)..(282): tr|A0A1M4SG79|A0A1M4SG79_9FIRM Epoxyqueuosine reductase QueG (Queuosine biosynthesis) OS=Schwartzia succinivor ans DSM 10502 OX=1123243 GN=SAMN02745190_00125 PE=4 SV= 1
MASEKARLKDKIVRKAKALDINLIGVAPVKRWQEQHLNDEEFWPQNIWPWAKNVIVLAMQIFPGMIETTPSVVYSELYNTTNRLLDDVSYRIANFLNEEGYRAHFFPRDCYGDISALVKRPEAAFSHVIAGYYAGLGTIGLNHTLITKKYGPRIRLVSIITDAELPASRMLKEDVCIRCQACIRACPMQAFTWKKGEPVANMDKHKCALYHQQLKQEFHYPCGRCAAACPVGLDKKRYGANAISAEGILHCRDFGAADAGEIKKQKGSVVRIAGRAAKKNFG

SEQ ID NO: 80823 - protein, 385 aa, Scopulibacillus darangshiensis
  misc_feature (1)..(385): tr|A0A4R2NB31|A0A4R2NB31_9BACL Epoxyqueuosine reductase OS=Scopulibacillus darangshiensis OX=442528 GN=queG PE =3 SV=1
MNDFRELKQKVIEHSKEIGIDKIGFTTADPFAELRARLYRQQSLGYQSGFEEDDIEKRVNPTLVMDGAQSVIAIALAYPAKMVERPKNTRSSRRGSFCRASWGKDYHAILRDRLTKLGDFIRKEVPEVKLKSMVDTGELSDRAVAERAGLGHAGKHTNVITKEYGSYVYLGEMITNIPFEPDEPATDLCGSCNLCVDHCPTGALVQGGQLNAQKCIAFLTQTKQDVPEYYKKAIGNRLYGCDTCQQVCPYNRGIDNHFHGEMEPEPEYVKPLLQPLLKMSNREFKEKYGHMAGSWRGKKPIQRNAIIALGNYKDVTAADTLMDVLKNDPRPVIRKSAAWALGNMIGRIPSGKKSGIFVGLKEVVYNEQDEDVFSEINNVLESMSD

SEQ ID NO: 80824 - protein, 322 aa, Scytonema hofmannii
  misc_feature (1)..(322): tr|A0A139XE76|A0A139XE76_9CYAN Epoxyqueuosine reductase OS=Scytonema hofmannii PCC 7110 OX=128403 GN=queG PE=3 SV=1
MNRSPGTRSSEIKEKALSLGFHKVGIVAVDGAESAENQRLQAWLALGYHSSMEWMTNPKRQDIFSVMPEVRSVICVALNYYTSHQRPEGQEYAKISRYAWGRDYHKVMHKKLKALTTWLQESDETVQARYYADTGPVQDKVWAQKAGIGWIAKNGNVITREYGSWVFLGEVLTNLELECDRPHTQHCGNCTRCMDACPTGAIIEPFVIDANRCIAYHTIENRNEELPETVKSNLQGWVAGCDICQDVCPWNQRFAKETDIPEFQPYPGNIAPKLVELAEISDRDWDKRFPASALRRIKPEMLRRNSRVNLDALKSMKGKDKA

SEQ ID NO: 80825 - protein, 319 aa, Scytonema millei
  misc_feature (1)..(319): tr|A0A4R4IQN2|A0A4R4IQN2_9CYAN Epoxyqueuosine reductase OS=Scytonema millei VB511283 OX=1245923 GN=queG PE=3 S V=1
MTNLTSDQIKQKALELGFHKVGIAAVEAVGTAERQRLQAWLQLGYQANMAWMANPKREDIRLVMPEVRSLICVALNYYTPHQHSTDLANAKISRYGWGRDYHKVLHKKLKALTQWLRSQAADIQTRFYADTGPIQDKAWAQQAGIGWIAKNGNVITREYGSWVFLGEVLTDLVLTPDRPHTQHCGNCTRCLEACPTQAITQPFVVDANRCIAYHTIENRAEQLPEAISSRLNGWVAGCDICQDVCPWNQRFARTTDINEFHPYPHNLAPKLTELATIEDGEWDRRFTGSALRRIKPEMLRRNARANLESSATIVYSDSL

SEQ ID NO: 80826 - protein, 318 aa, Scytonema millei
  misc_feature (1)..(318): tr|A0A1D2P6N5|A0A1D2P6N5_9CYAN Epoxyqueuosine reductase OS=Scytonema millei VB511283 OX=1245923 GN=queG PE=3 S V=1
MNRSPGTNSSEVKKKALELGFHKVGIAAVDGEEATQTQRLQAWLALGYQADMEWMANPKRQDIRQVMPEVQTIISVALNYYTPDQRPETEEYAKISRYAWGRDYHKVMHKKLKALTSWLQELHEGIQARYYADTGPVQDKVWAQKAGIGWIAKNGNVITREYGSWVFLGEVLTNLELESDRPHTEHCGSCTRCIEACPTGAITNPFVVDANRCIAYHTIENRNEELPQTLTPHLQGWVAGCDICQEVCPWNQRFANQTDVAEFEPYSGNLAPKLVELAQISDQEWDSQFPASALRRIKPEMLRRNARANLNALHKAKE

SEQ ID NO: 80827 - protein, 318 aa, Scytonema sp.
  misc_feature (1)..(318): tr|A0A1Z4ISW4|A0A1Z4ISW4_9CYAN Epoxyqueuosine reductase OS=Scytonema sp. HK-05 OX=1137095 GN=queG PE=3 SV=1
MNRSPGTNSTEVKKKALELGFHKVGIAAVDGEDVTHRQRLQAWLALGYGADMEWMANPKRQDIRQVMPEVQTIISVALNYYTPQKRPEGTEYAKISRYAWGRDYHKVMHKKLKALTTWLQGLDEGIQGRYYADTGPVQDKVWAQKAGIGWIAKNGNVITREYGSWVFLGEVLTNLELESDRPHTEHCGSCTRCMEACPTGAITQPFVVDANRCIAYHTIENRNEELPQTVAPHLHGWVAGCDICQEVCPWNQRFAKETDVAEFEPYSGNVAPKLVELAQISDQEWDRQFPASALRRIKPEMLRRNARANLNAFHQGKE

SEQ ID NO: 80828 - protein, 318 aa, Scytonema sp.
  misc_feature (1)..(318): tr|A0A1Z4Q5E9|A0A1Z4Q5E9_9CYAN Epoxyqueuosine reductase OS=Scytonema sp. NIES-4073 OX=2005464 GN=queG PE=3 SV= 1
MNRSPGTNSTEVKKKALELGFHKVGIAAVDGENVTQTQRLQAWLALGYGADMEWMANPKRQDIRQVMPEVQTIISVALNYYTAQKRPEGREYAKISRYAWGRDYHKVMHKKLKALTAWLQGLHEGIQARYYADTGPVQDKVWAQKAGIGWIAKNGNVITREYGSWVFLGEVLTNLQLESDRPHTEHCGSCTRCMEACPTAAITQPFVVDANRCIAYHTIENRNEELPQTVAPHLQGWVAGCDICQEVCPWNQRFAKETDVAEFEPYSGNVAPKLVELAQISDQEWDRQFPASALRRIKPEMLRRNARANLNAFHQGKE

SEQ ID NO: 80829 - protein, 318 aa, Scytonema tolypothrichoides
  misc_feature (1)..(318): tr|A0A0C2Q9W3|A0A0C2Q9W3_9CYAN Epoxyqueuosine reductase OS=Scytonema tolypothrichoides VB-61278 OX=1233231 GN= queG PE=3 SV=1
MNQSPRTNSSEVKKKALELGFQKVGIAAINGENITETQKLQTWLALGYHADMEWMANPKRQDIRKVMPDVRTIISVALNYYTHHQRPETEEYAKISRYAWGRDYHKVMHKKLKALTTWLQELDEGIQARYYADTGPVQDKVWAQKAGLGWIAKNGNLITREYGSWVFLGEVLTNLELESDRPHTEHCGTCTRCIDACPTGAITQPFVVDANRCIAYHTIENRNEKLPQTVTSHLQGWVAGCDICQEVCPWNQRFAKETDVAEFEPYPGNVAPKLVELAQISDQQWDRQFPASALRRIKPDMLRRNARANLDAFPQAKE

SEQ ID NO: 80830 - protein, 305 aa, Sedimentibacter saalensis
  misc_feature (1)..(305): tr|A0A562J3M0|A0A562J3M0_9FIRM Epoxyqueuosine reductase OS=Sedimentibacter saalensis OX=130788 GN=LY60_03251 P E=4 SV=1
MLTYIQEALAGQGHKAAMTGIDILEKLQEDLRNLQNKEKLNDYQNRLIEERYDWELPKVDFEIKSILLVGKKNTITKLKFEYKGKEIPVIMPPGYNEYFNAPDRIEHFMQQLLGEKGYKCKATPMLPNKLLAARSGFAKYGRNNIVYIDGMGSFCQVYLFYTDIPVEEHPFSKELIMKRCATCGACIKVCPTGAIMKDRFLLDSKRCLTFLNENGGYPFPAWVDPKIHHALYGCNRCQEICPANREQLMNPVEEVLFSEEETKILLEGESIDTFPDRLKNEIKRLNIEEYLSVVPRNLNAIFDQS

SEQ ID NO: 80831 - protein, 367 aa, Sedimentibacter saalensis
  misc_feature (1)..(367): tr|A0A562JHA4|A0A562JHA4_9FIRM Epoxyqueuosine reductase OS=Sedimentibacter saalensis OX=130788 GN=LY60_00940 P E=4 SV=1
MKNIIADIAKKIGIDVIGFTDVVDYSYLQELLVSRKNNGLNSEFEEQNIKKRLDARNILPGCKSIIAIAVPYAEGYKKSQAPNKGLLSVVSYKEDYHRNVKKLLESLAFEMKNFFSFEYAACVDTTPLVDREICKNAGIGHYGKNSLLINENFGSFINLGYLLTDLEIKCVNSQSVDICNDCTICIKSCPNSAILKGGTIDATRCISGLTQTKKYIPLDYRKNMKNQIYGCDVCQLVCPKNKKILEKKTNEDYKILELNLEELLKISNAEFEQKYSSMSGSWRGKNVWKRNALISIANLKLVSLFEDVENELDNTSDMIKTYAYWALMELDSKKASDILNKRYDYENDIIKCEILKLLEVYHDSGNM

SEQ ID NO: 80832 - protein, 385 aa, Sedimentibacter sp.
  misc_feature (1)..(385): tr|A0A252CLE0|A0A252CLE0_9FIRM tRNA epoxyqueuosine(34) reductase QueG OS=Sedimentibacter sp. SX930 OX=1955060 GN=B0533_07050 PE=4 SV=1
MNFAALKAEIIEESKKLGIDKLGFTTAEPFEYMLESLKEQHSKGHTVGFEHPVLDERIYPDRIFEKPQSILSIALAYPSRMTEKAERTRGERRGNFSRASWGTDYHVILRERMDRLIAFIQEKIPEARFKPMVDTGELIDTVVAQRAGLGFIGRNGLLITREFGSYVYLGEIITDIPFPADDPGVFGCGECTRCVDFCPTGAILGNGQLNPKICLSYQTQTKGYMPEEYRKKISHVIYGCDICQQVCPYNRGMDHHLHPEMEPEPESVTPVLQPMLTISNREFKEQFGHLAGSWRGKKPLQRNAVIALANYRDRTAIPELLRMVEQDPRPVLRGTAAWAIAEIVREANPELLAFFSERLIIETDEETKAEMEKAYLKILDIKEAD

SEQ ID NO: 80833 - protein, 353 aa, Sedimenticola selenatireducens
  misc_feature (1)..(353): tr|A0A557SF16|A0A557SF16_9GAMM Epoxyqueuosine reductase OS=Sedimenticola selenatireducens OX=191960 GN=queG PE =3 SV=1
MSDTTITNYQTLAEQIRQWGVELGFQQVGIADTDLTLAEQHLHHWLDQGMHGNMTYMSQHGLKRSRPEALVPGTLRIISVRMDYLPPNDQPERVLADTQRAFISRYALGRDYHKLMRNRLQKLAKKIEDSVGPFGYRAFVDSAPVLERALAEKAGLGWTGKHSNIVNRKAGSWFFLGELYTTLPLPIDQAESDHCGRCTDCIDICPTQAIVAPYQVDARRCISYLTIELDGPIPESLRPLMGNRIFGCDDCLMACPWNRFATPAQADEFLPRHGLDNATLCSLFAWDEETFLKRFEGSPIRRIGYERWLRNIAVALGNAHTTPAVIDALKSRREDHSALVREHISWALQQHGE

SEQ ID NO: 80834 - protein, 355 aa, Sedimenticola selenatireducens
  misc_feature (1)..(355): tr|A0A2N6CVP7|A0A2N6CVP7_9GAMM Epoxyqueuosine reductase OS=Sedimenticola selenatireducens OX=191960 GN=queG PE =3 SV=1
MSEQTTTDYQALAEQIRQWGAALGFQQVGFADTDLTLAEQHLHQWLDHGMHGNMEYMASHGLKRSRPAELVPGTLRIISVRMDYLPPDDDPEAVLADSQRAFISRYALGRDYHTLMRNRLQKLANRIEAAVGPFGYRAFVDSAPVLERALAEKAGLGWTGKHSNIVNRQAGSWFFLGELYTTLPLPVDQPEADHCGRCAACIDICPTQAIIAPYQVDARRCISYLTIELDGPIPEELRPLMGNRIYGCDDCLMACPWNRFATAADEADFSPRNGLDNATLRSLFAWDEETFLKRLEGSPIRRIGHQRWLRNIAVALGNARTSAETLAALNSRRDDPSELVREHVRWALARHGEPQ

SEQ ID NO: 80835 - protein, 361 aa, Sedimenticola sp.
  misc_feature (1)..(361): tr|A0A2N6GEI5|A0A2N6GEI5_9GAMM Epoxyqueuosine reductase OS=Sedimenticola sp. OX=1940285 GN=queG PE=3 SV=1
MTPLDPNRASADPDQYHALARMIRQWAEELGFQQLGIADTNLAVAESHFEQWLDQGFHGEMEYMARHGQKRTRPQQLVPDTLRILSVRMDYLPANDNPWQVLEDDQLAYVSRYALGRDYHKLMRNRLQTLAKRIERQIGPFGYRVFVDSAPVLEKPLAEMAGLGWQGKHSNVLNRKAGGWFFLGEIYTDLPLPVDTAEHNHCGRCTACIDICPTAAIVEPYRVDARRCISYLTSEHPGSIPETLRPLMGNRIYGCDDCLLVCPWNRFATPSAEADFTPRNGLQSAKLTELFLWSEDDFLKRLEGSPIRRIGHTRWLRNIAVALGNTKADQAVTTALRQQAEHHSELVREHVLWALMQHPAT

SEQ ID NO: 80836 - protein, 353 aa, Sedimenticola thiotaurini
  misc_feature (1)..(353): tr|A0A0F7JYB7|A0A0F7JYB7_9GAMM Epoxyqueuosine reductase OS=Sedimenticola thiotaurini OX=1543721 GN=queG PE=3 S V=1
MSQQPSTDYQALAEQIRHWGAELGFQQVGFADTDLTLAEQHLHQWLDRGMHGSMTYMASHGVKRSRPAELVPGTLRIISVRMDYLPPDDDPRAALADPQRAFISRYALGRDYHKLMRNRLQKLANRIETAVGPFGYRAFVDSAPVLERALAEKAGLGWIGKHSNMVNRQAGSWFFLGELYTTLPLPTDRPEADHCGRCSACIDICPTQAIVAPYQVDARRCISYLTIELDGPIPEPLRPLMGNRIYGCDDCLMACPWNRFAKATKEADFHPRNGLDSATLCALFAWEEETFLKRLEGSPIRRIGHQRWLRNIAVALGNGETTAETLEALNSRRNDPSELVREHVQWALAQHLD

SEQ ID NO: 80837 - protein, 306 aa, Sedimentisphaera cyanobacteriorum
  misc_feature (1)..(306): tr|A0A1Q2HLI9|A0A1Q2HLI9_9BACT Epoxyqueuosine reductase OS=Sedimentisphaera cyanobacteriorum OX=1940790 GN=que G PE=4 SV=1
MKEDIRKYALEQGFLRAGFASAEDLPAENRQRFGKWLEAEMHENTGYLERNLDKRFSPAKLFKDAKSVIVFAAGYNKAQGEKPDSEQAGKICDYACFEDYHSKIKSRIFNIADFIRNKYKSDLKIKACVDSVPINERSEAVLAGLGFIGKNGMLIIPGKGCRVLLGLLISNLEIEPDEGVIENRCGSCRRCIEACPSGALGENGLLDCTKCISFQTIEKKTEMNREAEEALSEELFGCDRCIDVCPFNENQQSSFLKQRLNKWLLIDEILEMDSDTFSASFGGTVVERTGLEKLKRNAEAISGKKR

SEQ ID NO: 80838 - protein, 308 aa, Sedimentisphaera salicampi
  misc_feature (1)..(308): tr|A0A1W6LQC6|A0A1W6LQC6_9BACT Epoxyqueuosine reductase OS=Sedimentisphaera salicampi OX=1941349 GN=queG PE=4 SV=1
MKEEIRKYAMEQGFLKAGFTSAEDLPEQSRHRFVKWLEADMHEKTGYLERNIDKRFSPRILFKDAKSVIVFAAGYNKAEGEKPCFDLEGKICDYACFEDYHRKIKSKILNIAGFIRDNWKSDLKIKACVDSVPINERSEAVRAGLGFIGKNGMLIVPRAGCRILLGVLISNLEIEADEGIIEHSCGSCRRCIEACPSGALGEDGLLDCRKCISFQTIEKQAQMNPEAEAAVSDELFGCDKCIDVCPFNVKGQNSFLNQRLNKWLRIDDVLGMSSETFSASFGGTAIERTGLEKLKRNAEVIAGKKRQN

SEQ ID NO: 80839 - protein, 358 aa, Sedimentitalea nanhaiensis
  misc_feature (1)..(358): tr|A0A1I7DDW5|A0A1I7DDW5_9RHOB Epoxyqueuosine reductase OS=Sedimentitalea nanhaiensis OX=999627 GN=queG PE=3 S V=1
MGESLKQRLVARALQEGFVACRVCRPWDVPQVPERLAAFLQAGYHGQMGWMAERSHWRGDPSVLWPEARSAIMLAESYAPEHDPTGVLAQRERGAISVYAQNRDYHDLVKKRLKRLARWLIAECETVNATVAPARALRSPEVKVFVDTAPVPEKALGQAAGLGWQGKHTNLVSRDWGNWAFIGSIFTTLELPVDAPERDHCGSCRACMDVCPTEAFPAPYRLDARRCISYLTIEYKGPVDEDLRGKLGNHIYGCDDCLAACPWNKFAVAASDMRYAARDELIAPRLAELAVLDDAGFRALFSGSPIKRIGRDRFVRNVLYAIGNSGDAGLRAVARGLVEDADAAVADAARWAVKRLSA

SEQ ID NO: 80840 - protein, 350 aa, Sedimentitalea sp.
  misc_feature (1)..(350): tr|A0A3T0N7N7|A0A3T0N7N7_9RHOB Epoxyqueuosine reductase OS=Sedimentitalea sp. W43 OX=2483033 GN=queG PE=3 SV=1
MNMGSMLKKALVERALDEGFVSCRICRPWDVPEVPNRLAAYIDAEYHGQMGWMAERTHWRGDPALLWPEAQSVIMLAESYAPEHDPTEILQHRERGAISVYAQNKDYHDLVKKRLKRLARWLIETAKAKGSEAEVKVFVDTAPVPEKALGQAAGLGWQGKHSNLVSRDWGNWAFIGSVFTTLELPVDPAEPDRCGSCRSCLDACPTDAFVAPYQLDARRCISYLSIEYKGPVEEELRVKLGNRIYGCDDCLAACPWNKFAVAASDMRYAAREELKAPKLAELAMLDDAAFRAMFSGSPIKRIGRDRFIRNVLYAIGNSQDPSLRPVAQVLVDDPDAAVADAARWAAQRLA

SEQ ID NO: 80841 - protein, 379 aa, Sediminibacillus albus
  misc_feature (1)..(379): tr|A0A1G9C8V0|A0A1G9C8V0_9BACI Epoxyqueuosine reductase OS=Sediminibacillus albus OX=407036 GN=queG PE=3 SV=1
MAYEELKQEIIDYSKSIGIDKIGFASVDVFTELKSRLEQQQDLGYQSGFEKGSIEERTNPAKLMPEAQSIVSIALAYPSRLKDAPKSKKGERRGLFCRASWGKDYHHILREKLEMLAEFIAGKVYAFNYKSMVDTGELSDRAVAERSGIGFSGKNTTIITPEFGSYVYLGEMITNIPFPPDQPVEDSCGECTKCIDSCPTGALIQGGQLNAQKCIAFLTQTKDFLPDEYRTKLGNRIYGCDTCQLVCPKNQKKDFHLHPEMEPDPEVVKPKLIPLLSMSNREFKEKFGEIAGSWRGKKPIQRNAIIALGHYREESSVNELIRLMESDPRPVIRGTAAWSLGKIGTEKAFAAIEAAKQKETDEQVLFEMEKGLRFQTVYS

SEQ ID NO: 80842 - protein, 382 aa, Sediminibacillus halophilus
  misc_feature (1)..(382): tr|A0A1G9W3M9|A0A1G9W3M9_9BACI Epoxyqueuosine reductase OS=Sediminibacillus halophilus OX=482461 GN=queG PE=3 SV=1
MAYEELKQEIIDYSKSIGIDKVGFASVDVFTELKSRLERQQDLGYQSGFEKGSVEERTNPVKLMPEAQSIISIALAYPSRLKDAPKSKKGERRGLFCRASWGKDYHDILRDKLEKLAAFLSEKVYGFNYRSMVDTGELSDRAVAERAGIGFSGKNTTLITPEFGSYVYLGEMITNVPFTPDEPVEDSCGECTKCIDACPTGALVQGGQLNAQKCIAFLTQTKDFLPDEYRGKLGNRIYGCDTCQLVCPKNRKKDFHLHPEMEPDPEVVKPKLVPLLSMSNREFKEKFGDIAGSWRGKKPIQRNAIIALGHYKEESAVEELIRLMKKDPRPVIRGTAAWSLGKIGTEEAFEAIEAAKQIETDEQVQFEMDKGLEFKETARQHA

SEQ ID NO: 80843 - protein, 310 aa, Sediminibacterium ginsengisoli
  misc_feature (1)..(310): tr|A0A1T4QHL9|A0A1T4QHL9_9BACT Epoxyqueuosine reductase OS=Sediminibacterium ginsengisoli OX=413434 GN=queG PE =3 SV=1
MDSTASHTTLIKSLAQELGFHYCGIAKAVRLDDDARRLEAWLNKGFHGQMQYMENHFDLRIDPSRLVPGAKSVITLLKNYYPSQEQKAGTPHIARYAFGKDYHEVIREQLNHFLHILRGKIGEIQGRGFVDSAPVLERSWATRSGAGWIGKNGNLITRQSGSFFFIATLIVDLPLEYDDPFAKDYCGSCRKCIDACPTDAIEPDKEINGSKCISYYTIELKDAMLPDNMKDKFDNWMFGCDVCQEVCPWNRFSKPHTEPAFTPIPEILNLSTSEWLEMSEITFREVFRHSPLKRSKFNGIRRNLNFLKND

SEQ ID NO: 80844 - protein, 313 aa, Sediminibacterium goheungense
  misc_feature (1)..(313): tr|A0A4R6J2H1|A0A4R6J2H1_9BACT Epoxyqueuosine reductase OS=Sediminibacterium goheungense OX=1086393 GN=queG PE =3 SV=1
MNTTNAYNHPVKQTAYKLGFDYCGIAKACVLDEDARRLEKWLHQNHHGSMQYMEKHFDLRIDPSKLVPGAKSVITVLKNYFPSKEQSSEAPRISKYAWGKDYHEVIRTQLQEFLNELRITYGDIQGRGFVDSAPVLERSWATRSGAGWIGKNGNLITKSSGSFFFIATLIVDIELPYDDPFAKDFCGTCRKCIDACPTDAILEDKTINGSKCISYFTIELKDALIPAEMKGKFENWMFGCDTCQDVCPWNRFSKPHTEENFDPIPAILNLSTREWETLSEDTFKKIFKDSPLKRSKFRGIQRNLHFLQNESHH

SEQ ID NO: 80845 - protein, 310 aa, Sediminibacterium sp.
  misc_feature (1)..(310): tr|A0A2M8JW81|A0A2M8JW81_9BACT Epoxyqueuosine reductase OS=Sediminibacterium sp. FEMGT703S OX=2080766 GN=queG PE=3 SV=1
MLQIQSNTQFVKSLSNELGFSYCGIAKAEQLTEDARKLEHWLNKGMHGKMQYMENHFDLRIDPTKLVPGALSVITLLKNYYPTEEQKPNTPLIAKYAWGKDYHEVIRATLKTFLASLRQKIGDINGRGFVDSAPVLERAWAVKSGLGWVGKNGNLIHKNAGSFFFIATLIVDIPLVYDDPLVKDYCGTCTKCITACPTEAILPNKQIDGSKCISYYTIELKDAMLNEGMKDQFQNWLFGCDICQDICPWNRFSKPHQEPAFEPIPAILNLSTSEWEELTEETFKTVFKDSPLKRAKFSGIKRNLRMIQSH

SEQ ID NO: 80846 - protein, 312 aa, Sediminicola luteus
  misc_feature (1)..(312): tr|A0A2A4G5G7|A0A2A4G5G7_9FLAO Epoxyqueuosine reductase OS=Sediminicola luteus OX=319238 GN=queG PE=3 SV=1
MNLKQTYSDLIKTEAKRLGFLACGVSKADFLEEEAPRLEQWLQKGMHGQMGYMENHFDKRLDPRKLVPGAKSVVSLLLNYFPENQQRQDAYKISKYAYGQDYHHVIKGKLRELHHFITTEIGEVGGRAFVDSAPVLDKAWAAKSGLGWIGKHSNLLSKQTGSFYFIAELILDLDLEPDGPTTDHCGQCTACIDACPTQAIVAPYVVDGSRCISYFTIELKEAIPAEFKNQLDDWMFGCDVCQDVCPWNRFATPHNQSEFEPHPDLLNMGKSDWDEITEEVFRTVFKKSAVKRTKFSGLTRNIRFLHNHQNGK

SEQ ID NO: 80847 - protein, 306 aa, Sediminicola sp.
  misc_feature (1)..(306): tr|A0A0S1SG66|A0A0S1SG66_9FLAO Epoxyqueuosine reductase OS=Sediminicola sp. YIK13 OX=1453352 GN=queG PE=3 SV=1
MGTIQKHTELIKAEAKRLGFLSCGISKAEFLEEEAPRLEQWLNKNMHGEMGYMENHFDKRLDPRLLVDGAKSVISLLLNYYPQKEQNDDSYKLSKYAYGQDYHHVIKTKLKSLQEFITQEIGEVNGRAFVDSAPVLDKAWAAKSGLGWIGKHSNLLTQQVGSFYFIAELIVDLDLEYDSKVTDHCGTCTACLDACPTQAIVEPYVVDGSKCISYLTIELKNQIPSDFKGKMDDWMFGCDVCQDVCPWNRFSKSHNEPLFNPHPDLLSMTKKDWEEITEDVFKKVFQKSAVKRTKFSGLTRNIDFLK

SEQ ID NO: 80848 - protein, 317 aa, Sediminitomix flava
  misc_feature (1)..(317): tr|A0A315Z6S6|A0A315Z6S6_9BACT Epoxyqueuosine reductase OS=Sediminitomix flava OX=379075 GN=queG PE=3 SV=1
MNHQLRKRTEWIKHKANELGFDFCGIAKADFLEEEAQGLEKWLTQGMHGKMSYMENHFDKRLDPRKLVPGAKSVVMLMLNYYPEKDLAQENELKIAKYAYGKDYHFIIKDKLKTFVDDIQAEIGEVDGRVFVDSAPVMERAWAQKSGLGWIGKNSLLLSKQNGSFYFLAELILDLELEADTPFTKDFCGRCTRCIDACPTDAIVKEGVVDGSKCLSYLTIELKDNIPSEFKGKTDNWIFGCDTCQDVCPWNRFSKPHSTSEFLPHEQLSQMKKEDWQEITREVFNEIFRKSAVKRTKLEGLERNIRFSLSPKEENLD

SEQ ID NO: 80849 - protein, 307 aa, Segetibacter aerophilus
  misc_feature (1)..(307): tr|A0A512BK52|A0A512BK52_9BACT Epoxyqueuosine reductase OS=Segetibacter aerophilus OX=670293 GN=queG PE=3 SV=1
MREKDTIWIKNKCRELGFDYCGIARAEKLDDDARRLETWLSEGMQGNMQYMENYFDLRTDPARLVPGAKSVITVLMNYFPSQTQSAEVPKIAKYAYGQDYHEVIREKLKQLLMMMKQEIGEVNGRGFVDSAPVLERAWATKSGLGWIGKNGNLLNKQAGSFFFIATLIVDLELVYDDPFAKDYCGSCRRCIAACPTDAILENKVVDGSKCISYFTIELKDALLPEHLKSQFSDWMFGCDVCQDVCPWNRFSKPNSEKQFTPLPQVLNFSSNDWEELTEESFKQIFKNSPLKRRKFEGIKRNLRFIKN

SEQ ID NO: 80850 - protein, 381 aa, Seinonella peptonophila
  misc_feature (1)..(381): tr|A0A1M4VH62|A0A1M4VH62_9BACL Epoxyqueuosine reductase OS=Seinonella peptonophila OX=112248 GN=SAMN05444392_1 02365 PE=4 SV=1
MKGQRLKDWIMKQAADIGIDQIGFASADPFDELRQRLVQHRELGYESGFEESDLDLRTSPSKNLPSVKTIIAIALAYPSRMKNPPQSAPGAYRGIFARASWGKDYHHVLRQKLDELANRIKERIPTAELMSMVDTGALSDRAVAQRAGIGWSGKNTSIITHKFGSWVYLGEMLTNLSIPPDQPIEDGCGDCNRCIEACPTGALVGPGQLNAKACIAFLTQTKESIPTAWRKKIGNRLYGCDTCQTVCPKNRKLSFTHQKDFAPDPERVKPLLKPLLKMSNREFRQQYCEMAGSWRGKKPIQRNAIIALAHFRDQSAIPDLAELLAYDPRPVIRQTAAWALGEIGGSQAEKALRKAEHEEDEQVVREEINQALQTLEQQNEK

SEQ ID NO: 80851 - protein, 372 aa, Selenihalanaerobacter shriftii
  misc_feature (1)..(372): tr|A0A1T4JQY0|A0A1T4JQY0_9FIRM Epoxyqueuosine reductase OS=Selenihalanaerobacter shriftii OX=142842 GN=SAMN027 45118_00335 PE=4 SV=1
MTLTEEIKRHAKEIGIDDIRITDTEPFLEIREFLKKAKEQGYLSKFVHDDLELITDPKQVISKAKTVIVCAISYKVELEDDEQSNSGLRGKLSRFAWGQDYHRVLGDKLDQLIDFLHTKSDQVQAKKFVDTGPTVDRALARRSGIGWQGKNCSIINPEYGSWIFIGGVITNLELEIDSELEKECGECRECIESCPTGALKDDYTLDSNRCLGYITLSKGYLDEKDRKKIGTRLWGCDTCQEVCCHNQEVKSGNHPEFLPQTIEAYPHLPSLLKLTNKEYKEKFMPTPMNWRGKRSIQRNAAVILGNLKDDKAVPHLIEGLNDPKPIVRAHSAWALGEIGEVIAVEALKKALDKEKDQEVIGELEKAINRLTR

SEQ ID NO: 80852 - protein, 282 aa, Seleniivibrio woodruffii
  misc_feature (1)..(282): tr|A0A4R1K9A4|A0A4R1K9A4_9BACT Epoxyqueuosine reductase QueG OS=Seleniivibrio woodruffii OX=1078050 GN=C8D98_1 804 PE=4 SV=1
MKQQLIKRIKDFLFNHPENLHPATGKKFYDEPDVFFASADDPIFEKFKDVVSPEHLTPKEIIELEYGEGSYSGGTVIVIVQAIQEDVRKSNRSRTEMASAEWAMSRAYGDEIFLKTRIKEIAGQLKEEGYKAVMPWLSDWFRVMRNKRDLTSNWSERHAAYAAGAGTFGLNDGFISDKGMSIRIMTIVTDLVIEPDVRQEGSHTRSCLFLSKGLCGACIKRCPADAISKDGHDKMKCYMFVYGEASKKFAVEAGGLEKAGSGCGLCQTKVPCEFRNPMAKIA

SEQ ID NO: 80853 - protein, 278 aa, Selenomonadales bacterium
  misc_feature (1)..(278): tr|A0A316QA77|A0A316QA77_9FIRM 4Fe-4S ferredoxin-type d omain-containing protein OS=Selenomonadales bacterium O X=2137878 GN=DBY09_07020 PE=4 SV=1
MEEILERLGAFYACQILKDGKFFLLSAYGYNPFSEIPDNCIKIDAYYPASHRVYLTCRDFAAEIGGRVTNDISYKAAAYSTGEFFRGQNDLLIHRAYGSYFILNMIELEKPLEWPPVIFKETGEINCARCGRCQANCPSGAITPFGFKRASCLRDMADRMPEKDSFALLGDSLLGCEICRECCPYNAGIKKVPPPEELVRLAALDRILNFERETREGLSALIGSNMARASVLLPAAVAGVLRRRAWEYIPLVERLLEHGSEKVREAARLGMEFYKENA

SEQ ID NO: 80854 - protein, 265 aa, Selenomonas ruminantium
  misc_feature (1)..(265): tr|A0A1H0TJX2|A0A1H0TJX2_SELRU Epoxyqueuosine reductase QueG (Queuosine biosynthesis) OS=Selenomonas ruminanti um OX=971 GN=SAMN05216366_12425 PE=4 SV=1
MPRSDRVKLKEKIKRRAKAMDINMLGIAPVERWEQEPHQSPDFWPQNIWPWSRNVIVMGMQIFPSMIETTPSVVYSELYNTTNRLLDHAAYRIANFLNEEGYRAHFFPRDCYGDISALVKRPEAAFSQVLAGLYAGLGTVGMNHTLLTKKYGSRIRLVSVITDADLPADKMLKEDICLGCKICVKACPMQVFSPVKGQIIARMDKHKCALCHQQLKQEFHYPCGRCIAACPVGEDKGRYGKEAISKEGILHCRDFGAADAGQVIA

SEQ ID NO: 80855 - protein, 265 aa, Selenomonas ruminantium
  misc_feature (1)..(265): tr|A0A1H3W8P5|A0A1H3W8P5_SELRU Epoxyqueuosine reductase QueG (Queuosine biosynthesis) OS=Selenomonas ruminanti um OX=971 GN=SAMN05660648_00735 PE=4 SV=1
MPRSDRVKLKEAIKRRAKAMDINMLGIAPVERWEQEPHQSADFWPQNIWPWSRNVIVMGMQIMPSMIETTPSVVYSELYNTTNRLLDNAAYRIANFLNEAGYRAHFFPRDCYGDISALVKRPEAAFSQVLAGLYAGLGTVGMNHTLLTKKYGSRIRLVSVITDADLPADHMIKKDICVGCQICVRACPQQVFSPVPGQVIAKMDKHKCALCHQQLKQEFHYPCGRCIAACPVGEDKKRYGREAISAAGVLHCRDFGAADVGTIVR

SEQ ID NO: 80856 - protein, 307 aa, Seonamhaeicola algicola
  misc_feature (1)..(307): tr|A0A5C7AD39|A0A5C7AD39_9FLAO Epoxyqueuosine reductase OS=Seonamhaeicola algicola OX=1719036 GN=queG PE=3 SV= 1
MNNKKQHYTTLIKTEAKRLGFLSCGISKATFLEEEAPRLEKWLNNNMHGEMRYMENHFDKRLDPTKLVEGSKSVVSLLLNYFPEETQTDSTLKLSKYAYGTDYHFVIKDKLKALLHFIHDEIGDVNGRAFVDSAPVLDKAWAAKSGLGWVGKHSNLLTQKVGSFYFIAELIIDLDLEYDAPTTNHCGTCTACIDACPTQAITEPYVVDGSKCISYFTIELKDNIPSEFKGKFDDWMFGCDVCQDVCPWNRFSKAHNEPLFNPHPELLSMSKKDWQEITEETFRKVFKKSAVKRTKFSGLTRNINFLK

SEQ ID NO: 80857 - protein, 307 aa, Seonamhaeicola aphaedonensis
  misc_feature (1)..(307): tr|A0A3D9HGW3|A0A3D9HGW3_9FLAO Epoxyqueuosine reductase OS=Seonamhaeicola aphaedonensis OX=1461338 GN=queG PE= 3 SV=1
MTSKTKHTHLIKTEAKRLGFLSCGISKARFLEEEAPRLEKWLQQNMQGGMHYMENHFDKRLDPTKLVEGSKSIISLLLNYYPKQVQNPDSYKLSKYAYGTDYHFVIKDKLKSLLHFIQAEIGEVNGRAFVDSAPVLDKAWAAKSGLGWIGKHSNLLTQQVGSFYFIAELIIDLELEYDTPVTDHCGTCTACIDACPTEAIVEPYVVDGSKCISYFTIELKENIPSEFKGKFEDWMFGCDVCQDVCPWNRFSKAHSEPLFNPHPELLSMSKKDWEEITKETFQKFFKKSAVKRTKFSGLKRNIKFLKD

SEQ ID NO: 80858 - protein, 72 aa, Seonamhaeicola marinus
  misc_feature (1)..(72): tr|A0A5D0HJL6|A0A5D0HJL6_9FLAO DUF1730 domain-containin g protein (Fragment) OS=Seonamhaeicola marinus OX=19122 46 GN=FUA24_23220 PE=4 SV=1
RYMENHFDKRLDPTKLVEGSKSVVSLLLNYFPEETQTDSTLKLSKYAYGTDYHFVIKDKLKALLHFIHDEIG

SEQ ID NO: 80859 - protein, 64 aa, Seonamhaeicola marinus
  misc_feature (1)..(64): tr|A0A5D0J526|A0A5D0J526_9FLAO tRNA epoxyqueuosine(34) reductase QueG (Fragment) OS=Seonamhaeicola marinus OX= 1912246 GN=FUA24_02880 PE=4 SV=1
MNNKKQHYTTLIKTEAKRLGFLSCGISKATFLEEEAPRLEKWLNNNMHGEMRYMENHFDKRLDP

SEQ ID NO: 80860 - protein, 306 aa, Seonamhaeicola sp.
  misc_feature (1)..(306): tr|A0A5C7GIT0|A0A5C7GIT0_9FLAO Epoxyqueuosine reductase OS=Seonamhaeicola sp. 1505 OX=2591822 GN=queG PE=3 SV= 1
MNNKSKYTQLIKTEAKRLGFLSCGISKAAFLEEEAPRLEHWLNQNMHGEMHYMENHFDKRLDPTKLVEGSKSVVSLLLNYFPEETQNKDSYKLSKYAYGTDYHFVIKDKLKSLLQFIKEEIGEVHGRAFVDSAPVLDKAWAAKSGLGWIGKHSNLLTQHFGSFYFIAELIIDLELDYDTPITDHCGTCTACIDACPTQAIVDPYVVDGSKCISYFTIELKDNIPSEFKGKFDDWMFGCDVCQDVCPWNRFSKSHNEPLFNPHPELLSMSKQDWEEITEQTFRKVFKKSAVKRTKFSGLQRNIDFLK

SEQ ID NO: 80861 - protein, 308 aa, Seonamhaeicola sp.
  misc_feature (1)..(308): tr|A0A562YFY9|A0A562YFY9_9FLAO Epoxyqueuosine reductase OS=Seonamhaeicola sp. W255 OX=2528206 GN=queG PE=3 SV= 1
MMGAKSKYTKLIKTEAKRLGFLSCGISKAEFLEEEAPRLEKWLNQNMHGEMQYMENHFDKRLDPTKLVEDSKSVVSLLLNYFPSQEQTANSYKLSKYAYGTDYHFVIKDKLTALLHFIQDEIGEVHGRAFVDSAPVLDKAWAAKSGLGWIGKHSNLLTQQVGSFYFIAELIIDLELEYDTPVTGHCGTCTACIDACPTEAITEPYVVDGSKCISYFTIELKENIPSEFKGKFDDWIFGCDVCQDVCPWNRFSKPHNEPLFNPHPELLSMSKQDWEEITEETFRKVFKNSAVKRTKFNGLKRNINFLKD

SEQ ID NO: 80862 - protein, 297 aa, Serpentinicella alkaliphila
  misc_feature (1)..(297): tr|A0A4R2TDW4|A0A4R2TDW4_9CLOT Epoxyqueuosine reductase OS=Serpentinicella alkaliphila OX=1734049 GN=EDD79_102 738 PE=4 SV=1
MKETLREYCLNLNIDSVGIAPIGPYGELKKILMARVNSNHLTGLEEQNIELRIDPKLTMAEAKSIIVCLFPYYICEQLESNLSKYTYGKDYHIVIKEKLDSIGQFLTNKIEGFKFQSYVDTGPLSDRYLAYLAGLGYFGINSHIITDKYGSYVFIGYIINNYYFEPDKPIEKTCIKCCDCIKMCPGQIILGNFDIDPRMCRAYITQIKRELSDDEVEVLKKGTLIYGCDICQEVCPHNKYIHTTNIDEFKENLIVNLNEEELRNISNKEFIRRYKDRAFAWRGKNVLLRNLEIMKNK

SEQ ID NO: 80863 - protein, 151 aa, Serpentinicella alkaliphila
  misc_feature (1)..(151): tr|A0A4R2T7E2|A0A4R2T7E2_9CLOT HEAT repeat protein OS=S erpentinicella alkaliphila OX=1734049 GN=EDD79_103732 P E=4 SV=1
MEIREVNGGRIHGCDVCQEVCPRKKKFLQTATKGDSFLDLLANELDLEKLLLMEDTYYEKIVHPIMYNYIKSKKVFQRNAAIALGNSQDEKHVLALTTALNTCDPMVREYAAWALGNIGGEMAKAKLEKELEHEQTDIVKEAINTALAKFQ

SEQ ID NO: 80864 - protein, 396 aa, Serpentinomonas mccroryi
  misc_feature (1)..(396): tr|A0A060NX09|A0A060NX09_9BURK Epoxyqueuosine reductase OS=Serpentinomonas mccroryi OX=1458426 GN=queG PE=3 SV =1
MFDAAQFVTQIQGWGRELGFSQIGVASVDLSSAEDGLRRWLEAGFHGEMGYMAAHGLKRARPAELVPGTLSVISARMDYLPSSHGPDWREQEWHGLQQPLQGSVALYARGRDYHKVLRQRLQRLAQRIEQGLQEQGGPTAAAPTDSSAAAQNPVSWRVFTDSAPVLEVELAQRSGLGWRGKHTLALSRDAGSMFFLGEIFLNFELPPSAAVSGHCGHCRACLDVCPTQAIVAPYRLDARRCIAYLTIEHAGPIAPELRPLIGSRIYGCDDCQLVCPWNKYAQRARVPDFEPREPLQAPELLRVWGWSQADFERHTEGTPIRRIGHERWLRNVAVALGNALAGGGLEPEQVQAIRAALASRLEDPSALVREHVRWALVPERGIEPPTFSLRMSCSTD

SEQ ID NO: 80865 - protein, 371 aa, Serpentinomonas raichei
  misc_feature (1)..(371): tr|A0A060NMJ1|A0A060NMJ1_9BURK Epoxyqueuosine reductase OS=Serpentinomonas raichei OX=1458425 GN=queG PE=3 SV= 1
MGFSQIGVAGVDLRHAEAGLLQWLQAGFHGQMHYMAAHGLKRARPAELVPGTLSVITARMDYLPASGNPGWREQEWKTLQQPLQANVALYARGRDYHKVLRQRLRRLAERIEQSLREQGGPCESMFKAAGQAAQQAPSWRVFTDSAPVLEVELAQRSGLGWRGKHTLALSREAGSMFFLGEIFLNFELPPTAPTSAHCGQCQACLEVCPTQAIVAPYRLDARRCIAYLTIEHTGPIAPELRPLIGNRIYGCDDCQLVCPWNKYAQRTSVPDFEPRAALQAPELLRVWAWSRAEFERHTEGSPIRRIGHERWLRNVAVALGNALASDGLEPQQAAAIQAALHARIEDTSPLVREHVRWALAQHPANPVEQDP

SEQ ID NO: 80866 - protein, 354 aa, Serratia ficaria
  misc_feature (1)..(354): tr|A0A240ANP6|A0A240ANP6_SERFI Epoxyqueuosine reductase OS=Serratia ficaria OX=61651 GN=queG PE=3 SV=1
MGICDTDLSAEEPRLQAWLDKQYHGEMAWMARHGMLRARPHELLPGTLRVISVRMNYLPAKAAFASTLQNPELGYVSRYALGRDYHKLLRQRLKKLGDQIQVYCGELNFRPFVDSAPVMERALASKAGIGWVGKHSLILNREAGSWFFLGELLIDLPLPVDKPQEEQCGRCVACITTCPTGAIVAPYTVDARRCISYLTIELEGAIPEEFRPLLGNRIYGCDDCQLICPWNRFSQLTDEDDFSPRAALHAPQLIDLFGWTEEKFLRITEGSAIRRIGHLRWLRNIAVALGNAPYQDEIVIALRARLKQDAMLDEHIDWALAQQLARREAQGVEVQTAQKKRLIRAVEKGLPRDA

SEQ ID NO: 80867 - protein, 414 aa, Serratia fonticola
  misc_feature (1)..(414): tr|A0A542BIL2|A0A542BIL2_SERFO Epoxyqueuosine reductase OS=Serratia fonticola OX=47917 GN=queG PE=3 SV=1
MPSVAAALDSACLIQSADQTECGKLVLYGFSLWLGMTHPLDLNQLAQHIKQWGQSLGFQQVGICDTDLSAEEPKLQAWLDKQYHGEMEWMARHGMLRARPHELLPGTLRVISVRMNYLPAKAAFATTLKNPELGYVSRYALGRDYHKLLRQRLKKLGDQIQAYCGELNFRPFVDSAPIMERALASKAGIGWVGKHSLLLNREAGSWFFLGELLIDLPLPVDPPQEEQCGRCVACITTCPTGAIVAPYTVDARRCISYLTIELEGAIPEAFRPLMGNRIYGCDDCQLICPWNRFAQLTDEEDFSPRAALHAPQLIELFGWSEEKFLRITEGSSIRRIGHLRWLRNIAVALGNAPYLDLIVGALQTRQGQDPMLDEHIDWALAQQLMRREALGIEVQTAQKKRLVRAIEKGLPRDA

SEQ ID NO: 80868 - protein, 379 aa, Serratia fonticola
  misc_feature (1)..(379): tr|U2MAW6|U2MAW6_SERFO Epoxyqueuosine reductase OS=Serr atia fonticola AU-P3(3) OX=1332070 GN=queG PE=3 SV=1
MTHPLDLDQLAQHIKQWGQSLGFQQVGICDTDLSTEEPRLQAWLDKQYHGEMEWMARHGMMRARPHELLPGTLRVISVRMNYLPAKAAFASTLNNSQLGYVSRYALGRDYHKLLRQRLKKLGDQIQAYCGELNFRPFVDSAPIMERALASKAGIGWVGKHSLILNRDAGSWFFLGELLIDLPLPVDKPQEEQCGRCVACITTCPTGAIVAPYTVDARRCISYLTIELEGAIPEEFRSLMGNRIYGCDDCQLICPWNRFSQLTDEDDFSPRAALHAPQLIELFGWNEEKFLRITEGSAIRRIGHLRWLRNIAVALGNAPYLDQIVISLQTRQGQDPMLDEHISWALAQQLARREALAVEVQTMQKKRLIRAVEKGLPRDA

SEQ ID NO: 80869 - protein, 379 aa, Serratia liquefaciens
  misc_feature (1)..(379): tr|A0A515D1M9|A0A515D1M9_SERLI Epoxyqueuosine reductase OS=Serratia liquefaciens OX=614 GN=queG PE=3 SV=1
MTHPLDLNQLAQHIKQWGQSLGFQQVGICDTDLSAEEPKLQAWLDKQYHGEMEWMARHGMLRARPHELLPGTLRVISVRMNYLPAKAAFASTLNNPELGYVSRYALGRDYHKLLRQRLKKLGDQIQAYCGELNFRPFVDSAPVMERALASKAGIGWVGKHSLILNREAGSWFFLGELLIDLPLPVDKPQDEQCGRCVACITTCPTGAIVAPYTVDARRCISYLTIELEGAIPEEFRPLLGNRIYGCDDCQLICPWNRFSQLTDEDDFSPRAALHAPQLIELFGWTEEKFLRITEGSAIRRIGHLRWLRNIAVALGNAPYQDAAVVALRSRLEQDAMLDEHIHWALEQQLARREAQGIEVQTTQKKRLIRAVEKGLPRDA

SEQ ID NO: 80870 - protein, 379 aa, Serratia liquefaciens
  misc_feature (1)..(379): tr|A0A484YTG6|A0A484YTG6_SERLI Epoxyqueuosine reductase OS=Serratia liquefaciens OX=614 GN=queG PE=3 SV=1
MSQPLDLVQLAQQIKQWGTELGFQQVGIADTDLSASEPKLQAWLDKQYHGEMEWMARHGMMRARPHELLPGTLRVISVRMNYLPANAAFARTLKDPTLGYVSRYALGRDYHKLLRNRLKKLGEKIQEHCASLNFRPFVDSAPILERPIAEKAGLGWTGKHSLILSHDAGSFFFLGELLIDLPLPVDSPVAEECGRCVACMTICPTGAIVEPYTVDARRCISYLTIELEGAIPEEFRPLIGNRIYGCDDCQLICPWNRFSQLTDEEDFSPRKALHAPPLVELFAWSEAWFLKVTEGSAIRRIGHLRWLRNIAVALGNAPWDEAHLRALESRRGEHPLLDEHIEWAIAQQLKKRNADAVEVQLPKKLRLVRVVEKGLPRDA

SEQ ID NO: 80871 - protein, 379 aa, Serratia marcescens
  misc_feature (1)..(379): tr|A0A1C3HM37|A0A1C3HM37_SERMA Epoxyqueuosine reductase OS=Serratia marcescens OX=615 GN=queG PE=3 SV=1
MTHPLDLHQLAQHIKQWGQSLGFQQVGICDTDLSLEEPKLQAWLDKQYHGEMEWMARHGMLRARPHELLPGTLRVISVRMNYLPAKAAFASTLQNPQMGYVSRYALGRDYHKLLRQRLKKLGDQIQEYCGELNFRPFVDSAPVMERALAAKAGIGWVGKHSLILNREAGSWFFLGELLIDLPLPVDKPQEEQCGRCVACITTCPTGAIVAPYTVDARRCISYLTIELEGAIPEEFRPLLGNRIYGCDDCQLICPWNRFSQLTDEDDFSPRAALHAPQLLDLFNWTEEKFLRITEGSAIRRIGHLRWLRNIAVALGNAPYEDGIVLALRARLGQDAMLDEHIHWALAQQLARREAQGIEVQTAQKKRLIRAVEKGLPRDA

SEQ ID NO: 80872 - protein, 379 aa, Serratia marcescens
  misc_feature (1)..(379): tr|A0A3E2EFB7|A0A3E2EFB7_SERMA Epoxyqueuosine reductase OS=Serratia marcescens subsp. sakuensis OX=211760 GN=q ueG PE=3 SV=1
MTHPLDLHQLAQHIKQWGQSLGFQQVGICDTDLSLEEPKLQAWLDKQYHGEMEWMARHGMLRARPHELLPGTLRVISVRMNYLPAKAAFASTLQDSQLGYVSRYALGRDYHKLLRQRLKKLGDQIQEYCGELNFRPFVDSAPVMERALAAKAGIGWVGKHSLILNREAGSWFFLGELLIDLPLPVDQPQEEQCGRCVACITTCPTGAIVAPYTVDARRCISYLTIELEGAIPEEFRPLLGNRIYGCDDCQLICPWNRFSQLTDEDDFSPRAALHAPQLIDLFNWTEEKFLRITEGSAIRRIGHLRWLRNIAVALGNAPYEDGVVLALRTRLGQDSMLDEHIHWALAQQLARREAQGIEVQTAQKKRLIRAVEKGLPRDA

SEQ ID NO: 80873 - protein, 379 aa, Serratia nematodiphila
  misc_feature (1)..(379): tr|A0A5C7D820|A0A5C7D820_9GAMM Epoxyqueuosine reductase OS=Serratia nematodiphila OX=458197 GN=queG PE=3 SV=1
MTHPLDLHQLAQHIKQWGQSLGFQQVGICDTDLSLEEPKLQAWLDKQYHGEMEWMARHGMLRARPHELLPGTLRVISVRMNYLPAKAAFASTLQNPQLGYVSRYALGRDYHKLLRQRLKKLGDQIQEYCGELNFRPFVDSAPVMERALAAKAGIGWVGKHSLILNREAGSWFFLGELLIDLPLPVDQPQEEQCGRCVACITTCPTGAIVAPYTVDARRCISYLTIELEGAIPEEFRPLLGNRIYGCDDCQLICPWNRFSQLTDEDDFSPRAALHAPQLLDLFNWTEEKFLRITEGSAIRRIGHLRWLRNIAVALGNAPYEDGVVLALRTRLGQDSMLDEHIHWALAQQLARREAQGIEVQTAQKKRLIRAVEKGLPRDA

SEQ ID NO: 80874 - protein, 345 aa, Serratia odorifera
  misc_feature (1)..(345): tr|A0A3S4E676|A0A3S4E676_SEROD Epoxyqueuosine reductase OS=Serratia odorifera OX=618 GN=queG PE=3 SV=1
MEEPKLQAWLDKQYHGEMEWMARHGMLRARPHELLPGTLRVISVRMNYLPAKAAFATTLNNPQLGYVSRYALGRDYHKLLRQRLKKLGEQIQDYCGELNFRPFVDSAPVMERALASKAGIGWVGKHSLILNREAGSWFFLGELLIDLPLPVDQPQEEQCGRCVACITTCPTGAIVAPYTVDARRCISYLTIELEGAIPEEFRPLLGNRIYGCDDCQLICPWNRFSQLTDEDDFSPRAALHAPQLIDLFGWSEEKFLRITEGSAIRRIGHLRWLRNIAVALGNAPYQDSVVLALRSRVGEHPLLDEHIHWALEQQLARRAQQGVEVQGSQKKRLIRAVQKGLPRDA

SEQ ID NO: 80875 - protein, 366 aa, Serratia odorifera
  misc_feature (1)..(366): tr|D4DY88|D4DY88_SEROD Epoxyqueuosine reductase OS=Serr atia odorifera DSM 4582 OX=667129 GN=yjeS PE=3 SV=1
MTHPLDLNQLAQHIKQWGQSLGFQQVGICDTDLSMEEPKLQAWLDKQYHGEMEWMARHGMLRARPHELLPGTLRVISVRMNYLPAKAAFATTLNNPQLGYVSRYALGRDYHKLLRQRLKKLGEQIQDYCGELNFRPFVDSAPVMERALASKAGIGWVGKHSLILNREAGSWFFLGELLIDLPLPVDQPQEEQCGRCVACITTCPTGAIVAPYTVDARRCISYLTIELEGAIPEEFRPLLGNRIYGCDDCQLICPWNRFSQLTDEDDFSPRAALHAPQLIDLFGWSEEKFLRITEGSAIRRIGHLRWLRNIAVALGNAPYQDSVVLALRSRVGEHPLLDEHIHWALEQQLARRAQQGVEVQGSQKND

SEQ ID NO: 80876 - protein, 379 aa, Serratia oryzae
  misc_feature (1)..(379): tr|A0A1S8CIM2|A0A1S8CIM2_9GAMM Epoxyqueuosine reductase OS=Serratia oryzae OX=2034155 GN=queG PE=3 SV=1
MTHPLDLAQLAQHIKQWGQSLGFQQVGICDTDLSVEEPKLQAWLDKQYHGEMAWMARHGMLRARPHELLPGTLRVISVRMNYLPAKAAFASTLQNAQLGYVSRYALGRDYHKLLRQRLKKLGEQIQAYCGELNFRPFVDSAPVMERALAAKARIGWVGKHSLILNREAGSWFFLGELLIDLPLPVDRPQEEQCGRCVACITTCPTGAIVAPYTVDARRCISYLTIELEGPIPEEFRSLMGNRIYGCDDCQLICPWNRFSQLTDEDDFSPRAALHAPQLIDLFSWNEEKFLRITEGSAIRRIGHLRWLRNIAVALGNAPYQDRIVIALRARQGENAMLDEHIHWALQQQLARREAQGITVQSQQKKRLIRAVEKGLPRDA

SEQ ID NO: 80877 - protein, 232 aa, Serratia plymuthica
  misc_feature (1)..(232): tr|A0A2X4U4C2|A0A2X4U4C2_SERPL Epoxyqueuosine reductase OS=Serratia plymuthica OX=82996 GN=queG_1 PE=4 SV=1
MASKAGIGWVGKHSLILNREAGSWFFLGELLIDLPLPVDEPQPEQCGRCVACITTCPTGAIVAPYTVDARRCISYLTIELEGAIPEEFRPLLGNRIYGCDDCQLICPWNRFSQLTDEDDFSPRAALHAPQLIELFGWTEEKFLRITEGSAIRRIGHLRWLRNIAVALGNAPYQDAVVIALRSRLSQNPMLDEHIDWALEQQLARREAQGIEVQTTQKKRLIRAVEKGLPRDA

SEQ ID NO: 80878 - protein, 379 aa, Serratia plymuthica
  misc_feature (1)..(379): tr|S4YAZ4|S4YAZ4_SERPL Epoxyqueuosine reductase OS=Serr atia plymuthica S13 OX=1348660 GN=queG PE=3 SV=1
MTHPLDLNQLAQHIKQWGQSLGFQQVGICDTDLSAEEPKLQAWLDKQYHGEMEWMARHGMLRARPHELLPGTLRVISVRMNYLPAKAAFASTLNNPQLGYVSRYALGRDYHKLLRQRLKKLGDQIQAYCGELNFRPFVDSAPVMERALASKAGIGWVGKHSLILNREAGSWFFLGELLIDLPLPVDEPQPEQCGRCVACITTCPTGAIVAPYTVDARRCISYLTIELEGAIPEEFRPLLGNRIYGCDDCQLICPWNRFSQLTDEDDFSPRAALHAPQLIELFGWTEEKFLRITEGSAIRRIGHLRWLRNIAVALGNAPYQDAVVIALRSRLSQDPMLDEHIDWALEQQLARREAQGIEVQTTQKKRLIRAVEKGLPRDA

SEQ ID NO: 80879 - protein, 379 aa, Serratia proteamaculans
  misc_feature (1)..(379): tr|A0A4Z0E2W4|A0A4Z0E2W4_9GAMM Epoxyqueuosine reductase OS=Serratia proteamaculans OX=28151 GN=queG PE=3 SV=1
MTHPLDLNQLAQHIKQWGQSLGFQQVGICDTDLSAEEPKLQAWLDKQYHGEMEWMARHGMLRARPHELLPGTLRVISVRMNYLPAKAAFASTLQNPELGYVSRYALGRDYHKLLRQRLKKLGDQIQAYCGELNFRPFVDSAPVMERALASKAGIGWVGKHSLILNREAGSWFFLGELLIDLPLPVDEPQQEQCGRCVACITTCPTGAIVAPYTVDARRCISYLTIELEGAIPEEFRPLLGNRIYGCDDCQLICPWNRFSQLTDEDDFSPRAALHAPQLIELFDWTEEKFLRITEGSAIRRIGHLRWLRNIAVALGNAPYQDAIVMALRSRLEQDAMLDEHIHWALKQQLARREAQGIEVQTMQKKRLIRAVEKGLPRDA

SEQ ID NO: 80880 - protein, 379 aa, Serratia proteamaculans
  misc_feature (1)..(379): tr|A8G8U3|A8G8U3_SERP5 Epoxyqueuosine reductase OS=Serr atia proteamaculans (strain 568) OX=399741 GN=queG PE=3 SV=1
MTHPLDLNQLAQHIKQWGQSLGFQQVGICDTDLSAEEPKLQAWLDKQYHGEMEWMARHGMLRARPHELLPGTLRVISVRMNYLPAKAAFASTLQNPELGYVSRYALGRDYHKLLRQRLKKLGDQIQAYCGELNFRPFVDSAPVMERALASKAGIGWVGKHSLILNREAGSWFFLGELLIDLPLPVDEPQQEQCGRCVACITTCPTGAIVAPYTVDARRCISYLTIELEGAIPEEFRPLLGNRIYGCDDCQLICPWNRFSQLTDEDDFSPRAALHAPQLIELFAWTEEKFLRITEGSAIRRIGHLRWLRNIAVALGNAPYQDAIVIALRSRLEQDAMLDEHIHWALKQQLGRREEQGIEVQTMQKKRLIRAVEKGLPRDA

SEQ ID NO: 80881 - protein, 379 aa, Serratia quinivorans
  misc_feature (1)..(379): tr|A0A2X2GE84|A0A2X2GE84_9GAMM Epoxyqueuosine reductase OS=Serratia quinivorans OX=137545 GN=queG PE=3 SV=1
MTHPLDLNQLAQHIKQWGQSLGFQQVGICDTDLSAEEPKLQAWLDKQYHGEMEWMARHGMLRARPHELLPGTLRVISVRMNYLPAKAAFASTLQNPELGYVSRYALGRDYHKLLRQRLKKLGDQIQAYCGELNFRPFVDSAPVMERALASKAGIGWVGKHSLILNREAGSWFFLGELLIDLPLPVDKPQQEQCGRCVACITTCPTGAIVAPYTVDARRCISYLTIELEGAIPEEFRPLLGNRIYGCDDCQLICPWNRFSQLTDEDDFSPRAALHAPQLIELFDWTEEKFLRITEGSAIRRIGHLRWLRNIAVALGNAPYQDAIVIALRSRLEQDAMLDEHIHWALEQQLGRREAQGIEVQTTQKKRLIRAVEKGLPRDA

SEQ ID NO: 80882 - protein, 379 aa, Serratia quinivorans
  misc_feature (1)..(379): tr|A0A4Q8DDN7|A0A4Q8DDN7_9GAMM Epoxyqueuosine reductase OS=Serratia quinivorans OX=137545 GN=queG PE=3 SV=1
MTHPLDLNQLAQHIKQWGQSLGFQQVGICDTDLSAEEPKLQAWLDKQYHGEMEWMARHGMLRARPHELLPGTLRVISVRMNYLPAKAAFASTLQNPNLGYISRYALGRDYHKLLRQRLKKLGDQIQAYCGELNFRPFVDSAPVMERALASKAGIGWVGKHSLILNREAGSWFFLGELLIDLPLPVDEPQQEQCGRCVACITTCPTGAIVAPYTVDARRCISYLTIELEGAIPEEFRPLLGNRIYGCDDCQLICPWNRFSQLTDEDDFSPRAALHAPQLIDLFGWTEEKFLRITEGSAIRRIGHLRWLRNIAVALGNAPYQDAVVMALRSRLEQNAMLDEHIHWAIEQQWIRREAQGVEVQTMQKKRLVRAVEKGLPRDA

SEQ ID NO: 80883 - protein, 340 aa, Serratia rubidaea
  misc_feature (1)..(340): tr|A0A2X5FH09|A0A2X5FH09_SERRU Epoxyqueuosine reductase OS=Serratia rubidaea OX=61652 GN=queG PE=3 SV=1
MQAWLDKQYHGEMEWMARHGMLRARPHELLPGTLRVISVRMNYLPAKAAFASTLNNPQLGYVSRYALGRDYHKLLRQRLKKLGEQIQQYCGELNFRPFVDSAPIMERPLAAKAGIGWVGKHSLILNREAGSWFFLGELLVDLPLPVDQPQEEQCGRCVACITTCPTGAIVEPYTVDARRCISYLTIELEGAIPEEFRPLMGNRIYGCDDCQLICPWNRFSQLTDETDFSPRAALHAPQLIDLFSWSEEKFLRITEGSAIRRIGHLRWLRNIAVALGNAPYQEAILSALRTRLGQSELLDEHIEWALQQQLARRTEHRIEVQSPQKKRLIRAVEKGLPRDA

SEQ ID NO: 80884 - protein, 104 aa, Serratia rubidaea
  misc_feature (1)..(104): tr|A0A4U9HAD1|A0A4U9HAD1_SERRU Epoxyqueuosine reductase OS=Serratia rubidaea OX=61652 GN=queG_2 PE=4 SV=1
MARHGMLRARPHELLPGTLRVISVRMNYLPAKAAFASTLNNPQLGYVSRYALGRDYHKLLRQRLKKLGEQIQQYCGELNFRPFVDSAPIMERPLAAKAGIWLGW

SEQ ID NO: 80885 - protein, 379 aa, Serratia sp.
  misc_feature (1)..(379): tr|A0A2I5TGH4|A0A2I5TGH4_SERS3 Epoxyqueuosine reductase OS=Serratia sp. (strain ATCC 39006) OX=104623 GN=queG PE=3 SV=1
MTYPYDLNELAQLIKQWGQSLGFQQVGICDTDLSHEEPRLQAWLDKQYHGEMAWMARHGMLRTRPHELLPGTLRVISVRMNYLPAKAAFANTLKNPHLGYVSRYALGRDYHKLLRQRLKKLGDMIQAYCGKLQFRPFVDSAPIMERPLAAKAGLGWVGKHSLILNRSAGSWFFLGELLIDLPLPLDNPVKEACGKCVACMTICPTGAIVEPYTVDARRCISYLTIELEGVIPEALRPLIGNRIYGCDDCQLICPWNRFSQLTDEVDFSPRAALHAPELLDLFGWDEDKFLRITEGSSIRRIGHLRWLRNIAVALGNAPYEDHIVLALRSRLGENNVLDEHIQWAIAQQLSRREQSALDILPAQKKRLIRAIEKGLPRDG

SEQ ID NO: 80886 - protein, 379 aa, Serratia sp.
  misc_feature (1)..(379): tr|A0A1B3FJB6|A0A1B3FJB6_9GAMM Epoxyqueuosine reductase OS=Serratia sp. YD25 OX=1759437 GN=queG PE=3 SV=1
MTHPLDLHQLAQHIKQWGQSLGFQQVGICDTDLSLEEPKLQAWLDKQYHGEMEWMARHGMLRARPHELLPGTLRVISVRMNYLPAKAAFASTLQNPQLGYVSRYALGRDYHKLLRQRLKKLGDQIQEYCGELNFRPFVDSAPVMERALAAKAGIGWVGKHSLILNREAGSWFFLGELLIDLPLPVDQPQEEQCGRCVACITTCPTGAIVAPYTVDARRCISYLTIELEGAIPEEFRPLLGNRIYGCDDCQLICPWNRFSQLTDEDDFSPRAALHTPQLIDLFNWTEEKFLRITEGSAIRRIGHLRWLRNIAVALGNAPYEDSIVLALRARLEQDAMLDEHIHWALAQQLARREAQGIEVQTAQKKRLIRAVEKGLPRDA

SEQ ID NO: 80887 - protein, 379 aa, Serratia ureilytica
  misc_feature (1)..(379): tr|A0A5C7C2Y4|A0A5C7C2Y4_9GAMM Epoxyqueuosine reductase OS=Serratia ureilytica OX=300181 GN=queG PE=3 SV=1
MTHPLDLHQLAQHIKQWGQSLGFQQVGICDTDLSLEEPKLQAWLDKQYHGEMEWMARHGMLRARPHELLPGTLRVISVRMNYLPAKAAFASTLQNPQLGYVSRYALGRDYHKLLRQRLKKLGDQIQAYCGELNFRPFVDSAPVMERALAAKAGIGWVGKHSLILNREAGSWFFLGELLIDLPLPVDQPQEEQCGRCVACITTCPTGAIVAPYTVDARRCISYLTIELEGAIPEEFRPLLGNRIYGCDDCQLICPWNRFSQLTDEDDFSPRAALHAPQLIDLFSWTEEKFLRITEGSAIRRIGHLRWLRNIAVALGNAPYEDSIVLALRTRLDQDAMLDEHIHWALAQQLARREAQGIEVQTAQKKRLIRAVEKGLPRDA

SEQ ID NO: 80888 - protein, 393 aa, Shewanella algae
  misc_feature (1)..(393): tr|A0A1S2TD63|A0A1S2TD63_9GAMM Epoxyqueuosine reductase OS=Shewanella algae OX=38313 GN=queG PE=3 SV=1
MSAPQPPQFDPCMLGKLARDIKAWGKELGFAQVGITDTDLRREEPRLQAWLDKGYHGEMGYMASHGMMRARPAELHPGTLRVISVRMDYLPPEAGFALNLKDPNLGYISRYAGGRDYHKLMRNRLKKLGERIDEALKTLQLEGSGFRPFVDSAPILERPLAEKAGIGWTGKHSLILNHEAGSWFFLGELLVNLPLPLDVAIAEGCNTCVACITSCPTGAIVEPYVVDGRRCISYLTIELAGSIPLEFRPLLGNRIYGCDDCQLVCPFNRAAPLTAETDFHLRPQLKQPKLLELFAWSETEFLKNTEGSAIRRIGHERWLRNIAVALGNAPGSETIVVALQARLTDASELVAEHITWALAQQAEKLSGKDTVPIPARKTGRLIRIVEKGLPRDA

SEQ ID NO: 80889 - protein, 393 aa, Shewanella algae
  misc_feature (1)..(393): tr|A0A3G4UV45|A0A3G4UV45_9GAMM Epoxyqueuosine reductase OS=Shewanella algae OX=38313 GN=queG PE=3 SV=1
MSAPQPPQFDPGMLGKLARDIKAWGKELGFAQVGITDTDLRREEPRLQAWLDKGYHGEMGYMASHGMMRARPAELHPGTLRVISVRMDYLPPQAGFALNLKDPNLGYISRYAGGRDYHKLMRNRLKKLGERIDEALKALQLEGCGFRPFVDSAPILERPLAEKAGIGWTGKHSLILNHEAGSWFFLGELLVNLPLPMDVAIAEGCNTCVACITSCPTGAIVEPYVVDGRRCISYLTIELAGSIPPEFRPLLGNRIYGCDDCQLVCPINRAAPLTAETDFHLRPQLKQPKLLELFAWSEAEFLKNTEGSAIRRIGHERWLRNIAVALGNAPGSETIVAALQERLTDASELVAEHIEWALAQQAEKLSANDTAPIPARKTGRLIRIVEKGLPRDA

SEQ ID NO: 80890 - protein, 385 aa, Shewanella amazonensis
  misc_feature (1)..(385): tr|A1S8X1|A1S8X1_SHEAM Epoxyqueuosine reductase OS=Shew anella amazonensis (strain ATCC BAA-1098 / SB2B) OX=326 297 GN=queG PE=3 SV=1
MTSTPSHAQLNDLARQIKAWGKALGFAELGITDTDLSAQEPRLLEWLTQGYHGEMAYMESHGLMRARPQELHPGTIRVIAARMDYLPENAGFATNLRDPNLGYISRYAGGRDYHKLIRNRLKKLGEQIDSWLIERGYAPANFRPFVDSAPILERPLAEKAGLGWTGKHSLILNHQAGSWFFLGELLVNLPLPIDIPIAEDCNTCVACIKSCPTDAIVAPYVVDGRRCISYLTIELQGAIPEEFRPLMGNRIYGCDDCQLACPVNSGSPLSNEADFQTRQPLKLPALLSLFAWDEATFLRQTEGSAIRRIGHKRWLRNIAVALGNAPASGDILSALNARLRDKEVDEMVAEHIHWAIKRQQSVLSKDSRKTARLVRAIEKGMPRDA

SEQ ID NO: 80891 - protein, 398 aa, Shewanella atlantica
  misc_feature (1)..(398): tr|A0A431W2N9|A0A431W2N9_9GAMM Epoxyqueuosine reductase OS=Shewanella atlantica OX=271099 GN=queG PE=3 SV=1
MSNTPVSQSSFYTLSSGDLTRLAQQIKQWGQELGFAQIGICDTDLTQQEPQLQQWLDSGYHGDMGYMESHGMMRARPHELHPGTKRVISARMDYLPPEAGFATNLSDPNLAYISRYAGGRDYHKMIRNRLKKLGQMIESELVNLGACKPGFRPFVDSAPVLERPLADKAGLGWTGKHSLLLNEDAGSWFFLGELFIDLPLPVDIPVVEGCNTCVACIKSCPTNAIIEPYVVDGRRCISYLTIELQGAIPEEFRPLIGNRIYGCDDCQLVCPVNSKAPLTNEHDFHTREPLIQPQLLNLFSWSEAEFLKITEGSPIRRIGHKRWLRNIAVALGNAPGSEDIITALEQRKASEEVDEMVIEHIDWALAQQQEKQVQEPASPNRKTQRVIRSVEKGLPRDA

SEQ ID NO: 80892 - protein, 395 aa, Shewanella baltica
  misc_feature (1)..(395): tr|A0A379YBE3|A0A379YBE3_9GAMM Epoxyqueuosine reductase OS=Shewanella baltica OX=62322 GN=queG PE=3 SV=1
MSTLANQIPNQSYASTLSRLALQIKSWGKALGFAQVGICDTDLTAEEAKLQAWLDKGFHGEMAYMATHGMMRARPQELHPGTVRVISVRMDYLPPEAGFATNLTDPNLGYISRYAGGRDYHKLIRARLKKLGDQISAELVALGFDAADFRPFVDSAPVLERPLAEKAGIGWTGKHSLILNHEAGSWFFLGELLINLPLPVDIPIQEGCNSCVACITSCPTGAIVEPYVVDGRRCISYLTIELQGAIPEEFRPLMGNRIYGCDDCQLVCPINRQAPLTAETDFHIRPQLKQPDLLSLFAWSEAEFLKQTEGSAIRRIGHKRWLRNIAVALGNAPSSPEIIQALSIRKEQADVDNIVKEHIDWALIQHQSKSPQLITARRKTERLIRTVKKGLPRDA

SEQ ID NO: 80893 - protein, 395 aa, Shewanella baltica
  misc_feature (1)..(395): tr|G0B0W7|G0B0W7_9GAMM Epoxyqueuosine reductase OS=Shew anella baltica BA175 OX=693974 GN=queG PE=3 SV=1
MSTLANQIPNQSYASTLSRLALQIKTWGKTLGFAQVGICDTDLTAEEAKLQAWLDKGFHGEMAYMATHGMMRARPQELHPGTVRVISVRMDYLPPEAGFATNLTDPNLGYISRYAGGRDYHKLIRARLKKLGDQISAELVALGFDAADFRPFVDSAPVLERPLAEKAGIGWTGKHSLILNHEAGSWFFLGELLINLPLPVDIPIQEGCNSCVACITSCPTGAIVEPYVVDGRRCISYLTIELQGAIPEEFRPLMGNRIYGCDDCQLVCPINRQAPLTAETDFHIRPQLKQPDLLSLFAWSEAEFLKQTEGSAIRRIGHKRWLRNIAVALGNAPSSPEIIQALSIRKEQADVDNIVKEHIDWALIQHQSKSPQLITARRKTERLIRTVKKGLPRDA

SEQ ID NO: 80894 - protein, 440 aa, Shewanella benthica
  misc_feature (1)..(440): tr|A0A330MAM4|A0A330MAM4_9GAMM Epoxyqueuosine reductase OS=Shewanella benthica OX=43661 GN=yjeS PE=3 SV=1
MYNPMSDTALPPINSHPFSPVELRELTAKIKQWGIELGFAQIGICDTDLTSEELKLQQWLDKGYHGDMAYMEAHGMMRARPHELHPGTIRVISARMNYLPPQAGFATNLKDPNLAYISRYAGGRDYHKLIRNRLKKLGQMIQAELDIINAGKTNFRPFVDSAPILERPLAEKAGLGWTGKHSLLLNEDVGSWFFIGELLIDLPLPVDIPVAEACNTCVACIKSCPTNAIVEPYIVDGRRCISYLTIELQGAIPEEFRPLIGNRIYGCDDCQLVCPVNSKAPITLESDFHTRDPLKQPELLTLFGWTEAEFLKITEGSPIRRIGHKRWLRNIAVALGNAPASEKIVQGLQQKKTSEEADEMVIEHIDWALAQQHARLAAAQSSEAQSLEAQSLETKGQETAALSPVARVLNQSARVQKTSSLSRKTQRVIRSVEKGLPRDA

SEQ ID NO: 80895 - protein, 431 aa, Shewanella benthica
  misc_feature (1)..(431): tr|A9CW53|A9CW53_9GAMM Epoxyqueuosine reductase OS=Shew anella benthica KT99 OX=314608 GN=queG PE=3 SV=1
MSDTALPPINSHPFSPAELRELTAKIKQWGIELGFAQIGICDTDLTSEEPKLQQWLDKGYHGDMAYMQAHGMMRARPHELHPGTIRVISARMNYLPPQAGFATNLKDPNLAYISRYAGGRDYHKLIRNRLKKLGQMIQAELDIMNAGKTNFRPFVDSAPILERPLAEKAGLGWTGKHSLLLNEEVGSWFFLGELLIDLPLPVDIPVAEACNTCVACIKSCPTNAIVEPYIVDGRRCISYLTIELQGAIPEEFRPLIGNRIYGCDDCQLVCPVNSKAPITLESDFHTRDPLKQPELLTLFGWTEAEFLKITEGSPIRRIGHKRWLRNIAVALGNAPASEKIVQGLQQRKASEEADEMVIEHIDWALTQQHARLAAAQSPEAQSLETKGQETAALSPVARVLSQSDRVQKTSSLSRKTQRVIRSIEKGLPRDA

SEQ ID NO: 80896 - protein, 391 aa, Shewanella bicestrii
  misc_feature (1)..(391): tr|A0A220URY0|A0A220URY0_9GAMM Epoxyqueuosine reductase OS=Shewanella bicestrii OX=2018305 GN=queG PE=3 SV=1
MSITTPSNIPDAATLSRLALQIKHWGKALGFAQIGICDTDLTAEEAKLQTWLDKGYHGEMGYMATHGMMRARPHELHPGTVRVISARMDYLPPEAGFATNLASPNMGYISRYAGGRDYHKLIRARLKKLGDQISSELVALGFDAADFRPFVDSAPVLERPLAEKAGIGWTGKHSLILNHDAGSWFFLGELLINLPLPVDIPIQEDCNTCVACITSCPTGAIVEPYTVDARRCISYLTIELQGAIPEEFRPLMGNRIYGCDDCQLVCPVNREAPLTQESDFHIRPKLKQPELLTLFAWSETEFLKQTEGSAIRRIGHQRWLRNIAVALGNAPSSPQIIAALEQRKAQADVDEMVKEHIDWALARQHAGGSQANNRKTERLVRVIQKGLPRDA

SEQ ID NO: 80897 - protein, 398 aa, Shewanella canadensis
  misc_feature (1)..(398): tr|A0A3S0LNU8|A0A3S0LNU8_9GAMM Epoxyqueuosine reductase OS=Shewanella canadensis OX=271096 GN=queG PE=3 SV=1
MSDTPVSPSSFYTLSPSDLTRLALQIKQWGQELGFAQIGICDTDLTAQEPQLQQWLDNGYHGGMGYMESHGMMRARPHELHPGTTRVISARMDYLPPEAGFATNLSDPNLAYISRYAGGRDYHKMIRNRLKKLGQMIEAELVNLGGSKPGFRPFVDSAPILERPLADKAGLGWTGKHSLLLNQDAGSWFFLGELFIDLALPVDIPVVEGCNTCVACIKSCPTNAIGEPYIVDGRRCISYLTIELQGAIPEEFRPLIGNRIYGCDDCQLVCPVNSKAPLTNEHDFHTRDPLKHPQLLTLFGWSEAEFLKITEGSPIRRIGHKRWLRNIAVALGNAPASEKILEGLKQKKISEEVDEMVIEHIDWALAQQQEKQDQEQASPNRKTQRVIRSVEKGLPRDA

SEQ ID NO: 80898 - protein, 381 aa, Shewanella chilikensis
  misc_feature (1)..(381): tr|A0A2V4VZC5|A0A2V4VZC5_9GAMM Epoxyqueuosine reductase OS=Shewanella chilikensis OX=558541 GN=queG PE=3 SV=1
MLGKLARDIKAWGKELGFAQVGITDTDLRREEPRLQTWLDKGYHGEMGYMASHGMMRARPAELHPGTLRVISVRMDYLPPQAGFALNLKDPNLGYISRYAGGRDYHKLMRNRLKKLGERIDEALKALQLEGCGFRPFVDSAPILERPLAEKAGIGWTGKHSLILNHEAGSWFFLGELLVNLPLPVDVAIAEGCNTCVACITSCPTGAIVEPYVVDGRRCISYLTIELAGSIPLEFRPLLGNRIYGCDDCQLVCPINRAAPLTAETDFHLRPQLKQPKLLELFAWSEVEFLKNTEGSAIRRIGHQRWLRNIAVALGNAPGSETIVAALQERLTDASELIAEHITWALAQQAEKLSGKNTAPIPVRKTDRLIRIVEKGLPRDA

SEQ ID NO: 80899 - protein, 391 aa, Shewanella colwelliana
  misc_feature (1)..(391): tr|A0A1E5IV30|A0A1E5IV30_SHECO Epoxyqueuosine reductase OS=Shewanella colwelliana OX=23 GN=queG PE=3 SV=1
MSIPSPMHQMLSQQQLAKLAQQIKTWGKALGFAQIGICDTDLSTEEGKLQTWLDNGYHGEMNYMAAHGMMRARPNELHPGTTRVISARMDYLPPEAGFATNLSDPNLAYISRYAGGRDYHKMIRNRLKKLGQQIEAELIELGFASPNFRPFVDSAPILERPLADKAGLGWTGKHSLLLNQDAGSWFFLGELLIDVPLPVDIPIQEECNTCVACIKSCPTNAIVEPYVVDGRRCISYLTIELQGAIPDEFRALIGNRIYGCDDCQLVCPVNSQAPITQENDFHTRDILKQPQLTTLFAWSEAEFLSYTEGSAIRRIGHKRWLRNIAVALGNAPHSPAIIDALLKRRSSEEVDEMVVEHIDWALTQQQSSCAAISRKTARVIRAVEKGLPRDA

SEQ ID NO: 80900 - protein, 393 aa, Shewanella decolorationis
  misc_feature (1)..(393): tr|A0A5B8QTF2|A0A5B8QTF2_9GAMM Epoxyqueuosine reductase OS=Shewanella decolorationis OX=256839 GN=queG PE=3 SV =1
MSTTVTSPANIPDAATLSRLAMQIKTWGKALGFAQIGICDTDLTAEEVKLQAWLDKGYHGEMGYMATHGMMRARPHELHPGTVRVISARMDYLPPEAGFATNLASPNMGYISRYAGGRDYHKLIRARLKKLGDQISSELVSLGFDAADFRPFVDSAPVLERPLAEKAGIGWTGKHSLILNHDAGSWFFLGELLINLPLPVDIPIQEDCNTCVACITSCPTGAIVEPYTVDARRCISYLTIELQGAIPEEFRPLMGNRIYGCDDCQLVCPVNREAPLTQESDFHIRPKLKQPELLTLFAWSETEFLKQTEGSAIRRIGHQRWLRNIAVALGNAPSSPQIITALEQRKAQADVDDMVKEHIDWALAQQHSRSSPAKNRKTERLVRVIQKGLPRDA

SEQ ID NO: 80901 - protein, 393 aa, Shewanella decolorationis
  misc_feature (1)..(393): tr|V1DEC6|V1DEC6_9GAMM Epoxyqueuosine reductase OS=Shew anella decolorationis S12 OX=1353536 GN=queG PE=3 SV=1
MSTTVTSPANIPDAATLSRLAMQIKTWGKALGFAQIGICDTDLTAEEVKLQAWLDKGYHGEMGYMETHGMMRARPHELHPGTVRVISARMDYLPPEAGFATNLASPNMGYISRYAGGRDYHKLIRARLKKLGDQISSELVSLGFDAADFRPFVDSAPVLERPLAEKAGIGWTGKHSLILNYDAGSWFFLGELLINLPLPVDIPIQEDCNTCVACITSCPTGAIVEPYTVDARRCISYLTIELQGAIPEEFRPLMGNRIYGCDDCQLVCPVNREAPLTQESDFHIRPKLKQPELLTLFAWSETEFLKQTEGSAIRRIGHQRWLRNIAVALGNAPSSPQIITALEQRKAQADVDDMVKEHIDWALAQQHSRSSPANNRKTERLVRVIQKGLPRDA

SEQ ID NO: 80902 - protein, 415 aa, Shewanella denitrificans
  misc_feature (1)..(415): tr|Q12RA3|Q12RA3_SHEDO Epoxyqueuosine reductase OS=Shew anella denitrificans (strain OS217 / ATCC BAA-1090 / DS M 15013) OX=318161 GN=queG PE=3 SV=1
MSSNESQTLATISPTALSQLARYIKQWGQELGFAQVGITDTDLSEEEAKLQDWLDKGYHGEMGYMANHGMMRARPHELHQGTKRVVSLRMDYLPPSAGFATNLIDPTLGYISRYAGGRDYHKLMRQRIKKLGDKIEAYCQEQGFGATDSRPFVDSAPVMERPLAEKAGIGWTGKHSLILNHNAGSWFFLGELFINLPLPLDIPISDGCNTCVACIKSCPTGAIVEPYVVDGRRCISYLTIELQGAIPEEFRPLMGNRIYGCDDCQLVCPINAQAPLTQEHDFHIRQQILQPELLTLFNWSEKTFLSLTEGSAIRRIGHKRWLRNIAIALGNAPANPNIIEALSARKASDEVDDMVLEHINWALAQQQAKVQQQTKVQQQAKVQQAVQFEPARETPAQRKTARVVRSVEKGLPRDA

SEQ ID NO: 80903 - protein, 387 aa, Shewanella fodinae
  misc_feature (1)..(387): tr|A0A4R2F7Q0|A0A4R2F7Q0_9GAMM Epoxyqueuosine reductase OS=Shewanella fodinae OX=552357 GN=queG PE=3 SV=1
MSTTAIDPHWLNQLARDIKTWGQQLGFAKVGICDIDLSAEEPKLQQWLDAGFHGEMHYMAQHGMMRARPQELHPGTLRVIAVRMDYLPPDAGFASNLSDPELAYISRYAGGRDYHKLLRNRLKKLGERINQALAEANLGDSGFRPFVDSAPILERPLAAKAGIGWTGKHSLLLSREAGSWFFLGELLINLPLPVDIPLAEGCGSCVACITSCPTGAIVAPYTVDARRCISYLTIELAGAIPEELRPLLGNRIYGCDDCQLVCPVNRQAPLTQEADFYTRTSLQQPQLLTLLGWDEATFLQNTEGSAIRRIGYERWQRNIAVALGNAPASEQIIQALRQRLQGASELLAEHLHWALQRQLRATTEDDTHQRKTQRVIRAVQKGLPRDA

SEQ ID NO: 80904 - protein, 383 aa, Shewanella frigidimarina
  misc_feature (1)..(383): tr|A0A106BY65|A0A106BY65_SHEFR Epoxyqueuosine reductase OS=Shewanella frigidimarina OX=56812 GN=queG PE=3 SV=1
MTAAQLDVLNRQIKLWGKELGFAHIGVADVDLSQHEAALQDWLDKGYHGEMGYMANHGMMRARPAELHPGAIRVICARMDYLPPDAGFASNLTDPNLGYISRYAGGRDYHKLIRQRLKKLGDKINQYCQQLNFDATDFRPFVDSAPILERPLADKAGLGWTGKHSLILHPDAGSWFFLGELLINLPLPLDIPIEEGCNTCVACIKSCPTDAIVEPYVVDARRCISYLTIELQGAIPKEFRPLIGNRIYGCDDCQLVCPVNAKAPLTKETDFHTRTALIQPDLLTLFAWSEPYFLSQTEGSAIRRIGHKRWLRNIAIALGNAPANPAIIEALEQRKHSEEVDDMVLEHIEWALVQQIQKAPQSALSRKTQRVIRSIQKGLPRDA

SEQ ID NO: 80905 - protein, 428 aa, Shewanella frigidimarina
  misc_feature (1)..(428): tr|Q086Y2|Q086Y2_SHEFN Epoxyqueuosine reductase OS=Shew anella frigidimarina (strain NCIMB 400) OX=318167 GN=qu eG PE=3 SV=1
MSKLSKTRIILACLLNDSVMTTTTAALTPNPIPDLGTDLTTEPCPLTAAQLDVLNRQIKLWGKELGFAHIGVADVDLSQHEAALQDWLDKGYHGEMGYMANHGMMRARPAELHPGAIRVICARMDYLPPDAGFASNLTDPNLGYISRYAGGRDYHKLIRQRLKKLGDKINQYCQQLDFDATDFRPFVDSAPILERPLADKAGLGWTGKHSLILHPDAGSWFFLGELLINLPLPLDIPIEEGCNTCVACIKSCPTDAIVEPYVVDARRCISYLTIELQGAIPEEFRPLIENRIYGCDDCQLVCPVNAKAPLTKETDFHTRTTLIQPDLLTLFAWSETYFLNQTEGSAIRRIGHKRWLRNIAIALGNAPANPAIIEALEQRKHSEEVDDMVLEHIEWALVQQIQKAPQSALSRKTQRVIRSIQKGLPRDA

SEQ ID NO: 80906 - protein, 414 aa, Shewanella halifaxensis
  misc_feature (1)..(414): tr|B0TRR0|B0TRR0_SHEHH Epoxyqueuosine reductase OS=Shew anella halifaxensis (strain HAW-EB4) OX=458817 GN=queG PE=3 SV=1
MSDSPSQLAAIDTLTATQLGELALNIKAWGQELGFAQIGICDTDLSAEEPKLQQWLDKGYHGDMGYMANHGMMRARPHELHPGTKRVISARMNYLPPEAGFAFNLKNPNLGYISRYAGGRDYHKMIRNRLKKLGDRIEAELKLLGVDKPNSRPFVDSAPILERPLADKAGLGWTGKHSLLLNQDAGSWFFLGELLIDLPLPVDIPVSEGCNTCVACIKSCPTNAIVEPYVVDGSRCISYLTIELQGAIPVEFRQAIGNRIYGCDDCQLVCPVNAKAPLTEESDFHTRPSLKQPQLVELFAWSEAIFLKLTEGSPIRRIGHSRWLRNIAVALGNAPYSEAIIAALETRKLSSEVDEMVMEHIDWALEQQHQKLEPQAAHSLNLSLGLNESTSSHSLSRKTQRIIRCIEKGLARDA

SEQ ID NO: 80907 - protein, 398 aa, Shewanella hanedai
  misc_feature (1)..(398): tr|A0A553JF95|A0A553JF95_SHEHA Epoxyqueuosine reductase OS=Shewanella hanedai OX=25 GN=queG PE=3 SV=1
MSETASVLSNSSSLTPSELSQLALKIKQWGKELGFAQIGICDTDLTEEEPKLQQWLDKGYHGDMGYMEAHGMMRARPYELHPGTIRVISARMDYLPPQAGFATNLQDPNLAYISRYAGGRDYHKLIRNRLKHLGQRIQAELDTLDAGKTNFRPFVDSAPILERPLADKAGLGWTGKHSLLLNEDAGSWFFLGELLIDLPLPVDIPVKEGCNTCVACIKSCPTNAIVAPYIVDGRRCISYLTIELQGAIPEEFRSLIGNRIYGCDDCQLVCPVNSKAPLTIESDFHTRDLLKQPKLLTLFNWGEAEFLKITEGSPIRRIGHQRWLRNIAVALGNAPASQAIIDALELRKQSDEVNELVIEHIEWALIQQRERLVQETFAPNRKTQRVIRSVEKGLPRDA

SEQ ID NO: 80908 - protein, 408 aa, Shewanella livingstonensis
  misc_feature (1)..(408): tr|A0A3G8LS03|A0A3G8LS03_9GAMM Epoxyqueuosine reductase OS=Shewanella livingstonensis OX=150120 GN=queG PE=3 S V=1
MTTTTPALTPDPITDLETHLTKPCPLTVAQLDVLNRQIKQWGKELGFAHIGVADIDLSQHEAGLQDWLDKGYHGEMNYMANHGMMRARPNELHPGTLRVICARMDYLPPDAGFASNLTDPNLGYISRYAGGRDYHKMIRQRLKKLGDKITEHCQTLGFDDTDFRPFVDSAPILERPLADKAGLGWTGKHSLILHPDAGSWFFLGELLINLPLPLDIPIEEGCNTCVACIKSCPTDAIVAPYVVDARRCISYLTIELQGAIPEEFRPLIGNRIYGCDDCQLVCPVNAKAPLTQETDFHTRSVLIQPDLLSLFAWSESQFLSQTEGSAIRRIGHKRWLRNIAIALGNAPANPAIISALERRKDSQEIDDMVLEHIDWALLQQTQKAPLETLSRKTQRVIRSIQKGLPRDA

SEQ ID NO: 80909 - protein, 387 aa, Shewanella loihica
  misc_feature (1)..(387): tr|A3QH97|A3QH97_SHELP Epoxyqueuosine reductase OS=Shew anella loihica (strain ATCC BAA-1088 / PV-4) OX=323850 GN=queG PE=3 SV=1
MSDHSPLSPQALQQLALKIKTWGKALGFAQIGICDTDLRAEEPKFQAWLDKGYHGEMGYMESHGMMRARPQELHPGTVRVISARMDYLPPEAGFATHLKDPNLAYISRYAGGRDYHKMIRNRLKKLGQQIEAELETLGLERPNYRPFVDSAPILERPLADKAGLGWTGKHSLLLNHEAGSWFFLGELLIDLPLPVDIPVQADCNTCVACIKSCPTNAIVEPYVVDGRRCISYLTIELQGAIPEEFRPLMGNRIYGCDDCQLVCPVNGEAPLTQESDFHTRDPLKHPELLTLFAWNEAEFLKFTEGSAIRRIGHKRWLRNIAIALGNAPASQEIIAALEARRESDEVDEMVREHIDWALTRQRLGDYQANRKTQRVIRTVEKGLPRDA

SEQ ID NO: 80910 - protein, 391 aa, Shewanella mangrovi
  misc_feature (1)..(391): tr|A0A094JBW4|A0A094JBW4_9GAMM Epoxyqueuosine reductase OS=Shewanella mangrovi OX=1515746 GN=queG PE=3 SV=1
MTNTPSPFDASLLNQLARDIKQWGQELGFAKVGICDIDLAAEEPILQQWLDKGYHGEMGYMASHGMMRARPAELHPGTVRVISVRMDYLPPQARFATNLKDPKMAYISRYAGGRDYHKLLRNRLKQLGERINQALAAFSLPDSGYRPFVDSAPILERPLAEKAGIGWTGKHSLILAEEAGSWFFLGELLINLPLPVDVAVTEQCGNCVACITSCPTGAIVEPYVVDARRCISYLTIELQGAIPEELRPLLGNRIYGCDDCQLVCPVNRAAPLTAEQDFHIRPQLQQMSLLTLFAWNEATFLKQTEGSAIRRIGHERWQRNIAVALGNAPFDDQIVAALTTAKVSASASTLVLEHIEWALQQQLHKQQTQSHDNRKQQRLLRIIEKGLPRDA

SEQ ID NO: 80911 - protein, 387 aa, Shewanella marisflavi
  misc_feature (1)..(387): tr|A0A4Y6IY63|A0A4Y6IY63_9GAMM Epoxyqueuosine reductase OS=Shewanella marisflavi OX=260364 GN=queG PE=3 SV=1
MSHPSSLSPQALQQLALKIKQWGKALGFAQIGICDTDLSAEEAKLQAWLDKGYHGEMNYMASHGMMRARPAELHPGTTRVISARMDYLPPEAGFATHLKDPNLAYISRYAGGRDYHKMIRNRLKKLGQQIEAELTSLGLERPNYRPFVDSAPILERPLADKAGLGWTGKHSLLLNHEAGSWFFLGELLIDLPLPVDIPVKADCNTCVACIKSCPTNAIVEPYVVDGRRCISYLTIELQGAIPEEFRPLMGNRIYGCDDCQLVCPVNSEAPLTNESDFHTRDPLKYPQLLTLFAWSEAEFLKFTEGSAIRRIGHKRWLRNIAVALGNAPASKEIVAALETRRDSEEVDEMVREHIDWALARQANGGDQPNRKTQRVIRAVEKGLARDA

SEQ ID NO: 80912 - protein, 400 aa, Shewanella morhuae
  misc_feature (1)..(400): tr|A0A1N6VRB7|A0A1N6VRB7_9GAMM Epoxyqueuosine reductase OS=Shewanella morhuae OX=365591 GN=queG PE=3 SV=1
MSTLAPPSPSQSYASTLSRLALQIKTWGKALGFAQVGICDTDLSAEEVKLQTWLDKGYHGEMAYMANHGMMRARPQELHPGTVRVISVRMDYLPPEAGFAANLTDPNLGYISRYAGGRDYHKLIRARLKKLGDQISAELVALGFDAADFRPFVDSAPVLERPLAEKAGIGWTGKHSLILNHDAGSWFFLGELLINLPLPVDIPIQEGCNTCVACITSCPTGAIVAPYVVDGRRCISYLTIELQGAIPEEFRPLMGNRIYGCDDCQLVCPINRQAPLTVETDFHIRPKLKQPDLLNLFAWSEAEFLKQTEGSAIRRIGHKRWLRNIAVALGNAPASETIIAALHARQDNEEVDEIVREHIDWALNAQQARLADNELIVQQKARRKTERMVRIIEKGLPRDA

SEQ ID NO: 80913 - protein, 393 aa, Shewanella oneidensis
  misc_feature (1)..(393): tr|A0A2W5FC60|A0A2W5FC60_SHEOE Epoxyqueuosine reductase OS=Shewanella oneidensis OX=70863 GN=queG PE=3 SV=1
MSTTATSPANIPDAATLSRLALQIKNWGKALGFAQIGICDTDLTAEEAKLEAWLDKGYHGEMAYMATHGMMRARPHELHPGTVRVISARMDYLPPEAGFATNLASPNMGYISRYAGGRDYHKLIRARLKKLGDQISSELVALGFDAADFRPFVDSAPVLERPLAEKAGIGWTGKHSLILNHDAGSWFFLGELLINLPLPVDIPIQEDCNTCVACITSCPTGAIVEPYTVDARRCISYLTIELQGAIPEEFRPLMGNRIYGCDDCQLVCPVNRKAPLTQESDFHIRPKLKQPELLTLFAWSETEFLKQTEGSAIRRIGHQRWLRNIAVALGNAPSSPQIIAALEQRKAQADVDEMVKEHIDWALVRQRAGGSQTNNRKTERLVRVIQKGLPRDA

SEQ ID NO: 80914 - protein, 393 aa, Shewanella oneidensis
  misc_feature (1)..(393): sp|Q8EAN7|QUEG_SHEON Epoxyqueuosine reductase OS=Shewan ella oneidensis (strain MR-1) OX=211586 GN=queG PE=3 SV =1
MSMTVTTSSNVSDAAMLSRLALQIKSWGKALGFAQIGICDTDLTAEEAKLQTWLDKGFHGEMAYMETHGMMRARPHELHSGTVRVISARMDYLPPEAGFATNLASPNMGYISRYAGGRDYHKLIRARLKKLGDQINSELVALGFDAADFRPFVDSAPVLERPLAEKAGIGWTGKHSLILNHDAGSWFFLGELLINLPLPVDIPVQEGCHSCVACITSCPTGAIVEPYTVDARRCISYLTIELQGAIPEEFRPLMGNRIYGCDDCQLVCPVNRAAPLTQESDFHIRPKLKQPELLTLFTWSETEFLKQTEGSAIRRIGHQRWLRNIAVALGNAPSSADIISALEQRKAQADVDEMVKEHIDWALAQQRAGDLQTNNRKTERLVRVIQKGLPRDA

SEQ ID NO: 80915 - protein, 407 aa, Shewanella pealeana
  misc_feature (1)..(407): tr|A8H7H3|A8H7H3_SHEPA Epoxyqueuosine reductase OS=Shew anella pealeana (strain ATCC 700345 / ANG-SQ1) OX=39857 9 GN=queG PE=3 SV=1
MSDTPSQLAPIDSLTSTQLGELALNIKVWGQELGFAQIGICDTDLSAEEPKLQAWLDKDYHGDMGYMANHGMMRARAYELHPGTVRVISARMNYLPPEAGFAFNLKDPNLGYISRYAGGRDYHKMIRNRLKKLGDRIEAELKELGISKPNSRPFVDSAPILERPLADKAGLGWTGKHSLLLNQDAGSWFFLGELLIDLPLPVDIPVVEGCNTCVACIKSCPTNAIVEPYIVDGSRCISYLTIELQGAIPVEFREAIGNRIYGCDDCQLVCPVNAKAPLTEESDFHTRASLKQPRLLELFAWSEAEFLKLTEGSPIRRIGHARWLRNIAVALGNAPSSEEIITALEARKLSSEVDEMVTEHIDWAVNQQRQKLEQQKAQPEATLTYNTQSRKTQRVIRSIEKGLPRDA

SEQ ID NO: 80916 - protein, 394 aa, Shewanella piezotolerans
  misc_feature (1)..(394): tr|B8CQU2|B8CQU2_SHEPW Epoxyqueuosine reductase OS=Shew anella piezotolerans (strain WP3 / JCM 13877) OX=225849 GN=queG PE=3 SV=1
MPNSDCELNPIIQISPETLRRLAEQVKVWGQELGFAQIGICDTDLTEEEPKLQQWLDNDYHGEMSYMANHGMMRARPHELHPGTRRVISARMDYLPPNAGFATNLKDPNLAYISRYAGGRDYHKMIRNRLKKLGDKIEVELKTLGFSQPNSRPFVDSAPILERPLADKAGLGWTGKHSLLLNSDAGSWFFLGELFIDLPLPVDVPVKADCNTCVACIKSCPTNAIVEPYIVDGRRCISYLTIELQGAIPTEFRQAIGNRIYGCDDCQLVCPVNSQAPITNEQDFHTRGPLQQPELLTLFAWSEAEFLKLTEGSAIRRIGHKRWLRNIAIALGNAPTNASIIAALESRKLSDEVDEMVIEHIDWALEQQRSKHAELSRKTQRVIRTVEKGLARDA

SEQ ID NO: 80917 - protein, 424 aa, Shewanella psychrophila
  misc_feature (1)..(424): tr|A0A1S6HVV1|A0A1S6HVV1_9GAMM Epoxyqueuosine reductase OS=Shewanella psychrophila OX=225848 GN=queG PE=3 SV=1
MSDTALPPINSHPFSATELRELTAKIKLWGNELGFAQIGICDTDLTSEEVKLQQWLDKGYHGDMAYMEAHGMMRARPHELHPGTIRVISARMNYLPPEAGFATNLQDPNLAYISRYAGGRDYHKLIRNRLKKLGQMIQAELDTINAGKTNFRPFVDSAPILERPLAEKAGLGWTGKHSLLLNEEVGSWFFLGELLIDLPLPVDIPVSEGCNTCVACIKSCPTNAIVEPYIVDGRRCISYLTIELQGAIPEEFRPLIGNRIYGCDDCQLVCPVNSKAPLTLETDFHTRDPLKQPQLLTLFSWTEAEFLKITEGSPIRRIGHKRWLRNIAVALGNAPASEKIIQGLEQRKASEEADEMVIEHIDWALAQQHTKLASILSLETQSLEKKGQVITTLSQSDRVQNASPLSRKTLRVIRSVEKGLPRDA

SEQ ID NO: 80918 - protein, 400 aa, Shewanella putrefaciens
  misc_feature (1)..(400): tr|A0A380AKS6|A0A380AKS6_SHEPU Epoxyqueuosine reductase OS=Shewanella putrefaciens OX=24 GN=queG PE=3 SV=1
MSTLAPPSPSQSYASTLSRLALQIKNWGKALGFAQVGICDTDLSAEEVKLQTWLDKGYHGEMAYMANHGMMRARPQELHPGTVRVISVRMDYLPPEAGFAANLTDPNLGYISRYAGGRDYHKLIRARLKKLGDQISAELVALGFDAADFRPFVDSAPVLERPLAEKAGIGWTGKHSLILNHDAGSWFFLGELLINLPLPVDIPIQEGCNTCVACITSCPTGAIVAPYVVDGRRCISYLTIELQGAIPEEFRPLMGNRIYGCDDCQLVCPINRQAPLTVETDFHIRPKLKQPDLLNLFAWSEVEFLKQTEGSAIRRIGHKRWLRNIAVALGNAPASETIIAALHARQDNEEVDEIVREHIDWALNAQQARLADNELIVQQKARRKTDRMVRIIEKGLPRDA

SEQ ID NO: 80919 - protein, 400 aa, Shewanella putrefaciens
  misc_feature (1)..(400): tr|A4Y3H9|A4Y3H9_SHEPC Epoxyqueuosine reductase OS=Shew anella putrefaciens (strain CN-32 / ATCC BAA-453) OX=31 9224 GN=queG PE=3 SV=1
MSPSIYPKSNYPDAAILSRLAQQIKGWGKALGFARVGICDTDLTSEEIKLQTWLDKGYHGEMAYMASHGMMRARPQELHPGTVRVISVRMDYLPPEAGFATNLTDPNLGYISRYAGGRDYHKLIRARLKKLGDHISAELIALGFDAADFRPFVDSAPVLERPLAEKAGIGWTGKHSLILNHDSGSWFFLGELFINLPLPVDIPIQEACNTCVACMTSCPTGAIVEPYVVDGRRCISYLTIELQGAIPEEFRPLMGNRIYGCDDCQLVCPINRQAPLTTEIDFHIRPQLKQPDLLSLFAWSEAEFLKQTEGSAIRRIGHKRWLRNIAVALGNAPANPIILEALTNRQESADVDEMVLEHIQWAIDAQQSRLAASNTLVQQKSRRQTARMVRIIEKGLPRDA

SEQ ID NO: 80920 - protein, 398 aa, Shewanella sediminis
  misc_feature (1)..(398): tr|A8FZ57|A8FZ57_SHESH Epoxyqueuosine reductase OS=Shew anella sediminis (strain HAW-EB3) OX=425104 GN=queG PE= 3 SV=1
MSDTPVSQSNFYTLSPGDLTRLALQIKQWGQELGFAQIGICDTDLTAQEPQLQQWLDNGYHGEMGYMESHGMMRARPHELHPGTTRVISARMDYLPPKAGFATNLSDPNLAYISRYAGGRDYHKMIRNRLKKLGQMIEAELLNLGASKPGFRPFVDSAPILERPLAAKAGLGWTGKHSLLLNQDAGSWFFLGELFIDLALPVDIPVVEGCNTCVACIKSCPTNAIVEPYIVDGRRCISYLTIELQGAIPEEFRPLIGNRIYGCDDCQLVCPVNNKAPLTNEHDFHTRDPLKQPQLLTLFGWSEAEFLKITEGSPIRRIGHKRWLRNIAVALGNAPASNDIVTALEQRKTSEEVDEVVIEHIDWALTQQQEKQLQEQASPNRKTQRVIRSVEKGLPRDA

SEQ ID NO: 80921 - protein, 393 aa, Shewanella sp.
  misc_feature (1)..(393): tr|A0KT64|A0KT64_SHESA Epoxyqueuosine reductase OS=Shew anella sp. (strain ANA-3) OX=94122 GN=queG PE=3 SV=1
MSTTVTSPANIPDAATLGRLALQIKTWGKALGFAQIGVCDTDLTAEELKLQAWLDKGYHGEMGYMATHGMMRARPHELHPGTVRVISARMDYLPPEAGFATNLASPNMGYISRYAGGRDYHKLIRARLKKLGDQISSELVSLGFDAADFRPFVDSAPVLERPLAEKAGIGWTGKHSLILNHDAGSWFFLGELLINLPLPVDIPIQEDCNTCVACITSCPTGAIVEPYTVDARRCISYLTIELQGAIPEEFRPLMGNRIYGCDDCQLVCPVNREAPLTKETDFHIRPKLKQPELLTLFAWSEAEFLKQTEGSAIRRIGHQRWLRNIAVALGNAPSSPQIIASLEQRKALVDVDDMVKEHIDWALAQQHSGSSPANNRKTERLVRVIQKGLPRDA

SEQ ID NO: 80922 - protein, 398 aa, Shewanella sp.
  misc_feature (1)..(398): tr|A0A550AH07|A0A550AH07_9GAMM Epoxyqueuosine reductase OS=Shewanella sp. YLB-08 OX=2593656 GN=queG PE=3 SV=1
MSDSVFPLINSHPFTQAQLRSLTVKIKQWGQELGFAQIGICDTDLTAEEPKLQEWLDKGYHGDMNYMQAHGMMRARPHELHPGTIRVISARMNYLPPEAGFAANLKDPNLAYISRYAGGRDYHKMIRNRLKKLGQMIQAELDTMDAGKTNFRPFVDSAPILERPLADKAGLGWTGKHSLLLNQEAGSWFFLGELFIDLPLPVDIPIEEGCNTCVACIKSCPTNAIVEPYIVDGRRCISYLTIELQGAIPEEFRSLIGNRIYGCDDCQLVCPVNSKAPLTVESDFHTRDPLKQPELLTLFSWNEAEFLKITEGSPIRRIGHKRWLRNIAVALGNAPASQKIIDALEARKNSDEVDELVIEHIDWALIQQNERLIQQSNSISRKTQRVIRSVEKGLPRDA

SEQ ID NO: 80923 - protein, 419 aa, Shewanella violacea
  misc_feature (1)..(419): tr|D4ZBN3|D4ZBN3_SHEVD Epoxyqueuosine reductase OS=Shew anella violacea (strain JCM 10179 / CIP 106290 / LMG 19 151 / DSS12) OX=637905 GN=queG PE=3 SV=1
MPDTALSPTNSHPFSPTELRELTAKIKQWGIELGFAQIGICDTDLTSEELKLQQWLDKGYHGDMAYMEARGMMRARPHELHPGTIRVISARMNYLPPEAGFATNLKDPNLAYISRYAGGRDYHKLIRSRLKKLGLMIQAELDTMNAGKTNFRPFVDSAPILERPLAEKAGLGWTGKHSLLLNEEVGSWFFLGELLIDLPLPVDIPVSEGCNTCVACIKSCPTNAIVEPYIVDGRRCISYLTIELQGAIPEEFRPLIGNRIYGCDDCQLVCPVNSKAPITLESDFHTRDPLKQPQLLTLFSWTEAEFLKITEGSPIRRIGHKRWLRNIAVALGNAPASEKIVQGLEQRKASEEADEMVIEHIDWALAQQHTKLAAVQNLETQSLETKGQETPALSQNVSSLSRKTQRVIRSVEKGLPRDA

SEQ ID NO: 80924 - protein, 398 aa, Shewanella woodyi
  misc_feature (1)..(398): tr|B1KKP5|B1KKP5_SHEWM Epoxyqueuosine reductase OS=Shew anella woodyi (strain ATCC 51908 / MS32) OX=392500 GN=q ueG PE=3 SV=1
MPNSVLTQSSFDSLTSSQLSQLVISIKHWGKELGFAQIGICDTDLTIEEPKLQQWLDKGYHGEMGYMESHGMMRARPHELHPGTIRVISARMDYLPPEAGFATNLRDPNLAYISRYAGGRDYHKLIRNRLKKLGLMIEEELTRLGVGKPNFRPFVDSAPILERPLADKAGLGWTGKHSLLLNQDAGSWFFLGELLIDLPLPVDIPVSEGCNTCVACIKSCPTNAIVEPYIVDGRRCISYLTIELQGAIPEEFRPLIGNRIYGCDDCQLVCPVNSKSPLTLETDFHTRDPLKQPELLTLFNWSEAEFLKITEGSPIRRIGHKRWLRNIAVALGNAPFSQTIIDTLELKKQTEELDEMVAEHIDWALKQQRFKQGGEVPTVNRKTQRVIRSVEKGLPRDA

SEQ ID NO: 80925 - protein, 393 aa, Shewanella xiamenensis
  misc_feature (1)..(393): tr|A0A1E3UX94|A0A1E3UX94_9GAMM Epoxyqueuosine reductase OS=Shewanella xiamenensis OX=332186 GN=queG PE=3 SV=1
MSTTATSPANIPDAATLSRLALQIKNWGKALGFAQIGICDTDLTAEEAKLEAWLDKGYQGEMAYMATHGMMRARPHELHPGTVRVISARMDYLPPEAGFATNLASPNMGYISRYAGGRDYHKLIRARLKKLGDQISSELVALGFDAADFRPFVDSAPVLERPLAEKAGIGWTGKHSLILNHDAGSWFFLGELLINLPLPVDIPIQEDCNTCVACITSCPTGAIVEPYTVDARRCISYLTIELQGAIPEEFRPLMGNRIYGCDDCQLVCPVNREAPLTQESDFHIRPKLKQPELLTLFAWSETEFLKQTEGSAIRRIGHQRWLRNIAVALGNAPSSPQIIAALKQRKAQADVDEMVKEHIDWALVRQRAGGSQTNNRKTERLVRVIQKGLPRDA

SEQ ID NO: 80926 - protein, 393 aa, Shewanella xiamenensis
  misc_feature (1)..(393): tr|A0A073KL33|A0A073KL33_9GAMM Epoxyqueuosine reductase OS=Shewanella xiamenensis OX=332186 GN=queG PE=3 SV=1
MSTTATSPANIPDAATLSRLAMQIKNWGKALGFAQIGICDTDLTAEEAKLEAWLDKGYHGEMAYMATHGMMRARPHELHPGTVRVISARMDYLPPEAGFATNLASPNMGYISRYAGGRDYHKLIRARLKKLGDQISSELVALGFDAADFRPFVDSAPVLERPLAEKAGIGWTGKHSLILNHDAGSWFFLGELLINLPLPVDIPIQEDCHTCVACITSCPTGAIVEPYTVDARRCISYLTIELQGAIPEEFRPLMGNRIYGCDDCQLVCPVNREAPLTLESDFHIRPKLKQPELLTLFAWSEAEFLKQTEGSAIRRIGHQRWLRNIAVALGNAPSSPQIIAALEQRKAQADIDDMVKEHIDWALARQHAGGSQANNRKTERLVRVIQKGLPRDA

SEQ ID NO: 80927 - protein, 379 aa, Shigella boydii
  misc_feature (1)..(379): tr|A0A398PW19|A0A398PW19_SHIBO Epoxyqueuosine reductase OS=Shigella boydii OX=621 GN=queG PE=3 SV=1
MSEPLDLNQLAQKIKQWGLELGFQQVGITDTDLSESEPKLQAWLDKQYHGEMDWMARHGMLRARPHELLPGTLRVISVRMNYLPANAAFASTLKNPKLGYVSRYALGRDYHKLLRNRLKKLGEMIQQHCVSLNFRPFVDSAPILERPLAEKAGLGWTGKHSLILNREAGSFFFLGELLVDIPLPVDQPVEEGCGKCVACMTICPTGAIVEPYTVDARRCISYLTIELEGAIPEELRPLMGNRIYGCDDCQLICPWNRYSQLTTEEDFSPRKPLHAPELIELFAWSEEKFLKVTEGSAIRRIGHLRWLRNIAVALGNAPWDETILTALESRKGEHPLLDEHIAWAIAQQIERRNACIVEVQLPKKQRLVRVIEKGLPRDA

SEQ ID NO: 80928 - protein, 379 aa, Shigella boydii
  misc_feature (1)..(379): tr|Q31T96|Q31T96_SHIBS Epoxyqueuosine reductase OS=Shig ella boydii serotype 4 (strain Sb227) OX=300268 GN=yjeS PE=3 SV=1
MSEPLDLNQLAQKIKQWGLELGFQQVGITDTDLSESEPKLQAWLDKQYHGEMDWMARHGMLRARPHELLPGTLRVISVRMNYLPANAAFASTLKNPKLGYVSRYALGRDYHKLLRNRLKKLGEMIQQHCVSLNFRPFVDSAPILERPLAEKAGLGWTGKHSLILNREAGSFFFLGELLVDIPLPVDQPVEEGCGKCVACMTICPTGAIVEPYTVDARRCISYLTIELEGAIPEELRPLMGNRIYGCDDCQPICPWNRYSQLTTEEDFSPRKPLHAPELIELFAWSEEKFLKVTEGSAIRRIGHLRWLRNIAVALGNAPWDETILTALESRKGEHPLLDEHIAWAIAQQIERRNACIVEVQLPKKQRLVRVIEKGLPRDA

SEQ ID NO: 80929 - protein, 379 aa, Shigella dysenteriae
  misc_feature (1)..(379): tr|A0A3P6LHQ7|A0A3P6LHQ7_SHIDY Epoxyqueuosine reductase OS=Shigella dysenteriae OX=622 GN=yjeS PE=3 SV=1
MSEPLDLNQLAQKIKQWGLELGFQQVGITDTDLSESEPKLQAWLDKQYHGEMDWMARHGMLRARPHELLPGTLRVISVRMNYLPANAAFASTLKNPKLGYVSRYALGRDYHKLLRNRLKKLGEMIQQHCVSLNFRPFVDSAPILERPLAEKAGLGWTGKHSLILNREAGSFFFLGELLVDIPLPVDQPVEEGCGKCVACMTICPTGAIVEPYTVDARRCISYLTIELEGAIPEELRPLMGNRIYGCDDCQLICPWNRYSQLTTEEDFSPRKPLHAPELIELFAWSEEKFLKVTEGSAIRRIGHLRWLRNIAVALGNAPWDETILTALESRKGEHPLLDEHIAWAIAQQIERRNACIVEVQLPKKQHLVRVIEKGLPRDA

SEQ ID NO: 80930 - protein, 415 aa, Shigella dysenteriae
  misc_feature (1)..(415): tr|A0A090NEQ6|A0A090NEQ6_SHIDY Epoxyqueuosine reductase OS=Shigella dysenteriae WRSd3 OX=1401327 GN=queG PE=3 SV=1
MSPSASAASRSPRRISSACQTVCGILTGFFFIVWSIMSEPLDLNQLAHKIKQWGLELGFQQVGITDTDLSESEPKLQAWLDKQYHGEMDWMARHGMLRARPHELLPGTLRVISVRMNYLPANAAFASTLKNPKLGYVSRYALGRDYHKLLRNRLKKLGEMIQQHCVSLNFRPFVDSAPILERPLAEKAGLGWTGKHSLILNREAGSFFFLGELLVDIPLPVDQPVEEGCGKCVACMTICPTGAIVEPYTVDARRCISYLTIELEGAIPEELRPLMGNRIYGCDDCQLICPWNRYSQLTTEDDFSPRKPLHAPELIELFAWSEEKFLKVTEGSAIRRIGHLRWLRNIAVALGNAPWDETILAALESRKGEHPLLDEHIAWAIAQQIERRNACIVEVQLPKKQRLVRVIEKGLPRDA

SEQ ID NO: 80931 - protein, 379 aa, Shigella flexneri
  misc_feature (1)..(379): tr|A0A4S3NIT0|A0A4S3NIT0_SHIFL Putative electron transp ort protein yjeS OS=Shigella flexneri OX=623 GN=queG PE =3 SV=1
MSEPLDLNQLAQKIKQWGLELGFQQVGITDTDLSESEPKLQAWLDKQYHGEMDWMARHGMLRARPHELLPGTLRVISVRMNYLPANAAFASTLKNPKLGYVSRYALGRDYHKLLRNRLKKLGEMIQQHCVSLNFRPFVDSAPILERPLAEKAGLGWTGKHSLILNREAGSFFFLGELLVDIPLPVDQPVEEGCGKCVACMTICPTGAIVEPYTVDARRCISYLTIELEGALPEELRPLMGNRIYGCDDCQLICPWNRYSQLTTEDDFSPRKPLHAPELIELFAWSEEKFLKVTEGSAIRRIGHLRWLRNIAVALGNAPWDETILTALESRKGEHPLLDEHIAWAIAQQIERRNACIVEVQLPKKQRLVRVIEKGLPRDA

SEQ ID NO: 80932 - protein, 379 aa, Shigella flexneri; identical to SEQ ID NO: 80931
  misc_feature (1)..(379): tr|A0A5C2EWB5|A0A5C2EWB5_SHIFL Epoxyqueuosine reductase OS=Shigella flexneri Y OX=424720 GN=queG PE=3 SV=1

SEQ ID NO: 80933 - protein, 379 aa, Shigella sonnei; identical to SEQ ID NO: 80931
  misc_feature (1)..(379): tr|A0A200LBF5|A0A200LBF5_SHISO Epoxyqueuosine reductase OS=Shigella sonnei OX=624 GN=queG PE=3 SV=1

SEQ ID NO: 80934 - protein, 379 aa, Shigella sonnei
  misc_feature (1)..(379): tr|Q3YUH7|Q3YUH7_SHISS Epoxyqueuosine reductase OS=Shig ella sonnei (strain Ss046) OX=300269 GN=yjeS PE=3 SV=1
MSEPLDLNQLAQKIKQWGLELGFQQVGITDTDLSESEPKLQAWLDKQYHGEMDWMARHGMLRARPHELLPGTLRVISVRMNYLPANAAFASTLKNPKLGYVSRYALGRDYHKLLRNRLKKLGEMIQQHCVSLNFRPFVDSAPILERPLAEKAGLGWTGKHSLILNREAGSFFFLGELLVDIPLPVDQPVEEGCGKCIACMTICPTGAIVEPYTVDARRCISYLTIELEGAIPEELRPLMGNRIYGCDDCQLICPWNRYSQLTTEDDFSPRKPLHAQELIELFAWSEEKFLKVTEGSAIRRIGHLRWLRNIAVALGNAPWDETILAALESRKGEHPLLDEHIAWAIAQQIERRNACIVEVQLPKKQRLVRVIEKGLPRDA

SEQ ID NO: 80935 - protein, 384 aa, Shigella sp.
  misc_feature (1)..(384): tr|A0A1D3DC53|A0A1D3DC53_9ENTR Epoxyqueuosine reductase OS=Shigella sp. FC1655 OX=1898038 GN=queG PE=3 SV=1
MSSLDLNLLAQNIKLWGSELGFQQTGICDTDLSLEEPRLQAWLDKQYHGEMAWMEKYGMTRARPHELVPGTLRVISVRMNYLPTDAAFARTLNNPEQGYISRYALGRDYHKVLRQRLKKLGERISQYCQQFEYQGVVNFRPFVDSAPIMERPLAVKAGLGWVGKHSLVINNQAGSWFFLGELLIDLPLPIDSPVEEQCGKCVACMTTCPTGAIVEPYTIDARRCISYLTIELEGAIPEAFRPLMGNRIYGCDDCQLICPWNRFSSLTDEEDFSPRSALHTPELLNLFQWSEDKFLRITEGSPIRRIGYLRWLRNISVALGNAPYQDKIILALQKRFGLSDVLDEHLNWAIAQQTAKRNEKEVKIQTSQQKRLVRAITKGLPRDA

SEQ ID NO: 80936 - protein, 379 aa, Shigella sp.
  misc_feature (1)..(379): tr|A0A1E3N4N9|A0A1E3N4N9_9ENTR Epoxyqueuosine reductase OS=Shigella sp. FC569 OX=1892897 GN=queG PE=3 SV=1
MSEPLDLNQLAQKIKQWGLELGFQQVGITDTDLSASEPKLQAWLDKQYHGEMDWMARHGMLRARPHELLPSTLRVISVRMNYLPANAAFASTLKNPKLGYVSRYALGRDYHKLLRNRLKKLGEMIQQHCVSLNFRPFVDSAPILERQLAEKAGLGWTGKHSLILNREAGSFFFLGELLVDIPLPVDQPVEKGCGKCVACMTICPTGAIVEPYTVDARRCISYLTIELEGAIPEELRPLMGNRIYGCDDCQLICPWNRYSQLTTEDDFSPRKPLHAPELIELFAWSEEQFLKVTEGSAIRRIGHLRWLRNIAVALGNAPWDETILTALESRKGEHPLLDEHIAWAIAQQIERRNACVVEVQLPKKQRLVRVIEKGLPRDA

SEQ ID NO: 80937 - protein, 350 aa, Shimia abyssi
  misc_feature (1)..(350): tr|A0A2P8F4F7|A0A2P8F4F7_9RHOB Epoxyqueuosine reductase OS=Shimia abyssi OX=1662395 GN=queG PE=3 SV=1
MTAELKDRLVSEAKAIGFDACYVCRPDSVNHVRDGLNGFLARGYHGQMGWLEQRKAWRSDPSALWPEARSVIMLGESYTPQHDPTEVHRQPDRGAISVYAQNKDYHDMVKKRLKRLARWLIAEGGGEVKVFVDTAPVPEKPLGQAAGLGWQGKHTNLVSRELGSWFFIGSVFSTLKFDTDPPEIDHCGSCRACLDACPTNAFPAPNKIDARRCISYLTIEHHGPVDEDLRPLMGNRIYGCDDCLAACPWNKFAVEASEMRYAARDELMAPKLAELATLDDSAFRTMFSGSPIKRIKRDRFVRNVLYAIGNSGDADLKPVAQRLCEDPDATVADAARWAVTRLQDVASGHE

SEQ ID NO: 80938 - protein, 350 aa, Shimia aestuarii
  misc_feature (1)..(350): tr|A0A1I4JXN5|A0A1I4JXN5_9RHOB Epoxyqueuosine reductase OS=Shimia aestuarii OX=254406 GN=queG PE=3 SV=1
MSAELKARLIEEARAIGFDMARICRPNAVGHVGAGLARFLDKGYHGQMGWLAERTHWRSDPSVLWTEARSVIVLAESYTPEHDPTEVHGMPDRGAISVYAQNKDYHDIVKKRLKRLARWLISEAGGEVKVFVDTAPVPEKPLGQAAGLGWQGKHTNLVSRELGSWFFIGSVFTTLDLPVDAAEVDHCGSCRACLDACPTGAFPAPHQIDARRCISYLTIEHHGPVDEALRPLLGNRIYGCDDCLAACPWNKFAQEAREMRYAAREDLVAPKLAELATMDDATFRAHFSGSPIKRIKRDRFVRNVLYAIGNSGECALIPVAQKLCDDADATVADAARWAVTRLQDVANRLD

SEQ ID NO: 80939 - protein, 347 aa, Shimia haliotis
  misc_feature (1)..(347): tr|A0A1I4EE30|A0A1I4EE30_9RHOB Epoxyqueuosine reductase OS=Shimia haliotis OX=1280847 GN=queG PE=3 SV=1
MDDLKAQLVAEAKAIGFDMAQVCRPDAVGHVAAGLAGFLDKDYHGSMGWLADRTHWRSDPSVLWPEARSVIVLGESYTPEHDPLAVHGMPDRGAISVYAQNRDYHDTVKKRLKRLARWLIAQTGDATQVKVFVDTAPVPEKPLGQAAGLGWQGKHTNLVSRDLGSWFFIGSVFTTIELPPDAAEIDNCGSCRACLDACPTGAFPAPHQIDARRCISYLTIEHHGPVDEDLRALMGNRIYGCDDCLGVCPWNKFAQEAREVKYHARAELVAPKLAELASFDDAGFRTHFSGSPIKRIGRNRFVRNVLYAIGNSGDLALLETTLALCDDPDDVVSDAARWAVGRLRDTG

SEQ ID NO: 80940 - protein, 352 aa, Shimia isoporae
  misc_feature (1)..(352): tr|A0A4R1N4D1|A0A4R1N4D1_9RHOB Epoxyqueuosine reductase OS=Shimia isoporae OX=647720 GN=queG PE=3 SV=1
MTDDLKTRLVAEAKAIGFDMARICRPDAVPQVAAGLAGFLDKDYHGTMGWLAERTHWRSDPAVLWPEARSVIVLGESYTPEHDPLAVHRKPDRGAISVYAQNKDYHDTVKKRLKRLARWLIAQTGDDTQVKVFVDTAPVPEKPLGQAAGLGWQGKHTNLVSRDLGSWFFIGSVFTTVELETDPAEIDHCGSCRACLDACPTNAFPAPHQIDARRCISYLTIEHHGPVEEDLRKLMGNRIYGCDDCLGVCPWNKFAQEAREVKYHARDELKAPRLAELATLDDAGFRLHFSGSPIKRIGRNRFVRNVLYAIGNSGDQALLETALALCDDPDDVVRDAAQWAVSRLEDVANGLA

SEQ ID NO: 80941 - protein, 351 aa, Shimia marina
  misc_feature (1)..(351): tr|A0A0P1ELH6|A0A0P1ELH6_9RHOB Epoxyqueuosine reductase OS=Shimia marina OX=321267 GN=queG PE=3 SV=1
MSADLTARMKAEAREMGFDLARVCRPDAVRHVGADLAGFLAKGYHGQMKWLGERTHWRADPSVLWPEARSVIMLGESYTPKHDPTAVHAHPERAAISVYAQNKDYHDTVKKRLKRLARWLIAQTDPEVQVKVFVDTAPVPEKPLGQAAGLGWQGKHTNLVSRDLGSWFFIGSVFTTAELDIDAAEVDHCGSCRACLEACPTGAFPAPHKIDARRCISYLTIESHGPVDPALRPLLGNRIYGCDDCLAACPWNKFAQGAREMKYHAREELKAPKLAELVGLDDPGFRSFFSGSPIKRIGRNRFVRNVLYAIGNSGAPELEAAAVPLCEDPDETVADAARWAVARLRGESGTP

SEQ ID NO: 80942 - protein, 347 aa, Shimia sp.
  misc_feature (1)..(347): tr|A0A0N0DA28|A0A0N0DA28_9RHOB Epoxyqueuosine reductase OS=Shimia sp. SK013 OX=1389006 GN=queG PE=3 SV=1
MSDDLKARLVAEAQAIGFDMAQVCRPDAVPQVAAGLAGFLAKDYHGTMGWLADRTHWRSDPAALWPEARSVIVLGESYTPQHDPLAVHQMPDRGAISVYAQNRDYHDTVKKRLKRLARWLIAETGDATQVKVFVDTAPVPEKPLGQASGLGWQGKHTNLVSRDLGSWFFIGSVFTTVEIETDPAEIDHCGSCRACLDACPTGAFPSPHQIDARRCISYLTIEHHGPVAEELRALMGNRIYGCDDCLGVCPWNKFAQEAREVKYHARTELVAPKLADLAAFDDAGFRAHFSGSPIKRIGRDRFVRNVLYAIGNSGDFALLETALGLCEDTDPVVADAARWAVARLRDE

SEQ ID NO: 80943 - protein, 379 aa, Shimwellia blattae
  misc_feature (1)..(379): tr|I2BDN2|I2BDN2_SHIBC Epoxyqueuosine reductase OS=Shim wellia blattae (strain ATCC 29907 / DSM 4481 / JCM 1650 / NBRC 105725 / CDC 9005-74) OX=630626 GN=yjeS PE=3 SV =1
MSQPLDYYQLAQDIKRWGAELGFQQVGITDTDLSASEAQLQAWLDNQYHGEMAWMARHGMLRARPHELHPGTLRVITVRMNYLPAKARFAAVLKDPHKGYVSRYALGRDYHKLMRNRLKQLGERLQQHCVALNFRPFVDSAPVLERPLAARAGLGWTGKHSLILNQEAGSFFFLGELLVDLPLPVDTPAQEQCGKCVACMTICPTGAIVAPYTVDARRCISYLTIELEGAIPEEFRPLIGNRIYGCDDCQLICPWNRFSQLTDEADFAPRQPLHAPQLTELFAWSEAQFLHITQGSAIRRIGHLRWLRNIAVAMGNAPWDEAIFNALQQRLGEDPMLDEHIHWALARQRAHREALGTEVQPAQKQRLVRVVEKGLPRDA

SEQ ID NO: 80944 - protein, 381 aa, Shinella granuli
  misc_feature (1)..(381): tr|A0A4R2CYR5|A0A4R2CYR5_9RHIZ Epoxyqueuosine reductase OS=Shinella granuli OX=323621 GN=queG PE=3 SV=1
MSGDDRIRRRLTDFLKAEAADKGFDLCRITGPDSIPEAPPRLADFLAAGYHGTMDWMAETEARRADPRVLWSEVRSVVLFGMNYGPAHDPRAVLSMPDRAAISVYAQNRDYHDLIKGKLKEVATRFAARGGVDVKVFVDTAPVMEKPLAAAAGLGWQGKHTNLVSRTHGSWLFLGSLFTTADLVRDEPERDHCGSCRACLDACPTDAFPAPYKLDARRCISYLTIEHKGPIDPGIREKIGNRIYGCDDCLAACPWNKFAAAASQMKLIAREELKAPAIADLLTFDDAGFRAHFSGSPVKRIGRDRFVRNVLIAAGNSGDRSLIAPCLHLADDASPVVRGMAAWALSRLMAASEFGKFAAGRAHDADADVRAEYERAKADCR

SEQ ID NO: 80945 - protein, 381 aa, Shinella sp.
  misc_feature (1)..(381): tr|A0A2W6Y6W0|A0A2W6Y6W0_9RHIZ tRNA epoxyqueuosine(34) reductase QueG OS=Shinella sp. OX=1870904 GN=queG PE=4 SV=1
MPAPAPDHRNDRRRAGLTAFMKSEAAAQGFSVCRITLPDSIPEAPERLATFIAAGRHGTMAWMEETQARRADPRVLWSEVRSIVMFGLNYGPDEDPRHLQARSDRGAISVYARNRDYHDVMKGRLKEVATRFAARAGADVKVFVDTAPVMEKPLAAAAGLGWQGKHTNLVSREFGSWLFLGSLFTSAELDIDAPEIDHCGSCRACLGACPTDAFPAPYQIDARRCISYLTIEHKGVIAKELRPAFGNRIYGCDDCLSACPWNKFAQAASEMKFKAREDLLEPELRFLLSLDDATFRTFFSGSPVKRIGRNRFIRNCLIAAGNSGSTEFTDICLALMDDEAAEVRGMAVWALSRLLPAETFRTLRDTRLKIEEDADVRQEWN

SEQ ID NO: 80946 - protein, 380 aa, Shinella sp.
  misc_feature (1)..(380): tr|A0A372NI57|A0A372NI57_9RHIZ Epoxyqueuosine reductase OS=Shinella sp. WSJ-2 OX=2303749 GN=queG PE=3 SV=1
MSGDEKIRRRLTDFIKAEAADKGFDLCRITGPDSIPQAPARLADFLSNGYHGTMEWMAETQARRADPRVLWSDVRSIVLFAMNYGPEHDPRAVLEKPDRAAISVYAQNRDYHDIIKGRLKELATRFAARGGADVKVFVDTAPVMEKPLAAAAGLGWQGKHTNLVSRTHGSWLFLGSLFTTADLYKDEPERDHCGSCRACLDACPTDAFPAPYKIDARRCISYLTIEHKGTIDPAIREKIGNRIYGCDDCLAACPWNKFAAAASEMKLVARDDLKTPALADLLTFDDPGFRAHFSGSPVKRIGRDRFVRNVLIAAGNSGDRGLIAQCINLADDASPVVRGMAAWALSRLMDASEFARFAAGRTDDADADVRAEYERARATP

SEQ ID NO: 80947 - protein, 306 aa, Siansivirga zeaxanthinifaciens
  misc_feature (1)..(306): tr|A0A0C5W7P0|A0A0C5W7P0_9FLAO Epoxyqueuosine reductase OS=Siansivirga zeaxanthinifaciens CC-SAMT-1 OX=1454006 GN=queG PE=3 SV=1
MYNKQTNTERIKTEAKRLGFLSCGISKAGFLEEEAPRLERWLNKNMHGQMHYMENHFDKRLDPTKLVEDSKSVISLLINYFPEDTQTDASFKISKYAYGTDYHYVIKDKLKQLLHFIQENIGDVYGRAFVDSAPVLDKAWASKSGLGWIGKNSNLLTQQVGSFYFIAELIVDLDLEYDLPTTNHCGTCAACIDACPTQAITEPYVVDGSKCISYFTIELKENIPTEFKDKMDDWMFGCDVCQDVCPWNRFSKPHKEPLFNPHPELLSMTKKDWEDITEDVFKKVFKDSAVKRTKFSGLKRNIDFLK

SEQ ID NO: 80948 - protein, 311 aa, Siccationidurans arizonensis
  misc_feature (1)..(311): tr|A0A1I5WI92|A0A1I5WI92_9BACT Epoxyqueuosine reductase OS=Siccationidurans arizonensis OX=1227077 GN=queG PE= 3 SV=1
MLPQSEWAPFIKRRAAELGFMACGISKAEFLEEEAPRLETWLTKRMNGRMGYMENHFDKRLDPRLLVDGAKSVISLLLNYYPAPEDQQPDDTLKISKYAYGRDYHFVIKDKLKTLLADMEAEIGHIGGRCFVDSAPVLDKAWAKKSGLGWVGKNSNLITPGTGSFYFIAELIVDVELPADGPIRDYCGTCTKCLDACPTQAITEPYVVDGSKCISYFTIELKDQIPTEVGGQFGNWVFGCDICQDVCPWNRFSRPHTEPQFNPAPGLKDLTPGDWREITHELFTELFRQSAVKRTGYEGLKRNIKFVLGSD

SEQ ID NO: 80949 - protein, 384 aa, Siccibacter turicensis
  misc_feature (1)..(384): tr|A0A2P8VNI6|A0A2P8VNI6_9ENTR Epoxyqueuosine reductase OS=Siccibacter turicensis OX=357233 GN=queG PE=3 SV=1
MLWSVMSQPLDLNQLAQNIKQWGAELGFQQVGITDTDLSASEPKLQAWLDKQYHGEMEWMARHGMMRARPHELLPGTLRVISVRMNYLPANAAFASTLKNPRLGYVSRYALGRDYHKLLRNRLKKLGETIQQHCATLNFRPFVDSAPILERPLAEKAGLGWTGKHSLILSRDAGSFFFLGELLIDLPLPIDSPVEEGCGRCVACMTICPTGAIVEPYTVDARRCISYLTIELEGAIPEEFRPLIGNRIYGCDDCQLICPWNRFSQLTDEADFSPRQALHAPELVTLFAWSEAQFLKVTEGSAIRRIGHLRWLRNIAVALGNAPWDEAILAALAQRKGEHPLLDEHIEWAMAQQIAKRNANAIEVQLPQKKRLVRVVEKGLPRDA

SEQ ID NO: 80950 - protein, 391 aa, Siculibacillus lacustris
  misc_feature (1)..(391): tr|A0A4Q9VVX7|A0A4Q9VVX7_9RHIZ Epoxyqueuosine reductase OS=Siculibacillus lacustris OX=1549641 GN=queG PE=3 SV =1
MTATAPADRAQLRRFLDAEARRLGFSGVGVTGPDAIDHAAVDLAGFLAAGHHATMTWMAETAARRARPRALWDEVRSVIVLAFDYGPTSDPLEGRGDRTRGEISVYARNRDYHDVIKGRLKELADRLAGEARRRGLGSRAKVFVDTAPVMEKPLAAAAGLAWQGKNTLAVSRTIGGWFFLGVIYTTLELDADAPAADHCGSCRRCLDVCPTDAFPAPHRLDARRCLSYLTIEHDGPIPTEFRAAMGDRIYGCDDCLAVCPWNKFAAVAREAKLVARPDLVRPALADLVGLDDAGFRAHFAGSPIKRIGRARFVRNVLIAIGNSGAAELAATISPRLGDQSAMVRGAAVWAAGRLMSGSALAAAFRGKGAAERDPAVAAEWRALGFTPPAEA

SEQ ID NO: 80951 - protein, 367 aa, Sideroxydans lithotrophicus
  misc_feature (1)..(367): tr|D5CR32|D5CR32_SIDLE Epoxyqueuosine reductase OS=Side roxydans lithotrophicus (strain ES-1) OX=580332 GN=queG PE=3 SV=1
MLAYTTSAMIRFMQNGTPQTDYDALAARIKAWGNALGFQAVGISDTHLDVAEAHLLQWLADGHHGAMDYMAKHGTRRARPAELVPGTLRVISVRMNYYPENAKDTHEVLADGGSAFVSRYALGRDYHKVLRNRLEKLAQQLRDETGCQCRVFTDSAPVLEVELAQKARLGWRGKHTLLLSREQGSWFFLGEIFVDLPLPVEAEQENHCGTCSACLDICPTQAITAPYRLDARRCISYLTIELKGSIPTELRPLIGNRIYGCDDCQLVCPWNRFAQKTMEPDFAVRNGLDNATLAELFAWDEPTFHARLAGSAIHRIGYEQWLRNIAVALGNAYATPEVMAALQTRSQHPSSLVREHVEWALQRHSKG

SEQ ID NO: 80952 - protein, 78 aa, Sideroxydans sp.
  misc_feature (1)..(78): tr|A0A1G3IR67|A0A1G3IR67_9PROT Uncharacterized protein OS=Sideroxydans sp. RIFOXYB12_FULL_59_6 OX=1802155 GN=A 3J87_06790 PE=4 SV=1
MSLIELFVWDEGVFKEKLAGSAIYRIGHEQWLRNIAVALGNAPVSLEIIEALRARSAHVSEMVREHVAWALARHGVAV

SEQ ID NO: 80953 - protein, 347 aa, Silicibacter sp.
  misc_feature (1)..(347): tr|C9D124|C9D124_9RHOB Epoxyqueuosine reductase OS=Sili cibacter sp. TrichCH4B OX=644076 GN=queG PE=3 SV=1
MKAAGDIKARLVAQARAEGFVSTRICRPWDVPEVPERLRAFLDAGYHGQMAWMAERVNWRENPAALWPEARSVIMLAESYTPDENPMAVVGLPDRAAISVYARGKDYHDLVKKRLKRLARWLIAEAGDEAEVKVFVDTAPVPEKALGQAAGLGWQGKHTNLVSRDWGNWAFLGSIFTTLDLPIDPVEPDHCGSCRACLTACPTDAFPAPYQLDARRCISYLTIEHKGPIEEELRAKLGNRIYGCDDCLAACPWNKFAVAASDMRYAAREGTVAPPLAELSQLNDAAFRERFSGSPIKRIGRDRFVRNVLYAIGNSREVKLRPYATQLCDDPDPTVADAARWAVMRLS

SEQ ID NO: 80954 - protein, 350 aa, Silicimonas algicola
  misc_feature (1)..(350): tr|A0A316GJ65|A0A316GJ65_9RHOB Epoxyqueuosine reductase OS=Silicimonas algicola OX=1826607 GN=queG PE=3 SV=1
MDADALKARLVAEAVDAGFAEARICRPDAVPEVAKRLAAFLAEGRHGQMGWLAERAHWRGDPSALWPEARSVVMLAEPYTPDHDPLEDLAATDRGVISVYAQGRDYHDVVKKRLKRVARWLVAEAGCEVKVFVDTAPVPEKALGQAAGLGWQGKHTNLLSRRLGNWFFLGAIFTTADLPPDPPEDEHCGTCRKCLDICPTDAFPAPFQLDARRCISYLTIEHEGPVDPALRPGLGNRIYGCDDCLAVCPWNKFAVAGRDARYAARAETDLPPLAELARLDDAAFRARFSGSPIKRSGRNRFVRNVGYAIGNSGDPSLRPVAEALARDADPAVADAGQWALSRLAAFGPRW

SEQ ID NO: 80955 - protein, 375 aa, Silvanigrella aquatica
  misc_feature (1)..(375): tr|A0A1L4D3V4|A0A1L4D3V4_9PROT tRNA epoxyqueuosine(34) reductase QueG OS=Silvanigrella aquatica OX=1915309 GN= AXG55_13740 PE=4 SV=1
MKLKKEILDLLNQNGILSAGVFSFEKNHSLILEKDIPAFQKWLSENAHAKMTFLENNIEARKDPSLILPNVKNALIFLFPYAAGHRVRNKKKENAHNNIQLNHNSESILAKKLISKYVYGKDYHKVLKKQLNLIATKLQKQIGNPFQFRAVVDSIPFFDRAYAREAALGFIGKNTMLIRPGMGSFFFIATLLTDASIQDICDLNLENKNAILNLDCGDCTKCLDACPTQAFKKPYFLDANRCLSYLSIEHRDIVDNEFIPHFANTIYGCDICQEVCPYNLVTSDFKILKEFSNYHNPFQIITAKDMALMDTDQYEKWFGGTAATRAKYQGLVRNALYHLHSVSDSSLPAILDKLCASEYELILKTVMQLRVLQKA

SEQ ID NO: 80956 - protein, 370 aa, Silvanigrellales bacterium
  misc_feature (1)..(370): tr|A0A4V0P2U7|A0A4V0P2U7_9PROT tRNA epoxyqueuosine(34) reductase QueG OS=Silvanigrellales bacterium RF1110005 OX=2493639 GN=queG PE=4 SV=1
MIIKPDIIELFKKCDAHVSGVFSFEDKKFLSIFEKDLRAFEQWISENSHAGMKFLENNIDARKDPSFILQESKTALIFLFPYSLGHRVRNRKTNAKAIKIKKNSLIGEKLISKYVYGKDYHKVLKKNLEKIAHALQKHLNINFAFRPVIDSIPFFDRAHAREAHLGFIGKNTMLIRPGMGSFFFIATLLIDLPYSEIVENNLKNKLNPIANLDCGDCQKCLDACPTSALTKPYYLDANKCISYLTIEHRDIVPKEYLAHFAKTIYGCDICQDVCPYNLVTNDFGILKEFSEFNKNFLNITMHNIALMTPFEYEKWFGGTAATRAKYQGLIRNALYHLYAVQDENMENILRHHENSEFKLISETVKQIRNF

SEQ ID NO: 80957 - protein, 382 aa, Simiduia agarivorans
  misc_feature (1)..(382): tr|K4KMG4|K4KMG4_SIMAS Epoxyqueuosine reductase OS=Simi duia agarivorans (strain DSM 21679 / JCM 13881 / BCRC 1 7597 / SA1) OX=1117647 GN=queG PE=3 SV=1
MNNDQAQQPLLDTLALRIKAEGQALGFQQIGITDTDLRAEEARLAGWIDRGYHAGMAWMTHHGNMRTRPEELLPGTLRVISARMDYLPGDTNLIAALKDGESAYISRYALGRDYHRLVRKRLSQLADFIETEAAALGLPLPDGFRHRAFVDSAPVSEKPLAAKAGLGWQGKHTLIMNSDAGSWFFLGEVFTALPLPVDQSHQPDRCGDCTACLKVCPTDAFPAPYQLDAGRCISYLTIEHKGPIPEEFRDPIGNRVFGCDDCQAICPWNKYARYTQEMDFLPRHQLDSAKLIDLFQWSEQTFLDRTAGSPLRRTGFENWQRNLAVGLGNAPQSAEIIRILSQARTQVSDLVAEHVDWALVQQRNPDRKRKRKIKANKSQRQP

SEQ ID NO: 80958 - protein, 365 aa, Simplicispira metamorpha
  misc_feature (1)..(365): tr|A0A4R2NFN3|A0A4R2NFN3_9BURK Epoxyqueuosine reductase OS=Simplicispira metamorpha OX=80881 GN=queG PE=3 SV=1
MVVCSSQLVPQIQQWARELGFSQIGVAGVDLSDAEPGLVQWLAQGFHGDMAYMAAHGLKRARPAELVPGTVSVITARMDYLPRATPDGWQALEFARLHDPAQGAVSLYARGRDYHKVLRTRLQKLAERIAQAVGPLGHRAFTDSAPVLEAELASRSGQGWRGKHTLVLNRDAGSMFFLGEIYIDLALPASAPVSAHCGQCRACLDVCPTQAIVAPYRLDARRCISYLTIEHAGPIPLDLRPLLGNRIYGCDDCQLACPWNKFAQTSTLPDFDARAGLSGQQLVHLFAWDEATFLRLTEGGPIRRIGHERWLRNVAVALGNALRAAGEAGAAGADAGALRAALQSRAQHDSALVREHVAWALAQAH

SEQ ID NO: 80959 - protein, 334 aa, Simplicispira sp.
  misc_feature (1)..(334): tr|A0A2U1C5P7|A0A2U1C5P7_9BURK Epoxyqueuosine reductase OS=Simplicispira sp. 125 OX=2135643 GN=C8D04_1373 PE=4 SV=1
MDLSSAEHGLMQWLEQGFHGEMHYMAAHGLKRARPAELVPGTVSVITARMDYLPSDTPIDMPPGWQAVEFARLQRPSEGIVSVYARGRDYHKVLRARLQKLCDRIAQAVGPLGHRVFTDSAPVLEAELARRSGQGWRGKHTLVLNREGGSMFFLGEIYVDMPLEPSEPVTAHCGSCQACIDVCPTQAIIAPYRLDARRCISYLTIEHAGPIPLEMRPLLANRIYGCDDCQLVCPWNKYAQPSQLPDFDARAGLTGQQLVHFFAWDEATFLRLTEGGPIRRIGHERWLRNVAIALGNALRATGDAGVRAALQARAEDASDLVREHVAWALQVKSN

SEQ ID NO: 80960 - protein, 348 aa, Simplicispira sp.
  misc_feature (1)..(348): tr|A0A398CKA4|A0A398CKA4_9BURK Epoxyqueuosine reductase OS=Simplicispira sp. NY-02 OX=2315688 GN=queG PE=3 SV= 1
MTQWARELGFSQIGVAGVDLSSAEPGLQGWLAQGFHGDMHYMEAHGMKRARPAELVPGTVSVITVRMDYLPRDTPAGWQAIEFARLADPEQGAVSVYARGRDYHKVLRARLQKLCDRIAEAVGPTGYRVFTDSAPVLEAELAARSGQGWRGKHTLVLNREAGSMAFLGEIYIDMELPESTPVTAHCGSCQACIDVCPTQAIVAPYRLDARRCISYLTIENAGPIPIEFRRPIGNRIYGCDDCQLICPWNKYARTSPLADFDARAGLSGQQLVDLFAWDEATFLRMTEGGPIRRIGHERWLRNVAVALGNALAKTHAPELRAALQSRAAHESALVREHVAWALENENIE

SEQ ID NO: 80961 - protein, 348 aa, Simplicispira suum
  misc_feature (1)..(348): tr|A0A2S0N540|A0A2S0N540_9BURK Epoxyqueuosine reductase OS=Simplicispira suum OX=2109915 GN=queG PE=3 SV=1
MKQWARELGFSQIGVAGVDLSSAEPGLQAWLAQGFHGEMHYMEAHGMRRARPAELVPGTVSVITARMDYLPRDTPDGWQAIEFARLADPQQAAVSVYARGRDYHKVLRARLQKLCDRIAEAVGPTGYRVFTDSAPVLEAELAARSGQGWRGKHTLVLNREAGSMSFLGEIYIDMPLPESEPVSAHCGSCQACIDVCPTQAIIAPYRLDARRCISYLTIEHAGPIPLELRRPIGNRVYGCDDCQLICPWNKYAQASPLADFDARAGLSGEQLVDLLAWDEATFLRTTEGGPIRRIGHERWLRNVAVALGNALAKTHDARLRAALSARAAHESALVREHVQWALENENIE

SEQ ID NO: 80962 - protein, 384 aa, Singulisphaera acidiphila
  misc_feature (1)..(384): tr|L0DEN8|L0DEN8_SINAD Uncharacterized Fe-S protein OS= Singulisphaera acidiphila (strain ATCC BAA-1392 / DSM 1 8658 / VKM B-2454 / MOB10) OX=886293 GN=Sinac_3000 PE=4 SV=1
MEPDLTARLKAEAMRLGFDQVGIAPAVSPSSYPHYLEWLQAGHAAGMGYLERQAEARAHPDRLLEGVRSIVVASFVYGRPAPEPAGPTQGKVARYARAADYHEVFWRRLEALLDWLKVEQPGLRGRAVADTAPLLERDFARLAGLGWVGKNTMLINRRLGSFTLLGGLLLDLELKYDPPHESSHCGTCTRCLDACPTDAFTGPYQLDARRCISYWTIEHKGPIPDDVAGQLDGWVFGCDVCQDVCPWNRKAAAGKEPALDPGEAWAHPNLLDWLTEDPATFSRAIKGTALSRSKRSGLLRNAAAVLGASGEASAVPALSALLDDADPVIRSSVARALGQIASDEAVKALEAHGNDQDPLAHDAIQRALTNSRRDRADSDNPLSV

SEQ ID NO: 80963 - protein, 390 aa, Singulisphaera sp.
  misc_feature (1)..(390): tr|A0A1N6KT55|A0A1N6KT55_9BACT Epoxyqueuosine reductase OS=Singulisphaera sp. GP187 OX=1882752 GN=SAMN05444166 _6138 PE=4 SV=1
MDPDLTARLKSEALRLGFDQVGIAPAVSPPSYPHYLDWLQAGHAAGMGYLERQAEARAHPDRLLEGVRSVVVASFVYGRPESEPAGPTQGKVARYARAADYHEVFWRRLESLLDWLKVEEPAVRGRAVTDTAPLLERDFARRAGLGWVGKNTMLINRRLGSFTLLGALLLDVELNYDPPHESSHCGTCTRCLDACPTDAFTGPYQLDARRCISYWTIEHKGPIPDDVAGQLDGWVFGCDICQDVCPWNRKASAGREPALDPGEEWAHPNLVEWLAEDPATFSKAIKGTALARSKRSGLLRNAASVLGASGEASAVPALAGLLDDPDPVIRSSVARALGQIGSDEAIQALESHLNDQDPLAHDAIQRALIVSGSGQADSTTPECEERPQGL

SEQ ID NO: 80964 - protein, 362 aa, Sinimarinibacterium flocculans
  misc_feature (1)..(362): tr|A0A318EEA0|A0A318EEA0_9GAMM Epoxyqueuosine reductase OS=Sinimarinibacterium flocculans OX=985250 GN=queG PE =3 SV=1
MNTASPPVPSLAEIPALIPQWARELGFSDAGISSCEIDADAGHLRDWLAQSHHGEMAWMARDPQMRHTPARLHPGTVSVISARMPYRPAAADALQVLEDKERAYVSRYALGRDYHKLMRARLRRLAARIEQAVGTHGYRVFADSAPVLEKALARDARLGWIGKHTLLLHRDAGSWFFLGEIYTDLPLPRPDSAPVADSCGRCMACIRICPTQAIVAPYQLDARRCISYLTIEHRGPIPVALRPLIGNRIFGCDDCQLVCPWNRHAQLTTEPDFAPRHGLDDARLIDLFAWTEAQWLQRTEGMALRRAGYGGWLRNIAIALGNAPRSAAVIEALTQKADHEDPVVREHVGWALARQREQTASD

SEQ ID NO: 80965 - protein, 352 aa, Sinimarinibacterium sp.
  misc_feature (1)..(352): tr|A0A4U0GTD1|A0A4U0GTD1_9GAMM Epoxyqueuosine reductase OS=Sinimarinibacterium sp. CAU 1509 OX=2562283 GN=queG PE=3 SV=1
MTPDDLHRLPALIPAWARELGFDTAAIATLELDQDHAHLQQWLAQGRHGEMAYMARNTQMRQHPEALREGTLSVISVRMNYRTATTDAMSILRDGNLGYVSRYALGRDYHRLMRGRLQKLGQRIEQAVGPHGYRVFSDSAPVLEKALARNAGLGWIGKHTLLLNRDAGSWFFLGEIYTDLLLTPTAAAPVRDECGRCSACIKVCPTQAIVAPHQLDARRCISYLTIEHHGSIPLELRPMMGNRIFGCDDCQLVCPWNRYASLSTEPDFAPRHELDTARLIDLFAWSESLWLQRTEGMALRRTGYARWLRNLAVALGNAPSSDAVITSLRTRADHPDPIVQEHVAWALQQHGA

SEQ ID NO: 80966 - protein, 353 aa, Sinirhodobacter ferrireducens
  misc_feature (1)..(353): tr|A0A443LB14|A0A443LB14_9RHOB tRNA epoxyqueuosine(34) reductase QueG OS=Sinirhodobacter ferrireducens OX=1215 032 GN=queG PE=4 SV=1
MKRRLIETARAEGFAKARVTTPDAIPEAMARLETFVAAGMHGQMGWMAERMEWRGNPAALWPEARAVVMLAEPYTPAVDPRAALEHRERGAISVYAQGKDYHDLLKRRLKRVGRWLIEAAKRQGEAAEIKVFVDTAPVMEKPLAQAAGLGWQGKHTNLLARDLGSWFFLGAIFTTLPLPPDAPDVSHCGRCTACLDACPTAAFPAPYRLDARRCISYLTIEHRGPVAPELRPMLGNRIYGCDDCLAACPWNKFAAAAHEIGYAAREAEAPLLAELAELDDAAFRARFAGSPIKRIGRDRMVRNVLYAIGNSGAPTLAAVAARLVDDADPAVADAARWALARVSPLAGPAPRDR

SEQ ID NO: 80967 - protein, 435 aa, Sinirhodobacter hungdaonensis
  misc_feature (1)..(435): tr|A0A443LQT9|A0A443LQT9_9RHOB Epoxyqueuosine reductase OS=Sinirhodobacter hungdaonensis OX=2501515 GN=queG PE =3 SV=1
MRRSSRARPSARFWPISCPACPPPRNTPSSISERARGLCPLTPGIFRAIGSKTAFPSSNCRRYPGGAGAAPPPGITETDVDELKRRLIETARAEGFAKARVTTPDAIPEAMERLETFVAAGMHGQMGWMAERMAWRGNPAALWPKARAVVMLAEPYTPAQDPRAVLEHREHGAISVYAQGKDYHDLLKRRLKRVGRWLIEAAKRQGETAEIKVFVDTAPVMEKPLAQAAGLGWQGKHTNLLARDLGSWFFLGAIFTTLPLAPDAPEPSHCGRCTACLDACPTAAFPAPYRLDARRCISYLTIEHRGPVDPELRPMLGNRIYGCDDCLAACPWNKFAAEAHEIGYAAREAGAPQLAELATLDDAAFRARFAGSPIKRIGRDRMVRNVLYAIGNSGAPALAAVAARLVDDPDPAVAEAARWALARLSPLAGAAPRDR

SEQ ID NO: 80968 - protein, 353 aa, Sinirhodobacter populi
  misc_feature (1)..(353): tr|A0A443KGZ9|A0A443KGZ9_9RHOB Epoxyqueuosine reductase OS=Sinirhodobacter populi OX=2306993 GN=queG PE=3 SV=1
MRADGTPVEELKALLTDRALAEGFSALRVTRPDAIPEAMARLRAFLDAGYHGDMGWMAERVEWRGDPAALWPAAKSVIMLAEVYTPDYDPRAVTRMPDRGAVSVYAQGKDYHDLVKRRLKRVGRWLLEEAGRRGLPGEIKVFVDTAPVMEKPLAQAAGLGWQGKHTNLLSRDLGNWFFLGAIFTTLELPADTPEVSHCGSCRACLDACPTNAFPAPYQLDARRCISYLTIEHKGPVDPELRPLLGNRIYGCDDCLAACPWNKFAAEAREIGYAARVGAPPLAELAGLDDAAFRARFAGSPIKRIGRGRMVRNVAYAIGNSADPGLAPALRPLTADPDPTVAEAAQWALVRLGC

SEQ ID NO: 80969 - protein, 353 aa, Sinirhodobacter populi
  misc_feature (1)..(353): tr|A0A443JNY2|A0A443JNY2_9RHOB Epoxyqueuosine reductase OS=Sinirhodobacter populi OX=2306993 GN=queG PE=3 SV=1
MRADGTPVEALKALLTDRALAEGFSALRVTRPDAIPEAMARLRAFLDAGYHGDMGWMAERVEWRGDPAALWPAAKSVIMLAEVYTPGYDPRAVTRMPDRGAVSVYAQGKDYHDLVKRRLKRVGRWLLEEAGRRGLPGEIKVFVDTAPVMEKPLAQAAGLGWQGKHTNLLSRDLGNWFFLGAIFTTLELPADTPEVSHCGSCRACLDACPTKAFPAPYRLDARRCISYLTIEHKGPVDPELRSLLGNRIYGCDDCLAACPWNKFAAEAREIGYAARVGAPPLAELAGLDDAAFRARFAGSPIKRIGRNRMMRNVAYAIGNSADPGLAPALRPLTADPDPTVAEAAQWALVRLGR

SEQ ID NO: 80970 - protein, 375 aa, Sinobaca qinghaiensis
  misc_feature (1)..(375): tr|A0A419V483|A0A419V483_9BACL Epoxyqueuosine reductase OS=Sinobaca qinghaiensis OX=342944 GN=queG PE=3 SV=1
MPEETLKEKIISYAKEIGIDKVGFASADPFLTLKDRLITQQELQYQSGFEEKDIEKRTHPSLLMEEGRTIISIALAYPSKLKNAPKSTKGDRRGIFCRASWGEDYHNVLRKRLSRLEEYVKELDPQAQCRSMVDTGELSDRAVAERAGIGWSAKNCAVITPEFGSYVYLGEMLTTLAIEPDVPLTDQCGSCNICVDACPTDALIQGGQLDANKCIAFLTQTKDMLPERYRKKIGNRIYGCDTCQQVCPKNKGVDFHHQKEFEPDPETVKPNLNSLLHMSNKEFKERFGSIAGSWRGKKPIQRNAVIALGNFKEESAVPELNELIKNDPRPVIRSSCAWTLGQIGTHEAIVGLEEAYMLEQESEVLAELETALGLQ

SEQ ID NO: 80971 - protein, 356 aa, Sinobacteraceae bacterium
  misc_feature (1)..(356): tr|A0A5C7L7U1|A0A5C7L7U1_9GAMM Epoxyqueuosine reductase OS=Sinobacteraceae bacterium OX=1969813 GN=queG PE=3 S V=1
MIPSAPSLEALPQLIKAWALELGFADAGIASLQLGEDLDHLRRWLDEGMHGGMAFMRRDLHLREHPAQLRPGTLSVICARLDYRPHAESALRVLEQPDRAYISRYALGRDYHRLMRARLLKLGKRIEEAIGPHGYRVLTDSAPALEKALARNAHLGWIGKNTLLLNRHAGSWFFLGEIYTDLALPPDPEPAVENRCGSCVACIKICPTQAIVGPYRLDARRCISYLTIEHHGSIPEELRPMIGNRIFGCDDCQLVCPWNRYAGLTQEPDFAPRHRLDSAKLIELFAWDETEWLAKTEGMALRRAGYLRWLRNLAVALGNSPSSPETIAALQARAHHTDDTVREHVQWALRRLVQTP

SEQ ID NO: 80972 - protein, 395 aa, Sinobacteraceae bacterium
  misc_feature (1)..(395): tr|A0A2T5MET1|A0A2T5MET1_9GAMM Epoxyqueuosine reductase OS=Sinobacteraceae bacterium GT1R17 OX=2029166 GN=queG PE=3 SV=1
MSSYSAFHGGTIQLTNLRGGIQFAGFCVHSNSIRAAIHTVTGSTPIFDDLPVSIQRWARELGFADAGIAELQLGEDLDHLRHWLDQGMHGGMEFMQRNLDLREHPAQLRPGTVSVISARLDYRPHAEAADRVLKDGERAYISRYALGRDYHRLMRARLLKLGKKIEEAIGPHGYRVFSDSAPALEKALARNARLGWIGKNTLLLNKDAGSWFFLGEIYTDLALPVSTAEQVENRCGKCSACIKICPTQAFIGPYKLDARRCISYLTIEHHGAIPLELRPMMGNRIFGCDDCQLVCPWNRYAKLTNEPDFAPRHSLDSVKLTELFSWSEEQWLSRTEGMALRRAGYNRWLRNIAVALGNAPKNVDVVRALQTRAEFPDEIVREHVEWALQQQTQAA

SEQ ID NO: 80973 - protein, 311 aa, Sinomicrobium oceani
  misc_feature (1)..(311): tr|A0A1K1R971|A0A1K1R971_9FLAO Epoxyqueuosine reductase OS=Sinomicrobium oceani OX=1150368 GN=queG PE=3 SV=1
MIDVKRRYTEYIKTEAKRLGFMACGISKAEFLESEAPRLERWLEQNMHGEMGYMENHFDKRLDPRLLVDGAQSVISLTLNYFPEKVQEDTDSPKISKYAYGKDYHFVIKEKLKELLGSIQEHIGEVGGRAFVDSAPVLDRAWATRSGLGWIGKNSNLITKQVGSFFFIAELIIDLELEYDHPTATDHCGSCTACIDACPTQAIVEPMVVDGSKCISYFTIELKGNIPSEFEGKFDDWMFGCDVCQDVCPWNRFSKPHREPLLDPHPDLLGMNKKDWEDITEDVFREVFRKSAVKRTKYEGLKRNIKFLGKY

SEQ ID NO: 80974 - protein, 311 aa, Sinomicrobium pectinilyticum
  misc_feature (1)..(311): tr|A0A3N0EZZ5|A0A3N0EZZ5_9FLAO Epoxyqueuosine reductase OS=Sinomicrobium pectinilyticum OX=1084421 GN=queG PE= 3 SV=1
MDVKHRYTERIKAEAKRLGFMSCGISKAEFLEEEAPRLEQWLKQNMHGEMGYMENHFDKRLDPRLLVEGAKSVISLTLNYFPEEVQSQDTDSPKISKYAYGRDYHFVIKDKLKQLLEFIGEEIGEVGGRAFVDSAPVLDRAWATRSGLGWIGKNSNLITKKVGSFFFIAELIVDLELEYDNPVTTDHCGSCTACIDACPTQAIVEPMVVDGSKCISYFTIELKGNIPAEFDGKLDDWMFGCDVCQDVCPWNRFSKPHNEPLFDPHPDLLKMSKKDWEEITEEVFREVFRKSAVKRTKYEGLKRNIEFLKKS

SEQ ID NO: 80975 - protein, 312 aa, Sinomicrobium sp.
  misc_feature (1)..(312): tr|A0A329MW45|A0A329MW45_9FLAO Epoxyqueuosine reductase OS=Sinomicrobium sp. N-1-3-6 OX=2219864 GN=queG PE=3 S V=1
MIRSKTEKYTQLIKEEALRLGFMSCGISRAEFLEEEAPRLEGWLRQQMHGDMAYMEHYFDKRLDPRLLVEGARSVISLTLNYFPENVQKDPDSPRISKYAYGKDYHFVIKEKLKHLLEFIREEVGEVGGRAFVDSAPVLDRAWATRAGLGWIGKNSNLITKKVGSFFFIAELIIDLELEYDHPVTTDHCGSCTACLDACPTQAITAPMVVDGSKCISYFTIELKGNLPAEFEGKFDDWMFGCDVCQDVCPWNRFSKPHSEPLFDPHPDLLEMSRADWEDITEDIFRDIFRKSAVKRTKFEGLKRNIEFLKKD

SEQ ID NO: 80976 - protein, 391 aa, Sinorhizobium americanum
  misc_feature (1)..(391): tr|A0A1L3LHQ6|A0A1L3LHQ6_9RHIZ Epoxyqueuosine reductase OS=Sinorhizobium americanum OX=194963 GN=queG PE=3 SV= 1
MVPGDAAKAENQGRKRRTLTAFLKEEAAAKGFELCRITRPDAIPQAPARLRQFLAAGCHGTMEWLSETAERRADPRVLWGEVRSIVLFGMNYGPDTDPLEILAKRDRGAISVYAQNRDYHDVVKGRLKEIATRFAARAGEDVKVFVDTAPVMEKPLAEKAGLGWQGKHTNLVSREFGSWLFLGSLFTTADLDIDDLERDHCGSCRACLDACPTRAFPAPYQIDARRCISYLTIEHKGPIDSELRPLIGNRIYGCDDCLAVCPWNKFARSASEMKLKAREDLREPELTALLTLDDAAFRSLFSGSPVKRIGRDRFVRNVLIAAGNSGEERLVPACKALARDASPTVRAMAVWALSRLMAADELAAFAMECGQETDDEVLSEWQMAGVSRCMS

SEQ ID NO: 80977 - protein, 391 aa, Sinorhizobium americanum
  misc_feature (1)..(391): tr|A0A1L3KZ55|A0A1L3KZ55_9RHIZ Epoxyqueuosine reductase OS=Sinorhizobium americanum CCGM7 OX=1408224 GN=queG P E=3 SV=1
MVPGDAAKAENQGRKRRTLTAFLKEEAAAKGFELCRITRPDAIPQAPARLRQFLAAGCHGTMEWLSETAERRADPRVLWGEVRSIVLFGMNYGPDTDPLEILAKRDRGAISVYAQNRDYHDVVKGRLKEIATRFAARAGEDVKVFVDTAPVMEKPLAEKAGLGWQGKHTNLVSREFGSWLFLGSLFTTADLDIDDLERDHCGSCRACLDACPTRAFPAPYQIDARRCISYLTIEHKGPIDSELRPLIGNRIYGCDDCLAVCPWNKFARSASEMKLKAREDLREPELTSLLTLDDAAFRSLFSGSPVKRIGRDRFVRNVLIAAGNSGEERLVPACKALARDASPTVRAMAVWALSRLMAADELAAFAMECGQETDDEVLSEWQMAGVSRCMS

SEQ ID NO: 80978 - protein, 390 aa, Sinorhizobium fredii
  misc_feature (1)..(390): tr|C3MCT7|C3MCT7_SINFN Epoxyqueuosine reductase OS=Sino rhizobium fredii (strain NBRC 101917 / NGR234) OX=394 G N=queG PE=3 SV=1
MPGHAIKAENQGRKRRTLTAFLKEEAAAKGFDLCRITRPDAIPEAPDRLAQFLDAGWHGTMEWLAETAERRADPRVLWSEVRSIVLFGMNYGPDSDPLAILAKRDRGAISVYAQNRDYHDVVKGRLKEIATRFAARAGEDVKVFVDTAPVMEKPLAEKAGIGWQGKHTNLVSREFGSWLFLGSLFTTADLDLDAPERDHCGSCRACLDACPTDAFPAPYRIDARRCISYLTIEHKGPIDRELRPLIGNRIYGCDDCLAVCPWNKFARSASEMKLRAREDLQEPELAALLTLDDAAFRSLFSGSPVKRIGRDRFVRNVLIAAGNSGQKDLIPACKACARDGSPTVRGMAVWALSRLMPAGDLAAFAAECGQETDDEVLSEWEMAGVSRCMS

SEQ ID NO: 80979 - protein, 390 aa, Sinorhizobium fredii
  misc_feature (1)..(390): tr|I3XFL3|I3XFL3_RHIFR Epoxyqueuosine reductase OS=Sino rhizobium fredii USDA 257 OX=1185652 GN=yjeS PE=3 SV=1
MPGDAAKAENQDRKRRTLTAFLKEEAAAKGFDLCRITRPDAIPDAPDRLRQFLDEGCHGTMEWMSETAERRSDPRVLWSEVRSIVLFGMNYGPDTDPLAILAKQDRGAISVYAQNRDYHDVVKGRLKEIATRFAARAGEDVKVFVDTAPVMEKPLAEKAGIGWQGKHTNLVSRDFGSWLFLGSLFTTADLDPDAPERDHCGSCRACLDVCPTGAFPAPYRIDARRCISYLTIEHKGPIDPELRPLIGNRIYGCDDCLAVCPWNKFARSASEMKLKAREDLQEPELADLLTLDDIAFRSLFSGSPVKRIGRDRFVRNVLIAAGNSGEERFVHACKALARDASPTVRAMAVWALSRLLAADDLAAFARECGRETDDEVLSEWEMAGVSRCMS

SEQ ID NO: 80980 - protein, 387 aa, Sinorhizobium medicae
  misc_feature (1)..(387): tr|A0A508X1X0|A0A508X1X0_9RHIZ Epoxyqueuosine reductase OS=Sinorhizobium medicae OX=110321 GN=queG PE=3 SV=1
MPGNAAEAEIQGRKRRTLTAFLKEEAAAKGFDICRITHPDAIPQAPERLRQFLADGCHGTMEWLAETEERRSDPRVLWGDVRSITLFGMNYAPEDDPRDVLAKRDRGAISVYARNRDYHDVVKGRLKDIATRFAARAGEDVKVFVDTAPVMEKPLAEKAGIGWQGKHTNLVSREFGSWLFLGSLFTTAELELDEPERDHCGSCRACLDACPTDAFPAPYRIDARRCISYLTIEHKGPIAPEYRPLIGNRIYGCDDCLAACPWNKFARSASEMKLKARDDLREPELSFLLTLDDAAFRTFFSGSPVKRIGRDRFVRNALIAAGNSGEKSLIPVCKLLAADPSPTVRGMAVWALSRLTSTADLADFGRQCEAENDDAVLSEWKMAGVSL

SEQ ID NO: 80981 - protein, 387 aa, Sinorhizobium medicae
  misc_feature (1)..(387): tr|A6UFC0|A6UFC0_SINMW Epoxyqueuosine reductase OS=Sino rhizobium medicae (strain WSM419) OX=366394 GN=queG PE= 3 SV=1
MPGNAAEAEIQGRKRRTLTAFLKEEAAAKGFDICRITHPDAIPQAPERLRQFLADGCHGTMEWLAETEERRSDPRVLWGDVRSITLFGMNYAPEDDPRDVLAKRDRGAISVYARNRDYHDVVKGRLKDIATRFAARAGEDVKVFVDTAPVMEKPLAEKAGIGWQGKHTNLVSREFGSWLFLGSLFTTAELELDEPERDHCGSCRACLDACPTDAFPAPYRIDARRCISYLTIEHKGPIAPEYRPLIGNRIYGCDDCLAACPWNKFARSASEMKLKARNDLREPELSFLLTLDDAAFRTFFSGSPVKRIGRDRFVRNALIAAGNSGEKSLIPVCKLLAADPSPTVRGMAVWALSRLTSTADLADFGRQCEAENDDAVLSEWKMAGVSL

SEQ ID NO: 80982 - protein, 387 aa, Sinorhizobium meliloti; identical to SEQ ID NO: 80348
  misc_feature (1)..(387): tr|A0A0E0UJ47|A0A0E0UJ47_SINMB Epoxyqueuosine reductase OS=Sinorhizobium meliloti (strain BL225C) OX=698936 GN =queG PE=3 SV=1

SEQ ID NO: 80983 - protein, 387 aa, Sinorhizobium meliloti
  misc_feature (1)..(387): tr|H0G0V8|H0G0V8_RHIML Epoxyqueuosine reductase OS=Sino rhizobium meliloti CCNWSX0020 OX=1107881 GN=queG PE=3 S V=1
MPGDAAKAENQGRKRRNLTAFLKEEAAAKGFDICRITHPDAIPQAPERLRQFLAAGAHGTMDWLAETAERRSDPRVLWSEVRSIVLFGMNYAPEDDPREVLARRDRGAISVYARNRDYHDVVKGRLKEIATRFAARAGEDVKVFVDTAPVMEKPLAEKAGIGWQGKHTNLVSREFGSWLFLGSLFTTAELDLDEPERDHCGSCRACLDACPTDAFPAPYRIDARRCISYLTIEHKGSIAPELRPLIGNRIYGCDDCLAACPWNKFARSASEMKLQARDDLREPELSFLLTLDDPGFRAFFSASPVKRIGRDRFVRNALIAAGNSGEKSLIEVCKALAADASPTVRGMAVWALLRLISSADLAVFARQCGPETDDEVLAEWQMAGVNR

SEQ ID NO: 80984 - protein, 390 aa, Sinorhizobium saheli
  misc_feature (1)..(390): tr|A0A178YG23|A0A178YG23_SINSA Epoxyqueuosine reductase OS=Sinorhizobium saheli OX=36856 GN=queG PE=3 SV=1
MPGNAVSAETQGRKRRTLTAFLKEEAASKGFDVCRITHPDAIPQAPERLKQFLAAGAHGTMDWLAETAERRSGPRVLWSEVRSIALFGMNYGPEADPLAILAKRDRGAISVYAQNRDYHDVVKGRLKEIATRFAARAGEDVKVFVDTAPVMEKPLAEKAGIGWQGKHTNLVSREFGSWLFLGSLFTTADLELDAPERDHCGSCRACLDICPTNAFPAPYQIDARRCISYLTIEHKGPIAPELRPLIGNRIYGCDDCLAVCPWNKFAHSASEMKLKARDELKEPKLSELLTLDDAAFRAFFSGSPVKRVGRVRFIRNALIAAGNSGEKTLIPACKALASDPSPTVRGMAVWALSRLMSPAEFTAYAGARGPESDDEVLGEWEMAGVSRCMS

SEQ ID NO: 80985 - protein, 400 aa, Sinorhizobium sp.
  misc_feature (1)..(400): tr|A0A1V3QV25|A0A1V3QV25_9RHIZ Epoxyqueuosine reductase OS=Sinorhizobium sp. A49 OX=1945861 GN=queG PE=3 SV=1
MRISISEGNVVPGSAAKAENQERRRQKLTDFLKAEAADKGFDVCRIARPDAIPEAPARLGDFLDEGFHGTMEWLAETAERRADPRALWGDVRSVVMFGMNYGPEEDPRGILDQPDRGAISVYAQNRDYHDIIKGRLKEVATRFAARAGEDVKVFVDTAPVMEKPLAEKAGLGWQGKHTNLVSREFGSWLFLGSLFTTADLAFDAAERDHCGSCRACVDACPTAAFPAPYKIDARRCISYLTIEHKGPIDPALRPLIGNRIYGCDDCLAACPWNKFARTASEMKLKARDDLKAPSLAFLLTLDDPTFRTFFSGSPVKRIGRDRFVRNVLIAAGNSGDENLVEACKTLTGDASPGVRAMAVWALSRLISHDALAAHERQCGAESDEEVLSEWQMAGVSRCMS

SEQ ID NO: 80986 - protein, 400 aa, Sinorhizobium sp.
  misc_feature (1)..(400): tr|A0A0T6Z2G4|A0A0T6Z2G4_9RHIZ Epoxyqueuosine reductase OS=Sinorhizobium sp. Sb3 OX=1358417 GN=queG PE=3 SV=1
MRTSTSEDESVPGIAAKADNGDRRRLKLTEFLKAEAADKGFDLCRITRPDAIPEAPARLQDFLDDGFHGTMDWLAETAERRSDPRTLWSDVRSVVMFAMNYGPEDDPRGILEKTDRGAISVYAQNRDYHDIIKGKLKEVATRFAARAGEDVKVFVDTAPVMEKPLSEKAGLGWQGKHTNLVSREFGSWLFLGSLFTTADLVIDEPERDHCGSCRACLDACPTGAFPAPYQIDARRCISYLTIEHKGPIDPELRPLMGNRIYGCDDCLAACPWNKFAQAASEMKLKAREDLKAPSLEALLGLDDPAFRSLFSGSPVKRIGRDRFVRNVLIAAGNSGNQALVPAVKARVGDASPVVRAMAVWALSRLVAPVALAQFAEQCEPETDEDVLNEWQMAGVSRCMS

SEQ ID NO: 80987 - protein, 318 aa, Siphonobacter aquaeclarae
  misc_feature (1)..(318): tr|A0A1G9XS90|A0A1G9XS90_9BACT Epoxyqueuosine reductase OS=Siphonobacter aquaeclarae OX=563176 GN=queG PE=3 SV =1
MTVSDLVRQRHTASVKEIARDLGFDFCGISAAGFLEEEAPRLENWLRRGRHGKMLYMENHFDKRLDPTLLVEGAKSVVSLLYNYYPPERLPEGEEDFKLAKYAYGTDYHFVIRDKLKAFLDRIRVEIGEVDGRCFVDSAPVMEKAWAKKAGLGWVGKNSNLITREIGSFFFLAELIIDLDLEPDGPITDYCGTCTRCIDACPTDALSEPYSVDGSRCISYLTIELKEAIPGDFQGKTDNWIFGCDICQDVCPWNRFSRPHRETAFLLPEELKSFGRRDWQEMTEETFRRIFQKSPLKRAKWEGFVRNLRFVSEENSSV

SEQ ID NO: 80988 - protein, 313 aa, Siphonobacter curvatus
  misc_feature (1)..(313): tr|A0A2S7IP30|A0A2S7IP30_9BACT Epoxyqueuosine reductase OS=Siphonobacter curvatus OX=2094562 GN=queG PE=3 SV=1
MTVSDIIQQENALRIKEIARDLGFDFCGISRADFLEEEAPRLEKWLRLGRHGKMQYMENHFDKRLDPRLLVEGAKSVVSLLYNYYPEETLPEGDEDLKIAKYAYGVDYHFVIKDKLKDFLSRIQEEIGAVDGRCFVDSAPVMEKAWAKQAGLGWIGKNSNLITRKSGSFFFIAELIIDLDLQPDGPMADYCGTCTRCIDACPTDAISEPYGVDGSRCISYLTIELKESIPESFKGHTKNWVFGCDICQDVCPWNRFSQPHRESAFHLPDELKTFQARDWQELTEETFRRVFKKSPLKRAKYEGLQRNVLFVTE

SEQ ID NO: 80989 - protein, 313 aa, Siphonobacter sp.
  misc_feature (1)..(313): tr|A0A261Q3H3|A0A261Q3H3_9BACT Epoxyqueuosine reductase OS=Siphonobacter sp. BAB-5385 OX=1864822 GN=queG PE=3 SV=1
MTVSDIIQQQNALRIKEIARDLGFDFCGISRADFLEEEAPRLEKWLRLGRHGKMQYMENHFDKRLDPRLLVEGAKSVVSLLYNYYPEETLPEGDEDLKIAKYAYGVDYHFVIKDKLKDFLSRIQEEIGAVDGRCFVDSAPVMEKAWAKQAGLGWIGKNSNLITRKSGSFFFIAELIIDLDLQPDGPMADYCGTCTRCIDACPTDAISEPYGVDGSRCISYLTIELKESIPESFKGHTKNWVFGCDICQDVCPWNRFSQPHRESAFHLPDELKTFQARDWQELTEETFRRVFKKSPLKRAKYEGLQRNVLFVTE

SEQ ID NO: 80990 - protein, 313 aa, Siphonobacter sp.
  misc_feature (1)..(313): tr|A0A2N7BDR3|A0A2N7BDR3_9BACT Epoxyqueuosine reductase OS=Siphonobacter sp. BAB-5405 OX=1864825 GN=queG PE=3 SV=1
MTVSDIIQQENALRIKEIARDLGFDFCGISRADFLEEEAPRLEKWLRLGRHGKMQYMENHFDKRLDPRLLVEGAKSVVSLLYNYYPEETLPEGDEDLKIAKYAYGVDYHFVIKDKLKDFLSRIQEEIGAVDGRCFVDSAPVMEKAWAKQAGLGWIGKNSNLITRKGGSFFFIAELIIDLDLQPDGPMADYCGTCTRCIDACPTDAISEPYGVDGSRCISYLTIELKESIPESFKGHTKNWVFGCDICQDVCPWNRFSQPHRESAFHLPDELKTFQARDWQELTEETFRRVFKKSPLKRAKYEGLQRNVLFVTE

SEQ ID NO: 80991 - protein, 346 aa, Skermanella aerolata
  misc_feature (1)..(346): tr|A0A512DQ93|A0A512DQ93_9PROT Epoxyqueuosine reductase OS=Skermanella aerolata OX=393310 GN=queG PE=3 SV=1
MDAADKREQIRDRALALGFDAVGFAPASLGDEARERLGDFLAQGLHGDMGWMLEKADRRGDPQVLWPEARTVIALGMSYAPHEDPRSLLEHPDRGIVSVYARGRDYHDVVKSRLKQLAQWVHRSFATDVKVFVDTAPVMEKPLAEQAGLGWQGKHTNLVSREHGSWLFLGEVYTALELPPDSPGADLCGSCRRCQDACPTAAFPEPYRLDARRCISYLTIEHKGPIPEDLRPLMGNRIYGCDDCLAACPWNKFAKRTREAAFLPRAELTAPRLADLAQLDDAGFRQVFSGSPIKRIGRDRFVRNVLTALGNSGDQAQIGVVERLTADESDLVRDAASWALERLRAV

SEQ ID NO: 80992 - protein, 337 aa, Skermanella aerolata
  misc_feature (1)..(337): tr|A0A0D2VUN6|A0A0D2VUN6_9PROT Epoxyqueuosine reductase OS=Skermanella aerolata KACC 11604 OX=1385368 GN=queG PE=3 SV=1
MRDRALALGFDAVGFAPASLGDEARERLGDFLAQGLHGDMGWMLEKADRRGDPQVLWPEARTVIALGMSYAPHEDPRSLLEHPDRGIVSVYARGRDYHDVVKSRLKQLAQWVHRSFATDVKVFVDTAPVMEKPLAEQAGLGWQGKHTNLVSREHGSWLFLGEVYTALELPPDSPGADLCGSCRRCQDACPTAAFPEPYRLDARRCISYLTIEHKGPIPEDLRPLMGNRIYGCDDCLAACPWNKFAKRTREAAFLPRAELTAPRLADLAQLDDAGFRQVFSGSPIKRIGRDRFVRNVLTALGNSGDQAQIGVVERLTADESDLVRDAASWALERLRAV

SEQ ID NO: 80993 - protein, 358 aa, Skermanella stibiiresistens
  misc_feature (1)..(358): tr|W9GU59|W9GU59_9PROT Epoxyqueuosine reductase OS=Sker manella stibiiresistens SB22 OX=1385369 GN=queG PE=3 SV =1
MAAAEPKPTIPGTPERSREEIRDRALALGFDAVGFAPATLAAEARARLGEFLAQGMHGDMGWMLEKADRRGDPQVLWPDARTIVALGMSYAPHEDPRRLLDHPDRGVVSVYAQGRDYHDVVKSRLKQLAQFIHRRHAAEVKVFVDTAPVMEKPLAERAGLGWQGKHTNLVSRGHGSWLFLGEVYTALELPPDPPGADLCGSCRRCQDACPTAAFPEPYRLDARRCVSYLTIEHKGPIPEDLRPLMGNRIYGCDDCLAACPWNKFAKRTREAAFLPRAELTAPRLADLAQLDDAAFRQVFSGSPIKRIGRDRFVRNVLTALGNSGDRGQMALVERLTHDGSDLVRDAAEWALKRLNPAP

SEQ ID NO: 80994 - protein, 377 aa, Smithella sp.
  misc_feature (1)..(377): tr|A0A094KHP8|A0A094KHP8_9DELT PBS lyase OS=Smithella s p. D17 OX=1538639 GN=KD27_07280 PE=4 SV=1
MITKQDIITEAKRLKFADIGFTDAQPFDSQREYLQAHQEEYGWAEAIGLSLIAGTDPKNILPQAKSIIVLLESYFEESYPLQLERHFGRCYLDDDRVTKDGLALRLKAFRKFLQANGIDSKVPFNLPHRLSAARAGLGTFGKNCLFYARRVARTSSFVFPVALAIDHEFVADEPEVSIGCPDWCRNACVAACPTHALQGGGKIDPRRCISFLTYYGDGLTPLELREPMGMNIYGCDRCQNVCPRNTPWMAQEKPQNPRVLAKTANFDLSRLLHMDKPYFENKIWPHMFYMSTDDVWRWKMNVARAMGNSLNPVYVAELILAFKENSDERVRCMIAWALGRIGNKEAMDGLEQFSRDSKDNVKEEIKQAMVLIEKKKV

SEQ ID NO: 80995 - protein, 377 aa, Smithella sp.
  misc_feature (1)..(377): tr|A0A0Q1AUB6|A0A0Q1AUB6_9DELT PBS lyase OS=Smithella s p. SDB OX=1735324 GN=APR62_05410 PE=4 SV=1
MLTKQDIIAEAKRLKFADIGFTDAKPFDSQKEYLLAHQDGYGWAEAIGLGLLAGTDPKNILPQAKSIIVLLESYFEESYPLPLEHHFGRCYLDDDRVTKDGLALKIKSFRKLLQLNGIDSKVPFDLPHRLSAARAGLGTFGKNSLFYARRVALNSSFVFPIAIVIDAEYTPDESSIAIECPEWCRNTCVAACPTRALKGDGKIDPLRCISFLTYYGAGLTPLELREPMGMYIYGCDRCQNVCPRNIPWMVRKKPQNPRVLAKESNFDLSCLLHMDKLYFEQKVWPHMFYMSVDDIWRWKMNVARAMGNSLNPAYVKELILAFGENSDERVRCMIAWALGRIGNQEAMTGLRKFFDNSEGIEKKEIKQAIIAIEKRKV

SEQ ID NO: 80996 - protein, 389 aa, Sneathiella sp.
  misc_feature (1)..(389): tr|A0A2E2QKB2|A0A2E2QKB2_9PROT Epoxyqueuosine reductase OS=Sneathiella sp. OX=1964365 GN=queG PE=3 SV=1
MPTSISKSDRLPVDKTRIREMAQAEGFDAVGFAPADIGEAPGSRLQEFIALERHGDMDWIAEKAAWRRHPQALWPDARTVIVLALNYGPEADPLAHTGKADRGVISVYAQGRDYHDVIKKKLKRIARALLKDYGGDVKVFVDTAPVMEKPLAAAAGLGWQGKHTNLLSREYGSWLFLGCIFTTLDIAPDAREEGSCGSCTACLDICPTNAFPAPYQLDAKRCISYLTIETRTHIERDLRPLIGNRIYGCDDCLAVCPWNKYAKHARELSLKPKPGLNAPKLVELAALDDAAFRALFAGTAVKRLGRNRFVRNVLIAIGNGGNREDLAVVKPLLGDASPIVRVAAVWAAGRLADMASYNRLRDEFAEQETDDDVLTEWKLSEGDNNESAG

SEQ ID NO: 80997 - protein, 384 aa, Sneathiella sp.
  misc_feature (1)..(384): tr|A0A2G1Z733|A0A2G1Z733_9PROT Epoxyqueuosine reductase OS=Sneathiella sp. OX=1964365 GN=queG PE=3 SV=1
MPTSTSEPAIGTDDKQRIRDQALAEGFDDIGFTMADIGDQPGKHLDTFIEKQRYGDMGWIVEKADRRRHPNALWPEVKSVIVLAQNYGPDTDPLANLDKPDRGSISVYAQGKDYHDVVKKRLKRLARWLIANYGGDVKVFVDTAPVMEKPLAEKAGIGWQGKHTNLLSRDFGSWLFLGSIFTTLDILPDAPVAGDCGSCRACLDICPTNAFVAPYQLDARRCISYLTIETRDHIDRDLRPLIGNRIYGCDDCLAVCPWNKYAKKASDMALYARSELVAPRLQQLVALDDSEFRALFSGSPVKRLGRNRFVRNVLIALGNSGDEKNLKSVTSLLGDASAIVRVAAVWAFGQLSSPEIYGRLKQDLIGQEQDPDVLAEWNLSKGRE

SEQ ID NO: 80998 - protein, 323 aa, Snowella sp.
  misc_feature (1)..(323): tr|A0A2W7B7Q0|A0A2W7B7Q0_9CYAN Epoxyqueuosine reductase OS=Snowella sp. OX=2164131 GN=queG PE=3 SV=1
MTVTSEEIKQKAIDLGFHLVGIAAIAEVEPDSAVEHLKAWLELGYQAKMQWMNNPKRLDIRSCFPEGRSVISVALNYYTPHQRPQGKEYAKIARYAWGRDYHKVLGKKLKALGQWLESQDATIQTRYYADTGPIQDKVWAQRSGLGWIGKNGNLITRQYGSWVFLGELLTNLSLTPDQPHSEHCGTCTRCLDACPTKAIAQPFVINSDRCIAYHTIENRAETLPPEITPHLEGWVAGCDICQDVCPWNQRFAQATDIADFQPYEGNIDSKLTDFVKITETEWERRFPASALRRIKPMMWRRNAHANLDTDTSKNLNYLYDSDD

SEQ ID NO: 80999 - protein, 379 aa, Sodalis praecaptivus
  misc_feature (1)..(379): tr|W0I245|W0I245_9GAMM Epoxyqueuosine reductase OS=Soda lis praecaptivus OX=1239307 GN=queG PE=3 SV=1
MSYPFDLTELARQIKRWGQELGFQQVGICDTDLAAHEPTLQAWLDRQYHGEMAWMARHGMLRARPHELLPGTLRVISVRMNYLPAKAAFASTLKNPSLGYVSRYALGRDYHKVLRNRLKQLGERIRDACGEVNFRPFVDSAPIMERPLAAKAGIGWVGKHSLILNREAGSWFFLGELLIDLPLPVDAPQAEQCGRCVACITTCPTGAIVEPYTLDARRCISYLTIELEGEIPEALRPLIGNRIYGCDDCQLICPWNRFSQLTDEPDFSPRAVLHAPKLVELFGWNEATFLRVTEGSAIRRIGHVRWSRNIAVALGNAPYQDEIVLALRRRLGELPLLDVHIHWALERQMARREAAAVAVQSAQQTRLVRAIEKGLTRDA

SEQ ID NO: 81000 - protein, 379 aa, Sodalis sp.
  misc_feature (1)..(379): tr|A0A4R1NFP1|A0A4R1NFP1_9GAMM Epoxyqueuosine reductase OS=Sodalis sp. 159R OX=2529856 GN=queG PE=3 SV=1
MSYPFDLIELARLIKEWGLALGFQQVGICDTDLAAHESVLQAWLDNQYHGDMEWMARHGSLRARPHELLPGTLRVISVRMNYLPANAAFARTLKNPRLGYVSRYALGRDYHKVLRHRLQQLGNKIREWCKEVQFRPFVDSAPLMERPLAAKAGIGWVGKHSLILNREAGSWFFLGELLINLPLPVDQPQQDGCGRCVACMTACPTGAIVAPYTVDARRCISYLTIELQGEIPEDLRPLIGNRIYGCDDCQLICPWNRFSALTDEKDFSPRAALHSPELLELYKWDETTFLRATEGSPIRRIGHWRWLRNIAVALGNAPYEESIVSCLQESLGNDALLNKHITWAIERQLQQREAATVNVQPARQRRLINAIEKGLARDA

SEQ ID NO: 81001 - protein, 379 aa, Sodalis sp.
  misc_feature (1)..(379): tr|A0A1J7D2B3|A0A1J7D2B3_9GAMM Epoxyqueuosine reductase OS=Sodalis sp. TME1 OX=1912097 GN=queG PE=3 SV=1
MSYPFDLTKLARQIKRWGQELGFQQVGICDTDLAAHEPTLQAWLDRQYHGEMAWMARHGMLRARPHELLPGTLRVISVRMNYLPAKAAFASTLKNPSLGYVSRYALGHDYHKVLRNRLKQLGERIRDACGEVNFRPFVDSAPIMELPLAAKAGIGWVGKHSLILNREAGSWFFLGELLIDLPLPVDAPLAEQCGRCVACITTCPTGAIVEPYTLDARRCISYLTIELEGEIPEALRPLIGNRIYGCDDCQLICPWNRFSQLTNEPDFSPRAVLHAPELVELFGWNEATFLRVTEGSAIRRIGHVRWSRNIAVALGNAPYQDEIVLALRRRLGELPLLDVHIHWALERQMARREAAAGAIQSAQQTRLVRAIEKGLTRDA

SEQ ID NO: 81002 - protein, 339 aa, Soehngenia sp.
  misc_feature (1)..(339): tr|A0A4Z0D660|A0A4Z0D660_9FIRM tRNA epoxyqueuosine(34) reductase QueG OS=Soehngenia sp. 1933P OX=2562294 GN=qu eG PE=4 SV=1
MKVELIKNLALELGLDLIGFTDITPLNRIKNKLKDRVDKKLNTEFEASDLQKRIDPKKIMGEANSIIVVGFPYFYANFNGNDSKDRLFGKLSRSSWGMDYHLVIKKYLQKLVDELSQYEKFDYSIITDTSPLVDREIAYKAGIGYYGKNTSIINQTYGSFIFIGYILTDLYLDKYNSPIESQCGECDICMRSCPGKAIEEPYKLNPKKCISYLTQTKKYLDEEESKKMGINIYGCDICQMVCPKNKNIKESTFDEFKPYKTNGVVYIKEILIMSNEEFKNKYGDMAGSWRGKNVLVRNAIIALENIGYIDDEIVEYLMENKSELLKPYIARYITKFSSK

SEQ ID NO: 81003 - protein, 354 aa, Solemya elarraichensis
  misc_feature (1)..(354): tr|A0A1T2L7X8|A0A1T2L7X8_9GAMM Epoxyqueuosine reductase OS=Solemya elarraichensis gill symbiont OX=1918949 GN= queG PE=3 SV=1
MTESSTALHQVACDIKSWASELGFQQCGITDTDLTLAESRLHAWLGHGYQGDMEYMSRHGVKRSRPAELEPGTLRVVSVRMNYLPDTQEDLLALTQEPAQAFLSRYALGRDYHKLLRKRLQQLADRITSAHGKFGYRVFVDSAPVLEKPIAEKAGLGWIGKHSNLISRDAGSWFFLGELYVDLPLPIDEPSEEHCGSCSACIDICPTQAIVEPFVVDARRCISYLTIELHDAIPLALRKQIGNRIYGCDDCQAVCPWNRFSQNGAEEDFLPRHELDQTTLLELFSWDEETFLNRTEGSAIRRIGYQRWQRNLAVALGNSKGGTEVISSLQHALTDASPMVKEHIAWALSNLCSD

SEQ ID NO: 81004 - protein, 362 aa, Solemya pervernicosa
  misc_feature (1)..(362): tr|A0A1T2L7J1|A0A1T2L7J1_9GAMM Epoxyqueuosine reductase OS=Solemya pervernicosa gill symbiont OX=642797 GN=que G PE=3 SV=1
MENCPPTTVNLSTDELAQLAASIANWATELGFDQIGISDTDLHVAEIHLQQWLKAGEHGEMSYMAAHGLKRSRPELLHPGTLRVITARLDYWPEQGMQSAIDLLEQGEQAYISRYALGRDYHKLMRKRLQQLAKRIEAAIGSHNYRVFSDSAPVLEKPLAERSGLGWVGKHTNLINQQNGSWFFLGEVYTDLPLPTVEPAANHCGTCQRCIEVCPTQAITAPYQLDARRCISYLTIELQGAIPLEYRAQIGNRIYGCDDCQLFCPWNRFAQMSREADFLPRNDLDNASLIELFDWSETEFLQRTEGSPIRRLGHQRWLRNIAVAMGNAASSESIRQALRSQSSHPSELVREHVAWALSQQGQ

SEQ ID NO: 81005 - protein, 360 aa, Solemya velesiana
  misc_feature (1)..(360): tr|A0A1T2KSC5|A0A1T2KSC5_9GAMM Epoxyqueuosine reductase OS=Solemya velesiana gill symbiont OX=1918948 GN=queG PE=3 SV=1
MNRQPTDDDFSKLAGDIKRWGAELGFQQVGICDTDLTVAEARFNEWADQGCHGEMAYMVSHGSKRSRPEELVPGTLRIISVRMDYLPGDDNPTGILNDSSLGYISRYALGRDYHKLMRNRLQKLAKRMEQEVGEFGYRVFVDSAPVLEKSLAEKAGLGWAGKHTNLVNRHAGGWFFLGELYTDLPLPSDEAESNHCGRCQACIDVCPTRAIVAPYQVDARRCISYLTIELHGTIPLEFRPLIGNRVYGCDDCLLACPWNRFAKSTGEQDFLPRHGLNSSQLVDLFAWSEEDFLERMEGSAIRRLGHERWLRNIAVALGNAETTSLVVDALKARSSHPSELVREHVNWALIRHTTSGDIAS

SEQ ID NO: 81006 - protein, 354 aa, Solemya velum
  misc_feature (1)..(354): tr|A0A0B0HBX6|A0A0B0HBX6_SOVGS Epoxyqueuosine reductase OS=Solemya velum gill symbiont OX=2340 GN=queG PE=3 SV =1
MTESSTALQQVASDIKSWAGELGFQQCGITDTDLTLAESRLHAWLGNGYHGDMEYMSRHGVKRSRPGELEPGTLRVISVSMNYLPDKQEDLLALTQEPAQAFISRYALGRDYHKLLRKRLQQLADRITSAHGKFGYRVFVDSAPVLEKPIAEKAGLGWIGKHSNLISRNAGSWFFLGELYVDLPLPIDDPAEEHCGSCSECIDICPTQAIVEPFVVDARRCISYLTIELHEAIPLELRKQIGNRIYGCDDCQAVCPWNRFSQSTGEEDFLPRHELDKKTLLELFSWSEETFLKRTEGSAIRRIGYQRWQRNLAVALGNSSGGSEVISSLQRALADASLLVKEHIEWALSNLGSD

SEQ ID NO: 81007 - protein, 377 aa, Solibacillus isronensis
  misc_feature (1)..(377): tr|K1L2T8|K1L2T8_9BACL Epoxyqueuosine reductase OS=Soli bacillus isronensis B3W22 OX=1224748 GN=queG PE=4 SV=1
MKVHQLQEDLVKYAASIGVDKIGFTTAAPFHELKNRLRRQQQLAYQSGFEEANIELRTEPLKLLDEAESIIAIAIAYPSRMQDAPQGKKGERRGIFCRASWGIDYHTAVRERLQLIEAWLHERVSNVKVKSMVDTGELVDRAVAERAGIGWSAKNCSIITPEFGSYVYLGEIITNIPFAPDTPMEDECGDCTLCIDVCPTGAIVAPGQLNSQRCIAFLTQTKGFLPDEFRAKIGNRLYGCDTCQTVCPKNKGKLNWIHDEFTPDPEIAKPLLQPLLSISNKEFKAKFGHVSGSWRGKKPIQRNAILALAHFKEEAAMPDLVQVLQKDERPVLRGTAAWAIGKIGTDGAVEILIAAKKTEQDEEVLAEIDKGLAMLNH

SEQ ID NO: 81008 - protein, 377 aa, Solibacillus silvestris; identical to SEQ ID NO: 81007
  misc_feature (1)..(377): tr|A0A1A7LT18|A0A1A7LT18_9BACL tRNA epoxyqueuosine(34) reductase QueG OS=Solibacillus silvestris OX=76853 GN=A 9986_09005 PE=4 SV=1

SEQ ID NO: 81009 - protein, 377 aa, Solibacillus silvestris; identical to SEQ ID NO: 81007
  misc_feature (1)..(377): tr|F2EZY1|F2EZY1_SOLSS Uncharacterized Fe-S protein OS= Solibacillus silvestris (strain StLB046) OX=1002809 GN= SSIL_0668 PE=4 SV=1

SEQ ID NO: 81010 - protein, 382 aa, Solibacillus sp.
  misc_feature (1)..(382): tr|A0A2D1SXN4|A0A2D1SXN4_9BACL tRNA epoxyqueuosine(34) reductase QueG OS=Solibacillus sp. R5-41 OX=2048654 GN= queG PE=4 SV=1
MKVHQLQAELIEYAKSIGVDKIGFTTAAPFHELKNRLRRQQELSFQSGFEESDVELRTVPLKLLDGAESIVAIALAYPSRMNDAPQGKKGARRGVFCRASWGVDYHTAVRERLQLIEAWLRERVPSVKTKSMVDTGELVDRAVAQRAGIGWSGKNCSIITPEFGSYVYLGEIMTNIPFAPDMPMEDECGECTLCIDVCPTGAIVAPGQLNSQRCIAFLTQTKGFLPDEFRTKIGNRLYGCDTCQTVCPKNKGKLNWIHDEFTPDPELAKPLLQPLLSISNKEFKAKFGHVSGSWRGKKPIQRNAIIALAHFKEESAVPDLIELMLKDERPVIRGTAAWAIGKIGSEDANEALLAAQIKEQDEEVLAEIEKGLAMLTNVERRI

SEQ ID NO: 81011 - protein, 341 aa, Solibacter usitatus
  misc_feature (1)..(341): tr|Q020U1|Q020U1_SOLUE 4Fe-4S ferredoxin-type domain-co ntaining protein OS=Solibacter usitatus (strain Ellin60 76) OX=234267 GN=Acid_3576 PE=4 SV=1
MNAEGIRELARACGFELAGVASALPAEDRARYHDWVAAGWAGKMGYLTDHRAEVRDDPRQLLASAKSIICVGKLYQTPWPHTARFDAHDRGWISRYAWGEDYHDVMRRGLERLEGMLRESVGGALESRICVDTAPLLERSYARLAGLGWIGKNTCLINQQQGSWFFLGELLVSLEIASETPPPDRCGTCTRCIDACPTAAIVPGKGLDATRCISYFTIELRGTIPEEMRAGMGAHIFGCDICQDVCPWNGRAPMTVEESFAPRHFAPRLEEMGAITEDEFRAMFRGTPVSRARYRGFLRNVAVAMGNGGEEKFRGPLEEMARSQDEVVAEHARWALKRIGG

SEQ ID NO: 81012 - protein, 366 aa, Solimicrobium silvestre
  misc_feature (1)..(366): tr|A0A2S9H0U7|A0A2S9H0U7_9BURK Epoxyqueuosine reductase OS=Solimicrobium silvestre OX=2099400 GN=queG PE=3 SV= 1
MINDNYPFLALSIKAWGQELGFSDVRISDVDLSQHEAGLSAWLAAGYHGEMEYMAAHGMKRARPAELVPGALRAIMVRMDYLPPESPPNWRNVEHQRAQQAGQAIISLYARGRDYHKVLRGRLQELANRIEVEVGEFGYRVFTDSAPVMEVALAEKAGLGWRGKHTLLLNRQAGSLFFIGEIITDLPLPVDPPVTPHCGQCTACITSCPTQAILAPYKLDARRCISYLTIELKTSIPIELRPLIGNRVYGCDDCQLCCPWNKFAQVSEQADFAVRNGLDNASLIDLFSWSEADFMKKLEGSPIRRIGYISWLRNLAVGLGNAKRELSMHQMDTSELDSALQKQISHPSEIVREHVLWALQQTAIVA

SEQ ID NO: 81013 - protein, 361 aa, Solimonas aquatica
  misc_feature (1)..(361): tr|A0A1H9D0R1|A0A1H9D0R1_9GAMM Epoxyqueuosine reductase OS=Solimonas aquatica OX=489703 GN=queG PE=3 SV=1
MRTDPAPPRPDAAAWQALRALPEWARELGFADAGFATLALDEDLAHLQRWLDEGLHGGMDWMRRDPALRAEPARLRPGTLSVISARMAYPIDAALAQQVLGDATRAYISRYALGRDYHRVLRARLLRLARRIEQAIGPFGYRVLADSAPALEKAMARNAGLGWIGKHTLLIQREAGSWFFLGEIYSDLPLPAQDASAAKNLCGSCSACLDICPTQAIIAPYRLDAARCISYLTIEHHGAIPEALRAAMGNRIFGCDDCQLVCPWNRYAQKSGEADFMARHRLDRAGLLELFAWDEAEWLRRTEGMALRRAGYARWLRNLAIALGNAPPSDAVRAALQARLHSDDEVLREHLLWALQRQGAA

SEQ ID NO: 81014 - protein, 378 aa, Solimonas fluminis
  misc_feature (1)..(378): tr|A0A2S5TCE7|A0A2S5TCE7_9GAMM Epoxyqueuosine reductase OS=Solimonas fluminis OX=2086571 GN=queG PE=3 SV=1
MAPSIGSPPAALAAELPEKIRQWARELGFADAGVASLELDEDLAHLQRWLDEGRNGGMAFMARDPGLRRDPARLRPGTLGVISARLDYRPDAEAADRVLRDGERAYISRYALGRDYHKLMRGRLLQLGRRIEAEIGPHGYRVLTDSAPVLEKALARNARLGWIGKNTLLLNRDAGSWFFLGEIYTDLPLAAQDRPAVAEQCGRCSACIRICPTQAITAPYRLDARRCISYLTIEHHGAIPEELRPMMGNRIFGCDDCQLVCPWNRYAQTTVEPDFAPRHGLDSAGLLELFSWDEAEWLQRTEGMALRRVGYPRWLRNLAVAIGNAPRSEAAAAALRSRLEYPDEIVREHVRWALDRQEASGQGLSPPPRSPQSGDATA

SEQ ID NO: 81015 - protein, 365 aa, Solimonas sp.
  misc_feature (1)..(365): tr|A0A346N844|A0A346N844_9GAMM Epoxyqueuosine reductase OS=Solimonas sp. K1W22B-7 OX=2303331 GN=queG PE=3 SV=1
MSFIAPSIGTPPAALAAELPEKIRLWARELGFADAGIAEQALDQDLAHLQRWLDEGRHGGMAFMARDLALRQTPARLRPGTLSVISARLDYRPDAEAADRVLRDGERAYISRYALGRDYHKLMRGRLLQLGRRIEAEIGPHGYRVLTDSAPVLEKALARNARLGWIGKNTLLLNRAAGSWFFLGEIYTDLPLAPESTPPVKEECGRCNACIRICPTQAITAPYRLDARRCISYLTIEHHGAIPLELRPLMGNRIFGCDDCQLVCPWNRYARTTVEPDFAPRHGLDSAALLDLFAWDEEEWLRRTEGMSLRRVGYPRWLRNLAVAIGNAPRSEAAVAALRERLEYPDEVVREHVLWALERQTETAA

SEQ ID NO: 81016 - protein, 327 aa, Solirubrum puertoriconensis
  misc_feature (1)..(327): tr|A0A0W8EDR9|A0A0W8EDR9_9BACT Epoxyqueuosine reductase OS=Solirubrum puertoriconensis OX=1751427 GN=queG PE=3 SV=1
MLASDITRAEHTAFIKRRAAELGFMACGISRAEFLEEEAPRLEQWLAKGMQGQMRWMENHFDKRLDPRLLVDGAKSVISLLLNYYPAAEDQQPDDTLKVSKYAYGRDYHHVIKDKLKTLLQDIQAHIGEVGGRAFVDSAPVLDKAWAKKSGLGWVGKNSNLITPGAGSFYFIAELIVDVELSYDGPIRDYCGSCTRCLDACPTQAITEPYVVDGSKCISYFTIELKEQLPADVQGQLGNWIFGCDICQDVCPWNRFSRATQEEQFKPHPHLKEMRESDWQEITQEVFQTLFRHSAVKRTGYQGLTRNIRFVAGKPSLGTPATEPELS

SEQ ID NO: 81017 - protein, 328 aa, Solitalea canadensis
  misc_feature (1)..(328): tr|H8KTH4|H8KTH4_SOLCM Epoxyqueuosine reductase OS=Soli talea canadensis (strain ATCC 29591 / DSM 3403 / NBRC 1 5130 / NCIMB 12057 / USAM 9D) OX=929556 GN=queG PE=3 SV =1
MQLSRTIYNCVFLRSVSKMALIEKNTQLIKAEALRLGFLHCGIAQATFLENEAPRLEKWLMNNNNGEMKYMENYFDMRLDPRKLVDGAKSVISLALNYYTDEVPEDFQAPKISKYAYGTDYHFVIKDKLKELLHFIRENIGDVNGRAFVDSAPIMDKAWAQRAGLGWMGKHSNILSKKRGSFFFLAELVIDLELKYDHPVADHCGECTRCIDACPTQAITSSYIVDGSKCISYLTIELKNEIPTAFKSKMDNWMFGCDVCQDVCPWNRFSIVHNEPSFNPHPDLLKLKKTDWQEITNEVFKSLFKKSAVKRTKFEGLNRNIRFLMNES

SEQ ID NO: 81018 - protein, 307 aa, Solitalea koreensis
  misc_feature (1)..(307): tr|A0A521D9Z4|A0A521D9Z4_9SPHI Epoxyqueuosine reductase OS=Solitalea koreensis OX=543615 GN=queG PE=3 SV=1
MSTSAKYSKLIKAEAKRLGFMFCGISKAEFLEEEAPRLEQWLNQNRHGEMKYMENHFDKRLDPTKLVEGAKSVISLALNYYTDQKQADSNAPKISQYAYGTDYHFVIKDKLKQLLHFIEEEIGEVNGRAFVDSAPIMDKVWARRSGLGWVGKNTNLINKKHGSFFFLAELVVDLELNYDHPVADHCGTCTRCIDACPTEAITNNYLIDGSKCISYLTIELKNEIPAEFKGKMDNWMFGCDVCQDVCPWNRFSLMNNEELFQPKPDLLQMSKKDWEDITEDVFQKLFKNSPVKRTKFSGLQRNLDFLK

SEQ ID NO: 81019 - protein, 307 aa, Solitalea longa
  misc_feature (1)..(307): tr|A0A2S5A1T5|A0A2S5A1T5_9SPHI Epoxyqueuosine reductase OS=Solitalea longa OX=2079460 GN=queG PE=3 SV=1
MSLKEKYSQLIKQEAKRLGFLQCGIAKASFLENEAPRLENWLNQGKHGEMKYMENYFDMRLDPRKLVDGAKSVISLALNYYTDQVQSDPEAPKLSKYAYGTDYHFVIKDKLKELLQFIQETVGEVNGRAFVDSAPIMDKAWAQQAGLGWIGKHSNILSKKKGSFFFLAELVIDLDLEYDKPVADHCGECTRCIDACPTQAITSAYIVDGSRCISYLTIELKNEIPTEFKNKVDDWMFGCDVCQDVCPWNRFSIVHNEPLFNPHPDLLSIKKEEWVELTEDVFRKVFKNSAVKRTKYSGLQRNIKFLS

SEQ ID NO: 81020 - protein, 308 aa, Soonwooa buanensis
  misc_feature (1)..(308): tr|A0A1T5F3U3|A0A1T5F3U3_9FLAO Epoxyqueuosine reductase OS=Soonwooa buanensis OX=619805 GN=queG PE=3 SV=1
MNSSEKLTKLIKDKAKNFGFQSCGISKSEFLEEEAPKLEAWLKNNFHGEMKYMENYFDKRLDPRLLVEGSRSVISLSYNYFPKQDLFKDKLQKISKYAYGEDYHEVIKEILREMISELQDEIGEFGFRVFVDSAPVLERAWAKKSGIGWVGKNANIITKQSGSFFFLAEIICDLDLEYDHATTDHCGTCRKCIDACPTDAIVSDKLIDGSKCISYATIELKEEIPDSFKNKMENWMFGCDICQDVCPWNRFSAPTLEEKFHPNEALQNFTKTEWKEMTQEIFSSVFRKSPVKRTKFAGLKRNLDFLSD

SEQ ID NO: 81021 - protein, 308 aa, Sorangium cellulosum
  misc_feature (1)..(308): tr|A0A150SIE6|A0A150SIE6_SORCE Epoxyqueuosine reductase (Fragment) OS=Sorangium cellulosum OX=56 GN=BE18_05925 PE=4 SV=1
VHATAMSEREVHRPEGEASSERRTHDRLVREQAFALGFDVVGVARADEPLGVEHARYLEFIERGMHGEMRYLAEYAEQRRRLDTDAILEGARSVVCVGRRYARPKDSEGRDPPLAQAVARYARGQDYHNHLKRRLRRLAAFIRTLAPSVLARPLCDVEPVMERVWAARAGIGFVGKNGLLITPGQGSYQLLGEVVTTLPLVPDVPIAERCGSCTRCLDACPTQAFDAPFVLDPRRCVAYLTIEQRGAPAEELRPGMGEHVFGCDVCQEVCPFNRTAPPPIERTAPFHPLSRWEGRDVDDLASLDERGF

SEQ ID NO: 81022 - protein, 417 aa, Sorangium cellulosum
  misc_feature (1)..(417): tr|S4XZB2|S4XZB2_SORCE 4Fe-4S ferredoxin-type domain-co ntaining protein OS=Sorangium cellulosum So0157-2 OX=12 54432 GN=SCE1572_27105 PE=4 SV=1
MSARGARGERDASAAAGAAVHATAMSEREAHRPEGEASPERRTHDRLVREQAFALGFDVVGVARADEPLGVEHARYLEFIARGMHGEMRYLAEYAEQRRRLDTDAILEGARSVVCVGRRYARPKDSEGRDPPLAQAVARYARGQDYHNHLKRRLRRLASFIRSLAPSVLARPLCDVEPVMERVWAARAGIGFVGKNGLLITPGQGSYQLLGEVVTTLPLVPDVPIAERCGSCTRCLDACPTQAFDAPFVLDPRRCVAYLTIEQRSAPAEELRPGMGEHVFGCDVCQEVCPFNRTAPPPLERTAPFHPLPRWEGRDVDDLASLDERGFEALTVGTPVKRARRGGLARNAAIVAANRLARGLEGEGAERAERALAAALAHDDPEVRAVAAWGMRRAGRGEPASPAAPEPAGSLDEPGAG

SEQ ID NO: 81023 - protein, 365 aa, Spartobacteria bacterium
  misc_feature (1)..(365): tr|A0A3B9LC84|A0A3B9LC84_9BACT Epoxyqueuosine reductase OS=Spartobacteria bacterium OX=2052183 GN=queG PE=3 SV =1
MSQIASNIDRVRAAISNTELKERLIAFARELGFDSCRVAECTPPTHVDEFRDWLKDGAAGEMSYMERGEEKRRDPQKVLPGAKSIIVLALNYWQGKFRPSQTAATGRIARYAWGDDYHDVINAKLNKIDNFLREFGGEQKCYVDTGPVLERDHAAQAGIGWHGKSTMLVDERLGTWFFLAEILTTLELAADPPARDRCGTCARCITACPTGAITAPHRLDARRCISYLTIEHKTSIPVELRPLIGDRIYGCDDCLDACPWNRFASVSRESAFAARRSTMNMRLRDYLNLSGAEFRLLFRHSPIKRIKRRGFLRNVCVALGNVGDANDLPALAKAALDSEPLIAEHAAWAIEQIRARSTSREVVVN

SEQ ID NO: 81024 - protein, 387 aa, Sphaerobacter thermophilus
  misc_feature (1)..(387): tr|D1C7R6|D1C7R6_SPHTD Uncharacterized protein OS=Sphae robacter thermophilus (strain DSM 20745 / S 6022) OX=47 9434 GN=Sthe_0461 PE=4 SV=1
MSAITHARLRRLAAECRLALLGVTTAEPFDGLAELLVERIRTGHMDGLDWFTEERARFSADPRNLHPTARSIVSVGLPYWQPDVAPPDDGVPRGRISRYAWGRDYHKTLKTRMRDLHARLEEELGRPIEARALVDTARIVDRAAAARSGLGWYGKNTMILVPGHGSWVMLGELVLDIEVEPLPALRPKCGRCTRCLDACPTGALVDAYRLHTPRCISYLTIELRGPIPRDLRPLMGSWVFGCDICQEVCPYTGAAAPSDDPAVQPERIEHAFPSLHWLLTMSEEEFRTVYRGRAVLRAKRGGLARNAAVALGNIGSDADLGLLEEVAATHDIPLVRGHAAWAMARIDAAATAPILRRLHDREPDPAVRAEIAATLNAPPPARCRDAA

SEQ ID NO: 81025 - protein, 323 aa, Sphaerospermopsis kisseleviana
  misc_feature (1)..(323): tr|A0A1Z4UWJ3|A0A1Z4UWJ3_9CYAN Epoxyqueuosine reductase OS=Sphaerospermopsis kisseleviana NIES-73 OX=1973480 G N=queG PE=3 SV=1
MKKCSLTSSLIKEKAQEIGFHKVGIAAVEGVDATEIQRLQAWMAMGYHADMEWMGNPKRQDISLVMPEVRSLICVALNYYTPHQHPEGEEYAKISRYGWGRDYHKVLHKKLKQLATWLESQGEGIKARYYADTGPVQDKVWAQKAGIGWIAKNGNVITREYGSWVFLGEILTNIELESDRTATQHCGNCTRCIQACPTAAITQPFVVDANKCIAYHTIENRAETLPENIKTNLHGWVAGCDICQDVCPWNQRFAQITDVTDFQPYPENLAPKLVELAQITDKEWDRRFTASALRRIKPKMLRRNARANLDSSKLKNDSKSNHL

SEQ ID NO: 81026 - protein, 323 aa, Sphaerospermopsis reniformis
  misc_feature (1)..(323): tr|A0A480A316|A0A480A316_9CYAN Epoxyqueuosine reductase OS=Sphaerospermopsis reniformis OX=531300 GN=queG PE=3 SV=1
MKKCSLTSSVIKEKAQEIGFHKVGFAAVEGVDATEIQKLQSWIAMGYHADMEWMGNPKRQDISLVMPEVRSLICVALNYYTPHQHPEGEEYAKISRYDWGRDYHKVLHKKLKQLATWLESQGEGIKARYYADTGPVQDKVWAQKAGIGWIAKNGNLITREYGSWVFLGEILTNIELESDRSATQHCGNCTRCIQACPTAAITQPFLVDANRCIAYHTIENRAETLPENIKTNLHGWVAGCDICQDVCPWNQRFAQITDVTDFQPYPENLAPKLVELAQITDEEWDRRFTASALRRIKPKMLRRNARANLDSSKLKNDSKSNHL

SEQ ID NO: 81027 - protein, 371 aa, Sphaerotilus hippei
  misc_feature (1)..(371): tr|A0A318H0K4|A0A318H0K4_9BURK Epoxyqueuosine reductase OS=Sphaerotilus hippei OX=744406 GN=queG PE=3 SV=1
MNSQRVEEPDGAALVERLRTWALELGFSQIGVSDVNLQGAEKGLLQWLDAGFHGEMDYMARHGLRRARPAELVPGTVRVVSARMDYLPAATPLGWREHEQARQHQPDQAIVSMYARGRDYHKVLRQRLQQLAERLQAEVGPTGHRVFCDSAPVLEVELARRAALGWRGKHTLLLDRSAGSMFFLGEIYIDLALPLTGAAGAGHCGRCSACLSACPTGAIVAPYRLDARRCISYLTIEHDGPIPEPLRAAFGNRIYGCDDCQLACPWNKYAQRSALPDFDVRAPLGDATLLALWAWDEAQFLHRTEGSAIRRIGHRRWQRNLAVALGNAWREAGDPAVRAALLERRASLGEAPADPVLAEHIDWALAQRPAA

SEQ ID NO: 81028 - protein, 349 aa, Sphaerotilus natans
  misc_feature (1)..(349): tr|A0A059KK56|A0A059KK56_9BURK Epoxyqueuosine reductase OS=Sphaerotilus natans subsp. natans DSM 6575 OX=12866 31 GN=queG PE=3 SV=1
MRQLREWAHALGFSQIGVADVHLATAEPGLLAWLEAGFHGSMQYMAAHGLRRARPAELVPGTVRVISVAMPYLPPDTGTDWRTIEHARAQQPGEAVISVYARGRDYHKVVRARLQRLADRLAAEIGPFGHRVFCDSAPVLEVELAGRAGLGWRGKHTLLLDRSAGSMFFLGELFVDLPLPVDAPAEPRCGRCSACIDACPTAAIVAPYRLDARRCISYLTIEHDGPIPVELRAAMGNRIYGCDDCQLVCPWNKYARTSTLADFDVRPGMGGATLLQLWAWDEASFLRRTEGSPIRRIGHARWRRNLAVALGNAWRETGEPALAEALRAARDGADALLAEHIDWALAQRA

SEQ ID NO: 81029 - protein, 367 aa, Sphaerotilus natans
  misc_feature (1)..(367): tr|A0A5C1PW42|A0A5C1PW42_9BURK Epoxyqueuosine reductase OS=Sphaerotilus natans subsp. sulfidivorans OX=639200 GN=queG PE=3 SV=1
MTDDDRDDGQPALDGPRLVRQLREWAHALGFSQIGVADVHLATAEPGLLAWLEAGFHGSMQYMAAHGLRRARPAELVPGTVRVISVAMPYLPQGTAPGWRDDERARAQQPGEAVISVYARGRDYHKVVRARLQRLADRLAAEIGPFGHRVFCDSAPVLEVELAGRAGLGWRGKHTLLLDRSAGSMFFLGELFVDLALPVDAPAEPHCGRCSACIDACPTAAIVAPYRLDARRCISYLTIEHDGPIPVELRAAMGNRIYGCDDCQLVCPWNKYARISTLADFEVRPGMGGATLLQLWAWDEASFLRRTEGSPIRRIGHARWRRNLAVAMGNAWRETGDEALAEALRAARDGAGELLAEHIDWALAQRV

SEQ ID NO: 81030 - protein, 210 aa, Sphingobacteriaceae bacterium
  misc_feature (1)..(210): tr|A0A3D3PGQ1|A0A3D3PGQ1_9SPHI tRNA epoxyqueuosine(34) reductase QueG (Fragment) OS=Sphingobacteriaceae bacter ium OX=2021370 GN=queG PE=4 SV=1
MLQNYSAYSHLIKEEALKLGFLFCGISKAEFLEEEASNLEAWLKNGFHGEMSYMENYFDKRLDPRKLVEDTKSVISLGLNYYTDQQQKDLSSPKISKYAYGDDYHTVIKSKLRQLIEIIREKIGDVSGRAFVDSAPVLDKAWAKKAGLGWVGKNANIINKERGSFFFLAELIIDLELEYDIAPAADHCGSCTRCIDACPTDAIVAPYIVD

SEQ ID NO: 81031 - protein, 311 aa, Sphingobacteriaceae bacterium
  misc_feature (1)..(311): tr|A0A1X9ZCB5|A0A1X9ZCB5_9SPHI Epoxyqueuosine reductase OS=Sphingobacteriaceae bacterium GW460-11-11-14-LB5 OX =1986952 GN=queG PE=3 SV=1
MYNNYAKYSQLIKDEALRLGFMACGISKAEFLEEEAPRLENWLNQNRHGEMKYMENYFDKRLDPRLLVDGAKSVISLSLNYYTEEKQSDPNAPKISKYAYGQDYHTVIKDKLKELTHFIEENIGEVSGRAFVDSAPVLDRAWAKKSGIGWIGKNSNLISKTDGSFFFLAELIVDLELDYDHPYQADYCGSCTRCLDACPTDAIIAPQVVDGTKCISYLTIELKNEIPNEFKDKMSNWMFGCDICQDVCPWNRFSKAHHEEAFKPAEGLLDLNAKDLTEITDDVFKRVFKGSAVKRTKFTGLKRNINFLKPE

SEQ ID NO: 81032 - protein, 191 aa, Sphingobacteriales bacterium
  misc_feature (1)..(191): tr|A0A4Q3CDR4|A0A4Q3CDR4_9SPHI tRNA epoxyqueuosine(34) reductase QueG (Fragment) OS=Sphingobacteriales bacteri um OX=2044944 GN=queG PE=4 SV=1
EHIGEVGGRAFVDSAPVMDKAWAAKSGLGWMGKNSNLLSKQVGSFFFIAELIVDIELEYDHAVTDHCGSCTACLDACPTQAIIQPYVVDGSKCISYFTIELKEKIPEEMKGSFADWAFGCDVCQDVCPWNRFSKPHREPLFNPNPDLLSFTKKDWEEITEDTFRAVFKNSAVKRTKFEGLKRNIDFLKPRS

SEQ ID NO: 81033 - protein, 319 aa, Sphingobacteriales bacterium
  misc_feature (1)..(319): tr|A0A2P7TFX2|A0A2P7TFX2_9SPHI Epoxyqueuosine reductase OS=Sphingobacteriales bacterium UPWRP_1 OX=2116516 GN= queG PE=3 SV=1
MTLLSTHLHTLQIKEEARRLGFQFAGISKSGFLEEEAPRLEEWLRRGYQGKMAYMEQHFDKRLDTTKLVPGSKSVITLLYNYYPLTATQNPDAPKISKYAWGEDYHIVLKDKLKELMYFIETHIGKVEGRGFVDSAPVMERAWAAKSGAGWIGKNSLLLHKKAGSYFFLAELIIDLALEYDSPVQDYCGTCTRCIDACPTQAITGNQLVDGSKCISYFTIELKDELPADMGGKFDNWMFGCDICQDVCPWNRFAQPHAEPRFAPAPLLLSMDKKDWEQLSQDTFNKLFKKSAVKRAKYAGLKRNIAFLSKENEKKTQKS

SEQ ID NO: 81034 - protein, 311 aa, Sphingobacteriia bacterium
  misc_feature (1)..(311): tr|A0A258YP97|A0A258YP97_9BACT Epoxyqueuosine reductase OS=Sphingobacteriia bacterium 24-36-13 OX=1970572 GN=q ueG PE=3 SV=1
MLPIQQYTQQVKSIAKKLGFEYCGIAQAVKLDEDARRLEKWLHQGMHGKMQYMENHFDLRVDPSKLVPGAKSVITLLKNYYPSAKQKPNTPLISKYAWGKDYHEVIRSQLKLFLAELSTHIGEINGRGFVDSAPVLERSWAVQSGLGWVGKNGNLIHKQSGSFFFIATLIVDIALEADAPFAKDYCGSCTKCIEACPTEAILPDKKINGSKCISYYTIELKDALLPNELKDQFNNWMFGCDICQDICPWNRFSKPHQEPSFEPISAVLNLTTSQWEELTEESFKTIFKESPLKRSKFSGIKRNLRFIQSSD

SEQ ID NO: 81035 - protein, 311 aa, Sphingobacteriia bacterium
  misc_feature (1)..(311): tr|A0A1G3J7S3|A0A1G3J7S3_9BACT Epoxyqueuosine reductase OS=Sphingobacteriia bacterium RIFOXYD2_FULL_35_12 OX=1 802167 GN=queG PE=3 SV=1
MLPIQQYTQQVKSIAKKLGFEYCGIAQAVKLDEDARRLEKWLHQGMHGKMQYMENHFDLRVDPSKLVPGAKSVITLLKNYYPSAKQKPNTPLIAKYAWGKDYHEVIRSQLKLFLAELSTHIGEINGRGFVDSAPVLERSWAVQSGLGWVGKNGNLIHKQSGSFFFIATLIVDIVLEADSPYAKDYCGSCTKCIEACPTEAILPDKKINGSKCISYYTIELKDALLPNELKEQFNNWMFGCDICQDICPWNRFSKPHQEPSFEPISAVLNLTTSQWEELTEESFKTIFKESPLKRSKFSGIKRNLRFIQSLD

SEQ ID NO: 81036 - protein, 311 aa, Sphingobacterium sp.
  misc_feature (1)..(311): tr|F4C483|F4C483_SPHS2 Epoxyqueuosine reductase OS=Sphi ngobacterium sp. (strain 21) OX=743722 GN=queG PE=3 SV= 1
MLIAAEKYSKLIKDEAKRLGFAFCGIAKADFLEEEAPRLEKWLKEEMHGEMYYMENHFDKRLDPRLLVEGAKSIISLGFNYFTSDIQIDKDSPKISRYAYGVDYHTVIKDKLKSLLHFMQDEIGEVGGRAFVDSAPVLDRAWAKRSGLGWIGKNSNLINRKKGSFFFLCELIVDIELDYDLAPTKDYCGTCTRCIDACPTEAIVAPQIVDGSKCISYLTIELKNEIPDQFVGKMDNWMFGCDVCQDVCPWNRFAEPHTEESFKPHPDLLEMTKKDWEEITEETFQRVFKKSAVKRAKFSGLTRNIKFLDNR

SEQ ID NO: 81037 - protein, 341 aa, Sphingobium algicola
  misc_feature (1)..(341): tr|A0A5J5H442|A0A5J5H442_9SPHN tRNA epoxyqueuosine(34) reductase QueG OS=Sphingobium algicola OX=2048546 GN=qu eG PE=4 SV=1
MEQRLKAEAARLGFAACRIAPADVAPKTGERLRQWLDAGHHGDMLWMEDRAEQRGSPKGLWPDVRSVIMLGMSYAPGRDPLGLADVPDRARFSVYAQGKDYHDVVKKALKALARWLVEQQPSALKVFVDTAPVMEKPLAQGAGLGWQGKHSNLVSRDHGSWLFLGAIYTEMALEPDSGERDHCGSCSACINACPTDAFPSPYVVDARRCISYLTIEHKGPIPEDLRAGIGNRVYGCDDCLSVCPWNKFADHAAANKAFIGRAELAAPAIGDLLDLDDATFREIFSGSPIKRIGRNRMVRNAAIAAGNSGDTRLLARLEALVADEDPVVAEAATWAIGKLTG

SEQ ID NO: 81038 - protein, 348 aa, Sphingobium algorifonticola
  misc_feature (1)..(348): tr|A0A437JCK4|A0A437JCK4_9SPHN Epoxyqueuosine reductase OS=Sphingobium algorifonticola OX=2008318 GN=queG PE=3 SV=1
MTKQSLPLEEQLKAAAAATGFADCAIAAADAAPRSAARLRDWIAQGCHGDMLWMEERAEQRGSPKGLWPEVRSVIMLGMSYTPGRDPLALEHVGDRGRISVYAQGQDYHDVVKKALKALARWLVDRAPCDVKVFVDTAPVMEKPLAEAAGLGWQGKHSNLVSRRHGSWLFLGAIYTTLDLTPDVPGSDSCGSCIACQAACPTDAFPAPYRLDARRCLSYLTIEHKGPIPEAFRKPMGNRIYGCDDCLAVCPWNKFADVAATHRAFLGRAELAAPALRDILALDDAAFREIFSGSPIKRIGRNRMVRNAAIAAGNSGEPLLIAVLEPLTRDADGVVAEAAGWAIAQLRA

SEQ ID NO: 81039 - protein, 341 aa, Sphingobium amiense
  misc_feature (1)..(341): tr|A0A494W7K1|A0A494W7K1_9SPHN Epoxyqueuosine reductase OS=Sphingobium amiense OX=135719 GN=queG PE=3 SV=1
MEQRLKSEAARLGFAACRIAPADAAPGAGERLRDWLDAGHHGDMLWMEERAEQRGSPRGLWPDVRSVIMLGMSYAPGRDPLALADVPERARVSVYAQGRDYHDVVKKALKALARWLVDQQSTALKVFVDTAPVMEKPLAQGAGLGWQGKHSNLVSRAHGSWLFLGAIYTEIALEPDAPESDHCGSCTACQSACPTDAFPAPYVVDARRCISYLTIEHKGPIPHDMRPGIGNRVYGCDDCLAVCPWNKFADMGAANRAFLGRAELAAPALADLLDLDDAAFREIFSGSPIKRIGRDRMVRNAAIAAGNSGDPALIPRLAPLVADPDPAVAEAARWAVERLTP

SEQ ID NO: 81040 - protein, 348 aa, Sphingobium baderi
  misc_feature (1)..(348): tr|A0A0S3EVD1|A0A0S3EVD1_9SPHN Epoxyqueuosine reductase OS=Sphingobium baderi OX=1332080 GN=queG PE=3 SV=1
MPTQIETLEQRLKRQAAQLGFAACAIASADAAPMAGRRLRDWLNAGHHGDMLWMEERAEQRGSPRGLWPDVRSVIMLGMSYAPGRDPLALAKAGDRARISVYAQGKDYHDTVKKGLKALARWLVEQQGSALKVFVDTAPVMEKPLAMAAGLGWQGKHSNLVSRTHGSWLFLGAIYSEIALTPDEGEHDHCGSCTACQTACPTDAFPSPYVVDARRCISYLTIEHKGPIPEALRPGIGNRVYGCDDCLAVCPWNKFADAAAANRAFLGRAELAAPAIEDLLALDDAAFREIFSGSPIKRIGRGRMVRNAAVAAGNSGEPRLIAKLRPLTSDGDPVVAEAATWAIARLSA

SEQ ID NO: 81041 - protein, 350 aa, Sphingobium baderi
  misc_feature (1)..(350): tr|T0G994|T0G994_9SPHN Epoxyqueuosine reductase OS=Sphi ngobium baderi LL03 OX=1114964 GN=queG PE=3 SV=1
MPTQIETLEQRLKAEAARLGFAACAIASADAAPMAGRRLRDWLDAGHHGGMLWMEERAAQRGSPRGLWPEVRSVVMLGMSYAPGRDPLALADAGDRARISVYAQGKDYHDIVKKGLKALARWLVAQQDGALKVFVDTAPVMEKPLAMAAGLGWQGKHSNLVSRTHGSWLFLGAIYSEIALATDQGEQDHCGSCNACQTACPTDAFPSPYVVDARRCISYLTIEHKGPIPEELRRGIGNRVYGCDDCLAVCPWNKFADAGAANRAFMGRAELAAPAIGDLLALDDAAFREIFSGSPIKRIGRGRMVRNAAIAAGNSGDRRLIAKLQALTGDPDPVVAEAADWAIGRLSIQS

SEQ ID NO: 81042 - protein, 349 aa, Sphingobium barthaii
  misc_feature (1)..(349): tr|A0A4R6FLH1|A0A4R6FLH1_9SPHN Epoxyqueuosine reductase OS=Sphingobium barthaii OX=1054037 GN=queG PE=3 SV=1
MPTQNETLEQRLKAEALRLGFAACAIAPADAAPRSAERLRQWLDAGHHGDMLWMAERAGQRGSPQALWPDVRSVIMLGMSYAPGRDPLALADAHDRGRISVYAQGRDYHDVVKKGLKALARWLVEQQPGALKVFVDTAPVMEKPLAEAAGLGWQGKHSNLVSRTHGSWLFLGAIYSEIALAPDMPEKDHCGSCTACQASCPTDAFPAPYVVDARRCISYLTIEHKGPIPEALRAGIGNRVYGCDDCLAVCPWNKFAEVAAANRAFVGRAELAAPELGDLLALDDAGFREIFAGSPIKRIGRNRMVRNAAIAAGNSGDRGLIGRLRPLTEDEDAVVAEAARWAIERLERG

SEQ ID NO: 81043 - protein, 340 aa, Sphingobium chinhatense
  misc_feature (1)..(340): tr|W1KWI0|W1KWI0_9SPHN Epoxyqueuosine reductase OS=Sphi ngobium chinhatense IP26 OX=1346790 GN=queG PE=3 SV=1
MEQRLKAEARRLGFAACAIAPADAAPRSAERLRQWLDAGHHGEMLWMEERAGQRGSPQGLWPDVRSVVMLGMSYAPGRDPLALADARDRGRISVYAQGRDYHDVVKKGLKALARWLVEQHPGALKVFVDTAPVMEKPLAQAAGLGWQGKHSNLVSRTHGSWLFLGAIYSEIALVPDAPEDDHCGSCTACQTACPTDAFPAPYVVDARRCISYLTIEHKGPIPEELRAGIGNRVYGCDDCLAVCPWNKFADAAAANRAFVGRAELAAPELGDLLALDDAGFREIFAGSPIKRIGRNRMVRNAAIAAGNSGDRRLVGRLQALAAADDPVVAEAARWALERLG

SEQ ID NO: 81044 - protein, 347 aa, Sphingobium chlorophenolicum
  misc_feature (1)..(347): tr|A0A081RCR0|A0A081RCR0_SPHCR Epoxyqueuosine reductase OS=Sphingobium chlorophenolicum OX=46429 GN=queG PE=3 SV=1
MPTQNETLEQRLKAEALRLGFAACAIAPADAAPRSAERLRQWLDAGHHGDMLWMEERAGQRGSPQGLWPDVRSVIMLGMSYAPGRDPLALAEVDDRGRISVYAQGRDYHDVVKKGLKALARWLVDQQPGALKVFVDTAPVMEKPLAQAAGLGWQGKHSNLVSRVHGSWLFLGAIYSEIALAPDAPEEDHCGSCTACQTACPTDAFPAPYVVDARRCISYLTIEHKGPIPEALRAGIGNRIYGCDDCLAVCPWNKFADAAAANRAFVARAELAAPELGDLLALDDAGFREIFSGSPIKRIGRNRMVRNAAIAAGNSGDRRLVRRLQALVTDDDPVVAEAACWALEQLV

SEQ ID NO: 81045 - protein, 347 aa, Sphingobium chlorophenolicum
  misc_feature (1)..(347): tr|F6EXR7|F6EXR7_SPHCR Epoxyqueuosine reductase OS=Sphi ngobium chlorophenolicum L-1 OX=690566 GN=queG PE=3 SV= 1
MPTQNETLEQRLKAEALRLGFAACAIAPADAAPRSAERLRQWLDAGHHGDMLWMEERAGQRGSPQGLWPDVRSVIMLGMSYAPGRDPLALAEVGDRGRISVYAQGRDYHDVVKKGLKALARWLVDQQPGALKVFVDTAPVMEKPLAQAAGLGWQGKHSNLVSRVHGSWLFLGAIYSEIALAPDAPEDDHCGSCTACQTACPTDAFPAPYVVDARRCISYLTIEHKGPIPEALRAGIGNRIYGCDDCLAVCPWNKFADAAAANRAFVGRAELAAPGLGDLLALDDAGFREIFSGSPIKRIGRNRMVRNAAIAAGNSGDRRLVGRLQALVTDDDPVVAEAACWALERLV

SEQ ID NO: 81046 - protein, 347 aa, Sphingobium chungbukense
  misc_feature (1)..(347): tr|A0A0M3AYZ2|A0A0M3AYZ2_9SPHN Epoxyqueuosine reductase OS=Sphingobium chungbukense OX=56193 GN=queG PE=3 SV=1
MPTQNETLEERLKAEARRLGFAACAIAPADAAPLAGERLKAWLDAGHHGDMLWMEERAGQRGSPQGLWPDVRSVIMLGMSYAPGRDPLALAEVGDRGRISVYAQGRDYHDVVKKGLKTLARWLVDQHPGALKVFVDTAPVMEKPLAQAAGLGWQGKHSNLVSRAHGSWLFLGAIYSEIALAPDAAEEDHCGSCSACQTACPTDAFPAPYVVDARRCISYLTIEHKGPIPEELRAGIGNRIYGCDDCLAVCPWNKFADAAAANRAFVGRAELAAPALDDLLALDDAGFREIFSGSPIKRIGRNRMVRNAAIAAGNSGDRRLIERLRPLVADNDPVVAEAAEWALARLV

SEQ ID NO: 81047 - protein, 348 aa, Sphingobium cloacae
  misc_feature (1)..(348): tr|A0A1E1F3Q3|A0A1E1F3Q3_9SPHN Epoxyqueuosine reductase OS=Sphingobium cloacae OX=120107 GN=queG PE=3 SV=1
MPVQIETLEQRLKAEAARLGFAACAIARADAAPQAGQRLRAWLGAGHHGEMLWMEERAEQRGSPQGLWPDVRSVIMLGMSYAPGRDPLALADAGDRARISVYAQGKDYHDTVKKGLKALARWLVAQQDGALKVFVDTAPVMEKPLAMAAGLGWQGKHSNLVSRTHGSWLFLGAIYSEIALTPDEGEVDHCGSCTACQSACPTDAFPAPYVVDARRCISYLTIEHKGPIPEEFRAAIGNRVYGCDDCLAVCPWNKFADRAAANRAFVGRAELAAPAIEDLLALDDAAFREIFSGSPIKRIGRDRMVRNAAIAAGNSGDPRLMEKLRPLAVDPDPVVAEAARWAMGRLSI

SEQ ID NO: 81048 - protein, 354 aa, Sphingobium cupriresistens
  misc_feature (1)..(354): tr|A0A4Q4JVV7|A0A4Q4JVV7_9SPHN Epoxyqueuosine reductase OS=Sphingobium cupriresistens OX=1132417 GN=queG PE=3 SV=1
MSVETETLEQRLKEEAARLGFAACRVAPADAAPLAGARLRQWLDAGHHGDMLWMEERAQQRGSPKGLWPQVRSVIMLGMSYAPGRDPLALADVPDRARFSVYAQGKDYHDVVKKALKALARWLVEQQPSSLKVFVDTAPVMEKPLAQGAGLGWQGKHSNLVSRDHGSWLFLGAIYTELALAPDDSETDHCGRCTACLNACPTDAFPSPYMVDARRCISYLTIEHKGPIPDDLRAGIGNRVYGCDDCLAVCPWNKFADAAAANRAFVGRAELAAPEIADLLALDDASFREIFSGSPIKRIGRNRLVRNAAIAAGNSGDARLLAPLEALVRDDDPVVAEAATWAIGRLSGGDESVG

SEQ ID NO: 81049 - protein, 354 aa, Sphingobium czechense
  misc_feature (1)..(354): tr|A0A0J7XSI0|A0A0J7XSI0_9SPHN Epoxyqueuosine reductase OS=Sphingobium czechense LL01 OX=1420583 GN=queG PE=3 SV=1
MSVETETLEQRLKEEAARLGFAACRVAPADAAPLAGARLRQWLDAGHHGDMLWMEERAQQRGSPKGLWPQVRSVIMLGMSYAPGRDPLALADVPDRARFSVYAQGKDYHDVVKKALKALARWLVEQQPSSLKVFVDTAPVMEKPLAQGAGLGWQGKHSNLVSRDHGSWLFLGAIYTELALTPDDGETDHCGRCTACLNACPTDAFPSPYMVDARRCISYLTIEHKGPIPDDLRAGIGNRVYGCDDCLAVCPWNKFADAAAANRAFVGRAELAAPEIADLLALDDASFREIFSGSPIKRIGRNRLVRNAAIAAGNSGDARLLAPLEALVRDDDPVVAEAATWAIGRLSGGDESVG

SEQ ID NO: 81050 - protein, 348 aa, Sphingobium faniae
  misc_feature (1)..(348): tr|A0A1G4S3D9|A0A1G4S3D9_9SPHN Epoxyqueuosine reductase OS=Sphingobium faniae OX=570446 GN=queG PE=3 SV=1
MPVQIETLEQRLKAQAAQLGFAACAIARADAAPKAGRRLREWLGAGHHGDMLWMEERAEQRGSPQGLWPEVRSVVMLGMSYAPARDPLALAEVGDRARISVYAQGKDYHDIVKKGLKALARWLVEQQDSALKVFVDTAPVMEKPLAMAAGLGWQGKHSNLVSRAHGSWLFLGAIYSEIALTPDAGEQDHCGSCTACQSACPTDAFPSPYVVDARRCISYLTIEHKGPIPEEFRAAIGNRVYGCDDCLAVCPWNKFADRAAAHRAFVGRAELAAPAIEDLLALDDAAFREIFSGSPIKRIGRDRMVRNAAIAAGNSGEPRLLEKLRPLAGDPDPVVAEAAIWAMKRLSV

SEQ ID NO: 81051 - protein, 340 aa, Sphingobium francense
  misc_feature (1)..(340): tr|A0A4Q4J3Y7|A0A4Q4J3Y7_9SPHN Epoxyqueuosine reductase OS=Sphingobium francense OX=332057 GN=queG PE=3 SV=1
MEQRLKAEAWRLGFAACAIAPADAAPRSAERLRQWLDAGHHGEMLWMEERAGQRGSPQGLWPDVRSVVMLGMSYAPGRDPLALADARDRGRISVYAQGRDYHDVVKKGLKALARWLVEQHPGALKVFVDTAPVMEKPLAQAAGLGWQGKHSNLVSRTHGSWLFLGAIYSEIALVPDAPEDDHCGSCTACQTACPTDAFPAPYMVDARRCISYLTIEHKGPIPEELRAGIGNRVYGCDDCLAVCPWNKFADAAAANRAFVGRAELAAPELGDLLALDDAGFREIFAGSPIKRIGRNRMVRNAAIAAGNSGDRRLVGRLQALAADDDPVVAEAARWALERLG

SEQ ID NO: 81052 - protein, 340 aa, Sphingobium fuliginis
  misc_feature (1)..(340): tr|A0A292ZKU6|A0A292ZKU6_SPHSA Epoxyqueuosine reductase OS=Sphingobium fuliginis (strain ATCC 27551) OX=336203 GN=queG PE=3 SV=1
MEQRLKAEALRLGFAACAIAPANAAPRSAERLRQWLDAGHHGEMLWMEERAGQRGSPQGLWPDVRSVVMLGMSYAPGRDPLALADVPDRGRISVYAQGRDYHDVVKKGLKSLARWLVEQHPGALKVFVDTAPVMEKPLAEAAGLGWQGKHSNLVSRAHGSWLFLGAIYSEIALAPDAPEKDHCGSCIACQAACPTDAFPAPYMVDARRCISYLTIEHKGPIPEEFRAGIGNRIYGCDDCLAVCPWNKFADAAAANRAFIGRAELAAPELGDLLALDDAGFREIFSGSPIKRIGRNRMVRNAAIAAGNSGDRRLADRLRALVADDDPVVAEAARWALERLD

SEQ ID NO: 81053 - protein, 340 aa, Sphingobium fuliginis
  misc_feature (1)..(340): tr|A0A5B8CH85|A0A5B8CH85_SPHSA Epoxyqueuosine reductase OS=Sphingobium fuliginis ATCC 27551 OX=1208342 GN=queG PE=3 SV=1
MEQRLKAEALRLGFAACAIAPANAAPRSAERLRQWLDAGHHGEMLWMEERAGQRGSPQGLWPDVRSVVMLGMSYAPGRDPLALADVPDRGRISVYAQGRDYHDVVKKGLKALARWLVEQHPGALKVFVDTAPVMEKPLAEAAGLGWQGKHSNLVSRAHGSWLFLGAIYSEIALAPDAPEKDHCGSCTACQAACPTDAFPAPYMVDARRCISYLTIEHKGPIPEEFRAGIGNRIYGCDDCLAVCPWNKFADAAAANRAFVGRAELAAPELGDLLALDDAGFREIFSGSPIKRIGRNRMVRNAAIAAGNSGDRRLADRLRALVADDDPVVAEAARWALERLA

SEQ ID NO: 81054 - protein, 352 aa, Sphingobium herbicidovorans
  misc_feature (1)..(352): tr|A0A086P4Z0|A0A086P4Z0_SPHHM Epoxyqueuosine reductase OS=Sphingobium herbicidovorans (strain ATCC 700291 / D SM 11019 / NBRC 16415 / MH) OX=1219045 GN=queG PE=3 SV= 1
MPTQTETLEQRLKAQAQRLGFAACAIARADAAPEAGQRLRQWLDAGRHGDMLWMEDRAEQRASPRGLWPDVRSVIMLGMSYAPGRDPLKLADVSDRGRISVYAQGRDYHDVVKKGLKILARWLVEQQESALKVFVDTAPVMEKPLAAAAGLGWQGKHSNLVSRDHGSWLFLGAIYSEIALEPDAPAVDHCGSCNACQTACPTDAFPAPYVVDARRCISYLTIEHKGPIPEEFRVGIGNRIYGCDDCLAVCPWNKFADAAAANKAFIGRAELAAPELDDLLALDDAGFREIFSGSPIKRIGRDRMVRNAAIAAGNSGEPRLIARLQPLLADGDTVVAEAAAWAIGKLSAKEAI

SEQ ID NO: 81055 - protein, 344 aa, Sphingobium hydrophobicum
  misc_feature (1)..(344): tr|A0A249MQP8|A0A249MQP8_9SPHN Epoxyqueuosine reductase OS=Sphingobium hydrophobicum OX=1673076 GN=queG PE=3 S V=1
MESLETRLKVQAASLGFAACAIAPADVAPQAGKRLGEWLDAGHHGDMLWMEERAGQRGSPRGLWPDVRSVVMLGMSYAPGRDPLALADVPDRARLSVYAQGKDYHDVVKKGLKSLARWLVDQQPGALKVFVDTAPVMEKPLAQGAGLGWQGKHSNLVSRQHGSWLFLGAIYTEIALEPDAPEVDHCGSCTACQTACPTDAFPSPYVVDARRCISYLTIEHKGPIPHELREGIGNRIYGCDDCLAVCPWNKFADQAAANKAFVGRAELAAPALADLLALDDAAFREIFSGSPIKRIGRNRMVRNAAIAAGNSGDARLLGRLQVLAGDDDPVVAEAATWAIGRLSV

SEQ ID NO: 81056 - protein, 340 aa, Sphingobium indicum; identical to SEQ ID NO: 81051
  misc_feature (1)..(340): tr|A0A1L5BRX3|A0A1L5BRX3_SPHIB Epoxyqueuosine reductase OS=Sphingobium indicum (strain DSM 16412 / CCM 7286 / MTCC 6364 / B90A) OX=861109 GN=queG PE=3 SV=1

SEQ ID NO: 81057 - protein, 340 aa, Sphingobium japonicum
  misc_feature (1)..(340): tr|D4YXR1|D4YXR1_SPHJU Epoxyqueuosine reductase OS=Sphi ngobium japonicum (strain DSM 16413 / CCM 7287 / MTCC 6 362 / UT26 / NBRC 101211 / UT26S) OX=452662 GN=queG PE= 3 SV=1
MEQRLKAEARRLGFAACAIAPANAAPRSAERLRQWLDAGHHGEMLWMEERAGQRGSPQGLWPDVRSVVMLGMSYAPGRDPLALADARDRGRISVYAQGRDYHDVVKKGLKALARWLVEQHPGALKVFVDTAPVMEKPLAQAAGLGWQGKHSNLVSRTHGSWLFLGAIYSEIALVPDAPEDDHCGSCTACQTACPTDAFPAPYVVDARRCISYLTIEHKGPIPEELRAGIGNRVYGCDDCLAVCPWNKFADAAAANRAFVGRAELAAPELGDLLALDDAGFREIFAGSPIKRIGRNRMVRNAAIAAGNSGDRRLVGRLQALAAADDPVVAEAARWALERLG

SEQ ID NO: 81058 - protein, 341 aa, Sphingobium japonicum
  misc_feature (1)..(341): tr|N1MJ95|N1MJ95_9SPHN Epoxyqueuosine reductase OS=Sphi ngobium japonicum BiD32 OX=1301087 GN=queG PE=3 SV=1
METRLKAQAAALGFAVCAIAPADVAPQAGQRLGEWLDAGHHGDMLWMAERAGQRGSPRDLWPDVRSVVMLGMSYAPGRDPLALADVGDRARISVYAQGKDYHDVVKKGLKALARWLVEQQPGALKVFVDTAPVMEKPLAQGAGLGWQGKHSNLVSRQHGSWLFLGAIYTEIALQPDAPEIDHCGSCTACQTACPTDAFPSPYVVDARRCISYLTIEHKGPIPHELREGIGNRIYGCDDCLAVCPWNKFAESAAANKAFVGRAELAAPAIADLLALDDAAFREIFSGSPIKRIGRNRMVRNAAIAAGNSGDARLLGRLQALAGDDDPVVAEAAIWAIGRLSV

SEQ ID NO: 81059 - protein, 346 aa, Sphingobium lactosutens
  misc_feature (1)..(346): tr|T0HNJ4|T0HNJ4_9SPHN Epoxyqueuosine reductase OS=Sphi ngobium lactosutens DS20 OX=1331060 GN=queG PE=3 SV=1
MEQRLKAQAQQLGFAACRIADADAAPQSAARLRAWLDAGHHGDMLWMEERAEQRGSPRGLWPAVRSVIMLGMSYAPARDPLALADAPDRARFSVYAQGKDYHDVVKKALKALARWLVEQPTREGEANALKVFVDTAPVMEKPLAAGAGLGWQGKHSNLVSRTHGSWLFLGAIYTERALTPDAPERDHCGSCTACQAACPTDAFPAPYVVDARRCISYLTIEHKGPIPQDLRDGIGNRVYGCDDCLAVCPWNKFADHAAANKAFLGRAELAAPDIGDLLDLDDATFREIFSGSPIKRIGRNRLVRNAAIAAGNSADPRLLTRLRPLCDDEDPVVAEAAAWAIAKLTA

SEQ ID NO: 81060 - protein, 341 aa, Sphingobium limneticum
  misc_feature (1)..(341): tr|A0A5J5H9S6|A0A5J5H9S6_9SPHN tRNA epoxyqueuosine(34) reductase QueG OS=Sphingobium limneticum OX=1007511 GN= queG PE=4 SV=1
MEQRLKAEAARLGFAACRIAPADVAPRTGERLRQWLDAGHHGDMLWMEDRAEQRGSPKGLWPDVRSVIMLGMSYAPGRDPLALADVPDRARFSVYAQGKDYHDVVKKALKALARWLVEQQAGSLKVFVDTAPVMEKPLAQGAGLGWQGKHSNLVSRDHGSWLFLGAIYTEMALEPDGGERDHCGSCSACINACPTDAFPSPYVVDARRCISYLTIEHKGPIPEDLRAGIGNRVYGCDDCLSVCPWNKFADHAAANKAFIGRAELAAPAIGDLLDLDDATFREIFSGSPIKRIGRNRMVRNAAIAAGNSGDTRLLARLEALVADEDPVVAEAATWAIGKLTG

SEQ ID NO: 81061 - protein, 340 aa, Sphingobium lucknowense; identical to SEQ ID NO: 81043
  misc_feature (1)..(340): tr|A0A081T2N7|A0A081T2N7_9SPHN Epoxyqueuosine reductase OS=Sphingobium lucknowense F2 OX=1450518 GN=queG PE=3 SV=1

SEQ ID NO: 81062 - protein, 341 aa, Sphingobium paulinellae; identical to SEQ ID NO: 81037
  misc_feature (1)..(341): tr|A0A5J5I366|A0A5J5I366_9SPHN tRNA epoxyqueuosine(34) reductase QueG OS=Sphingobium paulinellae OX=2048545 GN =queG PE=4 SV=1

SEQ ID NO: 81063 - protein, 347 aa, Sphingobium quisquiliarum
  misc_feature (1)..(347): tr|T0H6C2|T0H6C2_9SPHN Epoxyqueuosine reductase OS=Sphi ngobium quisquiliarum P25 OX=1329909 GN=queG PE=3 SV=1
METFEQRLKAEALRLGFAACAIARADAAPEAGRRLREWLDAGRHGDMLWMEERAEQRASPAGLWPDVRSVIMLGMSYAPGRDPLALAEAGGRGRISVYAQGRDYHDIVKKGLKALARWLVEQQQGALKVFVDTAPVMEKPLAQAAGLGWQGKHSNLVSRAHGSWLFLGAIYSEIALEPDAPERDHCGSCAACQAACPTGAFPAPYVVDARRCISYLTIEHKGPIPDALRVGIGNRIYGCDDCLAVCPWNKFADRAAANRAFVGRAELAAPSLADLLDLDDAGFREVFSGSPIKRIGRGRMVRNAAIAAGNSGDKDLLNRLRPLLADADPVVAEAAAWAIGRLTAPPA

SEQ ID NO: 81064 - protein, 349 aa, Sphingobium sp.
  misc_feature (1)..(349): tr|A0A2W6SSD4|A0A2W6SSD4_9SPHN Epoxyqueuosine reductase OS=Sphingobium sp. OX=1912891 GN=queG PE=3 SV=1
METLEQRLKSEAARLGFAACRIATADAAPGAGQRLRAWLDAGHHGDMLWMEDRAEQRGSPKGLWPDVRSVVMLGMSYAPRRDPLALAHVPDRARVSVYAQGKDYHDVVKKALKALARWLVEQQAGSLKVFVDTAPVMEKPLAQGAGLGWQGKHSNLVSRDHGSWLFLGAIYTEIVLEPDGPERDHCGSCTACQAACPTDAFPAPYVVDARRCISYLTIEHKGPIPHDLRAGIGNRVYGCDDCLAVCPWNKFADHAAANRAFVGRAELAAPAIADLLDLDDAAFREIFAGSPIKRIGRNRMVRNAAIAAGNSGDAGLIPRLEALLDDADPVVAEAARWAVEQLAGAGYFA

SEQ ID NO: 81065 - protein, 348 aa, Sphingobium sp.
  misc_feature (1)..(348): tr|A0A1H9RN79|A0A1H9RN79_9SPHN Epoxyqueuosine reductase OS=Sphingobium sp. YR768 OX=1884365 GN=queG PE=3 SV=1
METETLEQRLKAEALRLGFAACRIARADAAPKSGERLREWLDAGYHGDMLWMEERSEQRGSPTGLWPDVRSVIMLGMSYAPGRDPLALADVPDRARFSVYAQGKDYHDVVKKALKALARWLVEQQQGALKVFVDTAPVMEKPLAAGAGLGWQGKHSNLVSRDHGSWLFLGAIYSELALEADGPERDHCGSCTACQAACPTDAFPAPYKVDARRCISYLTIEHKGPIPEELRAGIGNRVYGCDDCLAVCPWNKFADAAAANRAFVGRAELAAPAIGDLLDLDDATFREIFSGSPIKRIGRNRMVRNAAIAAGNSGDPRLLARLEALVGDADAVVAEAAEWAIGKLSPSP

SEQ ID NO: 81066 - protein, 341 aa, Sphingobium ummariense
  misc_feature (1)..(341): tr|T0J2S4|T0J2S4_9SPHN Epoxyqueuosine reductase OS=Sphi ngobium ummariense RL-3 OX=1346791 GN=queG PE=3 SV=1
MEQRLKAEAARLGFAACAIARADAAPLAEARLRDWLAAGHHGDMLWMEERAAQRGSPQGLWPDVRSVVMLGMSYAPSRDPLALAGAGDRGRISVYAQGRDYHDVVKKGLKALARWLVEQQPGSLKVFVDTAPVMEKPLAQAAGLGWQGKHSNLVSRAHGSWLFLGAIYSEIALEPDAAEEDHCGSCTACQSACPTDAFPSPYVVDARRCISYLTIEHKGPIPEALRAGIGNRIYGCDDCLAICPWNKFADAAAANRAFLGRAELAAPALADLLDLDDAAFREIFSGSPIKRIGRDRMVRNAAIAAGNSGDPRLLDRLRPLLGDIDPAVADAARWAIGRLSP

SEQ ID NO: 81067 - protein, 350 aa, Sphingobium wenxiniae
  misc_feature (1)..(350): tr|A0A562KE92|A0A562KE92_SPHWJ Epoxyqueuosine reductase OS=Sphingobium wenxiniae (strain DSM 21828 / JZ-1) OX= 595605 GN=queG PE=3 SV=1
MATQIETLEQRLKAEAARLGFAACAIASADAAPMAGRRLRDWLDAGHHGGMLWMEERAAQRGSPRGLWPEVRSVVMLGMSYAPGRDPLALADAGDRARISVYAQGKDYHDIVKKGLKALARWLVAQQDGALKVFVDTAPVMEKPLAMAAGLGWQGKHSNLVSRTHGSWLFLGAIYSEIALATDQGEQDHCGSCNACQTACPTNAFPSPYVVDARRCISYLTIEHKGPIPEELRRGIGNRVYGCDDCLAVCPWNKFADAGAANRAFMGRAELAAPAIGDLLALDDVAFREIFSGSPIKRIGRGRMVRNAAIAAGNSGDRRLIAKLQALTGDPDPVVAEAADWAIGRLSIQS

SEQ ID NO: 81068 - protein, 344 aa, Sphingobium xenophagum
  misc_feature (1)..(344): tr|A0A401J5U1|A0A401J5U1_SPHXE Epoxyqueuosine reductase OS=Sphingobium xenophagum OX=121428 GN=queG PE=3 SV=1
MESLETRLKVQAASLGFAACAIAPADVAPQAGKRLGEWLDAGHHGDMLWMEERAGQRGSPRGLWPDVRSVVMLGMSYAPGRDPLALADVPDRSRISVYAQGKDYHDVVKKGLKSLARWLVDQQPGALKVFVDTAPVMEKPLAQGAGLGWQGKHSNLVSRQHGSWLFLGAIYTEIALQPDAPEVDHCGSCTACQTACPTDAFPSPYVVDARRCISYLTIEHKGPIPHDLREGIGNRIYGCDDCLAVCPWNKFADQAAANKAFVGRAELAAPAIADLLALDDAAFREIFSGSPIKRIGRNRMVRNAAIAAGNSGDVRLLGRLQALAGDDDPVVAEAATWAIGRLSV

SEQ ID NO: 81069 - protein, 352 aa, Sphingobium yanoikuyae
  misc_feature (1)..(352): tr|A0A084ECI8|A0A084ECI8_SPHYA Epoxyqueuosine reductase OS=Sphingobium yanoikuyae OX=13690 GN=queG PE=3 SV=1
MPVQNETLEQRLKAQAAQLGFAACAIARADAAPRTAERLRQWLEAGHHGDMLWMEERAEQRGSPTGLWPEARSVIMLGMSYAPGRDPLALAEVGDRGRISVYAQGRDYHDVVKKALKALARWLVDQQPTALKVFVDTAPVMEKPLAQGAGLGWQGKHSNLVSRQHGSWLFLGAIYTEIALEPDAPEVDHCGSCTACLSSCPTDAFPSPYIVDARRCISYLTIEHKGPIPEEFRARMGNRIYGCDDCLAACPWNKFAQGAAANRAFIGRAELAAPALGDLLDLDDAGFREIFSGSPIKRIGRDRMVRNAAIAAGNSGDLRLVDRLRRLTSDSDPVVAEAAEWALGQLLSAAGA

SEQ ID NO: 81070 - protein, 352 aa, Sphingobium yanoikuyae
  misc_feature (1)..(352): tr|K9CQN6|K9CQN6_SPHYA Epoxyqueuosine reductase OS=Sphi ngobium yanoikuyae ATCC 51230 OX=883163 GN=queG PE=3 SV =1
MPVQNETLEQRLKAQAAQLGFAACAIARADAAPRTAERLRQWLEAGHHGDMLWMEERAEQRGSPTGLWPEARSVIMLGMSYAPGRDPLALAEVGDRGRISVYAQGRDYHDVVKKALKALARWLVDQQPTALKVFVDTAPVMEKPLAQGAGLGWQGKHSNLVSRQHGSWLFLGAIYTEIALEPDAPEVDHCGSCTACLSSCPTDAFPAPYIVDARRCISYLTIEHKGPIPEEFRARMGNRIYGCDDCLAACPWNKFAQGAAANRAFIGRAELAAPALGDLLDLDDTGFREIFSGSPIKRIGRDRMVRNAAIAAGNSGDLGLVDRLRPLTSDPDPVVAEAAQWALGQLLSAAGV

SEQ ID NO: 81071 - protein, 346 aa, Sphingomonadaceae bacterium
  misc_feature (1)..(346): tr|A0A2E3HKC5|A0A2E3HKC5_9SPHN Epoxyqueuosine reductase OS=Sphingomonadaceae bacterium OX=1930536 GN=queG PE=3 SV=1
MVNGELQAELREEAERLGFVACGFASAAPDPQRASRLEQFLGEGRHGSMEWMEARKTQRASPQGLWPEANSVIALGMSYAPDVDPLALADAAEKARVSVYAQGRDYHDVVKKALKALARWLIAREPTSELKVFVDTAPVMEKPLGQAAGIGWQGKHTNLVSRSHGSWLFLGAIYSTLEFAPDLSHPDRCGNCRACQDACPTDAFPAPYQLDARRCISYLTIEHKGPIPEEFREALGNRIYGCDDCLAVCPWNKFADTAHRHLKLAPREELAAPDLASFLTFDDAGFRQFFSGSPIKRVGRDRFVRNCLYAAGNSGSAALAPLVEGLRGDPDPAVSEAADWAARRLG

SEQ ID NO: 81072 - protein, 367 aa, Sphingomonadaceae bacterium
  misc_feature (1)..(367): tr|A0A257DKX1|A0A257DKX1_9SPHN tRNA epoxyqueuosine(34) reductase QueG OS=Sphingomonadaceae bacterium PASS1 OX= 2015579 GN=queG PE=4 SV=1
MVNELQAKAQSEGLVAFGIAPGHLAPRAGQRLRQWIDEGRHGDMLWMESRVDERANPDILWPEVKSVIMLGMSYAPPHDPMALAGDDTKARISVYAQGRDYHDVIKGALKRLASWLAHSAEVGVKVFVDTAPVMEKALAEVAGLGWQGKHSNIVSKEHGSWLFLGAIYTTAELAPSVPATDTCGSCRACQDICPTNAFPAPYQLDARRCISYLTIEHKGPIDRELRSLMGNHIYGCDDCLAVCPWNKFAETAAAHKAFLPREALVAPCIADLLALDDTQFRQLFSGSPVKRIGRDSFVRNVLIAAGNGRDLGVLPVVEMLMDDTSPVVRGAAIWAMSRLSPEIFAREKQARFADELDPSVRTEWTLS

SEQ ID NO: 81073 - protein, 350 aa, Sphingomonadales bacterium
  misc_feature (1)..(350): tr|A0A4Q5RVN8|A0A4Q5RVN8_9SPHN Epoxyqueuosine reductase OS=Sphingomonadales bacterium OX=1978525 GN=queG PE=3 SV=1
MGVQLDKSLAAQIKVKAAEIGFAACGVARADAAPRAGERLHQWLAEGRHGSMIWMEERAHHRESPAGLWPEVRSVISLGMSYAPATDPLALAEEGERGRISVYAQGQDYHDVVKRRLKELARWIVGQAKDADVKVFVDTAPVMEKPLAEAAGLGWQGKHTNLVSREHGSWLFLGAIYTTLDLAGDKGAPSTCGSCDACQTACPTDAFPAPYRLDARRCISYLTIEHKGPIPHEFREAIGNRIYGCDDCLAVCPWNKFAEAGRANLAFAPRAELTAPALADLLALDDAAFREVFSGSPIKRIGRDRMVRNCLIAAGNSGSAALAGPVRALLVDPDETVREAAEWAAARLEV

SEQ ID NO: 81074 - protein, 355 aa, Sphingomonadales bacterium
  misc_feature (1)..(355): tr|A0A1G3JMJ6|A0A1G3JMJ6_9SPHN Epoxyqueuosine reductase OS=Sphingomonadales bacterium RIFCSPLOWO2_12_FULL_63_1 5 OX=1802170 GN=queG PE=3 SV=1
MEERLKGQAAQLGFAICRIAPTDAAPQSAERLRQWLDAGHHGDMLWMEDRAEQRGSPQGLWPDVRSVIMLGMSYAPGRDPLALADVPDRARISVYAQGKDYHDVVKKALKALARWLVDQQHGALKVFVDTAPVMEKPLAQGAGLGWQGKHSNLVSRDHGSWLFLGAIYTELTLAPDGAERDHCGSCTACLTACPTDAFPSPYVVDARRCISYLTIEHKGPIPHDLRAGIGNRIYGCDDCLAACPWNKFADAAAAHRAFLGRAELAAPELADLLALDDADFRELFSGSPIKRIGRNRLVRNAAIAAGNSGDARLRGRLEALVADDDPVVAEAAAWAIEKLSSAAPLNPLPPSRERV

SEQ ID NO: 81075 - protein, 383 aa, Sphingomonas aerolata
  misc_feature (1)..(383): tr|A0A2T4YUY8|A0A2T4YUY8_9SPHN Epoxyqueuosine reductase OS=Sphingomonas aerolata OX=185951 GN=queG PE=3 SV=1
MPDDKPSDLESRVKAKAAELGFAACGIARADAAPLAGERLHQWLAEGRHGDMIWMEERRDQRASPAGLWPAVRSVIALGMSYAPKDDPLRLAEQGEVGRISVYAQGADYHDVIKRQLKALGRWLASDAVGVEYLFDLKVFVDTAPVMEKPLAEAAGLGWQGKHTNLVSRTEGSWLFLGAIYTTLELKGDTAGRDLCGSCDACQRACPTDAFPAPYRLDARRCISYLTIEHAGVIPEEFRAGIGNRIYGCDDCLAVCPWNKFAAAANANLAFAPRAELVAPEIADLIALDDAGFRQVFAGSPIKRIGRDKMVRNALIAAGNSGDPALSEGVAALLGDPAPVVRGTAVWALSRLDAARFAAEKAQRRGSENDDGVRVEWDRANLS

SEQ ID NO: 81076 - protein, 356 aa, Sphingomonas aquatilis
  misc_feature (1)..(356): tr|A0A511Q5X5|A0A511Q5X5_9SPHN Epoxyqueuosine reductase OS=Sphingomonas aquatilis NBRC 16722 OX=1219039 GN=que G PE=3 SV=1
MAKDKPSPTPIEARIKAEAAALGFVACGIARADAAPRSGERLRQWLDEGRHGGMIWMEERSAQRAAPAALWSDVRSVIALGMSYAPARDPLALAGEGERGRISVYAQGGDYHDVVKRALKALGRWLAREAGCDLKVFVDTAPVMEKPLSEAAGLGWQGKHTNLVSRDHGSWLFLGAIYTTLDLAPDTPGRDSCGSCDACQRACPTDAFPAPYRLDARRCISYLTIEHAGPIPEEFRTGIGNRIYGCDDCLAVCPWNKFAASAAANMAFHPRAELTAPALADLLALDDAGFRQVFSGSPIKRIGRNRMVRNAAIAAGNSGSPALIPALDRLLGDEDPVVAEAAAWARARLDRTGSGG

SEQ ID NO: 81077 - protein, 353 aa, Sphingomonas aurantiaca
  misc_feature (1)..(353): tr|A0A2T5GLS4|A0A2T5GLS4_9SPHN Epoxyqueuosine reductase OS=Sphingomonas aurantiaca OX=185949 GN=queG PE=3 SV=1
MAQDKLEHRLKAKAAELGFAACGIARADAAPRAGERLHQWLADGRHGDMIWMEERKHHRESPAGLWPEVRSVIALGMSYAPKDDPLRFADEGGVGRISVYAQGPDYHDVVKRQLKALGRWLAAEAGRDLPPFDLKVFVDTAPVMEKPLAEAAGLGWQGKHTNLVSRDHGSWLFLGAIYTTLDLEPDKGGVDTCGTCTACLGACPTDAFPAPFQLDARRCISYLTIEHAGPIPHEFRAAIGNRIYGCDDCLAVCPWNKFAAAANANLAFHPRAELVAPELADILALDDAGFRQVFAGSPIKRIGRDRMIRNALIAAGNSGDLRLAPLVQDLLADENPVVRDAADWALSRLGAPS

SEQ ID NO: 81078 - protein, 350 aa, Sphingomonas carotinifaciens
  misc_feature (1)..(350): tr|A0A1G7EWY1|A0A1G7EWY1_9SPHN Epoxyqueuosine reductase OS=Sphingomonas carotinifaciens OX=1166323 GN=queG PE= 3 SV=1
MPQDKLETRIKAKAAELGFASIGIARADAAPHSAARLREWLADGAHGSMIWMEERAHHRESPAGLWPEVRTVISLGVSYAPKDDPMKLADAGDIGRISVYAQGADYHDVVKRQLKALGRWLVAEAACELKVFVDTAPVMEKPLAEAAGLGWQGKHTNLVSRAHGSWLFLGAIYTTLELTPDVAGRDTCGSCDACQQACPTAAFPKPYRLDARRCISYLTIEHKGPIPEEFRAAMGNRIYGCDDCLAACPWNKFAVAASANMAFRPRAELTAPALADLLDLDDAGFRQVFAGSPIKRIGRERMVRNAAIAAGNSGEYALVPVLQRLTTDASETVAEAARWALEQLGRQAKK

SEQ ID NO: 81079 - protein, 376 aa, Sphingomonas changbaiensis
  misc_feature (1)..(376): tr|A0A0E9MQK6|A0A0E9MQK6_9SPHN Epoxyqueuosine reductase OS=Sphingomonas changbaiensis NBRC 104936 OX=1219043 G N=queG PE=3 SV=1
MATESLPQALKNEAARIGFAACGIARADAAPRSGERLRAWLADGAHGDMIWMESRADQRAAPAGLWPDVRSVIALGMSYAPGGDPLKLAAEPEAGRISVYAQGADYHDLVKRKLKELARWLVAQAGGDLKVFVDTAPVMEKPLAEAAGLGWQGKHTNLVSREHGSWLFLGAIFTTLELAPDAAGAQRCGSCDACQRACPTDAFPAPFRLDARRCISYLTIEHKGPIPRALRKGIGNRIYGCDDCLAVCPWNKFAEAGAANLAFAPRAELSAPMLADLLALDDAGFRQLFAGSPIKRIGRDRMMRNCLVAAGNSGAAGLVETVRAHLDDPNPVVRGAAVWALGRLDEAMLGEERKSRLHEEPDEIVREEWLLASPSL

SEQ ID NO: 81080 - protein, 376 aa, Sphingomonas desiccabilis
  misc_feature (1)..(376): tr|A0A4Q2IUW8|A0A4Q2IUW8_9SPHN Epoxyqueuosine reductase OS=Sphingomonas desiccabilis OX=429134 GN=queG PE=3 SV =1
MDQHKSLETRIQEKAAELGFAACGFARADAAPQTAARLREWLEAGRHGSMIWMEERAHHRGSPAGLWPEVRSVIALGMSYAPARDPLALAGVGDRGRISVYAQGADYHDVVKKALKALGRWLANEAGCDLKVFVDTAPVMEKPLAEAAGLGWQGKHTNLLSREHGSWLFLGAIYTTLELAPDARPGGSCGSCDACQRACPTDAFPAPYQLDARRCVSYLTIEHAGPIPAALRPGIGNRIYGCDDCLAVCPWNKFAATAAANKGFLPRAELAAPRLAELMALDDPGFRQVFAGSPIKRIGRDRMVRNALVAAGNSGDPALVRPVVALLDDPAPVVRGAAAWALGQLDPARFAGEREARLVAEADVDVRAEWAASPSS

SEQ ID NO: 81081 - protein, 352 aa, Sphingomonas edaphi
  misc_feature (1)..(352): tr|A0A418PY01|A0A418PY01_9SPHN Epoxyqueuosine reductase OS=Sphingomonas edaphi OX=2315689 GN=queG PE=3 SV=1
MTSLKQRIFDKAAELGFSAWGIARANAAPEAGERLMDWLAAGNHGEMGWMEERAGQRSSPNGLWPDAKSVIALGMSYAPAVDPLALADAGDRGRISVYAQGADYHKVVKKALKAMGRWLADECGCQLKVFVDTAPVMEKPLSAAAGVGWQGKHSNLLNREHGSWLFLGIIYTTLDLEPDDPAAEHCGSCTRCIDACPTRAIVAPQLVDARRCISYLTIELAGPIPNEFREAIGNRIYGCDDCLAVCPWNRFASAAQANKAFAPRAELAAPALADLLSLDDASFRELFSGSPIKRIGVARMTRNCLIAAGNSGELSLRPSIERHLGSDDPVVADAARWALERLQRLPSRASIA

SEQ ID NO: 81082 - protein, 374 aa, Sphingomonas elodea
  misc_feature (1)..(374): tr|A0A495F1Q6|A0A495F1Q6_SPHEL Epoxyqueuosine reductase OS=Sphingomonas elodea OX=179878 GN=queG PE=3 SV=1
MRVRQDKSIEERLKAKAAEIGFAACGIAHADAAPRTAERLRQWLDEGAHGEMLWMEERAEQRGSPKGLWPEVRSVIALGMSYAPANDPLALADAGEIGRISVYAQGADYHDVVKRRLKELARWLVAEAPGADVKVFVDTAPVMEKPLSEAAGLGWQGKHTNLVSRSHGSWLFLGAIYTTLDLASDGPSGGGCGSCDACQTACPTGAFPAPYRIDARRCVSYLTIENKGPIPRDLRQGIGNRIYGCDDCLAVCPWNKFAAAAQANLAFHPRAELTVPHLADLLALDDAGFREVFAGSPIKRIGRDRMVRNCLIAAGNSGSARLVAPVATLLDDPDPVVRGAAIWALAQLAPARWADERIARASMEQDPLAHAEWQ

SEQ ID NO: 81083 - protein, 392 aa, Sphingomonas faeni
  misc_feature (1)..(392): tr|A0A2T5UBC3|A0A2T5UBC3_9SPHN Epoxyqueuosine reductase OS=Sphingomonas faeni OX=185950 GN=queG PE=3 SV=1
MAQDKLEHRLKAKAAELGFVACGIAHAGAAPRAGERLHQWLADGRHGDMIWMEERKHHRESPAGLWPEVRSVIALGMSYAPKDDPLRLADEGGVGRISVYAQGPDYHDVVKRQLKALGRWLAAEAGRDLPPFDLKVFVDTAPVMEKPLAEAAGLGWQGKHTNLVSREHGSWLFLGAIYTTLDLEPDKGGVDTCGSCDACQTACPTAAFPRPYQLDARRCISYLTIEHAGPIPHEFRAAIGNRIYGCDDCLAVCPWNKFAAAANANLAFHPRAELIAPELADILALDDASFRTVFAGSPIKRIGRAKMIRNALMAAGNSRDPGLVEAVVGLLSDDSPVVRGAAIWALRRLDSARWGIERGRRLADEGDQSVLGEWGAAAVDRVVPLVDLPASK

SEQ ID NO: 81084 - protein, 371 aa, Sphingomonas fennica
  misc_feature (1)..(371): tr|A0A2T4I087|A0A2T4I087_9SPHN Epoxyqueuosine reductase OS=Sphingomonas fennica OX=114404 GN=queG PE=3 SV=1
MTAELKIEARRLGFVACGVAPADATPDSAMRLREWLDSGAHGDMLWMEERAGQRGSPRALWPDVKSVVMLGMSYAPAEDPLRLADAPGIARISAYAQGQDYHDIVKKALKALARWLVDRAGGDLKVFVDTAPVMEKPLAEAAGLGWQGKHTNLVSRDHGSWLFLGAIMTTLDLAADDPGRGGCGSCDACQRACPTAAFPAPYRLDARRCISYLTIENKGPIPHEFRAAMGNRIYGCDDCLAVCPWNKFAATAAANRAFAARAELAAPEIADLLALDDPAFRAVFAGSPIKRIGRDRMVRNALIAAGNDRGRHLLPAVLHLLDDPTPMVRGAAIWALERIDPAGFAAARASRLPAEADASVRAEWLGMAMEA

SEQ ID NO: 81085 - protein, 357 aa, Sphingomonas gei
  misc_feature (1)..(357): tr|A0A4S1X915|A0A4S1X915_9SPHN Epoxyqueuosine reductase OS=Sphingomonas gei OX=1395960 GN=queG PE=3 SV=1
MRQDKPLEQRIKEKAAEIGFADCGIARADAAPAAGVRLRQWLAEGAHGSMIWMEERAHHRASPAALWPEVRSVIALGMSYAPAVDPLALAGEGETGRISVYAQGGDYHDLIKRRLKELARWLVGVAPGADVKVFVDTAPVMEKPLSEAAGLGWQGKHTNLVSRSHGSWLFLGAIYTTLDLAPDLAQQSTCGSCNACQTACPTDAFPAPYRLDARRCISYLTIEHKGPIPLEFRASMGNRIYGCDDCLAVCPWNKFAAAAQANLAFAPRAELTAPALADLLALDDAGFREVFAGSPIKRIGRDRMVRNCLIAAGNSGSAALVAPVRALLGDPDEVIREAAEWALGRLEGQAFPQLRSP

SEQ ID NO: 81086 - protein, 372 aa, Sphingomonas ginsenosidivorax
  misc_feature (1)..(372): tr|A0A5C6U9G4|A0A5C6U9G4_9SPHN Epoxyqueuosine reductase OS=Sphingomonas ginsenosidivorax OX=862135 GN=queG PE= 3 SV=1
MRVAVDKLEDRIRAKAAELGFAACGLARADAAPRAGERLHQWLAEGRHGDMIWMEERKHHRESPAGLWPEVRSIIALGLSYAPKEDPLRLADEGGVGRISVYAQGGDYHDVMKRALKALGRWLAKEAGCDLKVFVDTAPVMEKPLAEAAGLGWQGKHTNLVSRTAGSWLFLGAIYTTLDLAPDTPGSDSCGSCTACQTACPTDAFPAPYQLDARRCISYLTIEHAGPIPREFRRGIGNRIYGCDDCLAVCPWNKFAAAAQANLAFAPRAELVAPGLADLLALDDAGFRQVFAGSPIKRIGRDKMTRNALIAAGNSGDPDLLASVAALLDDPATVVRGAAVWALGRLDAARWQTERSGRIAAEADSAVLAEWG

SEQ ID NO: 81087 - protein, 357 aa, Sphingomonas glacialis
  misc_feature (1)..(357): tr|A0A502G497|A0A502G497_9SPHN Epoxyqueuosine reductase OS=Sphingomonas glacialis OX=658225 GN=queG PE=3 SV=1
MWRTVVDALPLEQRLAAKAREFGFVACGVAAADAAPKTAERLQQWLREGLHGGMIWMEERAHHRESPAGLWPEVKSVIALGMSYAPATDPLALAGEGGVGRISTYAQGGDYHDVVKRALKALARWLVAEAPGIDLKVFVDTAPVMEKPLAEAAGLGWQGKHTNLVSRSEGSWLFLGAIYTTLEIGAFGAVTPPVADHCGSCDACQRACPTDAFPAPYRLDARRCISYLTIEHAGPIPLEFRKGIGNRIYGCDDCLAVCPWNKFAAAASANRAFLPRAELVAPELADLLALDDAGFRQVFAGSPIKRIGRDRMVRNCLIAAGNSGDPGLRAQVALLRDDPNPVVAEAAEWAFAELADA

SEQ ID NO: 81088 - protein, 383 aa, Sphingomonas haloaromaticamans
  misc_feature (1)..(383): tr|A0A1S1H8G3|A0A1S1H8G3_9SPHN Epoxyqueuosine reductase OS=Sphingomonas haloaromaticamans OX=653954 GN=queG PE =3 SV=1
MPHSSHHIDNKALTAELKIEARRLGFVACGVAPADATPDSAMRLREWLESGAHGDMLWMEERAGQRGTPRALWPDVKSVVMLGMSYAPAEDPLRLADAPGIARISAYAQGQDYHDIVKKALKALARWLVDRAGGDLKVFVDTAPVMEKPLAEAAGLGWQGKHTNLVSRDHGSWLFLGAIMTTLDLAADGPGRGGCGSCDACQRACPTAAFPAPYRLDARRCISYLTIENKGPIPHEFRAAMGNRIYGCDDCLAVCPWNKFAATAAANRAFAARAELAAPEIADLLALDDPAFRAVFAGSPIKRIGRDRMVRNALIAAGNDRGRHLLPAVLRLLDDPAPVVRGAAIWALERIDPAGFAAARATRLPAEADASVRAEWLGVAMEA

SEQ ID NO: 81089 - protein, 359 aa, Sphingomonas hengshuiensis
  misc_feature (1)..(359): tr|A0A2W5B8E8|A0A2W5B8E8_9SPHN Epoxyqueuosine reductase OS=Sphingomonas hengshuiensis OX=1609977 GN=queG PE=3 SV=1
MIQDKGSPGDIVARIRAMAAECGFVACGIARADAAPRTAQRLRQWLDEGRHGSMIWMEERAHQRGSPAALWSEVKSIIALGMSYAPAGDPLALEGVGDRGRISVYAQGGDYHDVVKKALKALGRWLAQEAGCDLKVFVDTAPVMEKPLSEAAGLGWQGKHTNLVSRAHGSWLFLGAIYTTLDLPPDRPGRDSCGSCDACQRACPTDAFPQPYRLDARRCISYLTIEHAGPIPVELRAGIGNRIYGCDDCLAVCPWNKFAEVAAANRAFAARAEFAAPRLADLIALDDASFRAVFRGSPIKRIGRNRMVRNALIAAGNSGDPALVEPVRAACGDGDAVVAEAAAWALAQLNPALTLLPAS

SEQ ID NO: 81090 - protein, 357 aa, Sphingomonas hengshuiensis
  misc_feature (1)..(357): tr|A0A2W5CV04|A0A2W5CV04_9SPHN Epoxyqueuosine reductase OS=Sphingomonas hengshuiensis OX=1609977 GN=queG PE=3 SV=1
MNKDKPFAARLKQHATHVGFHACGIAPAAAAPQAGERLRDWLAAGRHGDMIWMAVRERERASPRGLWSEVQSVIALGMSYAPAVDPLALAGEPTRGRVSVYAQGGDYHDVVKRALKALARWIVAEAGGDVKVFVDTAPVMEKPLAEAAGIGWQGKHTNLVSRADGSWLFLGAIYTTLDLAADAPGRDACGSCDACQRACPTNAFPAPYQLDARRCVSYLTIEHAGPIPHDLRAGIANRVYGCDDCLAVCPWNKFAASAAANRAFLPRAELTAPALADLLALDDAGFRAVFAGSPVKRIGRERMARNAAIAAGNSGDARLAVPLRALLGDDSAVVREAADWALAQLLAPATPGDGADA

SEQ ID NO: 81091 - protein, 398 aa, Sphingomonas histidinilytica
  misc_feature (1)..(398): tr|A0A1T5EC93|A0A1T5EC93_9SPHN Epoxyqueuosine reductase OS=Sphingomonas histidinilytica OX=439228 GN=queG PE=3 SV=1
MTKHWVLAATLLDSPEMTDDPISLREAIRDEALKLGFTACGFARADAAPESAARLDAWLATGAHGSMEWMEARKGERARPQGLWPEARSLIMLGMSYAPREDPMRLADAPGIGRISVYAQGTDYHDVVKKALKHLARWLVDRAGGALKVFVDTAPVMEKPLSAAAGIGWQGKHSNLVSREHGSWLFLGAIMTSLELPPDDPHDDRCGSCSACQAACPTDAFPRPYVVDARRCISYLTIEHKGPIPAEFRAPIGNRIYGCDDCLAVCPWNKFAEAAAANRAFAARAELAAPELEDLLGLDDAGFRAVFAGSPIKRIGRDRMLRNALIAAGNSGLARLLPPIMALLDDPAPVVRGAAVWALGRLDPAGFATERATRRADEKDSDVAAEWDAEIAAAPAAR

SEQ ID NO: 81092 - protein, 352 aa, Sphingomonas indica
  misc_feature (1)..(352): tr|A0A1X7FZ42|A0A1X7FZ42_9SPHN Epoxyqueuosine reductase OS=Sphingomonas indica OX=941907 GN=queG PE=3 SV=1
MTAPLSLRDRLEAEARSLGFTAFGIARADAAPRSGERLRAWLADGAHGDMIWMEETANRRASPAGLWPEVRSVIALGMSYAPAADPRLLEAEPEAGRISVYAQGGDYHDVVKRALKALARWLVAAAPSELKVFVDTAPVMEKPLAEAAGIGWQGKHTNLVSREDGSWLFLGTIFTTLELEADAPHALRCGSCHACIDACPTAAFPVPYRLDARRCISYLTIEHKGPIPEEFRAAIGNRIYGCDDCLAACPWNRFASSARRNQAFLPRAELAAPALADLLALDDAGFRRVFAGSPIKRIGRNRMVRNAAIAAGNSGSAALVPVLQRLTDDADAVVAEAARWALERLAVSAAPR

SEQ ID NO: 81093 - protein, 380 aa, Sphingomonas jatrophae
  misc_feature (1)..(380): tr|A0A1I6JRZ4|A0A1I6JRZ4_9SPHN Epoxyqueuosine reductase OS=Sphingomonas jatrophae OX=1166337 GN=queG PE=3 SV=1
MNYSLTDRLKAEAARLGFVACGIAPADAMPQAAARLREWLASGAHGEMLWMEARESERASPTGLWPDVRSVVMLGMSYAPATDPRLLESELAIGRFAAYAQGQDYHDIVKKALKALARWLVAEAPDTALKVFVDTAPVMEKPLAEAAGLGWQGKHSNLVSREHGSWLLLGALMTTLDLAPDAPARTTCGSCSACLDACPTNAFPAPFRLDARRCISYLTIEAKGPIPREHRRSIGNRVYGCDDCLAACPWNKFAAGAAANRAFLPRAELTAPAIADLLELDDAAFRQVFSGSPIKRIGRDRMVRNALTAAGNSGDGALVGRVAALLDDASPLVRGAAVWALGQLAPQRLSAEAWRSGEETDAEVQAEWAAAGLDGSPPSA

SEQ ID NO: 81094 - protein, 351 aa, Sphingomonas koreensis
  misc_feature (1)..(351): tr|A0A1L6J9L7|A0A1L6J9L7_9SPHN Epoxyqueuosine reductase OS=Sphingomonas koreensis OX=93064 GN=queG PE=3 SV=1
MQQGKSLEGRIRDKAAELGFAACGFARADAAPLAGRRLHEWLAEGQHGDMIWMAERAHHRESPRGLWPEVRSVISLGMSYSPANDPLALADVPDRARISVYAQGADYHDVMKKALKALGRWLAQEAGCDLKVFVDTAPVMEKPLAEAAGLGWQGKHTNLVSRYHGSWLFLGAIYTTLELEPDGRSGGGCGSCDACQTACPTDAFPAPYRLDARRCISYLTIELKGPIPEEFREGIGNRIYGCDDCLAVCPWNKFAAAAAANLSFAPRAELTAPELRDLLALDDAGFRQVFSGSPIKRIGRDRMMRNCLIAAGNSGDAALLAAVEALRDDPDPVVAEAADWARARLTSRGSP

SEQ ID NO: 81095 - protein, 351 aa, Sphingomonas koreensis
  misc_feature (1)..(351): tr|A0A2M8WA58|A0A2M8WA58_9SPHN Epoxyqueuosine reductase OS=Sphingomonas koreensis OX=93064 GN=queG PE=3 SV=1
MQQGKSLEGRIRDKAAELGFAACGFARADAAPLAGRRLHEWLAEGRHGDMIWMAERAHHRESPRGLWPEVRSVISLGMSYSPANDPLALADVPDRARISVYAQGADYHDVMKKTLKALGRWLAQEAGCDLKVFVDTAPVMEKPLAEAAGLGWQGKHTNLVSRYHGSWLFLGAIYTTLELEPDGRSGGGCGSCDACQTACPTDAFPAPYRLDARRCISYLTIELKGPIPEEFREGIGNRIYGCDDCLAVCPWNKFAAAAAANLSFAPRAELTAPELRDLLALDDAGFRQVFSGSPIKRIGRDRMMRNCLIAAGNSGDAALLPAVEALRDDPDPVVAEAADWAQARLTSRGSP

SEQ ID NO: 81096 - protein, 378 aa, Sphingomonas laterariae
  misc_feature (1)..(378): tr|A0A239HHE7|A0A239HHE7_9SPHN Epoxyqueuosine reductase OS=Sphingomonas laterariae OX=861865 GN=queG PE=3 SV=1
MPDPSHHIDNKTLTAALKAEARRLGFVACGVAPADATPQAAARLAEWLASGAHGDMLWMEDRAEQRGSPAALWPEVRSVVMLGMSYAPAEDPLRLADAAGVARISTYAQGQDYHDIVKKALKALARWLVDQAGCDLKVFVDTAPVMEKPLAEAAGLGWQGKHTNLVSRDHGSWLFLGAIMTTLALEPDGRHRGSCGSCDACQTACPTAAFPAPYRIDARRCISYLTIENKGPIPREFRVAMGNRIYGCDDCLAVCPWNKFASAAAANQAFAARAELAVPGIADLLGLDDAGFRQVFAGSPIKRIGRDRMVRNALIAAGNDGGAALRAPIAALLDDPAPIVRGAAAWALARIDHPAFLAERDRRLAEEGDASVRDEWGA

SEQ ID NO: 81097 - protein, 356 aa, Sphingomonas melonis
  misc_feature (1)..(356): tr|A0A0D1M7C8|A0A0D1M7C8_9SPHN Epoxyqueuosine reductase OS=Sphingomonas melonis OX=152682 GN=queG PE=3 SV=1
MAKDKPSPTPIESRIKAEAAALGFVACGIAHADAAPRSGERLRQWLDEGRHGGMIWMEERSAQRAAPAALWSDVRSVIALGMSYAPARDPLALAGEGEVGRISVYAQGGDYHDVVKRALKALGRWLAREAGCDLKVFVDTAPVMEKPLSEAAGLGWQGKHTNLVSRDHGSWLFLGAIYTTLDLAPDTPGRDSCGSCDACQRACPTDAFPAPYRLDARRCISYLTIEHAGPIPEEFRTSIGNRIYGCDDCLAVCPWNKFAASAAANMAFHPRAELTAPALADLLALDDAGFRQVFSGSPIKRIGRNRMVRNAAIAAGNSGSPALIPALDRLLGDDDPVVAEAAAWARARLDRTGSGG

SEQ ID NO: 81098 - protein, 356 aa, Sphingomonas melonis
  misc_feature (1)..(356): tr|A0A175Y4Y7|A0A175Y4Y7_9SPHN Epoxyqueuosine reductase OS=Sphingomonas melonis TY OX=621456 GN=queG PE=3 SV=1
MAKDKPSPTPIEARIKAEAAALGFVACGIAHADAAPRSGERLRQWLDEGRHGGMIWMEERSAQRAAPAALWSDVRSVIALGMSYAPARDPLALAGEGERGRISVYAQGGDYHDVVKRALKALGRWLAREAGCDLKVFVDTAPVMEKPLSEAAGLGWQGKHTNLVSRDHGSWLFLGAIYTTLDLVPDTPGRDSCGSCDACQRACPTDAFPAPYRLDARRCISYLTIEHAGPIPEEFRDGIGNRIYGCDDCLAVCPWNKFAASAAANMAFHPRAELTAPALADLLALDDAGFRQVFSGSPIKRIGRNRMVRNAAIAAGNSGSPALIPALDRLLGDDDPVVAEAAAWARARLDRTGSGG

SEQ ID NO: 81099 - protein, 356 aa, Sphingomonas naasensis
  misc_feature (1)..(356): tr|A0A4S1WEW7|A0A4S1WEW7_9SPHN Epoxyqueuosine reductase OS=Sphingomonas naasensis OX=1344951 GN=queG PE=3 SV=1
MEELIKQKAAEIGFADCGVARADAAPAAGARLREWLAEGAHGSMIWMEERANHRESPAGLWPEVRSVIALGMSYAPGVDPMALAGAGETGRISVYAQGADYHDLIKRKLKELARWLVGAAPGADVKVFVDTAPVMEKPLSEAAGLGWQGKHTNLVSRTHGSWLFLGAIYTTLDLAPDGPGRSTCGSCDACQTACPTDAFPAPYRLDARRCISYLTIEHKGPIPHELREAIGNHIYGCDDCLSVCPWNKFAAAAQANLAFAPRAELTAPALADLLALDDADFREVFAGSPIKRIGRNRMVRNCLIAAGNSGSAALAAPVRALLDDPDEVVREAAGWALERIGAPAKAGAQGEEATGM

SEQ ID NO: 81100 - protein, 388 aa, Sphingomonas oleivorans
  misc_feature (1)..(388): tr|A0A2T5G0Z2|A0A2T5G0Z2_9SPHN Epoxyqueuosine reductase OS=Sphingomonas oleivorans OX=1735121 GN=queG PE=3 SV= 1
MDIEAALKAEAAALGFVACGIARADAAPETAARLAEWLASGAHGDMLWMEERSGQRGSPAALWPEVRSVIMLGMSYAPAENPMALEGEGGIGRISAYARGQDYHDIVKKALKALARWLVAKAGGDVKVFVDTAPVMEKPLAEAAGLGWQGKHSNLVSREQGSWLLLGAIMTTLELTPDARHRDSCGSCDACQRACPTDAFPAPYRIDARRCISYLTIENKGPIPLEFRAAIGNRVYGCDDCLAVCPWNKFAASAAANRAFHARAELAAPEIGDLLEMDDPAFRAIFSGSPIKRIGRDRMVRNALIVAGNSGAAALVAPAVRLLDDPSALVRGAAVWALSRLDPAAFARERAARIDSETDETVRAEWMLPPDMADARSVEPISALPAGG

SEQ ID NO: 81101 - protein, 335 aa, Sphingomonas oligophenolica
  misc_feature (1)..(335): tr|A0A502CKV0|A0A502CKV0_9SPHN Epoxyqueuosine reductase OS=Sphingomonas oligophenolica OX=301154 GN=queG PE=3 SV=1
MAAELGFAACGIARADAAPQTAARLRQWLDEGRHGDMIWMETRAHQRETPRALWPEVRSVIALGMSYAPTIDPLALAGESDIGRISVYAQGGDYHDVVKRQLKALGRWLAGEAGCDLKVFVDTAPVMEKPLAEAAGLGWQGKHTNLVSRDHGSWLFLGAIYTTLDLVPDRPGSDTCGSCDACQRACPTDAFPAPYRLDARRCISYLTIEHAGSIPHEFREAIGNRIYGCDDCLAVCPWNKFAHAASANLAFAPRAELAAPALADLLALDDAGFRQVFAGSPIKRIGRDRMVRNAAIAAGNSDDPALVPALDRLADDASEVVREAAAWARARLAAD

SEQ ID NO: 81102 - protein, 374 aa, Sphingomonas panacis
  misc_feature (1)..(374): tr|A0A1B3Z7Q4|A0A1B3Z7Q4_9SPHN Epoxyqueuosine reductase OS=Sphingomonas panacis OX=1560345 GN=queG PE=3 SV=1
MNEHNPLTARLKAKAAELGFAACGIAHADVSPRAGERLHQWLAQGMHGDMLWMAERAGQRESPAALWPAVRSVIALGMSYAPAADPLALADAGGIGRISVYAQGGDYHDVVKRALKALARWLIAEAPGADVKVFVDTAPVMEKPLAEAAGLGWQGKHTNIVSRDAGSWLFLGAIYTTLDLEADAGARDACGSCDACQRACPTDAFPAPYRLDARRCISYLTIEHAGPIPHEFRPGIGNRIYGCDDCLAVCPWNKFAASAAANRAFLPRAELAAPALADLLALSDADFRSVFAGSPIKRIGRDRMVRNCLIAAGNSGVAALADPVTRLLDDPSPVVRGAAVWALARLNAERARAEKAARLSFETDAGVLEEWAVL

SEQ ID NO: 81103 - protein, 349 aa, Sphingomonas parapaucimobilis
  misc_feature (1)..(349): tr|A0A0A1W6S3|A0A0A1W6S3_9SPHN Epoxyqueuosine reductase OS=Sphingomonas parapaucimobilis NBRC 15100 OX=1219049 GN=queG PE=3 SV=1
MAQDKLETRIKAKATELGFAAIGITHADAAPKTVERLHQWLDEGRHGSMIWMADRAHQRQSPASLWPEVKSILSLGVSYAPAEDPMRLADQGRIGRISVYAQGADYHDVVKRQLKALGRWLAQEAGCDLKVFVDTAPVMEKPLAEAAGLGWQGKHTNLVSREHGSWLFLGAIYTTLELEPDAVARDSCGRCDACQRACPTDAFPAPYQLDARRCISYLTIEHAGPIPEEFRVAMGNRIYGCDDCLAVCPWNKFAAAAQANMAFHPRAELTAPELGDLLSLDDAGFRQVFSGSPIKRIGRNRMVRNAAIAAGNSGAVELVPVLRGLLGDDDPVVVEAVEWALGQLGGSDA

SEQ ID NO: 81104 - protein, 347 aa, Sphingomonas paucimobilis
  misc_feature (1)..(347): tr|A0A031JI13|A0A031JI13_SPHPI Epoxyqueuosine reductase OS=Sphingomonas paucimobilis OX=13689 GN=queG PE=3 SV= 1
METFEQRLKAEALRLGFAACAIARAGAAPEAGRRLREWLDAGRHGDMLWMEERAEQRASPAGLWPDVRSVIMLGMSYAPGRDPLALAEAGGRGRISVYAQGRDYHDIVKKGLKALARWLVEQQQGALKVFVDTAPVMEKPLAQAAGLGWQGKHSNLVSRAHGSWLFLGAIYSEIALEPDAPERDHCGSCAACQAACPTGAFPAPYVVDARRCISYLTIEHKGPIPDALRAGIGNRIYGCDDCLAVCPWNKFADRAAANRAFVGRAELAAPSLADLLDLDDAAFREVFSGSPIKRIGRGRMVRNAAIAAGNSGDKDLLNRLRPLLDDADPVVAEAAAWAVERLTAPPA

SEQ ID NO: 81105 - protein, 353 aa, Sphingomonas paucimobilis
  misc_feature (1)..(353): tr|A0A0C9MMU5|A0A0C9MMU5_SPHPI Epoxyqueuosine reductase OS=Sphingomonas paucimobilis NBRC 13935 OX=1219050 GN= queG PE=3 SV=1
MAQDKLETRIKAKAAELGFAAIGITHADAAPKTVERLHQWLAEGRHGSMIWMADRAHQRQSPASLWPEVRSVISLGVSYAPAEDPMRLAEHKRIGRISVYAQGADYHDVVKRQLKALGRWLAQEAGCDLKVFVDTAPVMEKPLAEAAGLGWQGKHTNLVSREHGSWLFLGAIYTTLELEPDAVARDTCGRCDACQRACPTDAFPAPYQLDARRCISYLTIEHAGPIPEEFRVAIGNRIYGCDDCLAVCPWNKFAAAAQANMAFHPRAELTAPELGDLLSLDDAEFRQVFSGSPIKRIGRNRMVRNAAIAAGNSGAAELVPVLRGLLGDADPVVVEAAEWALGRLNAQPSSWRV

SEQ ID NO: 81106 - protein, 372 aa, Sphingomonas pokkalii
  misc_feature (1)..(372): tr|A0A2U0SBE6|A0A2U0SBE6_9SPHN Epoxyqueuosine reductase OS=Sphingomonas pokkalii OX=2175090 GN=queG PE=3 SV=1
MRQDKPIEARLKAKAAEIGFAACGIADADAAPRTAERLRAWLDDGAHGDMLWMEERAEQRGSPRGLWPDVRSVIALGMSYAPAADPLALAHEGEVGRISVYAQGADYHDVVKRRLKELARWLVEAAPGADVKVFVDTAPVMEKPLSEAAGLGWQGKHTNLVSRSHGSWLFLGAIYTTLALSPDGPGRGGCGSCDACQTVCPTDAFPAPYRIDARRCISYLTIENKGPIPREFRAGIGNRIYGCDDCLAVCPWNKFAAAAQANLAFHPRAELTVPYLADLLALDDASFRQVFAGSPIKRIGRDRMLRNCLIAAGNSGSAALVARVATLLDDPAGVVRGAAVWALSQLDPARWAAERAGRMVGESDPDVLAEWC

SEQ ID NO: 81107 - protein, 355 aa, Sphingomonas rubra
  misc_feature (1)..(355): tr|A0A1I5U2S7|A0A1I5U2S7_9SPHN Epoxyqueuosine reductase OS=Sphingomonas rubra OX=634430 GN=queG PE=3 SV=1
MQHGKLQDRIRAKAAELGFAACGFADADAAPQAGERLRRWLADGRHGSMIWMEERAHHRVGPAALWPAVRSVISLGMSYAPKCDPLALADEGGIGRISVYAQGADYHDVMKRALKALGRWLAQEAGCDLKVFVDTAPVMEKPLAEAAGVGWQGKHTNLVSRADGSWLFLGAIYTTLELDADMASRDACGSCDACQRACPTDAFPAPYQLDARRCISYLTIEHAGPIPAEFRAAIGNRIYGCDDCLAVCPWNKFAASAAANLAFAPRAEMVAPRLADLLALDDAGFRQVFAGSPIKRIGRDRMVRNAAIAAGNSGEAALVAALRPLLDDPSPVVAEAAAWALDRLGSAAADGKGQG

SEQ ID NO: 81108 - protein, 349 aa, Sphingomonas sanguinis
  misc_feature (1)..(349): tr|A0A147JDH6|A0A147JDH6_9SPHN Epoxyqueuosine reductase OS=Sphingomonas sanguinis OX=33051 GN=queG PE=3 SV=1
MAQDKLETRIKAKAAELGFAAIGITHADAAPKTVERLHHWLAEGRHGSMIWMADRAHQRQSPTSLWPEVKSVISLGVSYAPAEDPMRLADQGRIGRISVYAQGADYHDVVKRQLKALGRWLAQEANCDLKVFVDTAPVMEKPLAEAAGLGWQGKHTNLVSRDHGSWLFLGAIYTTLELEPDAVARDTCGRCDACQRACPTDAFPAPYQLDARRCISYLTIEHAGPIPEEFRVAMGNRIYGCDDCLAVCPWNKFAAAAQANMAFHPRAELTAPELGDLLSLDDAGFRQVFSGSPIKRIGRNRMVRNAAIAAGNSGAAELVPVLQGLLGDADPVVVEAAEWALGRLGEISA

SEQ ID NO: 81109 - protein, 349 aa, Sphingomonas sanguinis
  misc_feature (1)..(349): tr|A0A147HS23|A0A147HS23_9SPHN Epoxyqueuosine reductase OS=Sphingomonas sanguinis OX=33051 GN=queG PE=3 SV=1
MAQDKLETRIKAKAAELGFAAIGITHADAAPKTVERLHQWLAEGRHGSMIWMADRAHQRQSPASLWPEVKSIISLGVSYAPAEDPMRLADQGRIGRISVYAQGADYHDVVKRQLKALGRWLAQEAKCDLKVFVDTAPVMEKPLAEAAGLGWQGKHTNLVSRDHGSWLFLGAIYTTLELEPDAVARDTCGRCDACQRTCPTDAFPAPYQLDARRCISYLTIEHAGPIPEEFRVAIGNRIYGCDDCLAVCPWNKFAAAAQANMAFHPRAELTAPELGDLLSLDDADFRQVFSGSPIKRIGRNRMVRNAAIAAGNSGAAALVPVLQGLLGDADPVVVEAAEWALGRLGEVSA

SEQ ID NO: 81110 - protein, 373 aa, Sphingomonas sanxanigenens
  misc_feature (1)..(373): tr|A0A2W5A6T7|A0A2W5A6T7_9SPHN Epoxyqueuosine reductase OS=Sphingomonas sanxanigenens OX=397260 GN=queG PE=3 S V=1
MHSDKAALKKALKAEAERLGFVACGVARAARRWLPGDRLMTWIGEGMHGQMTWMEDRAEQRAAPAALWPEARSVIALGMSYAPAEDPMRLAAEPQIGRISVYAQGGDYHDVVKRNLKALARWLVAEAGGDVKVFVDTAPVMEKPVSQLAGLGWQGKHSNLVSRDHGSWLFLGAIMTTQEIAPDDVAEDRCGSCDACRQACPTDAFPAPYRLDARRCISYLTIEHKGPIPHEYRAAIGNHIYGCDDCLAACPWNKFAASAAANKAFAPRAELAAPDLADLLALDDPGFRRVFAGSPIKRIGRDRMVRNCLIAAGNSGDDALVKSVERLLDDPAPAVRGAAVWALARLDPQGWPKARDRHLPDESDPDVRAEWLL

SEQ ID NO: 81111 - protein, 399 aa, Sphingomonas sanxanigenens
  misc_feature (1)..(399): tr|W0AGC3|W0AGC3_9SPHN Epoxyqueuosine reductase OS=Sphi ngomonas sanxanigenens DSM 19645 = NX02 OX=1123269 GN=q ueG PE=3 SV=1
MTNVILYAPGFLYWAAVVARSDTGANSGLVDRLKAEAEALGFVACGIAPADAIPEAAPRLRQWLAEGAHGSMGWMEERSHQRGAAPALWPEVRSVVMLGMSYAPPENPLRLAGERDVGRISVYAQGADYHDVVKRALKHLARWLVAEAGGDVKVFVDTAPVMEKPYAAAAGLGWQGKHTNLVSRAEGSWLLLGAIMTTLDLEPDLPSGDRCGSCDACQRACPTEAFPSPYRLDARRCISYLTIENKGPIPHAFRAAIGNRIYGCDDCLAVCPWNKFAAAAAANKAFAPRAELAVPQIADLLALDDAGFRQVFAGSPIKRIGRDRMVRNCLIAAGNSGDAGFVAQVAALLDDPAPVVRGAAVWALERLDVARWTAERSARALAEPDEMVQAEWRRPFAPG

SEQ ID NO: 81112 - protein, 347 aa, Sphingomonas sp.
  misc_feature (1)..(347): tr|A0A2E1Z1M1|A0A2E1Z1M1_SPHSX Epoxyqueuosine reductase OS=Sphingomonas sp. OX=28214 GN=queG PE=3 SV=1
MSEDKSLESRIFEKAAELGFVACGFAPADAAPRTAERLRQWLAEGRHGDMIWMENRAHHRESPKGLWPEVRSVIALGMSYAPGYDPLALEDAGERGRISVYAQGRDYHDIVKKALKALARWLVENAGGELKVFVDTAPVMEKPLSEAAGLGWQGKHTNLVSRDHGSWLFLGAIYTTLDLAPTGAGRDSCGSCDACQTACPTDAFPAPYQLDARRCISYLTIELHGPIPQEFRESIGNRIYGCDDCLAACPWNKFAQAAAANRAFLPRGELTAPRLADLLALDDVSFREVFSGSPIKRIGRDRMVRNCLIAAGNSGDASLIAPVRALIDDPDPVVQEAARWALERLPA

SEQ ID NO: 81113 - protein, 381 aa, Sphingomonas sp.
  misc_feature (1)..(381): tr|A0A5D9C7N8|A0A5D9C7N8_9SPHN Epoxyqueuosine reductase OS=Sphingomonas sp. ZX OX=2606412 GN=queG PE=3 SV=1
MAPEDPTELREAIRAEATRLGFVACGFAAADAAPESAARLDEWLESGAHGSMEWMEARKGERARPQGLWPASRSLIMLGMSYAPREDPMRLATEPGVGRISVYAQGGDYHDVVKKALKALARWLVDRAGGELKVFVDTAPVMEKPLSAAAGLGWQGKHSNLVSREHGSWLFLGAIMTSLDLPPDLPEPDRCGSCDACQRACPTDAFPHPYVVDARRCISYLTIEHKGPIPADLRTGIGNHIYGCDDCLAACPWNKFAQAGAANRAFAARAELAAPELVDLLALSAADFRQIFAGSPIKRIGRDRMVRNAAIAAGNSALPSLTAPVTALLDDPDPAVRGSAIWALSRLDPARFAAERTARMSAEQDAGVLAEWGVAGSDPRR

SEQ ID NO: 81114 - protein, 355 aa, Sphingomonas spermidinifaciens
  misc_feature (1)..(355): tr|A0A2A4B9H0|A0A2A4B9H0_9SPHN Epoxyqueuosine reductase OS=Sphingomonas spermidinifaciens OX=1141889 GN=queG P E=3 SV=1
MHKSIEDRIRDKAAELGFAACGFARADAAPRAGERLRAWLADGFHGSMIWMEGRADQRASPAGLWPEVRSVIALGMSYAPAVDPLALEGVGDRGRISVYAQGADYHDVVKKALKALGRWLVGEAGGDLKVFVDTAPVMEKPLAEAAGLGWQGKHTNLVSREHGSWLFLGAIYTTLELHGDGAGRDRCGSCDACQRACPTDAFPSPYRLDARRCISYWTIEHAGPVPGDIADAMGNRIYGCDDCLAVCPWNKFAAAAAANRAFWPRAELVTPSLAELLALDDAGFRQVFAGSPIKRIGRARMVRNALIAAGNGGDVSLLPAVTALLWDEDETVRDAAARAVARLEAIVQSAENAIS

SEQ ID NO: 81115 - protein, 349 aa, Sphingomonas taxi
  misc_feature (1)..(349): tr|A0A097EGT3|A0A097EGT3_9SPHN Epoxyqueuosine reductase OS=Sphingomonas taxi OX=1549858 GN=queG PE=3 SV=1
MSQHKQQAEIEHRIKAKAAELGFVACGFARADAAPRTAGRLREWLDEGRHGDMIWMEERAHHRGSPTGLWPEVRSIVALGMSYAPAADPLRLAGEGERGRISVYAQGGDYHDVVKKALKALGRWLAQEAGCDLKVFVDTAPVMEKPLSEAAGLGWQGKHTNLVSRAHGSWLFLGAIYTTLDLTPDVPGRDSCGSCDACQRACPTDAFPTPYRLDARRCISYLTIEHAGPIPHEFRAAIGNRIYGCDDCLAVCPWNKFAATAAANMAFQPRAELTVPALADLLALDDADFRQVFAGSPIKRIGRNRMVRNAAIAAGNSGAPALLPVLERLRDDADPVVAEAAGWAVDRLR

SEQ ID NO: 81116 - protein, 212 aa, Sphingomonas taxi
  misc_feature (1)..(212): tr|A0A2W4YM69|A0A2W4YM69_9SPHN tRNA epoxyqueuosine(34) reductase QueG (Fragment) OS=Sphingomonas taxi OX=15498 58 GN=queG PE=4 SV=1
MPPNADIDTLTARIREESASLGYTRFGISGVELGDDESHLRRWLDAGMHGTMQWMAAHGDKRSRPDELIPGTVSVISVGLDYGREHEEAWATLAEGERAYVARYALGRDYHKLMRQRLQKLAERIEAIVGPIGHRVFVDSAPVLERALARNAGLGWIGKHTCLIDKDGGSWFFLGEIYVDLALPVATPAIDHCGTCKRCIDICPTQAIIAPY

SEQ ID NO: 81117 - protein, 381 aa, Sphingomonas trueperi
  misc_feature (1)..(381): tr|A0A543LRB2|A0A543LRB2_9SPHN Epoxyqueuosine reductase OS=Sphingomonas trueperi OX=53317 GN=queG PE=3 SV=1
MRVRQDKSIEERLKAKAAEIGFAACGIAHADAAPRTAERLRQWLDDGAHGEMLWMEERAEQRGSPRGLWPEVRSVIALGMSYAPATDPLALASEGEIGRISVYAQGADYHDVVKRRLKELARWLVAEAPGADVKVFVDTAPVMEKPLSEAAGLGWQGKHTNLVSRSHGSWLFLGAIYTTLDLASAGPSGGGCGSCDACQTACPTGAFPAPYRIDARRCVSYLTIENKGPIPRDLRQGIGNRIYGCDDCLAVCPWNKFAAAAQANLAFHPRAELTVPYLADLLALDDAGFREVFAGSPIKRIGRDRMVRNCLIAAGNSGSDRLVAPVLALLDDPAPVVRGAAAWALERLDPGRWYEERRERLVAEKDSSVLGEWASMASETG

SEQ ID NO: 81118 - protein, 352 aa, Sphingomonas turrisvirgatae
  misc_feature (1)..(352): tr|A0A1E3LVM1|A0A1E3LVM1_9SPHN Epoxyqueuosine reductase OS=Sphingomonas turrisvirgatae OX=1888892 GN=queG PE=3 SV=1
MHSGKPLEAQIREKAAELGFVACGIARADAAPLAGERLRQWLAQGRHGDMIWMEERAHHREAPAGLWPDVRSVIALGMSYAPASDPLALADAGEHGRISVYAQGGDYHDVVKKALKALGRWLAQAAGCDLKVFVDTAPVMEKPLAEAAGLGWQGKHTNLVSREHGSWLFLGAIYTTLDLVPDRPGRDLCGSCDACQRACPTDAFPAPYRLDARRCISYLTIEHSGPIPHEFREGIGNRIYGCDDCLAVCPWNKFAQAAAANLAFAPRAELTAPELTDLLALDDAGFRQVFSGSPIKRIGRNRIVRNCLIAAGNSGSPALLGPVRALLADPDPVVAEAAAWALAKLSAANARP

SEQ ID NO: 81119 - protein, 382 aa, Sphingomonas wittichii
  misc_feature (1)..(382): tr|A0A1X9UDM8|A0A1X9UDM8_SPHSD Epoxyqueuosine reductase OS=Sphingomonas wittichii (strain DC-6 / KACC 16600) O X=1283312 GN=queG PE=3 SV=1
MTDDPISLREAIRDEALKLGFATCGFARADAAPESAARLDQWLATGAHGSMEWMEARKGERARPQGLWPEARSLIMLGMSYAPREDPMRLADAPGIGRISVYAQGTDYHDVVKKALKHLARWLVDRAGGALKVFVDTAPVMEKPLSAAAGIGWQGKHSNLVSREHGSWLFLGAIMTSLDLPPDDPHDDRCGSCSACQAACPTDAFPRPYVVDARRCISYLTIEHKGPIPAEFRAPIGNRIYGCDDCLAVCPWNKFAEAAAANRAFAARAELAAPELEDLLGLDDAGFRAVFAGSPIKRIGRDRMLRNALVAAGNSGLAALLPPVVALLDDPAPVVRGAAVWALGRLDPAGFAAERAARLACEKDEAVAAEWDAEIAAAPAAR

SEQ ID NO: 81120 - protein, 382 aa, Sphingomonas wittichii; identical to SEQ ID NO: 81119
  misc_feature (1)..(382): tr|A5VAD5|A5VAD5_SPHWW Epoxyqueuosine reductase OS=Sphi ngomonas wittichii (strain RW1 / DSM 6014 / JCM 10273) OX=392499 GN=queG PE=3 SV=1

SEQ ID NO: 81121 - protein, 349 aa, Sphingomonas yabuuchiae
  misc_feature (1)..(349): tr|A0A147IMV5|A0A147IMV5_9SPHN Epoxyqueuosine reductase OS=Sphingomonas yabuuchiae OX=172044 GN=queG PE=3 SV=1
MAQDKLETRIKAKAAELGFAAIGITHADAAPKTVERLHQWLAEGRHGSMIWMADRAHQRQSPSSLWPEVKSIISLGVSYAPAEDPMRLADQGRIGRISVYAQGADYHDVVKRQLKALGRWLAQEAKCDLKVFVDTAPVMEKPLAEAAGLGWQGKHTNLVSREHGSWLFLGAIYTTLELEPDAVARDTCGRCDACQRACPTDAFPAPYQLDARRCISYLTIEHAGPIPAEFRVAMGNRIYGCDDCLAVCPWNKFAAAAQANMAFHPRAELTAPELGDLLSLDDAGFRQVFSGSPIKRIGRNRMVRNAAIAAGNSGAAELVPVLRGLLGDPDPVVVEAVEWALGRLGGSVA

SEQ ID NO: 81122 - protein, 350 aa, Sphingopyxis alaskensis
  misc_feature (1)..(350): tr|Q1GP49|Q1GP49_SPHAL Epoxyqueuosine reductase OS=Sphi ngopyxis alaskensis (strain DSM 13593 / LMG 18877 / RB2 256) OX=317655 GN=queG PE=3 SV=1
MVAEALPSLETRLEAAARAQGFVAFGIAAADAAPQTAARLRQWLADGHHGGMIWMESRAEQRGSPRGLWPAVRSVVALGMSYAPALDPLALADQPDRGRISVYAQGADYHDVVKKALKATARWLVAEAPDAEVKVFVDTAPVMEKPLAAAAGLGWQGRHSNLVSREHGSWLFLGAIYTTLDLAPSRAGRDRCGSCTACQQACPTDAFPAPYRLDARRCISYLTIEHDGPIPDEFRRAIGNRIYGCDDCLAVCPWNKFAGAAHRHRAFLPRAELAAPSLADLLALDDAGFRQVFAGSPIKRIGRGRMVRNAAIAAGNSGDARFVPALQRLADDESPMVADAARWALGELGS

SEQ ID NO: 81123 - protein, 350 aa, Sphingopyxis bauzanensis
  misc_feature (1)..(350): tr|A0A246K0V7|A0A246K0V7_9SPHN Epoxyqueuosine reductase OS=Sphingopyxis bauzanensis OX=651663 GN=queG PE=3 SV= 1
MVAEALSVLEDRLEAVARAHGFVAFGIADAGSAPQTAERLNQWLAEGRHGDMIWMESRAAQRGSPQGLWPEVRSVIALGMSYTPAHDPLVLAEHPDRGRISVYAQGGDYHDVVKRALKAVARWLVAEAPGAEVKVFVDTAPVMEKPLSAAAGLGWQGKHSNLVSREHGSWLFLGAIYTTLELVPSNPGRDRCGSCTACQDACPTQAFPAPYQVDARRCISYLTIEHDGAIPHELRRGIGNRVYGCDDCLAVCPWNKFAETAHAHRAFLPRAELVAPSLGDLLALDDAAFRQVFAGSPIKRIGRGRMVRNAAIAAGNSGDAGFRPVLERLTEDETPMVAEAARWALDELAS

SEQ ID NO: 81124 - protein, 350 aa, Sphingopyxis flava
  misc_feature (1)..(350): tr|A0A1T5B681|A0A1T5B681_9SPHN Epoxyqueuosine reductase OS=Sphingopyxis flava OX=1507287 GN=queG PE=3 SV=1
MVAEALPSLEQRLEAFARAQGFAAFGITLADATCKSAERLNQWLAEGRHGGMIWMESRAGQRGSPKGLWPEVRSVIALGMSYAPGGDPLALAGHPDCGRISVYAQGSDYHDTVKKALKAVARWLVAEAPGADVKVFVDTAPVMEKPLAAAAGLGWQGKHTNLVSRDHGSWLFLGAIYTTLELTPEKPGRDRCGSCHACQDVCPTQAFPAPYQLDARRCISYLTIEHDGPIPVELRRAIGNHVYGCDDCLAVCPWNKFAETAHCHRAFLPRAELAAPALADLLELDDAGFRQVFAGSPIKRIGRNRMVRNAAIAAGNSGNPRLRARLAALVGDDSEMVADAAAWALAQLAE

SEQ ID NO: 81125 - protein, 354 aa, Sphingopyxis fribergensis
  misc_feature (1)..(354): tr|A0A0A7PSI7|A0A0A7PSI7_9SPHN Epoxyqueuosine reductase OS=Sphingopyxis fribergensis OX=1515612 GN=queG PE=3 S V=1
MVAEALPLETPSLEDRLEAVARAHGFAAFGIAQADAAPQTAARLNQWLAEGRHGDMIWMESRAAQRGSPKGLWPEVKSVIALGMSYAPAHDPLALAEHPERGRISVYAQGGDYHDVVKKALKAVARWLVAEVKDAEVKVFVDTAPVMEKPLSAAAGLGWQGKHTNLVSRDHGSWLFLGAIYTTLDLAPSKPGRDTCGSCSACQDACPTQAFPAPYRLDARRCISYLTIEHDGPIPVDLRRGIGNRVYGCDDCLAVCPWNKFADTAHAHRAFLPRAELVAPSISDLLALDDAGFRQVFAGSPIKRIGRGRMVRNAAIAAGNSGDARFVPVLTQLAEDELPMVADAARWALAELAS

SEQ ID NO: 81126 - protein, 354 aa, Sphingopyxis granuli
  misc_feature (1)..(354): tr|A0A0X8QZR1|A0A0X8QZR1_9SPHN Epoxyqueuosine reductase OS=Sphingopyxis granuli OX=267128 GN=queG PE=3 SV=1
MVSDALPTPEGRLEDRLEAVARAHGFAAFGIADAGAAPQTAARLNAWLADGCHGDMIWMEGRAAQRGSPRGLWPEVRSVIALGMNYAPAADPLALAAHPDRGRISVYAQGTDYHDVVKKALKAVARWLVAEVPGAEVKVFVDTAPVMEKPLAAAAGLGWQGKHSNLVSRDHGSWLFLGAIYTTLALVPGAPGRDRCGRCRACQDACPTQAFPAPYRVDARRCISYLTIEHAGPIPVALRRAIGNRVYGCDDCLAVCPWNKFADTAHRHRAFLPRAELAAPSLADLLALDDAGFRQVFAGSPIKRIGRDRMVRNAAIAAGNSGDPRFRPRLTELTGDASPVVAEAAAWALAALAS

SEQ ID NO: 81127 - protein, 350 aa, Sphingopyxis indica
  misc_feature (1)..(350): tr|A0A239IID4|A0A239IID4_9SPHN Epoxyqueuosine reductase OS=Sphingopyxis indica OX=436663 GN=queG PE=3 SV=1
MVAKALPPLEDRLEAVARAHGFAAFGIARADAAPETAARLDAWLAEGCHGEMIWMESRAEQRGSPKGLWPEVRSVIALGMSYAPAEDPLALADHRTRGRISVYAQGADYHDVVKKALKAVARWLVAEAPGAEVKVFVDTAPVMEKPLAAAAGLGWQGKHTNMVSRDHGSWLFLGAIYTTLDLVPSAPGRDHCGSCRACQDACPTQAFPAPYRLDARRCISYLTIEHAGPIPEEFRHAIGNRIYGCDDCLAVCPWNKFADTAARHRAFLPRGELAAPALADLLALDDAGFRQVFAGSPIKRIGRDRMVRNAAIAAGNSGDPRFRTRLAELTRDASPAVADAAAWALAELAE

SEQ ID NO: 81128 - protein, 354 aa, Sphingopyxis lindanitolerans
  misc_feature (1)..(354): tr|A0A2S8B961|A0A2S8B961_9SPHN Epoxyqueuosine reductase OS=Sphingopyxis lindanitolerans OX=2054227 GN=queG PE= 3 SV=1
MVAEALPPVHDGIEPRLEAVARDHGFAAFGIARADAAPETAARLTRWLAEGCHGDMIWMESRAGQRGSPQGLWPEVRSVIALGMSYAPEQDPLALAEVPDRGRISVYAQGADYHDVVKRALKAVARWLVAEAPGAEVKVFVDTAPVMEKPLAAAAGLGWQGKHSNMVSREHGSWLFLGAIYTTLDLVPSAAARDRCGSCTACQDACPTQAFPAPYRVDARRCISYLTIEHDGPIPVELRRAMGNRIYGCDDCLAVCPWNKFADTAARHRAFLPRAELAAPSLADLLALDDAGFRQVFAGSPIKRIGRNRMVRNAAVAAGNSGDPRFRARLEELLGDESPMVADAAAWALDELTS

SEQ ID NO: 81129 - protein, 350 aa, Sphingopyxis macrogoltabida
  misc_feature (1)..(350): tr|A0A0P0DZX6|A0A0P0DZX6_SPHMC Epoxyqueuosine reductase OS=Sphingopyxis macrogoltabida OX=33050 GN=queG PE=3 S V=1
MVAEALPSLEQRLADVARAHGFVAFGIARADAAPQTAARLNQWLADGCHGSMIWMESRAAQRGSPTGLWPEVRSVIALGMSYAPAHDPLALEGVPDRGRISVYAQGGDYHDVVKKALKAVARWLVAEVKDAEVKVFVDTAPVMEKPLSAAAGLGWQGKHTNLVSRDHGSWLFLGAIYTTLDLAPSTPGRDTCGSCSACQDACPTNAFPAPYRLDARRCVSYLTIEHDGPIPEELRRGIGNRIYGCDDCLAACPWNKFAETAHAHRAFLPRAELVAPALADLLALDDAGFRQVFAGSPIKRIGRNRMVRNAAIAAGNSGDPGFRGILQQLTSDESPMVADAAAWALAELAS

SEQ ID NO: 81130 - protein, 350 aa, Sphingopyxis macrogoltabida
  misc_feature (1)..(350): tr|A0A0N7GT62|A0A0N7GT62_SPHMC Epoxyqueuosine reductase OS=Sphingopyxis macrogoltabida OX=33050 GN=queG PE=3 S V=1
MVAEALPSLEQRLADVARAHGFVAFGIARADAAPQTAARLNAWLAEGCHGGMIWMESRAAQRGSPTGLWPEVRSVIALGMSYAPAHDPLALEGVPDRGRISVYAQGGDYHDVVKRALKAVARWLVAEVKDAEVKVFVDTAPVMEKPLSAAAGLGWQGKHTNLVSRDHGSWLFLGAIYTTLDLAPSMPGRDTCGSCSACQDACPTDAFPAPYRLDARRCVSYLTIEHDGPIPEELRRGIGNRIYGCDDCLAACPWNKFAETAHAHRAFLPRAELVAPALADLLALDDAGFRQVFAGSPIKRIGRNRMVRNAAIAAGNSGDPGFREILHRLANDESPMVADAAAWALAELAS

SEQ ID NO: 81131 - protein, 351 aa, Sphingopyxis sp.
  misc_feature (1)..(351): tr|A0A2G2CVJ1|A0A2G2CVJ1_9SPHN Epoxyqueuosine reductase OS=Sphingopyxis sp. OX=1908224 GN=queG PE=3 SV=1
MPDDKLRLAKALEIKAREEGFSAVGIAPSSLAPETRHRLQQWLDQGRQGDMIWMANRADERSDPQTLWPDVQTVIMLGMSYAPATDPFALEDVADHGRISVYAQGKDYHDVVKGALKRTAGWLVGQAKCEVKVFVDTAPVMEKPLAEAAGLGWQGKHTNVVSREHGSWLFLGAIYTTLALEPSTPGSDRCGSCSACQDICPTNAFPAPYQLDARACISYLTIEHKGPIPHQYRKAIGNHIYGCDDCLAVCPWNKFAQAGRANKAFLPRAELAAPALADLLALDDAGFRKVFSGSPIKRSGRNRIVRNALIAAGNSSDRALIEPVQALLNDADEAVREAAGWALDQLGSASP

SEQ ID NO: 81132 - protein, 350 aa, Sphingopyxis sp.
  misc_feature (1)..(350): tr|A0A1H6FZA5|A0A1H6FZA5_9SPHN Epoxyqueuosine reductase OS=Sphingopyxis sp. YR583 OX=1881047 GN=queG PE=3 SV=1
MVAEALPSLEERLEAVAREHGFAAFGIARADAAPQTAARLNQWLAEGRHGDMIWMESRAEQRGSPRGLWPEVQSVIALGMSYAPALDPLALAEHRTRGRISVYAQGGDYHDVVKKALKAVARWLVAEVRDAEVKVFVDTAPVMEKPLSAAAGLGWQGKHTNLVSRDHGSWLFLGAIYTTLELAPSTPGRDTCGSCSACQDACPTQAFPAPYRLDARRCISYLTIEHNGPIPVALRRGIGNRIYGCDDCLAACPWNKFADTAHTHRAFLPRAELAAPSIADLLDLDDAGFRQVFAGSPIKRIGRGRMARNAAMAAGNSGDRRFVPALERLAKDESPMVADAALWALAELAS

SEQ ID NO: 81133 - protein, 350 aa, Sphingopyxis terrae
  misc_feature (1)..(350): tr|A0A142VXQ8|A0A142VXQ8_9SPHN Epoxyqueuosine reductase OS=Sphingopyxis terrae subsp. terrae NBRC 15098 OX=121 9058 GN=queG PE=3 SV=1
MLSNALPPIEERLAATARAHGFAAFGIARADAAPQTAARLAQWLADGCHGDMIWMESRAEQRGSPQGLWPEVRSVIALGMSYAPGTDPLALAGASDRGRISVYAQGADYHDVVKKALKHVARWLVAEAPGAEVKVFVDTAPVMEKPLAAAAGLGWQGKHSNMVSREHGSWLFLGAIYTTLDLVPSVPGRDRCGSCTACQQACPTAAFPAPYRVDARRCISYLTIEHDGPIPTEFRRAIGNRVYGCDDCLAVCPWNKFADTAARHQAFLPRGELAAPALADLLALDDTGFRQVFSGSPIKRIGRGRMVRNAAIAAGNSGDRSLRPRLVALASDTSPMVADAARWALEQLAD

SEQ ID NO: 81134 - protein, 350 aa, Sphingopyxis terrae
  misc_feature (1)..(350): tr|A0A1Y6FUR9|A0A1Y6FUR9_9SPHN Epoxyqueuosine reductase OS=Sphingopyxis terrae subsp. ummariensis OX=429001 GN =queG PE=3 SV=1
MLSNALPPIEERLAATARAHGFAAFGIARADAAPQTAARLRQWLADGCHGDMIWMESRAEQRGSPQGLWPEVRSVIAFGMSYAPGTDPLALAGAPDRGRISVYAQGADYHDIVKKALKHVARWLVAEAPGAEVKVFVDTAPVMEKPLAAAAGLGWQGKHSNMVSREHGSWLFLGAIYTTLDLAPSVPGQDRCGSCTACQQACPTAAFPAPYRVDARRCISYLTIEHDGPIPTEFRRAIGNRVYGCDDCLAVCPWNKFADTAARHRAFLPRGELAAPALADLLALDDVGFRQVFSGSPIKRIGRGRMVRNAAIAAGNSGDRSLRPRLMVLASDESPMVADAARWALEQLAE

SEQ ID NO: 81135 - protein, 355 aa, Sphingopyxis witflariensis
  misc_feature (1)..(355): tr|A0A2D0AMR3|A0A2D0AMR3_9SPHN Epoxyqueuosine reductase OS=Sphingopyxis witflariensis OX=173675 GN=queG PE=3 S V=1
MVANPLPSPETSSLEQRLADVARTHGFVAFGIADADAAPQTAARLGEWLADGCHGDMIWMESRAAQRGSPKGLWPEVRSVIALGMSYAPTHDPLALAEHATHGRISVYAQGADYHDVVKKALKAVARWLVAEVKDAQVKVFVDTAPVMEKPLSEAAGLGWQGKHSNLVSRDHGSWLFLGAIYTTLDLASSQPGRDRCGSCSACQDACPTQAFPAPYRVDARRCISYLTIEHDGPIPVEFRRAIGNRIYGCDDCLAVCPWNKFADTAARHRAFLPRAELVAPSLGDLLALDDTEFRAIFSGSPIKRIGRNRMVRNAAIAAGNSGDARFLPVLERLAADESDMVADAARWALAELAL

SEQ ID NO: 81136 - protein, 378 aa, Sphingorhabdus contaminans
  misc_feature (1)..(378): tr|A0A553WDA7|A0A553WDA7_9SPHN Epoxyqueuosine reductase OS=Sphingorhabdus contaminans OX=1343899 GN=queG PE=3 SV=1
MVNALKAKAASEGFVAIGIAPGHLAPAAGARLRQWLDDGCHGEMLWMENRADQRANPDILWPDVKSVIMLGMSYAPAADPMALADCGDRARISVYAQGRDYHDLVKGALKRVAGWLAHEADVGVKVFVDTAPVMEKALAEAAGLGWQGKHSNVVSRDHGSWLFLGAIYTTAQLEPDKAGTDRCGSCRACQDICPTNAFPAPYKVDARRCISYLTIEHKGPVDRTLRPLMGNHIYGCDDCLAVCPWNKFASSAAAHKAFLPRAELVAPRLSDLLTLDDTAFRALFSGSPIKRIGRNRFVRNVLIAAGNSGDTMLLPQIIPLVNDPDDGVRGSAIWALGRLAPTEFEDMKIRHAPLEMSPDVRAEWDFAPDEGSVPALLA

SEQ ID NO: 81137 - protein, 374 aa, Sphingorhabdus marina
  misc_feature (1)..(374): tr|A0A1N6CZ81|A0A1N6CZ81_9SPHN Epoxyqueuosine reductase OS=Sphingorhabdus marina DSM 22363 OX=1123272 GN=queG PE=3 SV=1
MANDKLRLTQDLERRAREEGFAAFGIAPADLAPEAGKRLQTWLAEGCHGDMIWMADRAGQRASPTALWPDTRSVIMLGMSYAPDRDPFALEHVRDHGRISVYAQGKDYHDIVKRALKRLARWLVDRSNCEVKVFVDTAPVMEKPLAEAAGLGWQGKHTNLVSRDHGSWLFLGAIYTTLDLEHSLAGQDRCGSCSACQDICPTNAFPAPYKLDARACISYLTIENKGPIPIEFRTAIGNHIYGCDDCLAVCPWNKFASAAASQKAFLPRAELAAPALSDLLDMDDAGFRQIFSGSPIKRTGRNRMVRNALIAAGNSADKGLVRAVRKRLYDDEPVVRGAAVWALSQLDSSAFEEEKARHVDRESDAHVLEEWSRD

SEQ ID NO: 81138 - protein, 357 aa, Sphingorhabdus sp.
  misc_feature (1)..(357): tr|A0A5C6UMX2|A0A5C6UMX2_9SPHN Epoxyqueuosine reductase OS=Sphingorhabdus sp. D-2Q-5-6 OX=2601267 GN=queG PE=3 SV=1
MADRPPPGRDSPTSLEARIAAEARALGFAACGIARADAAPRSAARLNEWLAQGMHGDMIWMESRAAQRGSPTGLWPEARSVIALGMSYAPDGDPLALEAHPVRGRISVYARGKDYHDVVKKSLKSLARWIVAETGVDTDVKVFVDTAPVMEKPLAEAAGLGWQGKHSNLVSRSDGSWLFLGAIYTTLELAPATPGRDLCGSCDACQRACPTDAFPAPYRVDARRCISYLTIEHKGPIPIEFRKPIGNRIYGCDDCLAVCPWNKFADSAAANIAFAARAELAAPRLADLLALDDAGFREVFAGSPIKRIGRHRMVRNCAIAAGNSGDAALIPVLTSLCQDDDAAVAEAARWALQELVA

SEQ ID NO: 81139 - protein, 351 aa, Sphingorhabdus sp.
  misc_feature (1)..(351): tr|A0A2D3R9X7|A0A2D3R9X7_9SPHN Epoxyqueuosine reductase OS=Sphingorhabdus sp. YGSMI21 OX=2077182 GN=queG PE=3 SV=1
MPDDKLRLTKALENRAKDEGFAAVGIAPARLAPETGLRLQQWLDEGRQGDMLWMVNRADERSDPATLWPDVQTVVMLGMSYAPAVDPFALEPVSDHGRISVYAQGRDYHDVVKSALKRTARWLVEQAECEVKVFVDTAPVMEKPLAEAAGLGWQGKHTNVVSREHGSWLFLGAIYTTLDLEPSKPGRDSCGSCSACQDICPTGAFPAPYQLDARACISYLTIEHKGPIPHKYRKAIGNHIYGCDDCLAVCPWNKFAKAGAANKAFLPRAELAAPALVDILALDDAGFRQVFSGSPIKRTGRDRMVRNALIAAGNSGDTALIQPVQALLEDEDDVIREAAGWALDQLASAQP

SEQ ID NO: 81140 - protein, 361 aa, Sphingorhabdus wooponensis
  misc_feature (1)..(361): tr|A0A3R8S3P3|A0A3R8S3P3_9SPHN tRNA epoxyqueuosine(34) reductase QueG OS=Sphingorhabdus wooponensis OX=940136 GN=queG PE=4 SV=1
MAKSEGFVAFGIAPGHLAPAAGLRLQQWLKEGLHGDMLWMESRTDERANPDLLWPEVKSVIMLGMSYAPPQDPMALADQDMLARISVYAQGRDYHDVVKGALKRLAGWLAHEAGAGVKVFVDTAPVMEKALAQSAGLGWQGKHSNIVSREHGSWLFLGAIYTTAELDPALPEDDHCGSCHLCQDICPTNAFPAPYRLDARRCISYLTIEHKGSIDPELRPLMGNHIYGCDDCLAVCPWNKFAETAAAHKAFLPRAELVAPQIADLLTLDDAAFRKLFSGSPIKRIGRDRFVRNVLIAAGNGRDAALVPQIEVLLRDPAPVVRGAAIWALGRLSPEALAQRRAEYLPDEQDPSVCAEWDSAT

SEQ ID NO: 81141 - protein, 352 aa, Sphingosinicella ginsenosidimutans
  misc_feature (1)..(352): tr|A0A5C6TS57|A0A5C6TS57_9SPHN Epoxyqueuosine reductase OS=Sphingosinicella ginsenosidimutans OX=1176539 GN=qu eG PE=3 SV=1
MESKHRLREDLRRSAEELGFCAFGIARADAAPKAGERLRQWLAEGCHGDMVWMEETAVRRAAPRALWPDVRSVVALGMSYAPAADPLALADARDRGRISVYAQGADYHDLVKKALKALARRLIELAGGELKVFVDTAPVMEKPLAEAAGIGWQGKHTNLVSRADGSWLFLGALYTSLDLATDAPHAARCGSCTACLAACPTDAFPAPFRLDARRCISYLTIEHKGPIPEEFRAAIGNRIYGCDDCLAVCPWNRFADAARANRAFLPRAELAAPALADLLDLDDAGFRQVFAGSPIKRIGRNRIVRNAAIAAGNSGRPDLVPALRKLVGDPDPVVAEAAAWALARLSAPAAGG

SEQ ID NO: 81142 - protein, 385 aa, Sphingosinicella microcystinivorans
  misc_feature (1)..(385): tr|A0A495RPG3|A0A495RPG3_SPHMI Epoxyqueuosine reductase OS=Sphingosinicella microcystinivorans OX=335406 GN=qu eG PE=3 SV=1
MDTNKILKDLNAKAAALGFSAIGIAPADAAPAAGARLKTWLANGCHGDMLWMAEKADRRESPRALWSEVRSIIMLGMSYAPALDPLRHADHPEIGVISVYAQGQDYHDTIKARLKTLARWLLEAAGEGEVKVFVDTAPVMEKPFAAAAGIGWQGKHTNLVSREHGSWLFLGAIYTTLELTPDAPHADRCGSCDACQRACPTAAFTGPYSLDARRCISYLTIELKGPIPHEFRRAIGNRIYGCDDCLAVCPWNRFAKASAEAAFQPRTELTTPRLAELAALDDAGFRQVFAGSPIKRVGRDRFVRNVAIALGNSGSTDAMPVLERLREDASDLVSEAAGWGLSALADDLERVRGERSGDDWREQIKPGDEEHGCGSEAQPQAERTV

SEQ ID NO: 81143 - protein, 367 aa, Sphingosinicella sp.
  misc_feature (1)..(367): tr|A0A4P6G2L0|A0A4P6G2L0_9SPHN Epoxyqueuosine reductase OS=Sphingosinicella sp. BN140058 OX=1892855 GN=queG PE =3 SV=1
MNQGKPGLRERMEAKARELGFAAVGVARADAAPKTGERLRQWLAGGAHGDMLWMAETADRRASPAGLWPDVRSVISLGMSYAPSIDPLALAGRPEIGRVSVYAQGADYHDIVKKALKALARWLVEEAGCELKVFVDTAPVMEKPLAEAAGLGWQGKHTNLVSRKDGSWLFLGAIYTTLELAAGGDAPMSPEPLPEHLGPALPPHRVHCGSCSACLDACPTGAFPAPFQLDARRCISYLTIEHKGPIPEAFREAIGNRIYGCDDCLSVCPWNRFADTARRNQAFLPRAELTAPALADILALDDAAFRTVFAGSPIKRIGRNRMVRNAAIAAGNSGCTDLISALEPLANDPDPVVADAAAWALARLRRA

SEQ ID NO: 81144 - protein, 351 aa, Sphingosinicella sp.
  misc_feature (1)..(351): tr|A0A2U2J4D1|A0A2U2J4D1_9SPHN Epoxyqueuosine reductase OS=Sphingosinicella sp. QZX222 OX=2068657 GN=queG PE=3 SV=1
MDGAASLRARLEAEARALGFSAFGVARADATPRTAKRLRQWLDSGAHGDMLWMETTAERRGSPAGLWPEVKSVIALGMSYAPATDPLALADEGEVGRISVYAQGADYHDTVKKALKALARWLVAEAGCELKVFVDTAPVMEKPLAEAAGLGWQGKHTNLVSRTHGSWLFLGAIYTTLELELEPDSVHEQRCGSCRRCLEACPTNAFPAPFRLDARRCISYLTIEHKGPIPHELREAMGNRIYGCDDCLAVCPWNRFADTARRHQAFVPRAELVAPSLADLLALDDADFRKVFAGSPIKRIGRNRMVRNAAIAAGNSGSAALVEPLERLVDDPDPVVAEAAQWAVGKLTNGR

SEQ ID NO: 81145 - protein, 361 aa, Spiribacter aquaticus
  misc_feature (1)..(361): tr|A0A557RK90|A0A557RK90_9GAMM Epoxyqueuosine reductase OS=Spiribacter aquaticus OX=1935996 GN=queG PE=3 SV=1
MAQAFDSTRLLPTLRQWAHELGFNELGVARPALAEDERHLLRWLQDGRHGTMTWMARHGVKRARPERLVPGTVRILSVRMDYRPPDLEADDALLADNRRAFIARYALGRDYHKLMRKRLQALANRIDTAVGGFGYRVFVDSAPVLEKALARNAGLGWIGKNTLVLNRHAGSYFFLGEIFTDLPLPESEPVDDLCGSCRACIDVCPTGAITGPQQLDARRCISYLTIEHEGSIPEDLRPAIGNRVFGCDDCQAVCPWNRYAQPTDEADFHPRHGLEDASLVALFRWDEATFLKRTEGSAIRRLGHERWLRNLAVALGNGPADADAIEALRERLEHPSAMVREHVTWALERLSRPGAAAAAHP

SEQ ID NO: 81146 - protein, 377 aa, Spiribacter curvatus
  misc_feature (1)..(377): tr|U5T5V3|U5T5V3_9GAMM Epoxyqueuosine reductase OS=Spir ibacter curvatus OX=1335757 GN=queG PE=3 SV=1
MVRTHDSREILPVIREWAGELGFDELGVARPALARDEQHLLRWLQDGRHGTMRWMARHGVKRARPERLVPGTIRVISVRMDYRPPDLEADDAILADRRRAFIARYALGRDYHKLMRKRLQALAQRIESSVGAFGYRVFVDSAPVLEKALGRDAGLGWIGKNTLLLNRHAGSYFFLGEIFTDLPLPTSDPVADLCGSCRACIDVCPTGAITGPGQLDARRCVSYLTIEHEGSIPEELRPAIGNRVFGCDDCQAVCPWNRYAQPTDEADFHPRHGLESASLVELFRWDETTFLKRTEGSAIRRLGHERWLRNLAVALGNGPADPAAIEALRERLDHPSALVTEHVQWALTRLVSPASGDSVQSTRRWSHPAPPAQDRPR

SEQ ID NO: 81147 - protein, 359 aa, Spiribacter salinus
  misc_feature (1)..(359): tr|A0A540VWC8|A0A540VWC8_9GAMM Epoxyqueuosine reductase OS=Spiribacter salinus OX=1335746 GN=queG PE=3 SV=1
MERLAVALRQWAEALGFDGVGIAKPALAEDEAHLLRWLKAGRHGTMRWMGRHGVKRARPDQLIPGTARIISVRMDYRPPDLEADDAILADRRRAFVARYALGRDYHKLMRRRLQQLAEQIETTVGPFGYRAFVDSGPVLEKALGRNAGLGWIGKNTLLLNREAGSYFFLGELFTDLPLPEDAPVEDLCGSCRACIDVCPTQAITGPRQLDARRCISYLTIEHEGSIPEALRPGIGNRVFGCDDCQAVCPWNRYAQPTDEADFHPRHGLEHASLIELFRWDEATFLKRTEGSAIRRLGHERWLRNLAVALGNGPADPEAIQALRERLEHPSDLVREHVDWALRQLQSATLPSIPSDQPRG

SEQ ID NO: 81148 - protein, 370 aa, Spiribacter salinus
  misc_feature (1)..(370): tr|R4VLZ3|R4VLZ3_9GAMM Epoxyqueuosine reductase OS=Spir ibacter salinus M19-40 OX=1260251 GN=queG PE=3 SV=1
MAETAQPAMPDMERLAVALRQWAEALGFDSVGIAKPALAEDEAHLLRWLKAGRHGTMRWMGRHGVKRARPDQLIPGTARIISVRMDYRPPDLEADDAILADRRRAFVARYALGRDYHKLMRRRLQQLAEQIETTVGPFGYRAFVDSGPVLEKALGRNAGLGWIGKNTLLLNREAGSYFFLGELFTDLPLPEDAPVEDLCGSCRACIDVCPTQAITGPRQLDARRCISYLTIEHEGSIPEALRPSIGNRVFGCDDCQAVCPWNRYAQPTDEADFHPRHGLEHASLIELFRWDEATFLKRTEGSAIRRLGHERWLRNLAVALGNGPADPEAIQALSERLEHPSDLVREHVDWALRQLQSATLPSVTSDQPRG

SEQ ID NO: 81149 - protein, 367 aa, Spiribacter sp.
  misc_feature (1)..(367): tr|A0A2U2N195|A0A2U2N195_9GAMM Epoxyqueuosine reductase OS=Spiribacter sp. E85 OX=2182432 GN=queG PE=3 SV=1
MPNLKPETLNPKPGAALDPAVLAADIRRWGAELGFDAVGIAEPELAVDEGHLLRWLRDGRHGEMSWMGRHGVKRARPAQLVPGTRRVICVRKDYRPPDAAADDAVLADPRRAFIARYAVGRDYHKLLRRRLQRLAERIQARIGPFGYRAFVDSAPVLEKALARNAGLGWIGKNTLLLNREGGSYFFLGELFTDLALPADAPPTEHCGSCRACIDVCPTGAITGPYQLDARRCISYLTIEHHGPIPEHLRPAIGNRVFGCDDCQAVCPWNRYARPTDEADFQPRHGLDSPQLVSLFRWDEATFLERTAGSPIRRLGHERWLRNLAVALGNGPADPDAIAALRERESHPSELVREHVVWALGRLGANPG

SEQ ID NO: 81150 - protein, 377 aa, Spirobacillus cienkowskii
  misc_feature (1)..(377): tr|A0A369KVR8|A0A369KVR8_9PROT tRNA epoxyqueuosine(34) reductase QueG OS=Spirobacillus cienkowskii OX=495820 G N=queG PE=4 SV=1
MKLNNEITKLINKYNVEVFRIFSFENEHNHIIKKDLPAFEKWLNDNANAEMDFLKNNIEVRKDPNLILKNVKNAIIFLFPYSAGHRVRGKGKIDSDNLKFVFNKNSIISKKLISRYVFGKDYHKVIKKYLNNISNDINNYFNDKYSFRAVVDSVPFFDRAYARESGIGFVGKNTMLIRPGMGSFFFVATLLTTAPIELLKYKSEDLSNRILSLDCGDCQKCLDSCPTQAFKKPYYLDANRCLSYLTIEHRNLVSEEYIPFFSNTIYGCDICQEVCPYNFVTSDFKILNEFSNFHKPFLTIDVKDIALMDMSQYEKWFGGTAATRAKYEGLVRNALYHLHATSSPDINEVLNKLEFSSYEIISRTVKQIRELKVSKDK

SEQ ID NO: 81151 - protein, 374 aa, Spirochaeta africana
  misc_feature (1)..(374): tr|H9UIS3|H9UIS3_SPIAZ Uncharacterized Fe-S protein OS= Spirochaeta africana (strain ATCC 700263 / DSM 8902 / Z -7692) OX=889378 GN=Spiaf_1349 PE=4 SV=1
MISQQPYFPPVPDHLAELFHAEGLGLMGIAPAVPPAGSEHDDDYRTWLERGFHGSMAYLQRHAHGKYHPEAMLPGCRSILIAGLNYYQHAPERPAGAGRIARYAWGRDYHKTLGKRLLRIRRRLEERFPDHGFRNFTDATPLAERYFAEQAGIGFQGRNTLLISGQYGSWFVLGEILTTMELSVSSPSAAAGQFGNRHGACPRSCTKCIDVCPTGALYAPHRIDASRCISYLTIEHSGSIPVELRRGMRDWLFGCDLCQEVCPLNVRRQVTGESDFLQARAGDHLDLTELLAMESDKDFLQRFAGSPVMRAGRIGMMRNACVVAANTGAHELLPRLRQLADGTARYSADPAERAMIAEHAAWAVSELMSETSRH

SEQ ID NO: 81152 - protein, 365 aa, Spirochaeta sp.; identical to SEQ ID NO: 79785
  misc_feature (1)..(365): tr|A0A2D7DSQ8|A0A2D7DSQ8_9SPIO tRNA epoxyqueuosine(34) reductase QueG OS=Spirochaeta sp. OX=28185 GN=queG PE=4 SV=1

SEQ ID NO: 81153 - protein, 368 aa, Spirochaeta sp.
  misc_feature (1)..(368): tr|A0A1W9NA00|A0A1W9NA00_9SPIO tRNA epoxyqueuosine(34) reductase QueG OS=Spirochaeta sp. LUC14_002_19_P3 OX=19 40821 GN=B0D92_01930 PE=4 SV=1
MNTVFQNIAKLYHEEELNTPAYMEWPPDNFVSELIEEQEELFMDRVSAGMPPGLAWMERHASVKYHPDRVLSGCRSVLVSSLGYYRDDSADHAPPGVLRGRIARYARGRDYHKELGRRLKRIADKLRGLFPSEQFMSFTDTGPLDEVWLAAASGAGFRGRHGLAILPGTGSWAVLGHLLSTARLGSSPVRPSPMRCPDGCRRCIDACPTGALTMPLNPSLCISYQSIEHRGAVDEALRGDTGNWVFGCDVCQEVCPFNARAEETTVRAFQRDYAGASVDLIELLKLKNHEETVRRFAGSPLMRAGRNGLVRNACTVIGNIGNREFLPELEKLFTDGDAAVREHARWAHSRIAERTGAGNDACCFQNPT

SEQ ID NO: 81154 - protein, 353 aa, Spirochaeta thermophila
  misc_feature (1)..(353): tr|E0RNQ4|E0RNQ4_SPITD Putative iron-sulfur protein OS= Spirochaeta thermophila (strain ATCC 49972 / DSM 6192 / RI 19.B1) OX=665571 GN=STHERM_c02040 PE=4 SV=1
MMSSILPRNPFRTGAVPGIPSLILYILGENILNCQRNMSKGLTFEAILDLSRETGLTEVYPASSEGIPGLDPHRHPSFLITHLPYTVPTPRPSPLPSARIAPFACANHYRELSHTLRRLVSLIGQRTGHPKSAFRVFSNSPLPERAMAHRAGLGVPGRNGLIIHPVYGSYIALGGILLPFPLDIPPPPPPPPPLSPCGPCTACLTACPTHALPGDGTLRKDRCIQYWAGTHGIVPDPVKAAWGPTLYGCPHCQAACPYNRRPAPGRRPVLRGRIGPTLPLTLLLGTPASLLKALLRSSALQLGWLSPLTLQRNALLAAAATGARPLFHYVEPYLTHPDPVLRDAARWALHRLS

SEQ ID NO: 81155 - protein, 316 aa, Spirochaeta thermophila
  misc_feature (1)..(316): tr|G0GCQ5|G0GCQ5_SPITZ Iron-sulfur protein OS=Spirochae ta thermophila (strain ATCC 700085 / DSM 6578 / Z-1203) OX=869211 GN=Spith_0187 PE=4 SV=1
MSKGLTFEAILDLCREAGLTEVYPSSSEGIPGLDPHRHPSFLITHLPYTIPTPHPSPLPSARIAPFACANHYRELSHTLRRIVSLIGQRTGHPKSAFRVFSNSPLPERAMAHRAGLGVPGRNGLIIHPVYGSYIALGGILLPFPLDLPPSPPPPPPLSPCGPCTACLTACPTRALPGDGTLRKERCIQYWASTHGIVPDPVKAAWSPTLYGCPHCQAACPYNRRPAPGRRPVLRGRIGPALPLTLLLGTPAPLLKALLRGSALHLGWLSPLTLQRNALLAAAATGARPLLPYVEPYLTHPDPVLRDAARWAVLRLS

SEQ ID NO: 81156 - protein, 411 aa, Spirochaetaceae bacterium
  misc_feature (1)..(411): tr|A0A2E9QGF8|A0A2E9QGF8_9SPIO Uncharacterized protein OS=Spirochaetaceae bacterium OX=1898206 GN=CMN76_20170 PE=4 SV=1
MHQPSRNPCLSKSQQTRFLELCQEAGFDLYGFTLASISQEDRENLDRFARENASNDLHWFNQHVHLRTHPSDILPGAISVLMLGAIYRHPEMDEALANSRAKVSRYAAGKDYHLVLRKKAARLADRFFELHRKELPGLRYRVTTDSAPVPEKILARNAGLGWQGKNTNLIHPEMGSYFFLTGVFLNADLEGFAEDLLRHPSTFPSHSNSQGLPDLRSASPENFGDPRKSSGDRYAANSNGGETARSAEQEGLFGSEVPEIPTDSESGAQYAEPSLFRAPNVDRCGSCRQCLDACPTGALEPYRIEASKCISYWTIEAKSAMPETVAANIQSWIFGCDICQEVCPYNRGAKGRRQVTKEESFEPRSFLMQWMASPTDPGESNTWSKLSVSSPLKRPGQDRFRESWKVIDARS

SEQ ID NO: 81157 - protein, 301 aa, Spirochaetaceae bacterium
  misc_feature (1)..(301): tr|A0A1W9VGJ9|A0A1W9VGJ9_9SPIO 4Fe-4S ferredoxin-type d omain-containing protein OS=Spirochaetaceae bacterium 4 572_59 OX=1971727 GN=B6241_00225 PE=4 SV=1
MVPKESPLAKEIIEDQGFSSDGQIIIAMFPIHRENEAKEKGMGQIAPFSCRNYYKETINRMKLIVKQVAPQLTKKQYRLFSNSRLPEKSLALEAGLGFRGKNSLLINRSIGSRGVLAGMILPGEIKVLEYSPEENDEALSNCGNCRLCEKACPGGAISDEGFCKEKCLQFWTTESGIVPDDIKRNWGSILYGCTICQDICPWNRKIPESRAIDLGALPQGIPLTFLLTAAQEEIKSYFRNSNMGMSWITPRMLQRNAVLCAANEGLSELIPLIEKRLSEAKDPSLEDACRWALKVLKRDQD

SEQ ID NO: 81158 - protein, 372 aa, Spirochaetae bacterium
  misc_feature (1)..(372): tr|A0A2N1TQF8|A0A2N1TQF8_9SPIR Epoxyqueuosine reductase OS=Spirochaetae bacterium HGW-Spirochaetae-1 OX=201383 2 GN=CVV44_01855 PE=4 SV=1
MIKKADIITKAKELGFDDIGFTTAEPFTEHRRILSGRMEEYGWAESAGLQLMKGSDPTEILPGAGSIIVLLDVYFKESFPACIEHNFGRCYLDDDRVTKDGLTLRIKNFRSYLRDNGIDSKVPFNLPHRAAAARAGLGTFGKNCLLYAERVARKSSWIIPMAVVTDQSFEPDTPTVRMGCPDWCRNACVAACPTRALKGDGTIDPRRCISYLTYYGDGLTPRELREPMGMYVYGCDRCQNVCPRNEAWMSQELPQNRRVALKAENFNLSRLLHMDKDYFEKLVWPHMFYMGYNNIWRWKMNVARVMGNSADPVYVPDLVRAFRENDDERVRAMAAWALGRITGSDARIALEEFLGDSKGIVREEIEASLVGE

SEQ ID NO: 81159 - protein, 263 aa, Spirochaetae bacterium
  misc_feature (1)..(263): tr|A0A2N1R397|A0A2N1R397_9SPIR 4Fe-4S ferredoxin-type d omain-containing protein (Fragment) OS=Spirochaetae bac terium HGW-Spirochaetae-7 OX=2013839 GN=CVV51_12240 PE= 4 SV=1
MSSPPVHRDARADIAASFGEAGLAVHSVVSRAVLEKLAGLSDSGAVARYGLLESAAAVVVAFPYDPRPGSRPDPSSLSVGAFAANNRYATMTRLLLSAGRSLAGRSGLPAKGFRAVVNSRLPEKLLGELAGLGFIGRSSLLVTRDYGPACLLGALLFPRDYMVGEDVADDPAGSDPLAAAAGAADGGCGACTACADACPTGAIRRGEGRREGRAGGPGGGPGIDQERCIQHWTTTPGEVPGPETAVDQDIEKPGRHQDEEPPL

SEQ ID NO: 81160 - protein, 439 aa, Spirochaetales bacterium
  misc_feature (1)..(439): tr|A0A3N5SXQ2|A0A3N5SXQ2_9SPIR Epoxyqueuosine reductase OS=Spirochaetales bacterium OX=2026792 GN=EHM32_08245 PE=4 SV=1
MLTRERITEEARRLGFVDIGFTTADPFDSHLEYLEKNREAYEWAPKLGLDLFKGADPRTVMPEAKSIIVLIEAYYRESFPPSLEAHFGRCYLDDDRVTRDGLTVRMKAFRSFLKENGVASKAPFDIPHRMAAARAGTGTFGKNCLLYSNRAVRGSSWILPLAFLVDCEFQPDEPTIGIDCPSWCRDACISACPTRALKGDGTIDPRRCISYLSYFGDGITPVELREPMGMYVYGCDRCQNVCPRNTAWSAQELPPNPRVAAKAKDFDLAALLHMDRTYFEQRIWPHMFYMSADELWRWKMNVARVMGNSGDDRYLPELLHAFGETDDTRVRGMIAWALGKIGGRGARRAPAAVPGRGRTGTYRIRHGPGVESPGPIRASSRLPFYRHGRHWRPGCPAGSLSRAMSGHPGLRYARRDNSPGPAYRRNLHSPDPENFRKLS

SEQ ID NO: 81161 - protein, 330 aa, Spirochaetales bacterium
  misc_feature (1)..(330): tr|A0A524KBQ7|A0A524KBQ7_9SPIR Epoxyqueuosine reductase OS=Spirochaetales bacterium OX=2026792 GN=E4H20_05015 PE=4 SV=1
MVDTNQPPNAEASLVGDVTATLIGLGLESFAFLGARGIAAIKAMTEPAVATVRGLDSARGAVVVALPYDPRPRPVPTEPRRFGSIGAFASSHRYATLARLLTSAGRSTALTSGLPRASFRTAVNSRLPEKPLAVLAGLAFIGRSSLAITRRFGPSCVLGVLLLPFDPTGDADASGLTGTESAREPGGRCGDCKACVDACPTGAIQDPGSGRSGLDRSRCIQNWASESGSVPAEILDSWGNRVYGCDLCVRACPYSNGAWMPDGRGTSAAIRADPLALPTEARPGSWVDLDRILDAGDKDLSRWARGTALGFSWFTPALLRRNAGIAATPR

SEQ ID NO: 81162 - protein, 395 aa, Spirochaetes bacterium
  misc_feature (1)..(395): tr|A0A522CND2|A0A522CND2_9SPIR Epoxyqueuosine reductase OS=Spirochaetes bacterium OX=2202144 GN=EPN93_18070 PE =4 SV=1
MNISKEDIRNKARELGFEDAGFTGCEPFEDHREVLEARRDMYEWCVSLGLDLFQGTDPRAVYPECRSIIVLLENYFREGFPRGLETHYGRCYLDDDRVTRDGLAVRLKAFRAFLKEHGMDSKVPFHVPHRLAAARAGLGTFGKNCLFYGHRAARGSSFVLPLAFLVDRDFEPDAPTVSVGCPEWCRNACISACPTGALKGPRKIDPRRCISYLSYYGNDLTPVELREPMGLWVYGCDRCQNVCPRNQAWLAADRPVNERVRARAAHFDLREILNMDTAYYTANVWPHMFYMPPEDLWRWQMNAARAMGNSLDPTYVSSLARGLAEAGDWRVRAMCAWSLGRIGTCGAGEALEAAREGSDTAVRGEIEAARIVYASRQALARRTDRKDGIDIPGAE

SEQ ID NO: 81163 - protein, 374 aa, Spirochaetes bacterium
  misc_feature (1)..(374): tr|A0A1G3QW05|A0A1G3QW05_9SPIR PBS lyase OS=Spirochaete s bacterium RBG_16_49_21 OX=1802195 GN=A2W19_08140 PE=4 SV=1
MVTRDDIIEKALGLGFADAGFTTAEPFESHRQCLAERTEDYRWAEAGGLALTAGTDPATILPSAKSIIVLIDVYFREAYPAWLAGHFGRCYLDDDRMTRDGLALRIKAFRSFLRENGIDSKVPFNLPHRVAAARAGLGTFGKNCLFYSGRTARQSSWVTPIPLVVDREFAPDGPTMKMGCPDWCRSACVAACPTKALKGNGVIASRMCVSYLTYYGKGITPRELREPMGMYVYGCDRCQNVCPRNLPWLAQELPENKRVAAKAQNFDLAALLHMSREYFMEKVWPHMFYSSPDDLWRWKMNVARVMGNSREERYVPELVRAFDEGIDERVRGMIAWALGRIGGEAARSALEGFLKRSEGLVYDETVAALESPFG

SEQ ID NO: 81164 - protein, 326 aa, Spirochaetia bacterium
  misc_feature (1)..(326): tr|A0A354GCQ0|A0A354GCQ0_9SPIR Uncharacterized protein OS=Spirochaetia bacterium OX=2053615 GN=DC057_07015 PE= 4 SV=1
MISNSNIIEKAKELGLEKIAFLHTTELTNDFKVIISASLSYNYNWNNESESAFGYIARYTTANFYKLLRIKLKALGDFIYQQTEMTMKKNELYHISINSNLNDKQIALQSGLGNILNNSLISVNHKGCKFVLGNLLINEDVDMCDSVIHQVNECGSCHLCIDSCPTGALKENRLFDKSICLQHLSSQIGDEFDSKLDYIIPHWNERFFGCTRCVDVCPLNNKNQQIECIAHELPGYIGTVFTADDCLKTIKKGEFKKKFTGNQLGANWIPEVALIRNYILMNFKNNKSICMEMYNSIDKSDLDTAEKKYLKKIILLLKNYDDISIK

SEQ ID NO: 81165 - protein, 302 aa, Spirochaetia bacterium
  misc_feature (1)..(302): tr|A0A3D3ARH5|A0A3D3ARH5_9SPIR Uncharacterized protein OS=Spirochaetia bacterium OX=2053615 GN=DHW82_14425 PE= 4 SV=1
MSDFHLLLKKTAPIFGVGSKIQFNEHEEYLLNREINQENIEFEGKWKKKMDLRNSLPEVSSYLVFGFPYPVFQPKIQKASFSAYASINDYHLVVSEKLNQCVQILKKKRPEETFLPLVDSGKVFEKELAIEAKIGFRGKNTLVVNPEYGSFFFIGIILSSLRFDSFFSHSIHTDCGLCERCLKSCPTLALTPYRLLPKKCLSYLTSSKKIEAMKSFSLYGCDLCQMVCPYNLKRNSNPLEDFYYNFQIKLINPDLTEEEFKHYTKNSPLKWIGRKKWITNLQVPYQNPEMPLKPDQKEDLPE

SEQ ID NO: 81166 - protein, 137 aa, Unknown
  misc_feature (1)..(137): tr|A0A421K8G7|A0A421K8G7_9SPIR 4Fe-4S ferredoxin-type d omain-containing protein (Fragment) OS=spirochete symbi ont of Stewartia floridana OX=1968597 GN=B6D68_03970 PE =4 SV=1
INTALCNSYLSIEHPGSVPEPYRANMANWIFGCDICQEVCPFNILSKTTNVENFNRDYAGASIELIKVLKLKDKNAVMQSFAGSPLMRTGQSGLIRNACTVAGNIEAHELKPSLISLLQSEEEGIRDHAAWALDRIV

SEQ ID NO: 81167 - protein, 319 aa, Spirosoma endophyticum
  misc_feature (1)..(319): tr|A0A1I1MZU5|A0A1I1MZU5_9BACT Epoxyqueuosine reductase OS=Spirosoma endophyticum OX=662367 GN=queG PE=3 SV=1
MPARHYTQLIKAKALGLGFDFCGIAKADFLEEEAPRLETWLKNGMHGQMNYMANHFDKRLDPRLLVDDAKSVITVLLNYYPEQKLPEGDADYKLSKYAYGTDYHFVIKDKLKDLLAYIHEEIGEVGGRAFVDSAPVMDKAWAKRAGLGWVGKHTNLINREIGSFFFIGELILDLELEPDGPITDYCGTCTRCIDACPTDAIVGPYVVDGSKCISYFTIELKEAIPTEVQGKFDNWIFGCDICQDVCPWNRFSRPHQTPAFDPHPELTTLTNTDWEEITEDVFREIFRRSAVKRTKLDGLKRNVAFVKPTAEVSALKKLP

SEQ ID NO: 81168 - protein, 308 aa, Spirosoma fluviale
  misc_feature (1)..(308): tr|A0A286FBF6|A0A286FBF6_9BACT Epoxyqueuosine reductase OS=Spirosoma fluviale OX=1597977 GN=queG PE=3 SV=1
MHAPAHHYSKLIKAKALDLGFDFCGVAKADFLEEEAPRLETWLKNGMHGQMNYMANHFDKRLDPRLLVDDAKSVITVLLNYYPEQKLPESDDDLKLSKYAYGTDYHFVIKDKLKDLLTFIHDEIGEVGGRAFVDSAPVMDKAWAKRAGLGWVGKHTNLINREIGSFFFIGELILDLELEPDGPITDYCGTCTRCIDACPTDAIVGPYVVDGSKCISYFTIELKEAIPTEVKGQFNNWIFGCDICQDVCPWNRFARPHQTPAFDPHPDLTAFTKTDWEEITEDVFREIFRRSAVKRTKLDGLKRNIGFL

SEQ ID NO: 81169 - protein, 308 aa, Spirosoma linguale
  misc_feature (1)..(308): tr|D2QNW3|D2QNW3_SPILD Epoxyqueuosine reductase OS=Spir osoma linguale (strain ATCC 33905 / DSM 74 / LMG 10896) OX=504472 GN=queG PE=3 SV=1
MHAPAHHYSKLIKAKAVALGFDFCGVAKADFLEEEAPRLETWLKNGMHGQMNYMANHFDKRLDPRLLVDDAKSVITVLLNYYPEQKLPEGDDDLKLSKYAYGTDYHFVIKDKLKHLLTYIHDEIGDVGGRAFVDSAPVMDKAWAKRAGLGWVGKHTNLINREIGSFFFIGELILDLELEPDGPITDYCGTCTRCIDACPTDAIVGPYVVDGSKCISYFTIELKEAIPTEVKGQFNNWIFGCDICQDVCPWNRFARPHQTPAFEPHPDLASFTKTDWEEITDDVFREIFRRSAVKRTKLEGLKRNIGFL

SEQ ID NO: 81170 - protein, 316 aa, Spirosoma montaniterrae
  misc_feature (1)..(316): tr|A0A1P9WTS3|A0A1P9WTS3_9BACT Epoxyqueuosine reductase OS=Spirosoma montaniterrae OX=1178516 GN=queG PE=3 SV= 1
MLPLKKYSQLIKAEATRLGFDFCGIAKADFLEEEAPLLETWLKNGMHGQMSYMANHFDKRLDPRLLVDGAKSVVTVLLNYYPEQRLPEGEDDYKLSKYAYGEDYHFVLKDKLKQLLAFIHDEIGEVNGRAFVDSAPVMDKAWAKRAGVGWIGKHTNLINRQIGSFFFIGELILDLELEPDGPITDYCGTCTRCIDACPTDAIVDAYVVDGSKCISYFTIELKEAIPDEVQGKFENWIFGCDICQDVCPWNRFARPHQTPAFTPHHDLTTFSKRDWEDITEDVFREIFRRSAVKRTKLEGLKRNVAFNQPDREEIED

SEQ ID NO: 81171 - protein, 346 aa, Spirosoma oryzae
  misc_feature (1)..(346): tr|A0A2T0RJN2|A0A2T0RJN2_9BACT Epoxyqueuosine reductase OS=Spirosoma oryzae OX=1469603 GN=queG PE=3 SV=1
MSVLLTPPLEQHVEFLTAYQRYLVSSSSNNMHSLIQRHTQLIKAKAVELGFDFCGVARADFLEEEAPRLEAWLKNGMHGQMNYMANHFDKRLDPRLLVEGAKSVVTVLLNYYPEEPLPQQHDDYKVSKYAYGTDYHFVIKDKLKELMTFIDTAIGEVGGRVFVDSAPVMDKAWAKRSGAGWIGKHSNLINRQIGSFFFIAELILDIDLEADGPIADYCGTCTRCIDACPTNAIVGPYVVDGSKCISYFTIELKDAIPTEVQGKFDNWIFGCDICQDVCPWNRFSRPHQTPAFAPHPDLATFSRTDWEEITEEVFREVFRRSAVKRTKLEGLKRNVRFNQTAILHTD

SEQ ID NO: 81172 - protein, 311 aa, Spirosoma pollinicola
  misc_feature (1)..(311): tr|A0A2K8YTW1|A0A2K8YTW1_9BACT Epoxyqueuosine reductase OS=Spirosoma pollinicola OX=2057025 GN=queG PE=3 SV=1
MNAKKTNYTQLIKAKATDLGFDFCGVAKADFLEDEAPRFENWLKNGMHGQMNYMANHFDKRLDPRLLVDDAKSVITVLLNYYPEQKLPEENDDLKLSKYAYGTDYHFVIKDKLADLLTFIHEEIGEVGGRAFVDSAPVMDKAWARRAGIGWVGKHTNLINREIGSFFFIGELILDLELEPDGPITDYCGTCTRCIDACPTEAIVGPYVVDGSKCISYFTIELKEAIPEDVRGKFDNWIFGCDICQDVCPWNRFARPHKTPAFDPHPELAAFSKSDWEEITEDVFREVFRRSAVKRTKLEGLKRNIGFVGGG

SEQ ID NO: 81173 - protein, 318 aa, Spirosoma radiotolerans
  misc_feature (1)..(318): tr|A0A0E3ZWM3|A0A0E3ZWM3_9BACT Epoxyqueuosine reductase OS=Spirosoma radiotolerans OX=1379870 GN=queG PE=3 SV= 1
MHSPASHYTQLIKAKAAALGFDFCGVAKADFLEDEAPRLETWLKNGMHGQMNYMANHFDKRLDPRLLVDDAKSVLTVLLNYYPEQKLPEGDDDLKLSKYAYGTDYHFVIKDKLKDLLTFIHDEIGEVGGRAFVDSAPVMDKAWAKRAGLGWVGKHTNLINREIGSFFFIGELILDLELEPDGPITDYCGTCTRCIDACPTDAIVGPYVVDGSKCISYFTIELKEAIPTEVQGKFNNWMFGCDICQDVCPWNRFARPHKTPAFDPHPDLAKLTKTDWEEITEDVFREIFRRSAVKRTKLEGLKRNISFVAPTADPSRSE

SEQ ID NO: 81174 - protein, 311 aa, Spirosoma sp.
  misc_feature (1)..(311): tr|A0A1Q3WHI7|A0A1Q3WHI7_9BACT Epoxyqueuosine reductase OS=Spirosoma sp. 48-14 OX=1895854 GN=queG PE=3 SV=1
MHSPSRAYTQRIKVKAAEIGFDFCGVSKADFLEEEAPRLEAWLKNGMQGQMNYMANHFDKRLDPRLLVDGAKSVITVLLNYYPEQRLPEGDDDFKLSKYAYGTDYHFVIKDKLKDLLAFIEEEIGAVNGRVFVDSAPVMDKAWAKRAGLGWIGKHTNLINREIGSFFFIGELILDLELEPDGPITDYCGTCTRCIDACPTDAIVAPYVVDGSKCISYFTIELKEAIPEEVRGKFDNWIFGCDICQDVCPWNRFARPHQTPAFELHPELSAFTKPDWEEITEEVFREIFRRSAVKRTKLEGLKRNIAFNQGE

SEQ ID NO: 81175 - protein, 313 aa, Spirosoma sp.
  misc_feature (1)..(313): tr|A0A4V1RW78|A0A4V1RW78_9BACT Epoxyqueuosine reductase OS=Spirosoma sp. TY50 OX=2502893 GN=queG PE=3 SV=1
MHAPASYYSTRLKAKALELGFDVCGIARADFLDEEAPRLETWLKNGMHGQMNYMANHFDKRLDPRLLVEGAKSVVTVLLNYYPSQPLPEAEDDYKLSKYAYGEDYHFVIKDKLKDLMAFIHEEIGEVGGRAFVDSAPVMDKAWAKRSGVGWVGKHSNLINRQMGSFFFIGELILDLELEPDGPITDYCGTCTRCLDACPTEAIVSPYVVDGSKCISYFTIELKEAIPDEVRGKFDNWVFGCDICQNVCPWNRFARPHQTPAFDPHPDLAEFSRTDWEEITEEVFREVFRRSAVKRTKLDGLKRNVTFAKNSTY

SEQ ID NO: 81176 - protein, 359 aa, Spongiibacter sp.
  misc_feature (1)..(359): tr|A0A2D7WD31|A0A2D7WD31_9GAMM Epoxyqueuosine reductase OS=Spongiibacter sp. OX=2024860 GN=queG PE=3 SV=1
MSKVLSPEALADLATQLKQWGKELGFAHIGIGPAEPSHHAERLTQWLAKGFHGEMHYMAERESLRRAPESLLPGTLRVISARMDYRPEASDALQILKQADKAYISRYALGRDYHKLIRKRLAQLADRLGGQQQRAFVDSAPVLERGFAEQAGLGWIGKNTMLINSRAGSWFFLGEIYTDLALPIDPPQETGHCGSCQACLDDCPTQAIVAPYQVDARRCISYLTIELKGAIPEDLRPAMGNRVFGCDDCQLVCPWNKFSQPTSEPDFAPRHQLDDRELLDLFLWTEEEFLSRTAGSPIRRIGYQRWLRNLAVGLGNAPFNPDIVAGLKKQRPQAEPMAAEHIDWALARQQHTDTLAHSH

SEQ ID NO: 81177 - protein, 385 aa, Spongiibacter sp.
  misc_feature (1)..(385): tr|A0A0F7M9G5|A0A0F7M9G5_9GAMM Epoxyqueuosine reductase OS=Spongiibacter sp. IMCC21906 OX=1620392 GN=queG PE=3 SV=1
MKDETDHNAELDTLAQSLKDWAKELGFAHLGITLADPVHHAERLRDWLAKDFHGEMHYMANREALRANPAELLPGTVRVISARMDYLPDAAATEAILNTPEKAYISRYALGRDYHKLIRKRLSQLAQKLQAEGGGQHRAFVDSAPVLERGFAEQAGLGWIGKNSMLINSKAGSWFFLGEIYTDIPLPVDPPQPSGHCGSCTACLQDCPTAAIVAPYQVDARRCISYLTIELKEAIPEEFRAPMGNRVFGCDDCQLVCPWNKFAQPTAETDFAPRHQLDNSDLLSLFMWTEEEFLRNTEGSAIRRIGYARWLRNLSVGLGNATYQANIVNALQQRRNELDTCHQDATAYDATNNTTDTNAMLAEHFDWALQCQQQKADSLKTPHQA

SEQ ID NO: 81178 - protein, 361 aa, Spongiibacteraceae bacterium
  misc_feature (1)..(361): tr|A0A2E2K2Q1|A0A2E2K2Q1_9GAMM Epoxyqueuosine reductase OS=Spongiibacteraceae bacterium OX=2026793 GN=queG PE= 3 SV=1
MSTIPQTDLSRLASDIKRWGAELGFQQVGITDADISQHADKLKQWLAKGFHGDMAYMAEREGLRNKPDELVPDTVRVISFRMDYFPDEQHTAERLQQPEQAYVSRYALGRDYHKLIRKRLATIAERLREAGGEHCRAFVDSAPVLERGFAEKAGLGWIGKNSMLINPKAGSWFFLGEIYTDLPLPTDPPQESLHCGSCTACLDDCPTGAIVAPFQVDARRCISYLTIELHGSIPEELRPLMGNRIFGCDDCQLVCPWNKFAEPTTEVDFSPRHKLDQADLLSLFAWTEAEFDRNTQGSAIRRVGYARWLRNIAVALGNAPPNQDTIKALEEKLGTVDAVVDEHIRWALQRQKDESPRPDRQ

SEQ ID NO: 81179 - protein, 360 aa, Spongiibacteraceae bacterium
  misc_feature (1)..(360): tr|A0A2E7IN34|A0A2E7IN34_9GAMM Epoxyqueuosine reductase OS=Spongiibacteraceae bacterium OX=2026793 GN=queG PE= 3 SV=1
MLQNTPQLSDDELRSLAADIHRWGLEMGFQQVGITDTDISTHSGKLREWLAKNYHGDMHYMADRESLRRQPDALLPETLRVISFRMDYLPDESNPPEEQLAQKDAAYISRYALGRDYHKLIRKRLSQIADNIRERGGLGGRAFVDSAPVLERGFAEKAGLGWIGKNSMLINPKAGSWFFLGEIYSDLALPTDPPQETGHCGSCRACLDDCPTGAIVAPYQVDARRCISYLTIELKTAIPEDLRPLMGNRVFGCDDCQLVCPWNKFATSTGENDFKPRHGLENAQLLELFNWTEQEFDTRTLGSAIRRIGYERWLRNLAVALGNAPHSREIVLALKGKREGVSEMVREHIDWALERQRCSR

SEQ ID NO: 81180 - protein, 337 aa, Sporanaerobacter acetigenes
  misc_feature (1)..(337): tr|A0A1M5X655|A0A1M5X655_9FIRM Epoxyqueuosine reductase OS=Sporanaerobacter acetigenes DSM 13106 OX=1123281 GN =SAMN02745180_01494 PE=4 SV=1
MNLKQYIIQKSQEVGIDIIGFTDSGRLDDLKDYLYERRENNRETEFEEKDLEKRVDPKSIFPHCKSIIVVGISYNVDFNEKVDFELKGKISKSSWGEDYHRVVKDRIEKLIDEIEKEIEFNYISFVDTGPLVDRELARKAGVGWYGKNCSIINDKYGSFIFIGYILTDLDIESDNPILSQCGDCNLCLRACPTGALEAPYKFNPKKCISYLTQTKDEIPYELREKMGIKVYGCDTCQIVCPKNKSALNSKNNEFVPVNTKGYIDIEEIFNMSNSEFKKKYGSMAGSWRGKNILKRNCIIAIGNMKDVNNIEFLEKALKDPSPMIRQYANWAIKKIKT

SEQ ID NO: 81181 - protein, 369 aa, Sporanaerobacter sp.
  misc_feature (1)..(369): tr|A0A410QEG8|A0A410QEG8_9FIRM tRNA epoxyqueuosine(34) reductase QueG OS=Sporanaerobacter sp. JN28 OX=2507161 GN=queG PE=4 SV=1
MNIKKYIMDKSKELNIDMIRFTDSSPLVDIKDFIMERKNLGYSTEFEEKDIERRINPKIILLDCKSIIAIALSYNIKYNENLNTDLKGKLSRCSWGLDYHKVLNNKMKKLIEEMEKKVKFNYSYFADTGPLVDREIAKKSGLGYYGKNCTIINEKFGSFIFLGYILTDLDIEEDGIIEGYNCGECNLCLKACPTGALEAPYRLNPKKCISYLTQTKGDIPYEQRKKMGINVYGCDVCQLVCPKNKYAEESSNKEFLPLRTKGYIDIKELFKISNREFKNEYGNMAGSWVGRNTLRRNAIIALGNMKKGENVSFLKELLSLNNIDFNLRKYIYWSLLNIDKKLGKEIIGDGIKDRIDIDEIEKLLRYFKI

SEQ ID NO: 81182 - protein, 369 aa, Sporanaerobacter sp.
  misc_feature (1)..(369): tr|A0A1G4FKE3|A0A1G4FKE3_9FIRM Epoxyqueuosine reductase OS=Sporanaerobacter sp. PP17-6a OX=1891289 GN=queG PE= 4 SV=1
MNIKKYIMDKSKELNIDMIRFTDSSPLIDIKDFIMERKNLGYSTEFEEKDIERRINPKIILPDCKSIIAIALSYNIKYNENLNTDLKGKLSRCSWGLDYHKVLNNKMKKLIEEMEKKVKFNYSYFADTGPLVDREIAKKSGLGYYGKNCTIINEKFGSFIFLGYILTDLDIEEDGIIEGYNCGECNLCLKACPTGALEAPYRLNPKKCISYLTQTKGDIPYEQRKKMGINVYGCDVCQLVCPKNKYAEESSNKEFLPLRTKGYIDIKELFKISNREFKNEYGNMAGSWVGRNTLRRNAIIALGNMKKGENVSFLKELLSLNNIDFNLRKYIYWSLLNIDKKLGKEIIGDGIKDRIDIDEIEKLLRYFKI

SEQ ID NO: 81183 - protein, 295 aa, Sporobacter termitidis
  misc_feature (1)..(295): tr|A0A1M5WH58|A0A1M5WH58_9FIRM Epoxyqueuosine reductase QueG (Queuosine biosynthesis) OS=Sporobacter termitidi s DSM 10068 OX=1123282 GN=SAMN02745823_01271 PE=4 SV=1
MDITGMIKDAAKRYGMDMCGVAGVDRFDESPPGRHPTDILPGCKSVVVVGVRLLDGIVQANFRTFENGRQDLKGLYGTYGYTMLPNFELTYACYAVAQFIERETGEAATPLSTGPMTNGAQISIRHAAVAAGLGEFGWLSIVLTPEFGPRNRFGVILTTAGLAPDPLYGGPRLCNPEVCHICTDVCPTKAIGAYGSEDFRTCGLGTYGKVSFPRCQVPTQGLRRAFGGAEDYVTTDDPVGRDIAEANARQPIMERGLQHHESWHCGMCLSYCPAGRWKEHFLDRALTGGAGAVAK

SEQ ID NO: 81184 - protein, 343 aa, Sporobacter termitidis
  misc_feature (1)..(343): tr|A0A1M5YN07|A0A1M5YN07_9FIRM Epoxyqueuosine reductase OS=Sporobacter termitidis DSM 10068 OX=1123282 GN=SAMN 02745823_02679 PE=4 SV=1
MNAMEEKIARRALALGYEKCGIVRLAAMEGYDEKLSERIQKVPESAPFYENQKRLTNLAEQYPWARSVVVAVHPYGRYNVPQNADGHIGKHYLFDTRVSEASPEYKACTELEKYLQELGLKTAGNRKFGVVGLRWAAMQAGLGLVRRNNFFYTESGSWVTLEGWLTDGDLELIQANALPQCPENCGQCVKACPSGALFDRYTMSPGRCVSFLTTFGGRDLPENPLAKRFGPWYYGCDACQDACPMNRGKWTGGEEFPGLAELSPCLSPENVLRMDDAFYREKIQPRFFYLSPEELWKWKVDVLNYMHNNYTEDYGPYILAACGDENDKVGDMARHVATERSLL

SEQ ID NO: 81185 - protein, 304 aa, Sporocytophaga myxococcoides
  misc_feature (1)..(304): tr|A0A098LLX5|A0A098LLX5_9BACT Epoxyqueuosine reductase OS=Sporocytophaga myxococcoides OX=153721 GN=queG PE=3 SV=1
MFSSKSKHTLLIKNKAKELGFDYCGISRADFLEEEAPRLENWLKNNYHGEMKWMENHFDKRLDPRKLVEGSKSVISFLLNYFPEETVDHQLKISKYAYGRDYHTVIKDKLKELMLHMKQEIGDFNGRAFVDSAPVMDKTWAERGGLGWRGKNSNLINPKSGSFFFIAELITDLDLEYDGPMKDYCGTCTRCIDACPTDAISQAYVVDGSKCISYLTIELKNNIPSDFKGKMDNWIFGCDVCQDVCPWNRFSKAHNEPQFLPSEEFKSLKEWTELTSELFDEIFKKTAIKRTKFEGLQRNIKFLA

SEQ ID NO: 81186 - protein, 385 aa, Sporolactobacillus inulinus
  misc_feature (1)..(385): tr|A0A4Y3T908|A0A4Y3T908_9BACL Epoxyqueuosine reductase OS=Sporolactobacillus inulinus OX=2078 GN=queG PE=3 SV =1
MMDFQELKEQLIRYSKEIGVDKIGFTTADPFTELKARLYRQRELGYQSGFEEKDIEKRTEPSLLMDGVQSIVSIAMAYPKKMAERPANTKGHRRGAFARVSWGQDYHTILRDRMQKLGEFLVETVPGATFKSMVDTGELSDRAVAERAGIGWAGKSTNLITKEFGSYVYLGEMLTNIPFPPDKPATDLCGDCTICIDHCPTGALVQGGQLNSQKCIAYLTQTKQELPEEYKKAIGNRLYGCDMCQQVCPYNRDVDSHFHEEMEPDPELAHPLLTPLLTLSNRAFKETFGDVSGSWRGKKPIQRNAIVALGNYKEVAAALELLRLLHDDPRPVIRRTVTWALQQMWDRLEPDMRAHMIQSFEDLLAKEEDEKVHQWIKAKLDAEEG

SEQ ID NO: 81187 - protein, 384 aa, Sporolactobacillus inulinus
  misc_feature (1)..(384): tr|A0A0U1QLE6|A0A0U1QLE6_9BACL Epoxyqueuosine reductase OS=Sporolactobacillus inulinus CASD OX=1069536 GN=queG PE=3 SV=1
MDFQELKEQLIRYSKEIGVDKIGFTTADPFTELKARLYRQRELGYQSGFEEKDIEKRTEPSLLMDGVQSIVSIAMAYPKKMAERPANTKGHRRGAFARVSWGQDYHTILRDRMQKLGEFLVETVPGATFKSMVDTGELSDRAVAERAGIGWAGKSTNLITKEFGSYVYLGEMLTNIPFPPDKPATDLCGDCTICIDHCPTGALVQGGQLNSQKCIAYLTQTKQELPEEYKKAIGNRLYGCDMCQQVCPYNRDVDSHFHEEMEPDPELAHPLLTPLLTLSNRAFKETFGDVSGSWRGKKPIQRNAIVALGNYKEVAAALELLRLLHDDPRPVIRRTVTWALQQMWDRLEPDMRAHMIQSFEDLLAKEEDEKVHQWIKAKLDAEEG

SEQ ID NO: 81188 - protein, 388 aa, Sporolactobacillus laevolacticus
  misc_feature (1)..(388): tr|V6J3U7|V6J3U7_9BACL Epoxyqueuosine reductase OS=Spor olactobacillus laevolacticus DSM 442 OX=1395513 GN=queG PE=3 SV=1
MTDFQKLKEQLITYSKEIGVDKIGFTTADPFTELKGRLYQQQALGFQSGFEEKDIEKRTEPSLLMDGVQSIVSIAMAYPKRMPERLANTKGHRRGAFARVSWGQDYHMILRKAMQKLGEFLVDTIPGAQYKSMVDTGELSDRAVAERAGIGWSGKSTNLITKEFGSYVYLGEMLTNIPFPPDKPATDLCGDCTICIDHCPTGALVQGGQLNSKKCIAYLTQTKQELPEEYKKAIGNRLYGCDTCQQVCPYNRDVDSHFHEEMEPEPELARPLLQPLLSLSNREFKETFGPLSGSWRGKKPIQRNAIVALGNYKEVSAAPELLRLLNEDPRPVIRRTVTWTLQQMWDRFEPDTRAQMIQSLENLLTKETDEKVHRWIKERLDTDKSTEK

SEQ ID NO: 81189 - protein, 388 aa, Sporolactobacillus nakayamae
  misc_feature (1)..(388): tr|A0A1I2VXZ0|A0A1I2VXZ0_9BACL Epoxyqueuosine reductase OS=Sporolactobacillus nakayamae OX=269670 GN=queG PE=3 SV=1
MTDFQKLKEQLITYSKKMGVDKIGFTTADPFTELKARLYQQRELGYQSGFEEKDIEKRTEPSLLMDGAQSIVSIAMAYPKKMAERPANTKGQRRGAFARVSWGQDYHMILRKALEKLGDFLVDTTPGARYKSMVDTGELSDRAVAERAGIGWAGKSTNLITEEFGSYVYLGEMLTNIPFPPDKPATDLCGDCTICIDHCPTGALVQGGQLNSQKCIAYLTQTKQELPEPYKKAIGNRIYGCDTCQQVCPYNRDVDSHFHEEMEADPELARPLLIPLLSLSNRDFKETFGELSGSWRGKKPIQRNAIVALGNYKDVSAAPELLRLLDEDPRPVIRRTVTWALQKMWDRFDPNMRVQVVQSLENLLVKEDDEKVFQWIKEKLDAEKGNCC

SEQ ID NO: 81190 - protein, 388 aa, Sporolactobacillus shoreae
  misc_feature (1)..(388): tr|A0A4Z0GQE6|A0A4Z0GQE6_9BACL Epoxyqueuosine reductase OS=Sporolactobacillus shoreae OX=1465501 GN=queG PE=3 SV=1
MTDFQKLKEQLITYSKEIGVDKIGFTTADPFAELKARLYEQRALGFQSGFEEKDIEKRTEPSLLMDGVQSIVSIAMAYPKRMPERPANTKGHRRGAFARVSWGQDYHMILRDRLQKLGEFLVDTIHGAKYKSMVDTGELSDRAVAERAGIGWAGKSTNLITKELGSYVYLGEMLTNIPFPPDKPATDLCGDCTICIDHCPTGALVQGGQLNSQKCIAYLTQTKQELPEEYKKAIGNRLYGCDTCQQVCPYNRDVDSHFHEEMEPDPELARPLLQPLLSLSNREFKETFGPLSGSWRGKKPIQRNAIVALGNYKEISAAPELLRLLSEDPRPVIRRTITWALQQMWDRFEPDTRAQMIQSLENLLAKETDEKIHQWIKERLDADKSTEK

SEQ ID NO: 81191 - protein, 388 aa, Sporolactobacillus sp.
  misc_feature (1)..(388): tr|A0A4Q4IC81|A0A4Q4IC81_9BACL Epoxyqueuosine reductase OS=Sporolactobacillus sp. THM19-2 OX=2511171 GN=queG P E=3 SV=1
MTDFHRLKKELITYSKKAGIDKIGFTTADPFTELKARLYKQQALGYQSGFEEKDIEKRTEPSLLMDGVKSIISIAMAYPKKMARRPANTRGNRRGAFARVSWGKDYHVILRDRLQKLGDFLVDQVPGARYKSMVDTGELSDRAVAERAGIGWSGKNTNLITQEFGSYVYLGEMLTNIPFPPNRPATDLCGDCTICLDHCPTGALIQGGQLNSRKCIAYLTQTRQELPDAYKKAVGNRLYGCDTCQQVCPYNRDVDSHFHEEMEPDPELARPLLKPLLSLSNREFRETFGALSGSWRGKKPIQRNAIVALGNYKETDAAPELLRLLREDPRPVIRRTATWALQKMWDRLEHDMRTHIIQSLEDLYGKETDEKVRSWIEGRLDSGADSSS

SEQ ID NO: 81192 - protein, 382 aa, Sporolactobacillus sp.
  misc_feature (1)..(382): tr|A0A4Q4JG47|A0A4Q4JG47_9BACL Epoxyqueuosine reductase OS=Sporolactobacillus sp. THM7-7 OX=2511172 GN=queG PE =3 SV=1
MTDFAELKKKIIAYSKEIGVDKIGFTTADPFTELKARLYQQQALGYQSGFEEKDIEKRTKPALLMDGVQSIVAIAMAYPKKMAVRPENTKTDRRGAFARVSWGTDYHVILRDRLQKLGEFLVENAPGAAFKNMVDTGALSDRAVAERAGIGWAGKNTNVITKEFGSYVYLGEMLTNVPFPPDKPAENLCGDCTRCIDHCPTGALVQGGQLNSHKCIAFLTQTKQDIPEYYRKAIGNRVYGCDTCQQVCPYNRDVDSHFHEEMEPDPELVRPRLKPLLSLSNRSFKEKFGSLSGAWRGKKPIQRNAIIALGNYKDVTAAPELVRLLREDPRPVIRRAAIWAINKMRDRLNPDDRDNLDQSLRSLLETETDPSVRENIKNVLGE

SEQ ID NO: 81193 - protein, 385 aa, Sporolactobacillus terrae
  misc_feature (1)..(385): tr|A0A410D5K4|A0A410D5K4_9BACL Epoxyqueuosine reductase OS=Sporolactobacillus terrae OX=269673 GN=queG PE=3 SV =1
MTDFQELKEQLIRYSKEIGVDKIGFTTADPFTELKARLYRQRELGYQSGFEEKDIEKRTEPSLLMDGVQSIVSIAMAYPKKMAERPANTKGHRRGAFARVSWGQDYHTILRNRMQKLGEFLVETVPGAKFKSMVDTGELSDRAVAERAGIGWAGKSTNLITKEFGSYVYLGEMLTNIPFPPDKPATDLCGDCTICIDHCPTGALVQGGQLNSQKCIAYLTQTKQELPEEYKKAIGNRLYGCDTCQQVCPYNRDVDSHFHEEMEPDPELSRPLLAPLLSLSNRAFKETFGELSGSWRGKKPIQRNAIVALGNYKEVAAAPELLRLLHDDPRPVIRRTVTWALQQMWDRLEPDMRAHMIQSFEDLLAKEEDEKVHQWIKAKLDAEEG

SEQ ID NO: 81194 - protein, 300 aa, Sporolituus thermophilus
  misc_feature (1)..(300): tr|A0A1G7IRC8|A0A1G7IRC8_9FIRM Epoxyqueuosine reductase OS=Sporolituus thermophilus DSM 23256 OX=1123285 GN=SA MN05660235_00586 PE=4 SV=1
MKEKLKQFCRSQGLEYVGIAPPGPYPELAAILHDRMAKGQCTEFDGPEIAKRIDPRLTMADVQSVIVCLFPYYIGHQAPANLAKYTYGLDYHHIIRRKLDEIGIYLQANIPGFAYQPFVDTGPLVDRYLAYLAGLGFYGINSHIITDKYGSYVFIGYLLTNYPFAPDRPQNRTCIQCGQCVKMCPGQIILGNFAIDPRGCRSYLTQKKGDLSPAEISIIQKTGLVFGCDVCQDVCPHNRDVALTPLAEFRQQLLPWLDETEVAALSNKEFTCRYGDRAFSWRGKKILLRNFAYIQGRQCR

SEQ ID NO: 81195 - protein, 338 aa, Sporomusa acidovorans
  misc_feature (1)..(338): tr|A0A259V0U6|A0A259V0U6_9FIRM Epoxyqueuosine reductase OS=Sporomusa acidovorans DSM 3132 OX=1123286 GN=queG_1 PE=4 SV=1
MASLENGIKEKARQLGYEACGIIAAGIFEEFLTQLNTRSELFPHAKPFYDNLRKLAIPKQQIDWAKSVIVCVRRYDKYRIPDGLDRLIGKVFLCDGRLNYSQEYKNNVAFEEYLQQLGFRTVTNAVPARWAAVKAGLGKFRNNNFLYREQGSWVWVDTWVVDKGLEVQPAVDSPQFSCPEGCQKCIKACPTGALSAPLTMDATKCIACRTFRSELKVEESLLEKMGTWLYGCDICQNVCPANANTWQENESCFEEPLSLPELITLEKLFSLDDSTYRTNIQPRFWYINAEDGWFWKCKVIRAMANEDAQKYQDYFLQALNDSHEEVKKMARWALRRRQ

SEQ ID NO: 81196 - protein, 233 aa, Sporomusa acidovorans
  misc_feature (1)..(233): tr|A0A259U5R1|A0A259U5R1_9FIRM Epoxyqueuosine reductase OS=Sporomusa acidovorans DSM 3132 OX=1123286 GN=queG_4 PE=4 SV=1
MINAVNAMEIKRRVRELGADLCGIAPAARFEDAPQGFQPTDVLKECKSIIVVALRFPLSTLSSSSPAAYTFVRNQLCGKIDTLTFQISSELEQLGCCAVPVPSSEPYEFWDESRRHGQGIVSLKHAAVRAGLGKMGKNTLLINDQLGNMLWLGAVLADADLEPDQVADYQACLPNCNICLEACPAKALDGITIEQRQCRAVSAKYSEGGGGVYTCNLCRKICPQYRGIKVEAG

SEQ ID NO: 81197 - protein, 228 aa, Sporomusa malonica
  misc_feature (1)..(228): tr|A0A1W2ET02|A0A1W2ET02_9FIRM Epoxyqueuosine reductase QueG (Queuosine biosynthesis) OS=Sporomusa malonica OX =112901 GN=SAMN04488500_12852 PE=4 SV=1
MKTISAEEIRCRAKELGADLCGIASVERFDDAPPGFHPTDVALGCKSVIVLAARFPSSTLAASSQAAYTFVRNRLVDRIDSITVQISSELEQLGYCAVPIPSSDPYDYWDDSRRHGQGILSLKHAAVRAGLGHMGKNTLLVNDELGNMLWLGAVLIDKELEPDLIAGYQTCNPDCRICLDSCPANALDGTTIDQRKCRGVSAKYTEGGGGVYACNLCRKLCPQNKGIK

SEQ ID NO: 81198 - protein, 342 aa, Sporomusa malonica
  misc_feature (1)..(342): tr|A0A1W2CXI6|A0A1W2CXI6_9FIRM Epoxyqueuosine reductase QueG (Queuosine biosynthesis) OS=Sporomusa malonica OX =112901 GN=SAMN04488500_11281 PE=4 SV=1
MCKSSLALRIREKAVELGFAACGIIKLDAIKGYAEKLEERMDCLPETRSMYEVFLKYATPEQSYGWAKSVVVCITRYGKYKVPENLEGLIGKYYLYDYKLQGHTREFQNHARFEEYLKSLNLKTARELHGVTAARWVAAKAGLGIIRKNNFLYTEHGSWVIIDTWLIDEELELIEEPKIPDCPEGCSECVQSCPTQALTQSYCTSMLTCITRLTWGIKDLPPEDLWDKMGKWVYGCDECQNACPMNYGKWEATDNYPGLGELAEKLSLESIVAMDNEELKNQMLSKFWFIRQETVYQWKVNALRAMANSYESRYEKYIIGALSDENAQVREIAKWACAKNKL

SEQ ID NO: 81199 - protein, 250 aa, Sporomusa silvacetica
  misc_feature (1)..(250): tr|A0A259URB9|A0A259URB9_9FIRM Epoxyqueuosine reductase OS=Sporomusa silvacetica DSM 10669 OX=1123289 GN=queG_ 1 PE=4 SV=1
MEETIRKYVLDLGVDDIGFLSVQDYKSPASPAIDSIFPEARSIIILAYHELATCESPSPITAMNGRMDLMEFSRSCNYKLARFLTKDFCAKAMTVPFSYPMDLGNSIAGQLSLRHAAVSAGLGTFGRHNIVVHPQFGTRVCFTAVLTDLELKTTNSTLEDICVNCNQCVTNCPANALDQPGQTDVLRCLQKSQPYGIVASAGFWVKFVNSSADEQNVMLRSEFYAKMYQSQFIGFQYYCFNCMKTCPVGR

SEQ ID NO: 81200 - protein, 251 aa, Sporomusa silvacetica
  misc_feature (1)..(251): tr|A0A259U9Q3|A0A259U9Q3_9FIRM Epoxyqueuosine reductase OS=Sporomusa silvacetica DSM 10669 OX=1123289 GN=queG_ 5 PE=4 SV=1
MPEEFYPQNVWPLAKTVIVLGVPVWLPIVEAAPAQLGREQYTITNELLDEAAYRLAAYLNRNGHAAINTCRDGYGDSDVLMENPVAVFSHVWAAHYAGLGRVGWNHTLLTPQFGPRLRLVSILTALELPGDPMIEKDLCTHCMLCQKICPANALAGDRTDLYANMDKRACTGNGKRLRKAYRNPCGFCIKVCPVGKDRQLFQSTNVQKYFKEQEILAQNPDAPEYRSWQHLRKYGGHALEGEIQAARKVEK

SEQ ID NO: 81201 - protein, 345 aa, Sporomusa sp.
  misc_feature (1)..(345): tr|A0A562GSB6|A0A562GSB6_9FIRM Epoxyqueuosine reductase OS=Sporomusa sp. KB1 OX=943346 GN=Salpa_5623 PE=4 SV=1
MMDKKELTKKIKMKALELGFSKIGTTTADDFVEYEQELNSRPDYTPWINTPGTGYLIDGCRPSTFYPEGKSIICTVYGFSDILFPEELTPYVGRAYLSRSYRPLEESSCGLRVNAFKDFIKSLGISMYEGGIIVPERMACARAGVITYGKNNFAYTEEDGSFIILYTFVVDTELECDEPTIICKCPPDCQECIKACPTHAIAQARRLLPLNCVLRNNLSNMVIPYELRECLGTKIHGCDACQLACPRNKKVLANASKKDLFLEELKKDFDLERILLLDEKYYQNVVYPIMYNYIRDMDLFRRNAAIALGNTGDQSHIPALKKALENANPLVRDVAQWAIDKLSVK

SEQ ID NO: 81202 - protein, 288 aa, Sporomusa sp.
  misc_feature (1)..(288): tr|A0A562GLV4|A0A562GLV4_9FIRM Epoxyqueuosine reductase QueG OS=Sporomusa sp. KB1 OX=943346 GN=Salpa_3640 PE=4 SV=1
MKEQIVRKIIDLAGSLSSNRWRSGDDLLAYFDEPLVGFASVNDPLFLKYKQDIGEFYLTPQELFEEEFGSGALSAGTIISVILPVSEVLLQSNRGQSGFPSREWAQLSAYGGQYAAELRSSVIAYMNQLGHRAIAPVLSLKWKTLQVPSNAHTTNWSERHAAYAAGLGTFSLAGALISKRGIAHRTFSVITDWELEPDKRPYTGLYDYCLYYNSDSCGACVSRCSGGAITARGYNNELCYRHNRSPQYMALRAEYGVEKTGCSLCQTKVPCEKSIPVQKRSDRGLVGD

SEQ ID NO: 81203 - protein, 252 aa, Sporomusa sphaeroides
  misc_feature (1)..(252): tr|A0A1U7MC08|A0A1U7MC08_9FIRM Epoxyqueuosine reductase OS=Sporomusa sphaeroides DSM 2875 OX=1337886 GN=queG_5 PE=4 SV=1
MEEQIRNYILDLGVDDVGFACAQDYHSPKSYEITKLLPEAKSIIVLAFKPLSSCESPSMSAAQNGYLDLGSFARSASYRISRFLERNYKAKIATMPIAYPFEIHNDRKALADFSQRHAAVAAGLGSFGRHNLVIHPQFGTRVIFTSIITNLTLQPSPQCEDFCTQCNLCVENCPARALDEAGKTDIRKCLGHSQPYGLIADITFQLQQLGRSPEEQKQMLMDEQYARLRQAAHLGNQYMCFNCLKSCPIGLA

SEQ ID NO: 81204 - protein, 246 aa, Sporomusa sphaeroides
  misc_feature (1)..(246): tr|A0A1U7MJE2|A0A1U7MJE2_9FIRM Epoxyqueuosine reductase OS=Sporomusa sphaeroides DSM 2875 OX=1337886 GN=queG_2 PE=4 SV=1
MSMKNQIEQLIVEKVASLNRPDLFRRPIVSFSSATDSRYSELKEIIGPWHLNPTELLPDAQSVISYFVPFTSLVVAAPKTVDGGSEAWGEAYAIINPYFNVVNQAVIQYLSDLGYSASAVQATHTYDPKDMKSIWSHRSAAAIAGLGTFGANRMLITEKGSGGRFCSVLTSATLYEEQAPAETRCLYVKNGSCGLCFKICPVNALVPDSFDKFICQDECNKNQKQDRHGADTCGKCISVCPVAYID

SEQ ID NO: 81205 - protein, 253 aa, Sporomusa termitida
  misc_feature (1)..(253): tr|A0A517DWC0|A0A517DWC0_9FIRM Epoxyqueuosine reductase OS=Sporomusa termitida OX=2377 GN=queG_5 PE=4 SV=1
MEQQIRDYILELGVDDVGVACAADYQSPKSYAITKFLPDAKSVIVLAFKPLTSCESPSMSAAQNGYLDLGSFAHTASYRIARQLENKYQAKVATISISYPFEMHNDRRAIADFSQRHAAVAAGLGKIGRHNLVIHPRFGTRVIFTSIITNLDLRPSARCDEDFCIHCNLCVENCPAGALAEEGRTDVMKCLSHSQPYGLGADITFQLQRLGKSPAEQQAMLVDEHYARLRQAAYLGNQYMCFNCLKNCPVGLA

SEQ ID NO: 81206 - protein, 353 aa, Sporomusa termitida
  misc_feature (1)..(353): tr|A0A517DV91|A0A517DV91_9FIRM Epoxyqueuosine reductase OS=Sporomusa termitida OX=2377 GN=queG_4 PE=4 SV=1
MCVDAKSFFASDELGYEKCGIIPIQEMDGYAEKLEERIQKVPASEKFYQGQRRLLNLQISYPWAKSVVVLARRYGRYKIPQPVKGQIAKSYLLDLRADPELKEYKSSQAMDQYLQSLGLQVATNRKCGIVGLRWAAMQAGLGVIRRNNFFYAQSGSWVALEAWLTDKEMELRETSDLPPCPKGCNRCVVACPTRSLSEPYTMLPTTCVSFLTTFGGRNLPKEPLSKAFGRCIYGCDICQDVCPMNKGRWQENEDFPGLSELAPTLTPESILEMDEDYYKEKIQPKFFYLSSDELWKWKVNVLCFMRNNYQKEYKSYIIAACENENIKVQEMARAIRDEWGLSNGNTSTALIEY

SEQ ID NO: 81207 - protein, 77 aa, Sporomusaceae bacterium
  misc_feature (1)..(77): tr|A0A3C0UF59|A0A3C0UF59_9FIRM Fe-S oxidoreductase (Fra gment) OS=Sporomusaceae bacterium OX=1917525 GN=DCP36_0 8675 PE=4 SV=1
STPYTMLPNTCVSFMTTFGGRNLPQESLRKTFGNCIYGCDICQDVCPMNKGKWQEEENFPGLAELSPALTPENILQM

SEQ ID NO: 81208 - protein, 73 aa, Sporomusaceae bacterium
  misc_feature (1)..(73): tr|A0A3C0UGZ9|A0A3C0UGZ9_9FIRM tRNA epoxyqueuosine(34) reductase QueG (Fragment) OS=Sporomusaceae bacterium OX =1917525 GN=DCP36_13020 PE=4 SV=1
MPLNRVCLQCGRCQAACPGQIILGDFTIDPRGCKSYLTQKKAALSPAEVAIIGKTPLVFGCDICQDVCPHNRN

SEQ ID NO: 81209 - protein, 377 aa, Sporosarcina globispora
  misc_feature (1)..(377): tr|A0A0M0GII4|A0A0M0GII4_SPOGL Iron-sulfur cluster-bind ing protein OS=Sporosarcina globispora OX=1459 GN=AF332 _24450 PE=4 SV=1
MDIVQFKQEVIEYSKTIGIDKIGFTSASTFDEMKNRLIRQQAHHYQSGFEEPDIEKRVNPSLLMDKPRSIISIAVAYPSKMKVRVVSKRGERRGIFCRASWGKDYHHILRERLQKLEEFIQARIPEAICKSMVDTGELVDRAVAQRAGIGWSGKNCSIITPEFGSYVYLGEMITSLPFEPDEPMEDRCGSCNKCVDVCPTGALIQGGQLDAQKCVAFLTQTKGFLAEQYREKLGNRLYGCDTCQTVCPENKGKDFHLHKEMEPDPEVAKPLLRPLLFIGNREFKEKFGPVSGSWRGKKPIQRNAIIALAHYKDETAVDDLIKVMTEDPRPVIRGTAAWALGKIGGEESLAALKQALQQEKDGEVIPEIEKGLSFIEQ

SEQ ID NO: 81210 - protein, 379 aa, Sporosarcina luteola
  misc_feature (1)..(379): tr|A0A511Z5K8|A0A511Z5K8_9BACL Epoxyqueuosine reductase OS=Sporosarcina luteola OX=582850 GN=queG PE=4 SV=1
MNVAQLQKSIKEYAASIGIDKIGFTTAAPFLELKNRLRRQQELGYQSGFEESDIEKRTEPVLLLDRAESILSIAIAYPSKMEGSPKGKRGERRGIFCRASWGMDYHHVLREKLQLLEEYISEWLPDAKMRSMVDTGELVDRAVAQRAGIGWSAKNCSIITPEFGSYVYLGEMITNIPFEPDIPMEDQCGDCTLCLDACPTGALIQGGQLNAQRCIAFLTQSKKPIPEEFRAKIGNRVYGCDTCQTVCPKNKGKYNLHQPSFEPEPELTKPLLVPMLNLSNREFKETYGHMSGSWRGKNPIQRNAILALAHFKDESSVPVLAELLVKDPRPVIRGTIAWALGEIGSSEGKAAIERAILQEEDPEVRMEMEKVLETNQRKC

SEQ ID NO: 81211 - protein, 384 aa, Sporosarcina newyorkensis
  misc_feature (1)..(384): tr|A0A1T4YH18|A0A1T4YH18_9BACL Epoxyqueuosine reductase OS=Sporosarcina newyorkensis OX=759851 GN=SAMN04244570 _2589 PE=4 SV=1
MVNVAQLQQEIREFAASIGIDKIGFTTAAPFVKLKDRLKQQQELNYQSGFEEPDVEKRTKPFLLLEGAESIISIAVAYPSKMADSPRGKKGERRGMFCRASWGEDYHTVLRDKLAQLELFILTKVPDARLRSMVDTGELVDRAVAERAGIGWSAKNCSIITPEFGSYVYLGEMITNLPFAPDRAMEDQCLDCTLCLDACPTGALIQPGQLNAQRCIAFLTQTKQPVPEEFRQKIGNRLYGCDTCQTVCPKNKGMNHTHQPAFTPEPERVKPLLLSLLSLSNRQFKEQYGHMSGSWRGKNPIQRNALIALAHFKDESAIPELGRLVREDARPMIRGTAVWALGRIGTEPAEEILQKVSQIEQDEAVIAEINKAMKQLSSNQKKEV

SEQ ID NO: 81212 - protein, 384 aa, Sporosarcina newyorkensis
  misc_feature (1)..(384): tr|F9DXU8|F9DXU8_9BACL Iron-sulfur cluster-binding prot ein OS=Sporosarcina newyorkensis 2681 OX=1027292 GN=HMP REF9372_3629 PE=4 SV=1
MVNVAQLQQEIREFAASIGIDKIGFTTAAPFVKLKDRLKQQQELNYQSGFEEPDVEKRTKPLLLLEGAESIISIAVAYPSKLADSPRGKRGERRGIFCRASWGEDYHTVLRDKLAQLELFILTKVPDARLRSMVDTGELVDRAVAERAGIGWSAKNCSIITPEFGSYVYLGEMITNLPFAPDEAMEDQCLDCTLCLDACPTGALIQPGQLNAQRCIAFLTQTKQSVPEEFRQKIGNRLYGCDTCQTVCPKNKGMNHTHQPAFTPEPERVKPLLLSLLSLSNRQFKEQYGHMSGSWRGKNPIQRNALIALAHFKDESAIPELGRLVTEDPRPMIRGTAAWALGRIGTEQAEDILEKVSQIEQDEAVAEEIHKAMKQLSSNQKKEV

SEQ ID NO: 81213 - protein, 381 aa, Sporosarcina pasteurii
  misc_feature (1)..(381): tr|A0A380CAN3|A0A380CAN3_SPOPA Epoxyqueuosine reductase OS=Sporosarcina pasteurii OX=1474 GN=queG PE=4 SV=1
MNILELQEEVKKYAATIGIDKIGFTTAAPFHELRNRLVRQQELGFQSGFEEKDINKRTEPALLLDRPESIIAIAIAYPSRMENSVRGKKGERRGIFCRASWGTDYHIVLRERLKLLEEFILARVPTAKLRSMVDTGELADRAVAERAGIGWSGKNCSIITPEFGSYVYLGEMITNIPFAPDEPMEDECGDCTLCLDACPTGALIQGGQLNAQRCIAFLTQTKTSIPEEFRAKIGNRVYGCDTCQTICPKNRKKYNMHQEAFEPEPELVKPILEPMLDLSNRQFREQFGHMAGSWRGKNPIQRNAIIALAHFKEEAAIPKLMEMLLNDQRPVMRGTVAWALGKIGTTASYEAIQAALETEEHADVRLELEKALENWQEETHI

SEQ ID NO: 81214 - protein, 379 aa, Sporosarcina psychrophila
  misc_feature (1)..(379): tr|A0A127VV25|A0A127VV25_SPOPS Epoxyqueuosine reductase OS=Sporosarcina psychrophila OX=1476 GN=AZE41_03890 PE =4 SV=1
MNAVQLQQSVRDYAESIGIDKIGFTTAAPFRELKNRLKRQQELGYQSGFEEKDLDKRTEPALLLDQAESIIAIAVAYPSKMADSPRGKKGERRGIFCRASWGTDYHTVLREKLSLLEEFILEHAPKAKVRSMVDTGELADRAVAERAGIGWSAKNCSIITPEFGSYVYLGEMITNIPFAPDVPMEDECGDCTLCLDVCPTGALIQGGQLNAQRCIAFLTQSKKPIPEEFRAEFGNRIYGCDTCQTVCPKNKGKHNLHQQAFQPDPELAKPLLQPVLRLSNREFKEKFGHVSGSWRGKNPIQRNAIIALAHFKEESAVPELISMLENDPRPVIRGTIAWALGRIGLEEGYVAIKEALSKEEDPEVRAELEKAADTYILKK

SEQ ID NO: 81215 - protein, 379 aa, Sporosarcina sp.
  misc_feature (1)..(379): tr|A0A5B0BRF7|A0A5B0BRF7_9BACL tRNA epoxyqueuosine(34) reductase QueG OS=Sporosarcina sp. ANT_H38 OX=2597358 G N=queG PE=4 SV=1
MNAVQLQQSVRNYAESIGIDKIGFTTAAPFRELKNRLKRQQELGYQSGFEEKDLDKRTEPALLLDQAESIIAIAVAYPSKMADSPRGKKGERRGIFCRASWGTDYHTVLREKLRLLEEFILEHAPAAKVRSMVDTGELVDRAVAERAGIGWSAKNCSIITPEFGSYVYLGEMITNIPFAPDVPMEDECGDCTLCLDVCPTGALIQGGQLNAQRCIAFLTQSKMPIPEEFRTEFGNRVYGCDTCQTVCPKNKGKHNLHQQAFQPEPELAKPLLQPILRLSNREFKEIFGHVSGSWRGKNPIQRNAIIALAHFKDESAVPELISMLKNDPRPVIRGTIAWALSRIGLEEGYIAIMEALVIEEDPEVRAELTKASDNWKEKV

SEQ ID NO: 81216 - protein, 377 aa, Sporosarcina sp.
  misc_feature (1)..(377): tr|A0A345P228|A0A345P228_9BACL tRNA epoxyqueuosine(34) reductase QueG OS=Sporosarcina sp. PTS2304 OX=2283194 G N=queG PE=4 SV=1
MNVAQLQEEVRAFATSIGIDKIGFTTAAPFIKLKDRLKRQQQLNYQSGFEESDIEKRTEPLLLLDQAESIISIAVAYPSKMTESPRGKRGERRGVFCRASWGEDYHTVLRDKLAQLELFIVTKVPHARLRSMVDTGELVDRAVAERAGIGWSAKNCSIITPEFGSYVYLGEMITNLPFEPNEPMEDQCLDCTLCLDVCPTGALVQPGQLNAQRCIAFLTQTKQSIPEEFRHKIGNRVYGCDTCQTVCPKNKGVNSTHQLDFTPDPERVKPLLLSLLSLSNRQFKEQFGHMSGSWRGKNPIQRNALIALAHFKEESAISDITKVLTEDPRPVMRGTAAWALGQIGTSEAIEGLQLGSIVNQEEAVTIEIERALMHCTK

SEQ ID NO: 81217 - protein, 347 aa, Stakelama pacifica
  misc_feature (1)..(347): tr|A0A4V3BTL6|A0A4V3BTL6_9SPHN Epoxyqueuosine reductase OS=Stakelama pacifica OX=517720 GN=queG PE=3 SV=1
MSEDKSLESRIFEKAAELGFVACGFAPADAAPRTAERLRQWLAEGRHGDMIWMENRAHHRESPKGLWPEVRSVIALGMSYAPGYDPLALEDAGERGRISVYAQGRDYHDIVKKALKALARWLVENAGGELKVFVDTAPVMEKPLSEAAGLGWQGKHTNLVSRDHGSWLFLGAIYTTLDLAPTGAGRDSCGSCDACQTACPTDAFPAPYQLDARRCISYLTIELHGPIPHEFRESIGNRIYGCDDCLAACPWNKFARAAAANRAFLPRGELTAPRLADLLALDDAAFREVFSGSPIKRIGRDRMVRNCLIAAGNSGDASLTPPVRALMDDPDPVVQEAAQWALERLPA

SEQ ID NO: 81218 - protein, 316 aa, Stanieria cyanosphaera
  misc_feature (1)..(316): tr|K9XX60|K9XX60_STAC7 Epoxyqueuosine reductase OS=Stan ieria cyanosphaera (strain ATCC 29371 / PCC 7437) OX=11 1780 GN=queG PE=3 SV=1
MSQNLNSEDIKSAAKSFGFHKVGIATINNNYQDDAVAHLQTWLALGYHADLSWMANPKRENITACMPEVRSVICVALNYYTPHQHSNHPEVAKISRYGWGRDYHKIMDKKLKALSNWLTAQQEGIKTRYYADTGPIQDKVWAQRAGIGWIAKNGNVITRDYGSWVFLGEILTNLELPPDRPHTQHCGTCTRCLDACPTGAITKPFVVDANRCLAYHTIENRAEQLPDAIANNLQGWVAGCDICQDVCPWNQRFAQETDIKEFQPYPENLNPKLTELAEITEPEWDSRFRASALRRIKLPMLQRNALANLKSKKMMS

SEQ ID NO: 81219 - protein, 314 aa, Stanieria sp.
  misc_feature (1)..(314): tr|A0A140K8T8|A0A140K8T8_9CYAN Epoxyqueuosine reductase OS=Stanieria sp. NIES-3757 OX=1807358 GN=queG PE=3 SV= 1
MSQNLNSEDIKSAAKSFGFHKVGIATINNNYQDDAVAHLQTWLALGYHADLSWMANPKRKNIAACMPEVRSVICVALNYYTPHQHSNHPEVAKISRYGWGRDYHKIMEKKLKALNNWLTAQQEGIKTRYYADTGPIQDKVWAQRAGIGWIAKNGNVITRDYGSWVFLGEILTNLELTPDRPHTQHCGTCTRCLDACPTKAITKPFVVDANRCIAYHTIENRAEQLPDAIAANLQGWVAGCDICQDVCPWNQRFAQETDVEDFQPYPENLNPKLTELAEISEPEWNRRFRASALRRIKLPMLQRNALANLKSKKE

SEQ ID NO: 81220 - protein, 375 aa, Staphylococcus agnetis
  misc_feature (1)..(375): tr|A0A2T4MS03|A0A2T4MS03_9STAP tRNA epoxyqueuosine(34) reductase QueG OS=Staphylococcus agnetis OX=985762 GN=q ueG PE=4 SV=1
MDLVTLKQEIIAYAHQIGIDDIGFTTADPFDELKNKLIEYHEKGYASGFEESDISLRVDPKLSMSSAQSIIAIAVGYPNKLKGAPKSVRGERRGMFARASWGQDYHSIMRRRLNDLGLFIQSKVPEAEMMSMVDTGVLSDRAVAERAGLGFIGRNGFVINPELGTWTYLGEMLINLPFPPDEQILDSCGTCTICVDRCPTGALVGDGQLNSQKCISFLTQTKGYLKDEYRYKIGNRLYGCDTCQQVCPKNRGINTEQEDIILEPEILKPKLVPLLQMSNKEFKATYGHLAGAWRGKKPIQRNAIIALAHFNETTAIPDLKQVAENDPRPMIRGTAYWAIGQILGEAAREYIMSRYDDELEEVQQEMIKGLEMRRL

SEQ ID NO: 81221 - protein, 375 aa, Staphylococcus agnetis
  misc_feature (1)..(375): tr|A0A2T4MJV7|A0A2T4MJV7_9STAP tRNA epoxyqueuosine(34) reductase QueG OS=Staphylococcus agnetis OX=985762 GN=q ueG PE=4 SV=1
MDLVTLKQEIIAYAHQIGIDDIGFTTADPFDELKNKLIEYHTKGYASGFEESDIALRVEPKLSMSSAESIIAIAVGYPNKLKNAPKSVRGERRGMFARASWGQDYHTIMRRRLDDLAAFIQSKVPDVEIMSMVDTGVLSDRAVAERAGLGFTGRNGFVINPELGTWTYLGEMLINLPFPPDEQILDSCGECTICVDRCPTGALVGNGQLNSQKCISYLTQTKGYLKDEYRYKIGNRLYGCDTCQQVCPKNRGINTEQEDIILEPEILKPKLVPLLQMSNKEFKATYGHLAGAWRGKKPIQRNAIIALAHFNETTAIPDLKQVAEDDPRPMIRGTAYWAIGQILGEAAREYIMSRYDDELEEVQQEMIKGLEMRRL

SEQ ID NO: 81222 - protein, 375 aa, Staphylococcus argensis
  misc_feature (1)..(375): tr|A0A2K4FG71|A0A2K4FG71_9STAP Epoxyqueuosine reductase OS=Staphylococcus argensis OX=1607738 GN=queG PE=3 SV= 1
MDVKQLKEDVIAYAHTIGIDSIGFTTADPFDELKQKLVDYHAKGYASGFEEDDIQLRTEPKLSLPTARSIIAIAVGYPNKLKGAPRSKRGERRGMFARASWGQDYHTIMRKRLDKLAEYIESRVPDVEMKSMVDTGVLSDRAVAERAGLGYTGRNGFVINPDLGTWTYLGEMLVSIPFPPDDPLIDSCGDCTMCVDRCPTGALVGNGQLNAQKCISFLTQTKGYLQDEYRYKIGNRLYGCDTCQQVCPRNRGINTEHDDIVLEPEILKPRLVPLLQMSNREFKETYGHLAGAWRGKKPIQRNAIIALAHFKETSAIPELEEVAVNDPRPMIRATAYWAIGQIQGDEARPFIEAHYDEELEEVQEEMIKGLEMGRT

SEQ ID NO: 81223 - protein, 376 aa, Staphylococcus argenteus
  misc_feature (1)..(376): tr|A0A348BCC4|A0A348BCC4_9STAP Epoxyqueuosine reductase OS=Staphylococcus argenteus OX=985002 GN=queG PE=3 SV= 1
MDTKQLKQDIIDYAYTIGIDSIGFTTADPFDELKQKLEAYHSNGYASGFEESDIALRTEPKLSLPTSRSIIAIAVGYPNKLKGAPKSVRGDRRGLFARASWGQDYHSIMRKRLDKLAAFIESKVPNVEIKSMVDTGVLSDRAVAERAGLGFVGRNGFVINPNLGTWTYLGEMLVSIPFEPDDPLLDSCGDCTICVDRCPTSALVGNGQLNSQKCISFLTQTKGYMPDQYRYKIGNRLYGCDTCQQVCPKNRGINTEQDDIILEPEILKPRLIPLLRMSNKEFKQTYGHLAGAWRGKKPIQRNAILALAHFNEVDAIPELKKVATTDERPMIRATAYWAIGQILGDDAKDFINANYEKEDAEVQQEMIKGIETRREK

SEQ ID NO: 81224 - protein, 381 aa, Staphylococcus argenteus
  misc_feature (1)..(381): tr|A0A4U7FZA4|A0A4U7FZA4_9STAP Epoxyqueuosine reductase OS=Staphylococcus argenteus OX=985002 GN=queG PE=3 SV= 1
MGGIRLDTKQLKQDIIDYAYTIGIDSIGFTTADPFDELKQKLEAYHSNGYASGFEESDIALRTEPKLSLPTSRSIIAIAVGYPNKLKGAPKSVRGDRRGLFARASWGQDYHSIMRKRLDKLAAFIESKVPNVEIKSMVDTGVLSDRAVAERAGLGFVGRNGFVINPNLGTWTYLGEMLVSIPFEPDDPLLDSCGDCTICVDRCPTSALVGNGQLNSQKCISFLTQTKGYMPDQYRYKIGNRLYGCDTCQQVCPKNRGINTEQDDIILEPEILKPRLIPLLRMSNKEFKQTYGHLAGAWRGKKPIQRNAILALAHFNEVDAIPELKKVATTDERPMIRATAYWAIGQILGDDAKDFINANYEKEDAEVQQEMIKGIETRREK

SEQ ID NO: 81225 - protein, 371 aa, Staphylococcus arlettae
  misc_feature (1)..(371): tr|A0A380CC22|A0A380CC22_9STAP (Fe-S)-binding protein O S=Staphylococcus arlettae OX=29378 GN=queG PE=4 SV=1
MKQEVIDYAHSIGIDHIGFTTADPFDELKQKLEDYHSKGYASGFEEPDINLRTEPKLSLPTARSIIAIAVGYPNKLKGAPKSVRGDRRGLFARASWGQDYHTIMRKRLDKLEQFLRSKVADIEVKSMVDTGVLSDRAVAERAGLGFTGRNGFVINPDLGTWTYLGEMLVSVPFAPDDPLLDSCGDCTICVDRCPTGALVGDGQLNSQKCISFLTQTKGYMADEYRYKIGNRLYGCDTCQQVCPKNRGINTQHDDIVLEPEILKPRLVPLLKMSNKEFKNTYGHLAGAWRGKKPIQRNAILALAHFKEEAAIPDLKDVALTDPRPMIRATAYWAIGQILGEEARPFIDAYYDTEIEEVQQEMLKGLEQRREH

SEQ ID NO: 81226 - protein, 376 aa, Staphylococcus arlettae
  misc_feature (1)..(376): tr|A0A5F0THP9|A0A5F0THP9_9STAP tRNA epoxyqueuosine(34) reductase QueG OS=Staphylococcus arlettae OX=29378 GN=q ueG PE=4 SV=1
MDINQLKQEVIDYAHSIGIDHIGFTTADPFDELKQKLEDYHSKGYASGFEEPDINLRTEPKLSLPTARSIIAIAVGYPNKLKGAPKSVRGDRRGLFARASWGQDYHTIMRNRLDKLEQFLRSKVADIEVKSMVDTGVLSDRAVAERAGLGFTGRNGFVINPDLGTWTYLGEMLVSVPFAPDDPLLDSCGDCTICVDRCPTGALVGDGQLNSQKCISFLTQTKGYMADEYRYKIGNRLYGCDTCQQVCPKNRGINTQHDDIVLEPEILKPRLVPLLKMSNKEFKNTYGHLAGAWRGKKPIQRNAILALAHFKEEAAIPDLKDVALTDPRPMIRATAYWAIGQILGEEARPFIDAYYDTEIEEVQQEMLKGLEQRREH

SEQ ID NO: 81227 - protein, 376 aa, Staphylococcus aureus; identical to SEQ ID NO: 81223
  misc_feature (1)..(376): tr|A0A0U1MQK9|A0A0U1MQK9_STAAU Epoxyqueuosine reductase OS=Staphylococcus aureus OX=1280 GN=queG PE=3 SV=1

SEQ ID NO: 81228 - protein, 375 aa, Staphylococcus aureus
  misc_feature (1)..(375): tr|A0A0E1AHL9|A0A0E1AHL9_STAAU Epoxyqueuosine reductase OS=Staphylococcus aureus subsp. aureus Z172 OX=1406863 GN=queG PE=3 SV=1
MDTKQLKQDIIDYAYTIGIDSIGFTTADPFDELKQKLEAYHANGYASGFEESDIALRTEPKLSLPTARSIIAIAVGYPNKLKGAPKSVRGDRRGLFARASWGQDYHTIMRKRLDMLAAFIESKVPDVEIKSMVDTGVLSDRAVAERAGLGFVGRNGFVINPKLGTWTYLGEMLVSIPFEPDDPLLDSCGDCTICVDRCPTSALVGNGQLNSQKCISFLTQTKGYMPDQYRYKIGNRLYGCDTCQQVCPKNRGINTEQDDIILEPEILKPRLVPLLRMSNKEFKQTYGHLAGAWRGKKPIQRNAILALAHFNEVDAIPELKKVATTDERPLIRATAYWAIGQILGEEARDFINANYDQEDAEVQNEMIKGLDTRRE

SEQ ID NO: 81229 - protein, 376 aa, Staphylococcus auricularis
  misc_feature (1)..(376): tr|A0A2T4MAJ7|A0A2T4MAJ7_9STAP tRNA epoxyqueuosine(34) reductase QueG OS=Staphylococcus auricularis OX=29379 G N=queG PE=4 SV=1
MDLKQLKQDVIEYAHSIGIDSIGFTTADPFDELKQKLVDYHAKGYASGFEEDDINLRTEPKLSLPTARSIIAIAVGYPNKMKGAPKSVRGDRRGMFARASWGQDYHTIMRTRLDKLADYLRSRVEDVEIKSMVDTGVLSDRSVAERAGLGYVGRNGFVINPDLGTWTYLGEMLVSIPFEPDDPLLDSCGDCTICVDRCPTGALVGNGQLNSQKCISFLTQTKGYLEDRYRYKIGNRLYGCDTCQQVCPRNRGINTQHDDIVLEPEVLKPRLVPLLKMSNKEFKNTYGHLAGAWRGKKPIQRNAIIALAHFKEETAIPDLEDVALNDPRPMIRGTAYWAIGQIQGEDARPFIEAHYDDEIEEVQAEMIKGLEMGRES

SEQ ID NO: 81230 - protein, 376 aa, Staphylococcus auricularis
  misc_feature (1)..(376): tr|A0A2K4BWR0|A0A2K4BWR0_9STAP (Fe-S)-binding protein O S=Staphylococcus auricularis OX=29379 GN=queG PE=4 SV=1
MDLKQLKQDVIEYAHSIGIDSIGFTTADPFDELKQKLVDYHAKGYASGFEEDDINLRTEPKLSLPTARSIIAIAVGYPNKMKGAPKSVRGDRRGMFARASWGQDYHTIMRTRLDKLADYLRSRVEDVEIKSMVDTGALSDRSVAERAGLGYVGRNGFVINPDLGTWTYLGEMLVSIPFEPDDPLLDSCGDCTICVDRCPTGALVGNGQLNSQKCISFLTQTKGYLEDRYRYKIGNRLYGCDTCQQVCPRNRGINTQHDDIVLEPEVLKPRLVPLLKMSNKEFKNTYGHLAGAWRGKKPIQRNAIIALAHFKEETAIPDLEDVALNDPRPMIRGTAYWAIGQIQGEDARPFIEAHYDDEIEEVQAEMIKGLEMGRES

SEQ ID NO: 81231 - protein, 375 aa, Staphylococcus capitis
  misc_feature (1)..(375): tr|A0A0U1EA51|A0A0U1EA51_STACP Epoxyqueuosine reductase OS=Staphylococcus capitis OX=29388 GN=queG PE=3 SV=1
MDYKQLKREIIDYAHSIGIDSIGFTTADPFDELKQKLESYHSKGFASGFEESDIALRTEPKLSLPSARSIIAIAVGYPNKLKGAPKSVRGDRRGMFARASWGQDYHTIMRKRLDKLSEFLREKVPDVEIQSMVDTGVLSDRAVAERAGLGFVGRNGFVISPELGTWTYLGEMLVSIPFEPDDPILDSCGDCTICVDRCPTGALVGNGQLNSQKCISFLTQTKGYLQDEYRYKIGNRLYGCDTCQQVCPKNRGINTQHDDIVLEPEILKPRLVPLLQMSNKEFKNTYGHLAGAWRGKKPIQRNAILALAHFNEESAIPELKEVALNDPRPMIRGTAYWAIGQIQGEDAKAFINENYEKEIEEVQVEMKKGLDMRRD

SEQ ID NO: 81232 - protein, 387 aa, Staphylococcus capitis
  misc_feature (1)..(387): tr|A0A341ERD2|A0A341ERD2_STACP tRNA epoxyqueuosine(34) reductase QueG OS=Staphylococcus capitis subsp. capitis OX=72758 GN=queG PE=4 SV=1
MTYVILCEGAKLVDYKQLKREIIDYAHSIGIDSIGFTTADPFDELKQKLESYHSKGFASGFEESDIALRTEPKLSLPSARSIIAIAVGYPNKLKGAPKSVRGDRRGMFARASWGQDYHTIMRKRLDKLSEFLRVKVPDVEIQSMVDTGVLSDRAVAERAGLGFVGRNGFVISPELGTWTYLGEMLVSIPFEPDDPILDSCGDCTICVDRCPTGALVGNGQLNSQKCISFLTQTKGYLQDEYRYKIGNRLYGCDTCQQVCPKNRGINTQHDDIVLEPEILKPRLVPLLQKNNKEFKNTYGHLAGAWRGKKPIQRNAILALAHFNEESAIPELKEVALNDPRPMIRGTAYWAIGQIQGEDAKAFINENYEKEIEEVQVEMKKGLDMRRD

SEQ ID NO: 81233 - protein, 375 aa, Staphylococcus caprae
  misc_feature (1)..(375): tr|C5QTJ1|C5QTJ1_9STAP Epoxyqueuosine reductase OS=Stap hylococcus caprae M23864:W1 OX=525378 GN=queG PE=3 SV=1
MDYKQLKREIIDYAHSIGIDSIGFTTADPFDELKQKLESYHSRGYASGFEESDIALRTEPKLSLPSARSIIAIAVGYPNKLKGAPKSVRGDRRGMFARASWGQDYHTIMRKRLDKLSEFLRERVPNVEIQSMVDTGVLSDRAVAERAGLGFVGRNGFVISPELGTWTYLGEMLVSIPFEPDDPILDSCGDCTICVDRCPTGALVGNGQLNSQKCISFLTQTKGYLEDEYRYKIGNRLYGCDTCQQVCPKNRGINTQHDDIVLEPEILKPRLVPLLQMSNKEFKNTYGHLAGAWRGKKPIQRNAIIALAHFKEENAIPELKEVALNDPRPMIRGTAYWAIGQIQGEDARHFINENFEKEIEEVQVEMKKGLEMRRD

SEQ ID NO: 81234 - protein, 375 aa, Staphylococcus carnosus
  misc_feature (1)..(375): tr|B9DMX7|B9DMX7_STACT Epoxyqueuosine reductase OS=Stap hylococcus carnosus (strain TM300) OX=396513 GN=queG PE =3 SV=1
MLDYKQLKKDIIEYAYQIGIDSIGFTTADPFDELKQKLVDYHAKGYASGFEESDIDLRVNPKLSMPTVRSIIAIAVGYPNKLKGAPRSVRGDRRGMFARASWGQDYHTIMRKRLDKLAEYIKTRVPDVEMMSMVDTGVLSDRAVAERAGLGYTGRNGFVINPDLGTWTYLGEMLVSIPFEPDDPLLDSCGDCTICVDRCPTGALVGDGQLNSQKCISFLTQTKGYLPDEYRSKIGNRLYGCDTCQQVCPRNRGINTEHDDIVLEPEILKPRLIPLLQMSNKEFKNTYGHLAGAWRGKKPIQRNAIIALAHFKEETAIPELKEVAINDPRPMIRGTAYWAIGQIAGETERDFIEQHLADELDEVQEEMVKGLEKRN

SEQ ID NO: 81235 - protein, 375 aa, Staphylococcus carnosus
  misc_feature (1)..(375): tr|A0A380F4H5|A0A380F4H5_STACA Epoxyqueuosine reductase OS=Staphylococcus carnosus subsp. utilis OX=147449 GN= queG PE=3 SV=1
MLDYKQLKKDIIEYAYQIGIDSIGFTTADPFDELKQKLVDYHAKGYASGFEESDIDLRVNPKLSMSTVRSIIAIAVGYPNKLKGAPRSVRGDRRGMFARASWGQDYHTIMRKRLDKLAEYIKTRVPDVEMMSMVDTGVLSDRAVAERAGLGYTGRNGFVINPDLGTWTYLGEMLVSIPFEPDDPLLDSCGDCTICVDRCPTGALVGDGQLNSQKCISFLTQTKGYLPDEYRSKIGNRLYGCDTCQQVCPRNRGINTEHDDIVLEPEILKPRLIPLLQMSNKEFKNTYGHLAGAWRGKKPIQRNAIIALAHFKEETAIPELKEVAINDPRPMIRGTAYWAIGQIAGETERDFIEQHLADELDEVQEEMVKGLEKRN

SEQ ID NO: 81236 - protein, 377 aa, Staphylococcus chromogenes
  misc_feature (1)..(377): tr|A0A4U0D931|A0A4U0D931_STACR tRNA epoxyqueuosine(34) reductase QueG OS=Staphylococcus chromogenes OX=46126 G N=queG PE=4 SV=1
MDIKTLKQEIIDYAQQIGIDDIGFTTADPFDELKNKLIDYHENGYASGFEESDIQLRTEPKLSMASAQSIIAIAVGYPNKLKNAPKSVRGDRRGMFARASWGQDYHTIMRRRLDDLATFISSKVPEAEMMSMVDTGVLSDRAVAERAGLGFTGRNGFVINPKLGTWSYLGEMLINIPFPPDEQIMDSCGTCTICVNRCPTGALVGDGQLNSQKCISFLTQTKGYLKDEYRYKIGNRLYGCDTCQQVCPKNRGINTEQEDIILEPEILKPRLIPLLQMTNKEFKNTYGHLAGAWRGKKPIQRNAIIALAHFNEVSAIPELKQVAENDPRPMIRGTAYWAIGQILGVDAKEYIMSHYDDELEEVQNEMLKGLEMRRQTK

SEQ ID NO: 81237 - protein, 377 aa, Staphylococcus chromogenes
  misc_feature (1)..(377): tr|A0A2T4LZ25|A0A2T4LZ25_STACR tRNA epoxyqueuosine(34) reductase QueG OS=Staphylococcus chromogenes OX=46126 G N=queG PE=4 SV=1
MDIKTLKQEIIDYAQQIGIDDIGFTTADPFDELKNKLIDYHENGYASGFEESDIQLRTEPKLSMASAQSIIAIAVGYPNKLKNAPKSVRGDRRGMFARASWGQDYHTIMRRRLDDLATFISSKVPEAEMMSMVDTGVLSDRAVAERAGLGFTGRNGFVINPKLGTWSYLGEILINIPFPPDEQIMDSCGTCTICVDRCPTGALVGDGQLNSQKCISFLTQTKGYLKDEYRYKIGNRLYGCDTCQQVCPKNRGINTEQEDIILEPEILKPRLIPLLQMTNKEFKNTYGHLAGAWRGKKPIQRNAIIALAHFNEVSAIPELKQVAENDPRPMIRGTAYWAIGQILGVDAKEYIMSHYDDELEEVQNEMLKGLEMRRQTK

SEQ ID NO: 81238 - protein, 375 aa, Staphylococcus cohnii
  misc_feature (1)..(375): tr|A0A3A0MHU2|A0A3A0MHU2_9STAP tRNA epoxyqueuosine(34) reductase QueG OS=Staphylococcus cohnii OX=29382 GN=que G PE=4 SV=1
MNINQLKQDVIDYAHSIGIDSIGFTTADPFDELKQKLVDYHEKGYASGFEEPDIGLRTEPKLTLPTARSIIAIAVGYPNKLKGAPRSVRGDRRGMFARASWGQDYHSIMRKRLDKLAEYLETRVPDVEIKSMVDTGVLSDRAVAERAGLGYVGRNGFVINPDLGTWTYLGEMLVSVPFPPDDPIIDSCGDCTICVDRCPTGALVGDGQLNSQKCISFLTQTKGYLQDEYRYKIGNRLYGCDTCQQVCPRNRGINTQHDDIVLEPEILKPRLVPLLQMSNKEFKNTYGHLAGAWRGKKPIQRNAILALAHFKEETAIPELQEVALNDPRPMIRATAFWAIGQIQGEQARSFIESHYESELEEVQHEMIKGLNMRRE

SEQ ID NO: 81239 - protein, 375 aa, Staphylococcus cohnii; identical to SEQ ID NO: 74978
  misc_feature (1)..(375): tr|A0A0M2NRK2|A0A0M2NRK2_STACC Epoxyqueuosine (OQ) redu ctase QueG OS=Staphylococcus cohnii subsp. cohnii OX=74 704 GN=UF66_2046 PE=4 SV=1

SEQ ID NO: 81240 - protein, 375 aa, Staphylococcus condimenti
  misc_feature (1)..(375): tr|A0A448JH32|A0A448JH32_9STAP Epoxyqueuosine reductase OS=Staphylococcus condimenti OX=70255 GN=queG PE=3 SV= 1
MLDYKQLKKDIIEYAYQIGIDSIGFTTADPFDELKQKLVDYHAKGYASGFEESDIELRVNPKLSMPTARSIIAIAVGYPNKLKGAPRSVRGDRRGMFARASWGQDYHTIMRKRLDKLAEYIKTRVPDVEMLSMVDTGVLSDRAVAERAGLGYTGRNGFVINPDLGTWTYLGEMLVSIPFEPDDPLLDSCGDCTICVDRCPTGALVGDGQLNSQKCISFLTQTKGYLPDDYRSKIGNRLYGCDTCQQVCPRNRGINTEQDDIVLEPEILKPRLIPLLQMSNKEFKNTYGHLAGAWRGKKPIQRNAIIALAHFKEETAIPELKEVAINDPRPMIRGTAYWAIGQIAGESERDFIEQHLADELDEVQKEMVKGLEKRN

SEQ ID NO: 81241 - protein, 374 aa, Staphylococcus condimenti
  misc_feature (1)..(374): tr|A0A4Q7CQ56|A0A4Q7CQ56_9STAP Epoxyqueuosine reductase OS=Staphylococcus condimenti OX=70255 GN=queG PE=3 SV= 1
MDYKQLKKDIIEYAYQIGIDSIGFTTADPFDELKQKLVDYHAKGYASGFEESDIELRVNPKLSMPTARSIIAIAVGYPNKLKGAPRSVRRDRRGMFARASWGQDYHTIMRKRLDKLAEYIKTRVPDVEMLSMVDTGVLSDRAVAERAGLGYTGRNGFVINPDLGTWTYLGEMLVSIPFEPDDPLLDSCGDCTICVDRCPTGALVGDGQLNSQKCISFLTQTKGYLPDDYRSKIGNRLYGCDTCQQVCPRNRGINTEQDDIVLEPEILKPRLIPLLQMSNKEFKNTYGHLAGAWRGKKPIQRNAIIALAHFKEETAIPELKEVAINDPRPMIRGTAYWAIGQIAGESERDFIEQHLADELDEVQKEMVKGLEKRN

SEQ ID NO: 81242 - protein, 376 aa, Staphylococcus delphini
  misc_feature (1)..(376): tr|A0A447YX50|A0A447YX50_9STAP Iron-sulfur cluster-bind ing protein OS=Staphylococcus delphini OX=53344 GN=queG PE=4 SV=1
MDVRALKEEIIAYAHTIGINRIGFTTADPFDELKQKLVDYHAKGYASGFEPSDIALRTEPKLSLPTARSIIAIAVGYPNKLKGAPKSVRGDRRGMFARASWGQDYHSIMRRRLDDLAAFIQSKVPDVELMSMVDTGVLSDRAVAERAGLGFVGRNGFVINPDLGTWSYLGEMLVSIPFPPDDPLLDSCGDCTICVDRCPTGALVGNGQLNSQKCISFLTQTKSYLPDEYRYKIGNRLYGCDTCQQVCPKNRGINTEQDDIHLEPEILKPRLVPLLKMNNKTFKNTFGHLAGAWRGKKPIQRNAILALAHFKEETAIPDLKDVAETDPRPMIRATAFWAIGQILGDAAKDYVMSHYDNELEEVQVEMIKGLEMRRDE

SEQ ID NO: 81243 - protein, 376 aa, Staphylococcus delphini
  misc_feature (1)..(376): tr|A0A2A4GVR0|A0A2A4GVR0_9STAP Epoxyqueuosine reductase OS=Staphylococcus delphini OX=53344 GN=queG PE=3 SV=1
MDVRALKEEIIAYAHTIGINRIGFTTADPFDELKQKLVDYHAKGYASGFEPSDIALRTEPKLSLPTARSIIAIAVGYPNKLKGAPKSVRGDRRGMFARASWGQDYHSIMRRRLDDLAAFIQSKVPDVELMSMVDTGVLSDRAVAERAGLGFVGRNGFVINPDLGTWSYLGEMLVSIPFPPDDPLLDSCGDCTICVDRCPTGALVGNGQLNSQKCISFLTQTKGYLPDEYRYKIGNRLYGCDTCQQVCPKNRGINTEQDDIHLEPEILKPRLVPLLKMNNKTFKNTFGHLAGAWRGKKPIQRNAILALAHFKEETAIPDLKDVAETDPRPMIRATAFWAIGQILGDAAKDYVMSHYDNELEEVQVEMIKGLEMRRDE

SEQ ID NO: 81244 - protein, 375 aa, Staphylococcus devriesei
  misc_feature (1)..(375): tr|A0A2T4KG76|A0A2T4KG76_9STAP tRNA epoxyqueuosine(34) reductase QueG OS=Staphylococcus devriesei OX=586733 GN =queG PE=4 SV=1
MNYKELKREIIDFAHSIGIDSIGFTTADPFDELKQKLEDYHSKGYASGFEESDIALRTEPKLSLPTARSIIAIAVGYPNKLKGAPKSVRGDRRGMFARASWGQDYHTIMRKRFDKLAEYIQSKVPDVEIQSMVDTGVLSDRAVAERAGLGFAGRNGFIINPDLGTWTYLGEMLVSIPFEPDDPILDSCGDCTICVDRCPTGALVGNGQLNAQKCISFLTQTKGYLQDEYRYKIGNRLYGCDTCQQVCPKNRGINTVHEDIVLEPEILKPRLVPLLQMSNKEFKNTYGHLAGAWRGKKPIQRNAIIALAHFNEETAIPELKEVALNDPRPMIRGTAYWAIGQILGEEARSFIEEYYDSELEEVQQEMIKGLEMRKP

SEQ ID NO: 81245 - protein, 375 aa, Staphylococcus devriesei
  misc_feature (1)..(375): tr|A0A2T4K908|A0A2T4K908_9STAP Epoxyqueuosine reductase OS=Staphylococcus devriesei OX=586733 GN=queG PE=3 SV= 1
MDYKELKSEIIDFAHSIGIDSIGFTTADPFDELKQKLEDYHSKGYASGFEESDIALRTEPKLSLPTARSIIAIAVGYPNKLKGAPKSVRGDRRGMFARASWGQDYHTIMRKRLDKLAEFIQTKVPDVEIQSMVDTGVLSDRAVAERAGLGFAGRNGFIINPDLGTWTYLGEMLVSIPFEPDDPILDSCGDCTICVDRCPTGALVGNGQLNAQKCISFLTQTKGYLQDEYRYKIGNRLYGCDTCQQVCPKNRGINTVHDDIVLEPEILKPRLVPLLQMSNKEFKNTYGHLAGAWRGKKPIQRNAIIALAHFNEETAIPELKEVALNDPRPMIRGTAYWAIGQILGEEARSFIEEHYDNELEEVQQEMTKGLEMRKP

SEQ ID NO: 81246 - protein, 375 aa, Staphylococcus edaphicus
  misc_feature (1)..(375): tr|A0A2C6WRT0|A0A2C6WRT0_9STAP tRNA epoxyqueuosine(34) reductase QueG OS=Staphylococcus edaphicus OX=1955013 G N=queG PE=4 SV=1
MDLNQLKQDVIDYAHTIGIDSIGFTTADPFDELKQKLADYHAKGYASGFEESDIELRTEPKLSLPTARSIIAIAVGYPNKLKGAPKSVRGDRRGMFARASWGQDYHSIMRKRLDKLGAYLETRVEDVEIQSMVDTGVLSDRAVAERAGLGYVGRNGFVINPELGTWTYLGEMLVSIPFPPDDPLIDSCGDCTICVDRCPTGALVGDGQLNSQKCISFLTQTKGYLADEYRYKIGNRLYGCDTCQQVCPRNKGINTQHDDIVLEPEILKPRLVPLLQMSNKEFKNTYGHLAGAWRGKKPIQRNAIVALAHFKDETAIPELKEVALNDPRPMIRGTAYWAIGQIQGETARPFILQQYDNELAEVQTEMMKGLEMRSE

SEQ ID NO: 81247 - protein, 380 aa, Staphylococcus epidermidis
  misc_feature (1)..(380): tr|A0A4Y7VR22|A0A4Y7VR22_STAEP Epoxyqueuosine reductase OS=Staphylococcus epidermidis OX=1282 GN=queG PE=3 SV= 1
MAKLMNNKLKKEIIDFAHSIGIDSIGFTTADPFDELKQKLEEYHAKGYASGFEESNISLRTEPKLSLPSARSIIAIAVGYPNKLKGAPKSVKGDRRGMFARASWGQDYHSIMRKRLDKLADFIKEKVPDVEIQSMVDTGVLSDRAVAERAGLGFTGRNGFVISPELGTWSYLGEMLVSIPFEPDDPLLDSCGDCTICVDRCPTGALVGNGQLNSQKCISFLTQTKGYLQDEYRYKIGNRLYGCDTCQQVCPKNRGINTQHDDIVLEPEILKPRLVPLLQMSNKKFKSTYGHLAGAWRGKKPIQRNAIIALAHFKEESAIPELKEVALNDPRPMIRGTAYWAIGQILEDDAIPFIDAHYENEIEEVQIEMKKGLQMRREQK

SEQ ID NO: 81248 - protein, 380 aa, Staphylococcus epidermidis; identical to SEQ ID NO: 81247
  misc_feature (1)..(380): tr|A0A0E1VKB0|A0A0E1VKB0_STAEP Epoxyqueuosine reductase OS=Staphylococcus epidermidis W23144 OX=525376 GN=queG PE=3 SV=1

SEQ ID NO: 81249 - protein, 376 aa, Staphylococcus equorum
  misc_feature (1)..(376): tr|A0A1E5TNY5|A0A1E5TNY5_9STAP Epoxyqueuosine reductase OS=Staphylococcus equorum OX=246432 GN=queG PE=3 SV=1
MDLNQLKQDVIDYAHSIGIDSIGFTTADPFDEMKQKLVDYHAKGYASGFEESDIELRTEPKLNLPTARSIIAIGVGYPNKLKGAPKSVRGDRRGMFARASWGQDYHSIMRKRLDKLGEYLESRVEDVEIKSMVDTGALSDRAVAERAGLGFVGRNGFVINPDLGTWTYLGEMLVSIPFAPDDPLIDSCGDCTICVDRCPTGALVGDGQLNSQKCISFLTQTKGYLEDEYRYKIGNRLYGCDTCQQVCPKNKGINTQHDDIELEPEILKPRLVPLLKMSNKEFKNTYGHLAGAWRGKKPIQRNAIIALAHFKEETAIPELQDVALDDPRPMIRATAYWAIGQIQGEAARPFIEQHYENELEEVQIEMLKGLETRSEK

SEQ ID NO: 81250 - protein, 376 aa, Staphylococcus equorum
  misc_feature (1)..(376): tr|A0A1B1GAI3|A0A1B1GAI3_9STAP Epoxyqueuosine reductase OS=Staphylococcus equorum OX=246432 GN=AVJ22_08095 PE= 4 SV=1
MDLNQLKQDVIDYAHSIGIDSIGFTTADPFDEMKQKLVDYHAKGYASGFEESDIELRTEPKLNLPTARSIIAIGVGYPNKLKGAPKSVRGDRRGMFARASWGQDYHTIMRKRLDKLGEYLQSRVEDVEIKSMVDTGALSDRAVAERAGLGFVGRNGFVINPDLGTWTYLGEMLVSIPFAPDDPLIDSCGDCTICVDRCPTGALVGDGQLNSQKCISFLTQTKGYLEDEYRYKIGNRLYGCDTCQQVCPKNKGINTQHDDIVLEPEILKPRLVPLLKMSNKEFKNTYGHLAGAWRGKKPIQRNAIIALAHFKEETAIPELQDVALDDPRPMIRATAYWAIGQIQGEAARPFVEQHYENELEEVQTEMLKGLETRSEK

SEQ ID NO: 81251 - protein, 375 aa, Staphylococcus felis
  misc_feature (1)..(375): tr|A0A3E0IS47|A0A3E0IS47_9STAP tRNA epoxyqueuosine(34) reductase QueG OS=Staphylococcus felis OX=46127 GN=queG PE=4 SV=1
MDVKVLKKEVIEYAYTIGIDSIGFTTADPFDELKQKLKAYHSKGYASGFEESDINLRTEPKLSLPTARSIIAIAVGYPNKLKNAPKSTKGDRRGMFARASWGQDYHTIMRKRLDLLGQFIQSKVPDVDIMSMVDTGVLSDRAVAERAGLGFTGRNGFIISPELGTWTYLGEMLVSIPFPPDDPLMDSCGDCTICVDRCPTGALVGNGQLNSQKCISFLTQTKGYLQDEYRYKIGNRLYGCDTCQQVCPKNKGINTEQDDIILEPDILKPRLIPLLQMNNKTFKNTFGHLAGAWRGKKPIQRNAIIALAHFKEMTAIPTLKEVAEHDPRPMIRGTAFWAIGQIDGENQQDYLLRHFENEIEEVRHEIIKGLEMERI

SEQ ID NO: 81252 - protein, 375 aa, Staphylococcus felis
  misc_feature (1)..(375): tr|A0A2K3ZEN1|A0A2K3ZEN1_9STAP tRNA epoxyqueuosine(34) reductase QueG OS=Staphylococcus felis OX=46127 GN=queG PE=4 SV=1
MDVKVLKKEVIEYAYTIGIDSIGFTTADPFDELKQKLKAYHSKGYASGFEESDINLRTEPKLSLPTARSIIAIAVGYPNKLKNAPKSTKGDRRGMFARASWGQDYHTIMRKRLDLLGQFIQSKVPDVEIMSMVDTGVLSDRAVAERAGLGFTGRNGFIISPELGTWTYLGEMLVSIPFPPDDPLMDSCGDCTICVDRCPTGALVGNGQLNSQKCISFLTQTKGYLQDEYRYKIGNRLYGCDTCQQVCPKNKGINTEQDDIILEPDILKPRLIPLLQMNNKTFKNTFGHLAGAWRGKKPIQRNAIIALAHFKEMTAIPTLKEVAEHDPRPMIRGTAFWAIGQIDGENQQDYLLRHFENEIEEVRHEIIKGLEMERI

SEQ ID NO: 81253 - protein, 375 aa, Staphylococcus fleurettii
  misc_feature (1)..(375): tr|A0A3A0I1Z6|A0A3A0I1Z6_9STAP tRNA epoxyqueuosine(34) reductase QueG OS=Staphylococcus fleurettii OX=150056 G N=queG PE=4 SV=1
MNLDLLKQEVIDYAHSIGIDSIGFTTADPFDELKQKLEDYHSKGYASGFEESDIELRTVPKLTLPSARSIIAIAVGYPNKLKDAPKSVRGDRRGLFARASWGQDYHTIMRNRLDKLSLFLQEKVPDVEVKSMVDTGVLSDRAVAERAGLGFAGKNGFIINEDLGTWSYLGEMLVSIPFKPDDPVIDSCGDCNICVDRCPTGALVGDGQLNSQKCISFLTQTKGYLKDEYRYKIGNRLYGCDTCQQVCPRNRGINTEQDDIVLEPEVLKPRLVPLLKMSNKEFKNTYGHLAGAWRGKKPIQRNAIVALAHFNEESAIPDLKDVALTDPRPMVRGTAFWAIGQIQGEEARSFIMSHYEREIEEVQEEMIKGLEIRRK

SEQ ID NO: 81254 - protein, 375 aa, Staphylococcus gallinarum
  misc_feature (1)..(375): tr|A0A3A0VN16|A0A3A0VN16_STAGA tRNA epoxyqueuosine(34) reductase QueG OS=Staphylococcus gallinarum OX=1293 GN= queG PE=4 SV=1
MDLKQLKQDVINYAHTIGIDSIGFTTADPFDELKQKLVDYHTKGYASGFEESDINLRTEPKLTLPTARSIIAIAVGYPNKLKGAPKSVRGDRRGMFARASWGQDYHSIMRKRLDQLAEYLKSRVEGVEIKSMVDTGVLSDRAVAERAGLGYVGRNGFVINPDLGTWTYLGEMLVSIPFEPDDPLLDSCGDCTICVDRCPTGALVGDGQLNSQKCISFLTQTKGYLQDEYRYKIGNRLYGCDTCQQVCPRNRGINTQQDDIVLEPEILKPRLVPLLKMSNKEFKNTYGHLAGAWRGKKPIQRNAIIALAHFKEESAIPELQDVALEDPRPMIRATAYWAIGQIQGEGARPFIEANYANEIEEVQQEMVKGLEMRSE

SEQ ID NO: 81255 - protein, 281 aa, Staphylococcus gallinarum
  misc_feature (1)..(281): tr|A0A512SCE3|A0A512SCE3_STAGA Uncharacterized protein OS=Staphylococcus gallinarum OX=1293 GN=SGA02_14320 PE= 4 SV=1
MFARASWGQDYHSIMRNRLDKLSEYLQSRVKDVEIKSMVDTGVLSDRAVAERAGLGYVGRNGFVINPDLGTWTYLGEMLVSIPFEPDDPLLDSCGECTLCVDRCPTGALVGDGQLNSQKCISFLTQTKGYLQDEYRYKIGNRLYGCDTCQQVCPRNRGINTQHDDIVLEPEILKPRLVPLLKMSNKEFNNTYGHLAGAWRGKKPIQRNAIIALAHFKEESAIPELQDVALEDPRPMIRATAYWAIGQIQGELARPFIEAHYDKEIEEVQQEMIKGLEMRSE

SEQ ID NO: 81256 - protein, 375 aa, Staphylococcus haemolyticus
  misc_feature (1)..(375): tr|A0A2A1K8G1|A0A2A1K8G1_STAHA Epoxyqueuosine reductase OS=Staphylococcus haemolyticus OX=1283 GN=queG PE=3 SV =1
MDYNWLKQEIIDYAYSIGIDSIGFTTADPFDELKKKLEDYHANGYASGFEESDISLRTEPKLSLPTARSIIAIAVGYPNKLKGAPKSVRGDRRGMFARASWGQDYHSIMRKRLDKLADFIQSKVPDVELKSMVDTGVLSDRAVAERAGLGFAGRNGFIINPDLGTWSYLGELLVSIPFEPDDPLLDSCGDCTICVDRCPTGALVGNGQLNSQKCISFLTQTKGYLQDEYRYKIGNRLYGCDTCQQVCPRNRGINTTHDDIILEPEILKPRLVPLLQMSNKEFKQTYGHLAGAWRGKKPIQRNAIIALAHFNEETAIPELKEVALNDPRPMIRGTAYWAIGQIQGEDAREFIVANYENEIEEVQNEMIKGLEMRKL

SEQ ID NO: 81257 - protein, 375 aa, Staphylococcus haemolyticus; identical to SEQ ID NO: 81256
  misc_feature (1)..(375): tr|Q4L7G0|Q4L7G0_STAHJ Epoxyqueuosine reductase OS=Stap hylococcus haemolyticus (strain JCSC1435) OX=279808 GN= queG PE=3 SV=1

SEQ ID NO: 81258 - protein, 373 aa, Staphylococcus hominis
  misc_feature (1)..(373): tr|A0A3S7H086|A0A3S7H086_STAHO Epoxyqueuosine reductase OS=Staphylococcus hominis OX=1290 GN=queG PE=3 SV=1
MNHQLKQEIIDYAYSIGIDSIGFTTADPFDELKQKLVDYHEKGYASGFEESDIALRTEPKLSLPTARSIIAIAVGYPNKLKGAPKSVKGDRRGMFARASWGQDYHSIMKKRLDKLSEFIQSKVPDVEIKSMVDTGVLSDRAVAERAGLGFVGRNGFVINPKLGTWTYLGEMLVSIPFEPDDPILDSCGDCTICVDRCPTGALVGNGQLNSQKCISFLTQTKGYLKDEYRYKIGNRLYGCDTCQQVCPKNRGINTTHEDIILEPEILKPRLVPLLQMSNKEFKNTYGHLAGAWRGKKPIQRNAIIALAHFGEEAAIPELKEVALNDPRPMIRGTAYWAIGQILGDDARTFIYEHFDNEIEEVQVEMRKGLEMRK

SEQ ID NO: 81259 - protein, 373 aa, Staphylococcus hominis
  misc_feature (1)..(373): tr|A0A533IW33|A0A533IW33_STAHO Epoxyqueuosine reductase OS=Staphylococcus hominis OX=1290 GN=queG PE=3 SV=1
MNHQLKQEIIDYAYSIGIDSIGFTTADPFDELKQKLVDYHEKGYASGFEESDIALRTEPKLSLPTARSIIAIAVGYPNKLKGAPKSVKGDRRGMFARASWGQDYHSIMKKRLDKLSEFIQSKVPDVEIKSMVDTGVLSDRAVAERAGLGFVGRNGFVINPKLGTWTYLGEMLVSIPFEPDDPILDSCGDCTICVDRCPTGALVGNGQLNSQKCISFLTQTKGYLKDEYRYKIGNRLYGCDTCQQVCPKNRGINTTHEDIILEPEILKPRLVPLLQMSNKEFKNTYGHLAGAWRGKKPIQRNAIIALAHFGEEAAIPELKEVALNDPRPMIRGTAYWAIGQILGNDARTFIYEHYDNEIEEVQVEMRKGLEMRK

SEQ ID NO: 81260 - protein, 375 aa, Staphylococcus hyicus
  misc_feature (1)..(375): tr|A0A2T4RHQ2|A0A2T4RHQ2_STAHY tRNA epoxyqueuosine(34) reductase QueG OS=Staphylococcus hyicus OX=1284 GN=queG PE=4 SV=1
MDYVKLKQEIIDYAHHIGIDDIGFTTADPFDELKNKLIEYHEKGYASGFEESDISLRVDPKLSMSSAQSIIAIAVGYPNKLKGAPKSVRGERRGMFARASWGQDYHSIMRRRLNDLALFIQSKVPEAEMMSMVDTGVLSDRAVAERAGLGFTGRNGFVINPELGTWTYLGEMLINLPFPPDEQILDSCGTCTICVDRCPTGALVGDGQLNSQKCISFLTQTKGYLKDEYRYKIGNRLYGCDTCQQVCPKNRGINTEQEDIILEPEILKPKLVPLLQMSNKEFKQTYGHLAGAWRGKKPIQRNAIIALAHFNETSAIPELKEVAKNDPRPMIRGTAYWAIGQILGDAAQDFIMSQYDDELEEVQLEMKKGLEMRRL

SEQ ID NO: 81261 - protein, 375 aa, Staphylococcus hyicus
  misc_feature (1)..(375): tr|A0A3S4PSH3|A0A3S4PSH3_STAHY Epoxyqueuosine reductase OS=Staphylococcus hyicus OX=1284 GN=queG PE=3 SV=1
MVDNKQLKKDIIEYAHQIGIDSIGFTTADPFDELKQKLVDYHAKGYASGFEESDIELRVNPKLSMPTARSIIAIAVGYPNKLKGAPKSVRGDRRGMFARASWGQDYHTIMRKRLDKLGEYIKSRVPDVEMLSMVDTGVLSDRAVAERAGLGFTGRNGFVINPDLGTWTYLGEMLVSIPFEPDDPLLDSCGDCTICVDRCPTGALVGNGQLNSQKCISFLTQTKGYLPDEYRYKIGNRLYGCDTCQQVCPKNRGINTEHDDIVLEPEILKPRLIPLLQMSNKEFKNTYGHLAGAWRGKKPIQRNAIIALAHFNETAALPELKEVALNDPRPMIRATAYWAIGQIAGEDERDFIEAHLADELDEVQEEMLKGLEKRN

SEQ ID NO: 81262 - protein, 376 aa, Staphylococcus intermedius
  misc_feature (1)..(376): tr|A0A380G7H4|A0A380G7H4_STAIN Iron-sulfur cluster-bind ing protein OS=Staphylococcus intermedius NCTC 11048 OX =1141106 GN=queG PE=4 SV=1
MDVRALKQEIIDYAHTIGINSIGFTTTDPFDELKQKLVDYHAKGYASGFEPSDIALRTEPKLSLPTARSIIAIAVGYPNKLKGAPKSVRGDRRGMFARASWGQDYHSIMRRRLDDLAAFIQSKVPDVELMSMVDTGVLSDRAVAERAGLGFVGRNGFVINPDLGTWSYLGEMLVSIPFPPDDPLLDSCGDCTICVDRCPTGALVGNGQLNSQKCISFLTQTKGYMPDQYRYKIGNRLYGCDTCQQVCPKSRGINTEQDDIHLEPEILKPRLVPLLKMNNKTFKNTFGHLAGVWRGKKPIQRNAILALAHFKEETAIPDLKDVAETDPRPMIRATAFWAIGQILGNKAKDYIMSHYDNELEEVQVEMIKGLEMRRDE

SEQ ID NO: 81263 - protein, 374 aa, Staphylococcus kloosii
  misc_feature (1)..(374): tr|A0A151A414|A0A151A414_9STAP Epoxyqueuosine reductase OS=Staphylococcus kloosii OX=29384 GN=A0131_04925 PE=4 SV=1
MDIKQLKQDVITYAHSIGIDSIGFTTADPFDELKQKLIDYHEKGYASGFEESDISLRTEPKLSLPTARSIIAIAVGYPNKLKGAPKSVKGDRRGMFARASWGQDYHTIMRNRLDKLAEYLKTKVPDVEVQSMVDTGVLSDRAVAERAGLGFAGRNGFVINPDLGTWTYLGEMLVSIPFEPDDPLMDSCGDCTICVDRCPTGALVGDGQLNSQKCISFLTQTKGYMKDEYRYKIGNRLYGCDTCQQVCPKNKGINTQHDDIVLEPEILKPRLVPLLKMSNKEFKNTYGHLAGAWRGKKPIQRNAILALAHFKETTAIPELKDVALNDPRPMIRGTAYWAIGQILGDEATEFINKHYASEIEEVQQEMIKGLEQES

SEQ ID NO: 81264 - protein, 371 aa, Staphylococcus kloosii
  misc_feature (1)..(371): tr|A0A512QGK4|A0A512QGK4_9STAP Epoxyqueuosine reductase OS=Staphylococcus kloosii OX=29384 GN=queG PE=4 SV=1
MDIKQLKQDVITYAHSIGIDSIGFTTADPFDELKQKLIDYHEKGYASGFEESDISLRTEPKLSLPTARSIIAIAVGYPNKLKGAPKSVKGDRRGMFARASWGQDYHTIMRNRLDKLAEYLKTKVPDVEVQSMVDTGVLSDRAVAERAGLGFAGRNGFVINPDLGTWTYLGEMLVSIPFEPDDPLMDSCGDCTICVDRCPTGALVGDGQLNSQKCISFLTQTKGYMKDEYRYKIGNRLYGCDTCQQVCPKNKGINTQHDDIVLEPEILKPRLVPLLKMSNKEFKNTYGHLAGAWRGKKPIQRNAILALAHFKETTAIPELKDVALNDPRPMIRGTAYWAIGQILGDEATEFINKHYASEIEEVQQEMIKGLE

SEQ ID NO: 81265 - protein, 375 aa, Staphylococcus lentus
  misc_feature (1)..(375): tr|A0A178PAY6|A0A178PAY6_STALE Epoxyqueuosine reductase OS=Staphylococcus lentus OX=42858 GN=queG PE=4 SV=1
MNLDQLKQEVIDYAHSIGIDSIGFTTADPFDELKKKLADYHNKGYASGFEESDIALRTEPKLSLPSARSIIAIAVGYPNKLKGAPKSVRGDRRGMFARASWGQDYHTIMRNRLDKLGEFLKEKVPDVEIQSMVDTGVLSDRAVAERAGLGFAGKNGFIINEDLGTWTYLGEMLVSIPFKPDDPVIDSCGDCNICVDRCPTGALVGNGQLNSQKCISFLTQTKGYLKDEYRYKIGNRLYGCDTCQQVCPRNRGINTQHDDIVLEPEILKPRLVPLLKMSNKEFKNTYGHLAGAWRGKKPIQRNAIVALAHFNEESAIPELKDVALTDPRPMIRATAYWAIGQIQGEEARTFIMSHYEHEIEEVQEEMIKGLEMRRQ

SEQ ID NO: 81266 - protein, 380 aa, Staphylococcus lugdunensis
  misc_feature (1)..(380): tr|A0A133Q761|A0A133Q761_STALU Epoxyqueuosine reductase OS=Staphylococcus lugdunensis OX=28035 GN=queG PE=3 SV =1
MGGLELNTAHLKTEIIQFAHSIGIDQIGFTTADPFDELKQKLEDYHAKGYASGFEESDIALRTEPKLSLPTARSIIAIAVGYPNKLKGAPKSVRGNRRGMFARASWGQDYHTIMRNRLDKLAEFIQSKVPDVEIQSMVDTGVLSDRAVAERAGLGFVGKNGFIINAELGTWSYLGEMLVSIPFEPDDPILDSCGDCTICVDRCPTGALVGNGQLNSQKCISFLTQTKGYLADEYRYKIGNRLYGCDTCQQVCPKNKGINTEHDDIILEPEILKPRLIPLLQMSNKEFKNTYGHLAGAWRGKKPIQRNAIIALAHFKAKEALPELKEVALNDKRPMIRATAYWAIGQIDGYNAQSFIDAHFAEEVEEVQQEMIKGLEMRRN

SEQ ID NO: 81267 - protein, 380 aa, Staphylococcus lugdunensis
  misc_feature (1)..(380): tr|A0A4Q9W9B1|A0A4Q9W9B1_STALU tRNA epoxyqueuosine(34) reductase QueG OS=Staphylococcus lugdunensis OX=28035 G N=queG PE=4 SV=1
MGGLELNTAHLKTEIIQFAHSIGIDQIGFTTADPFDELKQKLEDYHAKGYASGFEESDIALRTEPKLSLPTARSIIAIAVGYPNKLKGAPKSVRGDRRGMFARASWGQDYHTIMRNRLDKLAEFIQSKVPDVEIQSMVDTGVLSDRAVAERAGLGFVGKNGFIINAELGTWSYLGEMLVSIPCEPDDPILDSCGDCTICVDRCPTGALVGNGQLNSQKCISFLTQTKGYLADEYRYKIGNRLYGCDTCQQVCPKNKGINTEHDDIILEPEILKPRLIPLLQMSNKEFKNTYGHLAGAWRGKKPIQRNAIIALAHFKAKEALPELKEVALNDKRPMIRATAYWAIGQIDGYNAQSFIDAHFAEEVEEVQQEMIKGLEMRRN

SEQ ID NO: 81268 - protein, 376 aa, Staphylococcus lutrae
  misc_feature (1)..(376): tr|A0A1W6BJL8|A0A1W6BJL8_9STAP tRNA epoxyqueuosine(34) reductase QueG OS=Staphylococcus lutrae OX=155085 GN=qu eG PE=4 SV=1
MDVLELKQEIIDYAQTIGINSIGFTTADPFDELKQKLVDYHAKGYASGFEHDDIALRTEPKLSLPTARSIIAIAVGYPNKMKGAPKSVRGDRRGIFARASWGQDYHVMMRRRLNDLARFIQSKVPDVECLSMVDTGVLSDRAVAERAGLGFVGRNGFVINPDLGTWTYLGEMLVSIPFPPDDPLLDSCGDCTICVDRCPTSALVGDGQLNSQKCISFLTQTKGYLADEYRYKIGNRLYGCDTCQQVCPKNRGINTEQEDIHLEPDILKPRLVPLLTMNNKTFKNTFGHLAGAWRGKKPIQRNAIIALAHFKEESAIPTLKEVAETDARPMIRATAFWAIGQILGDAAKDYIMSHYENELEEVQIEMIKGLETRREE

SEQ ID NO: 81269 - protein, 375 aa, Staphylococcus massiliensis
  misc_feature (1)..(375): tr|K9AKI8|K9AKI8_9STAP (Fe-S)-binding protein OS=Staphy lococcus massiliensis S46 OX=1229783 GN=C273_09106 PE=4 SV=1
MDTRVLKDEIIAYAHEIGIDEIGFTTADPFDELKQRLKAYHEKGYASGFEATDDIELRTNPKFSLPTARSIIAIAVGYPNKLPNAPRSKRGDRRGMFARASWGMDYHSIMRIRLNKLADFIKARVPDVDIQSMVDTGVLSDRAVAERAGLGYAAKNGFILNQKLGTWTYLGEMLVSIPFEPDDPIMDSCGDCTICIDRCPTGALVGDGSLNSQKCISLLTQTKGYMPDEYRYKIGNRLYGCDTCQQVCPKNRGINTTQEDIVLEPETLKPRLVPLLQMSNREFKETYGHLAGAWRGKKPIQRNAILALAHFKEVDAVPTLKGVAENDARPMIRATAYWAIGQILGDDAKGYIDSQYDNEIEEVQTEMLKGLQKRS

SEQ ID NO: 81270 - protein, 375 aa, Staphylococcus microti
  misc_feature (1)..(375): tr|A0A0D6XRK0|A0A0D6XRK0_9STAP Iron-sulfur cluster-bind ing protein OS=Staphylococcus microti OX=569857 GN=queG PE=4 SV=1
MDVAQLKADIIAYAHTIGIDSIGFTTADPFDELKQKLMDYHAKGYASGFEPTDIAMRTEPKLSMSSARSIIAIAVGYPNRLPDAPKSKRGERRGIFARASWGQDYHSIMRKRLDALGDYIQSRVPDVEMMSMVDTGVLSDRAVAERAGLGYTGRNGFVINPELGTWTYLGEMLVSIPFPPDDPIIDSCGSCTICVDRCPTGALVGNGQLNSQKCVSFLTQTKGYMPDQYRYKIGNRLYGCDTCQQVCPRNRGINTQHDDIVLEPEILKPRLVPLLKMSNKEFKETYGHLAGAWRGKKPIQRNAILALAHFKEKEAIPELKDVAENDPRPMIRATAYWAIGQILEDDAESYIMSRYDSEIEEVQVEMKKGLETRRP

SEQ ID NO: 81271 - protein, 376 aa, Staphylococcus muscae
  misc_feature (1)..(376): tr|A0A240C723|A0A240C723_9STAP Iron-sulfur cluster-bind ing protein OS=Staphylococcus muscae OX=1294 GN=queG PE =4 SV=1
MDVSQLKADIIEYAHSIGIDSIGFTTADPFDELKQKLVEYHANGYASGFEPTDIKMRTEPKLSMSSARSIIAIAVGYPNRLPDAPKSKRGDRRGIFARASWGQDYHSIMRKRLDALSAYIKERVPDAETMSMVDTGVLSDRAVAERAGLGYTGRNGFVIHPELGTWTYLGEMLVSIAFPPDDPIMDSCGDCTICIDRCPTGALVGDGQLNSQKCVSFLTQTKGYMPDQYRYKIGNRLYGCDTCQQVCPRNRGINTQQDDIVLEPEILKPRLIPLLKMSNKAFKETYGHLAGAWRGKKPIQRNAILALAHFKEKEAIPELKDVAENDPRPMIRATAYWAIGQILEDEAEDYIMSRYDSEIEEVQVEMKKGLETRRTV

SEQ ID NO: 81272 - protein, 375 aa, Staphylococcus nepalensis; identical to SEQ ID NO: 75924
  misc_feature (1)..(375): tr|A0A291JJL7|A0A291JJL7_9STAP (Fe-S)-binding protein O S=Staphylococcus nepalensis OX=214473 GN=queG PE=4 SV=1

SEQ ID NO: 81273 - protein, 163 aa, Staphylococcus nepalensis
  misc_feature (1)..(163): tr|A0A2T4S590|A0A2T4S590_9STAP tRNA epoxyqueuosine(34) reductase QueG (Fragment) OS=Staphylococcus nepalensis OX=214473 GN=queG PE=4 SV=1
LGFTGCNGFVIHPDLGTWTYLGEMLVSIPFEPDDPLLDSCGDCTICVDRCPTGALVGNGQLNSQKCISFLTQTKGYLPDEYRYKIGNRLYGCDTCQQVCPKNRGINTEHDDIVLEPEILKPRLIPLLQMSNKEFKNTYGHLAGAWRGKKPIQRNAIIALAHFN

SEQ ID NO: 81274 - protein, 376 aa, Staphylococcus pasteuri
  misc_feature (1)..(376): tr|A0A269XMC5|A0A269XMC5_9STAP tRNA epoxyqueuosine(34) reductase QueG OS=Staphylococcus pasteuri OX=45972 GN=B 8W95_00150 PE=4 SV=1
MDVKQLKKDIIEYAHTIGIDSIGFTTADPFDELKQKLEDYYSKGYASGFEESDIALRTEPKLSLPTARSIIAIAVGYPNKLKGAPKSVRGDRRGMFARASWGQDYHTIMRKRLDLLGTYIQSKVPDVEIKSMVDTGVLSDRAVAERAGLGFAGRNGFIINPDLGTWTYLGEMLVSIPFEPDDPILDSCGDCTICVDRCPTGALVGNGQLNSQKCISFLTQTKGYLADEYRYKIGNRLYGCDTCQQVCPKNKGINTEHDDIILEPEILKPRLVPLLQMSNKEFKNTYGHLAGAWRGKKPIQRNAILALVHFNETGAIPDLKEVALNDPRPMIRGTAYWAIGQIEGENAREFIHTHYENEIEEVQVEMLKGLEMRREK

SEQ ID NO: 81275 - protein, 376 aa, Staphylococcus pasteuri
  misc_feature (1)..(376): tr|A0A0M2NXD9|A0A0M2NXD9_9STAP Epoxyqueuosine (OQ) redu ctase QueG OS=Staphylococcus pasteuri OX=45972 GN=queG PE=4 SV=1
MDVKQLKQDIIDYAHTIGIDSIGFTTADPFDELKQKLEDYHAKGYASGFEESDIALRTEPKLSLPTARSIIAIAVGYPNKLKGAPKSVRGDRRGMFARASWGQDYHTIMRKRLDQLSEYIRSVVPDVEIQSMVDTGVLSDRAVAERAGLGFVGRNGFVINPDLGTWTYLGEMLVSIPFEPDDPLIDSCGDCTICVDRCPTGALVGNGQLNSQKCISFLTQTKGYLDDQYRYKIGNRLYGCDTCQQVCPKNKGINTQHDDIVLEPEILKPRLIPLLQMSNKEFKATYGHLAGAWRGKKPIQRNAILALAHFNEESAIPELKEVALNDPRPMIRGTAFWAIGQIDGENAREFIQTHYHDELEEVQVEMKKGLEMRREK

SEQ ID NO: 81276 - protein, 375 aa, Staphylococcus petrasii
  misc_feature (1)..(375): tr|A0A2K4C9P3|A0A2K4C9P3_9STAP Epoxyqueuosine reductase OS=Staphylococcus petrasii subsp. croceilyticus OX=319 942 GN=queG PE=3 SV=1
MDYKQLKRDIIDYAYTIGIDSIGFTTADPFDELKQKLEDYHSKGYASGFEESDIALRTEPKLSLPTARSIIAIAVGYPNKLKGAPKSVRGDRRGMFARASWGQDYHTIMRKRLDKLAEFITSKVPDVEIKSMVDTGVLSDRAVAERAGLGFAGRNGFIINPDLGTWTYLGEMLVSIPFEPDDPVLDSCGDCTICVDRCPTGALVGNGQLNAQKCISFLTQTKGYLQDEYRYKIGNRLYGCDTCQQVCPKNRGINTTHDDIVLEPEILKPRLVPLLQMSNKEFKNTYGHLAGAWRGKKPIQRNAIIALAHFGEETAIPELKEVAMNDPRPMIRGTAYWAIGQILGEAAREFIQEHYDDELEEVQVEMLKGLEMRKQ

SEQ ID NO: 81277 - protein, 375 aa, Staphylococcus petrasii
  misc_feature (1)..(375): tr|A0A4Z1BNL5|A0A4Z1BNL5_9STAP Epoxyqueuosine reductase OS=Staphylococcus petrasii subsp. pragensis OX=1611836 GN=queG PE=3 SV=1
MDYKQLKKEIIDYAYTIGIDSIGFTTADPFDELKQKLEDYHAKGYASGFEESDIALRTEPKLSLPTARSIIAIAVGYPNKLKGAPKSVRGDRRGMFARASWGQDYHTIMKKRLDKLAEFIISKVPDVEIKSMVDTGVLSDRAVAERAGLGFAGRNGFIINPDLGTWTYLGEMLVSIPFEPDDPVLDSCGDCTICVDRCPTGALVGNGQLNAQKCISFLTQTKGYLQDEYRYKIGNRLYGCDTCQQVCPKNRGINTTHDDIVLEPEILKPRLVPLLQMSNKEFKNTYGHLAGAWRGKKPIQRNAIIALAHFNEETAIPELKEVAMNDPRPMIRGTAYWAIGQILGEAAREFIQEHYDDELEEVQVEMLKGLEMRKQ

SEQ ID NO: 81278 - protein, 375 aa, Staphylococcus pettenkoferi
  misc_feature (1)..(375): tr|A0A2N6QBQ7|A0A2N6QBQ7_9STAP Epoxyqueuosine reductase OS=Staphylococcus pettenkoferi OX=170573 GN=queG PE=3 SV=1
MDLKQLKEDVIAYAHTIGIDSIGFTTADPFDELKQKLVDYHAKGYASGFEEDDIQLRTEPKLSLPTARSIIAIAVGYPNKLKGAPRSKRGERRGMFARASWGQDYHTIMRKRLDKLAEYIESRVPDVEMKSMVDTGVLSDRAVAERAGLGYTGRNGFVINPDLGTWTYLGEMLVSIPFPPDDPLIDSCGDCTMCVDRCPTGVLVGNGQLNAQKCISFLTQTKGYLQDEYRYKIGNRLYGCDTCQQVCPRNRGINTEHDDIVLEPEILKPRLVPLLQISNREFKETYGHLAGAWRGKKPIQRNAIIALAHFKETSAIPELEEVAVNDPRPMIRATAYWAIGQIQGDEARPFIDAHYDAELEEVQEEMIKGLEMGRT

SEQ ID NO: 81279 - protein, 375 aa, Staphylococcus piscifermentans
  misc_feature (1)..(375): tr|A0A239TWE0|A0A239TWE0_9STAP Epoxyqueuosine reductase OS=Staphylococcus piscifermentans OX=70258 GN=queG PE= 3 SV=1
MLDYKQLKKDIIEYAYQIGIDSIGFTTADPFDELKQKLVEYHAKGYASGFEESDIDLRVDPKLSMPTARSIIAIAVGYPNKLKGAPRSTRGDRRGMFARASWGQDYHTIMRKRLDKLSEYIQERVPDVEMMSMVDTGVLSDRAVAERAGLGYTGRNGFVINPDLGTWTYLGEMLVSIPFEPDDPLLDSCGDCTICVDRCPTGALVGDGQLNSQKCISFLTQTKGYLPDEYRSKIGNRLYGCDTCQQVCPRNRGINTEHDDIVLEPEILKPRLIPLLQMSNKEFKNTYGHLAGAWRGKKPIQRNAIIALAHFKEEAAVPELKEVALNDARPMIRGTAYWAIGQIAGEAEREFIEAQLETEIEEVRAEMLKGLEKRN

SEQ ID NO: 81280 - protein, 376 aa, Staphylococcus piscifermentans
  misc_feature (1)..(376): tr|A0A431YW40|A0A431YW40_9STAP tRNA epoxyqueuosine(34) reductase QueG OS=Staphylococcus piscifermentans OX=702 58 GN=queG PE=4 SV=1
MDLNQLKQDVIDYAHSIGIDSIGFTTADPFDEMKQKLVDYHAKGYASGFEESDIELRTEPKLNLPTARSIIAIGVGYPNKLKGAPKSVRGDRRGMFARASWGQDYHTIMRKRLDKLGEYLQSRVEDVEIKSMVDTGALSDRAVAERAGLGFVGRNGFVINPDLGTWTYLGEMLVSIPFAPDDPLIDSCGDCTICVDRCPTGALVGDGQLNSQKCISFLTQTKGYLEDEYRYKIGNRLYGCDTCQQVCPKNKGINTQHDDIVLEPEILKPRLVPLLKMSNKEFKNTYGHLAGAWRGKKPIQRNAIIALAHFKEETAIPELQDVALDDPRPMIRATAYWAIGQIQGEAARPFVEQHYENELEEVQIEMLKGLETRSEK

SEQ ID NO: 81281 - protein, 43 aa, Staphylococcus pseudintermedius
  misc_feature (1)..(43): tr|A0A3D8Z8E1|A0A3D8Z8E1_STAPS tRNA epoxyqueuosine(34) reductase QueG (Fragment) OS=Staphylococcus pseudinterm edius OX=283734 GN=DV946_13790 PE=4 SV=1
MCGILTGFFFIVWSVMSEPLDLNQLAQKIKQWGLELGFQQVGI

SEQ ID NO: 81282 - protein, 376 aa, Staphylococcus pseudintermedius
  misc_feature (1)..(376): tr|A0A2P5PIY7|A0A2P5PIY7_STAPS tRNA epoxyqueuosine(34) reductase QueG OS=Staphylococcus pseudintermedius OX=28 3734 GN=queG PE=4 SV=1
MDVRGLKEEIIAYAHTIGINSIGFTTADPFDELKQKLVDYHAKGYASGFEPSDIALRTEPKLSLPTARSIIAIAVGYPNKLKGAPKSVRGDRRGVFARASWGQDYHSIMRRRLDDLAAFIQRKVPDVELMSMVDTGVLSDRAVAERAGLGFVGRNGFVINPDLGTWSYLGEMLVSIPFPPDDPLLDSCGDCTICVDRCPTGALVGNGQLNSQKCISFLTQTKGYLPDEYRYKIGNRLYGCDTCQQVCPKNRGINTEQDDIHLEPEILKPRLVPLLKMNNKTFKNQFGHLAGAWRGKKPIQRNAILALAHFKEETAIPDLKDVAETDPRPMIRATAFWAIGQILGEAAKDYVMSHYDNELEEVQVEMIKGLEMRRDE

SEQ ID NO: 81283 - protein, 377 aa, Staphylococcus rostri
  misc_feature (1)..(377): tr|A0A2K3YGP9|A0A2K3YGP9_9STAP tRNA epoxyqueuosine(34) reductase QueG OS=Staphylococcus rostri OX=522262 GN=qu eG PE=4 SV=1
MDVAQLKADIIDYAHTIGIDSIGFTTADPFDELKQKLIEYHAKGYASGFEPDDIEMRVDPKLSMSSARSIIAIAVGYPNRLPNAPKSKRGERRGIFARASWGQDYHSIMRKRLDALGAYIKERVPDVEMMSMVDTGVLSDRAVAERAGLGYTGRNGFVINPDLGTWTYLGEMLVSIPFPPDDPIMDSCGSCTICVDRCPTGALVGDGQLNSQKCVSFLTQTKGYMPDQYRYKIGNRLYGCDTCQQVCPRNRGINTQHDDIVLEPEILKPRLVPLLKMSNKEFKATYGHLAGAWRGKKPIQRNAILALAHFKETEAIPELKDVAENDPRPMMRATAYWAIGQILEDEAESYIMSRYDSEIEEVQVEMKKGLETRRTTL

SEQ ID NO: 81284 - protein, 153 aa, Staphylococcus saccharolyticus
  misc_feature (1)..(153): tr|A0A380H4G8|A0A380H4G8_9STAP (Fe-S)-binding protein O S=Staphylococcus saccharolyticus OX=33028 GN=queG_1 PE= 4 SV=1
MNNKQLKKEIKDFAHSIDINSIGFTTADPFDELKQKLENYHANGYASGFEESDIALGTEPKLSLPTARSIIAIAVGYPNKLKGAPKSVRGNRRGMFARASWGQDYHSIMRRRLDQLGEFIRNRVPEVEIQSMVDTGVLSDRAVAERAGLGFCW

SEQ ID NO: 81285 - protein, 376 aa, Staphylococcus saccharolyticus; identical to SEQ ID NO: 81275
  misc_feature (1)..(376): tr|A0A3S0JVR9|A0A3S0JVR9_9STAP tRNA epoxyqueuosine(34) reductase QueG OS=Staphylococcus saccharolyticus OX=330 28 GN=queG PE=4 SV=1

SEQ ID NO: 81286 - protein, 375 aa, Staphylococcus saprophyticus; identical to SEQ ID NO: 74978
  misc_feature (1)..(375): tr|A0A380HDK4|A0A380HDK4_STASA (Fe-S)-binding protein O S=Staphylococcus saprophyticus OX=29385 GN=queG PE=4 SV =1

SEQ ID NO: 81287 - protein, 375 aa, Staphylococcus saprophyticus
  misc_feature (1)..(375): tr|Q49YQ3|Q49YQ3_STAS1 Putative iron-sulphur protein OS =Staphylococcus saprophyticus subsp. saprophyticus (str ain ATCC 15305 / DSM 20229 / NCIMB 8711 / NCTC 7292 / S -41) OX=342451 GN=SSP0939 PE=4 SV=1
MDLNQLKQDVIDYAHTIGIDSIGFTTADPFDELKQKLADYHAKGYASGFEESDIELRTEPKLSLPTARSIIAIAVGYPNKLKGAPKSVRGDRRGMFARASWGQDYHSIMRKRLDKLGAYLEEKVPGVEIQSMVDTGVLSDRAVAERAGLGYVGRNGFVINPELGTWTYLGEMLVSIPFPPDDPLIDSCGDCTICVDRCPTGALVGDGQLNSQKCISFLTQTKGYLADEYRYKIGNRLYGCDTCQQVCPRNKGINTQHDDIVLEPEILKPRLVPLLQMSNKEFKNTYGHLAGAWRGKKPIQRNAIVALAHFKDETAISELQEVALNDPRPMIRGTAYWAIGQIQGEAARPFIEQHYNDEIEEVQVEMIKGLEMRSE

SEQ ID NO: 81288 - protein, 376 aa, Staphylococcus schleiferi
  misc_feature (1)..(376): tr|A0A0M4ULH2|A0A0M4ULH2_9STAP Epoxyqueuosine reductase OS=Staphylococcus schleiferi OX=1295 GN=queG PE=3 SV=1
MDVLQLKEEIIEYAYSIGINRIGFTTADPFDELKQKLVDYHAKGYASGFEESDIALRTEPKLSLPTAKSIIAISVGYPNKLKNAPKSIRGDRRGMFARASWGQDYHTIMRKRLDKLAKFIQAKVPDAEMMSMVDTGVLSDRAVAERAGLGFVGRNGFVIHPDLGTWTYLGEMLVNIPFPPDDPIMESCGDCTICVDRCPTGALVGDGQLNSQKCISFLTQTKGYLPDEYRYKIGNRLYGCDTCQQVCPKNRGINIEQDDIILEPEILKPRLVPLLKMNNKTFKNTFGHLAGAWRGKKPIQRNAIIALAHFKEEDAIPDLKEVAENDPRPLIRATAFWAIGQIQGDLAKSYIMAHYENEDEEVQVEMLKGLEMRRDG

SEQ ID NO: 81289 - protein, 375 aa, Staphylococcus schleiferi
  misc_feature (1)..(375): tr|A0A431YHG7|A0A431YHG7_9STAP tRNA epoxyqueuosine(34) reductase QueG OS=Staphylococcus schleiferi subsp. schl eiferi OX=74707 GN=queG PE=4 SV=1
MNLDQLKQEVIDYAHSIGIDSIGFTTADPFDELKKKLEDYHSKGYASGFEESDIELRTVPKLSLPSARSIIAIAVGYPNKLKGAPKSVRGDRRGMFARASWGQDYHTIMRNRLDKLSLFLKEKVPDVEIKSMVDTGVLSDRSVAERAGLGFAGKNGFIINEELGTWSYLGEMLVSIPFKPDDPVIDSCGDCNICVDRCPTGALVGNGQLNSQKCISFLTQTKGYLKDEYRYKIGNRLYGCDTCQQVCPRNRGINTEHDDIILEPEVLKPRLVPLLKMSNKEFKNTYGHLAGAWRGKKPIQRNAIVALAHFNEESAIPELKDVALTDPRPMIRGTAFWAIGQIQGEEARPFIMSHYEREIEEVQEEMIKGLEIRRK

SEQ ID NO: 81290 - protein, 376 aa, Staphylococcus schweitzeri
  misc_feature (1)..(376): tr|A0A448CXG4|A0A448CXG4_9STAP Epoxyqueuosine reductase OS=Staphylococcus schweitzeri OX=1654388 GN=queG PE=3 SV=1
MDTKQLKQDIIDYAYTIGIDSIGFTTADPFDELKQKLEVYHANGYASGFEESDIALRTEPKLSLSTARSIIAIAVGYPNKLKGAPKSVRGDRRGLFARASWGQDYHTIMRKRLDMLATFIESKVPDVEIKSMVDTGVLSDRAVAERAGLGFVGRNGFVINPKLGTWTYLGEMLVSIPFEPDDPLLDSCGDCTICVDRCPTSALVGNGQLNSQKCISFLTQTKGYMPDQYRYKIGNRLYGCDTCQQVCPKNRGINTEQDDIILEPEILKPRLVPLLRMSNKEFKQTYGHLAGAWRGKKPIQRNAILALAHFNEVDAIPELKKVATTDERPMIRATAYWAIGQILGDDAKEFIHANYEKEDAEVQQEMIKGIETRREK

SEQ ID NO: 81291 - protein, 381 aa, Staphylococcus schweitzeri
  misc_feature (1)..(381): tr|A0A2K4AF67|A0A2K4AF67_9STAP Epoxyqueuosine reductase OS=Staphylococcus schweitzeri OX=1654388 GN=queG PE=3 SV=1
MGGKRLDTKQLKQDIIDYAYTIGIDSIGFTTADPFDELKQKLEVYHANGYASGFEESDIALRTEPKLSLSTARSIIAIAVGYPNKLKGAPKSVRGDRRGLFARASWGQDYHTIMRKRLDMLATFIESKVPDVEIKSMVDTGVLSDRAVAERAGLGFVGRNGFVINPKLGTWTYLGEMLVSIPFEPDDPLLDSCGDCTICVDRCPTSALVGNGQLNSQKCISFLTQTKGYMPDQYRYKIGNRLYGCDTCQQVCPKNRGINTEQDDIILEPEILKPRLVPLLRMSNKEFKQTYGHLAGAWRGKKPIQRNAILALAHFNEVDAIPELKKVATTDERPMIRATAYWAIGQILGDDAKEFIHANYEKEDAEVQQEMIKGIETRREK

SEQ ID NO: 81292 - protein, 375 aa, Staphylococcus sciuri
  misc_feature (1)..(375): tr|A0A2T4RQX9|A0A2T4RQX9_STASC tRNA epoxyqueuosine(34) reductase QueG OS=Staphylococcus sciuri OX=1296 GN=queG PE=4 SV=1
MNLDQLKQEVIDYAHSIGIDSIGFTTADPFDELKKKLEDYHSKGYASGFEESDIELRTVPKLSLPSARSIIAIAVGYPNKLKGAPKSVRGDRRGMFARASWGQDYHTIMRNRLDKLSLFLKEKVPDVEIKSMVDTGVLSDRSVAERAGLGFAGKNGFIINEELGTWSYLGEMLVSIPFKPDDPVIDSCGDCNICVDRCPTGALVGNGQLNSQKCISFLTQTKGYLKDEYRYKIGNRLYGCDTCQQVCPRNRGINTEHDDIILEPEVLKPRLVPLLKMSNKEFKNTYGHLAGAWRGKKPIQRNAIVALAHFNEESAIPDLKDVALTDPRPMIRGTAFWAIGQIQGEEARPFIMSHYEREIEEVQEEMIKGLEIRRK

SEQ ID NO: 81293 - protein, 375 aa, Staphylococcus sciuri
  misc_feature (1)..(375): tr|A0A3S0SPI6|A0A3S0SPI6_STASR tRNA epoxyqueuosine(34) reductase QueG OS=Staphylococcus sciuri subsp. rodentiu m OX=147469 GN=queG PE=4 SV=1
MDYVKLKQEIIDYAHQIGIDDIGFTTADPFDELKNKLIEYHEKGYASGFEESDISLRVDPKLSMSSAQSIIAIAVGYPNKLKGAPKSVRGERRGMFARASWGQDYHSIMRRRLNDLALFIQSKVPEAEMMSMVDTGVLSDRAVAERAGLGFTGRNGFVINPELGTWTYLGEMLINLPFPPDEQILDSCGTCTICVDRCPTGALVGDGQLNSQKCISFLTQTKGYLKDEYRYKIGNRLYGCDTCQQVCPKNRGINTEQEDIILEPEILKPKLVPLLQMSNKEFKQTYGHLAGAWRGKKPIQRNAIIALAHFNETSAIPELKEVAKNDPRPMIRGTAYWAIGQILGDAAKDFIMSQYDNELEEVQLEMKKGLEMRRL

SEQ ID NO: 81294 - protein, 376 aa, Staphylococcus simiae
  misc_feature (1)..(376): tr|G5JFE4|G5JFE4_9STAP Iron-sulfur cluster binding prot ein, putative OS=Staphylococcus simiae CCM 7213 = CCUG 51256 OX=911238 GN=SS7213T_00728 PE=4 SV=1
MDYKQLKQDIIDYAHSIGIDSIGFTTADPFDELKQKLEDYHSKGYASGFEESDIALRTEPKLSLPTARSIIAIAVGYPNKLKGAPRSVRGDRRGLFARASWGQDYHTIMRTRLDKLSEFIKAKVENVEILSMVDTGVLSDRAVAERAGLGFAGRNGFIINKDLGTWTYLGEMLVSIPFEPDDPILDSCGDCTICVDRCPTGALVGNGQLNSQKCISFLTQTKGYMPDQYRYKIGNRLYGCDTCQQVCPKNRGINTQHDDIVLEPEILKPRLIPLLQMSNKEFKANYGHLAGAWRGKKPIQRNAILALAHFNEEAAVPELKEVAMNDARPMIRATAYWAIGQILGEDARPFINEHYNSEDEEVQTEMLKGLETRSNT

SEQ ID NO: 81295 - protein, 383 aa, Staphylococcus simulans
  misc_feature (1)..(383): tr|A0A133QDM7|A0A133QDM7_STASI Epoxyqueuosine reductase OS=Staphylococcus simulans OX=1286 GN=queG PE=3 SV=1
MDHGYGGIMVDNKQLKKDIIEYAHQIGIDSIGFTTADPFDELKQKLVDYHAKGYASGFEESDIELRVNPKLSMPTARSIIAIAVGYPNKLKGAPKSVRGDRRGMFARASWGQDYHTIMRKRLDKLGEYIKSRVPDVEMLSMVDTGVLSDRAVAERAGLGFTGRNGFVINPDLGTWTYLGEMLVSIPFEPDDPLLDSCGDCTICVDRCPTGALVGNGQLNSQKCISFLTQTKGYLPDEYRYKIGNRLYGCDTCQQVCPKNRGINTEHDDIVLEPEILKPRLIPLLQMSNKEFKNTYGHLAGAWRGKKPIQRNAIIALAHFNETAALPELKEVALNDPRPMIRATAYWAIGQIAGEDERDFIEAHLADELDEVQEEMLKGLEKRN

SEQ ID NO: 81296 - protein, 375 aa, Staphylococcus simulans; identical to SEQ ID NO: 81261
  misc_feature (1)..(375): tr|A0A2X3SDA5|A0A2X3SDA5_STASI Epoxyqueuosine reductase OS=Staphylococcus simulans OX=1286 GN=queG PE=3 SV=1

SEQ ID NO: 81297 - protein, 380 aa, Staphylococcus sp.
  misc_feature (1)..(380): tr|A0A5B2WL09|A0A5B2WL09_9STAP Epoxyqueuosine reductase OS=Staphylococcus sp. 29213 OX=2608397 GN=queG PE=3 SV =1
MGGIRLDTKQLKQDIIDYAYTIGIDSIGFTTADPFDELKQKLEAYHANGYASGFEESDIALRTEPKLSLPTARSIIAIAVGYPNKLKGAPKSVRGDRRGLFARASWGQDYHTIMRKRLDMLAAFIESKVPDVEIKSMVDTGVLSDRAVAERAGLGFVGRNGFVINPKLGTWTYLGEMLVSIPFEPDDPLLDSCGDCTICVDRCPTSALVGNGQLNSQKCISFLTQTKGYMPDQYRYKIGNRLYGCDTCQQVCPKNRGINTEQDDIILEPEILKPRLVPLLRMSNKEFKQTYGHLAGAWRGKKPIQRNAILALAHFNEVDAIPELKKVATTDERPMIRATAYWAIGQILGEEARDFINANYDQEDAEVQNEMIKGLDTRRE

SEQ ID NO: 81298 - protein, 377 aa, Staphylococcus sp.
  misc_feature (1)..(377): tr|A0A2J6P7C1|A0A2J6P7C1_9STAP tRNA epoxyqueuosine(34) reductase QueG OS=Staphylococcus sp. UMB0328 OX=2029110 GN=queG PE=4 SV=1
MDVKQLKKDIIDYAHTIGIDSIGFTTADPFDELKQKLEDYHSKGYASGFEESDIALRTEPKLSLPTARSIIAIAVGYPNKLKGAPKSVRGDRRGMFARASWGQDYHTIMRKRLDQLGTYIQSKVPDVEIKSMVDTGVLSDRAVAERAGLGFAGRNGFIINPDLGTWTYLGEMLVSIPFEPDDPILDSCGDCTICVDRCPTGALVGNGQLNSQKCISFLTQTKGYLDDEYRYKIGNRLYGCDTCQQVCPKNKGINTEHDDIILEPEILKPRLVPLLQMSNKEFKNTYGHLAGAWRGKKPIQRNAILALAHFNETSAIPDLKDVALNDPRPMIRGTAYWAIGQIEGENARDFIHTHYENEIEEVQVEMLKGLEMRRESK

SEQ ID NO: 81299 - protein, 288 aa, Staphylococcus stepanovicii
  misc_feature (1)..(288): tr|A0A239YUP5|A0A239YUP5_9STAP (Fe-S)-binding protein O S=Staphylococcus stepanovicii OX=643214 GN=queG PE=4 SV =1
MKGDRRGMFARASWGQDYHTIMRNRLDKLSKFLQEKVPDVEIKSMVDTGVLSDRAVAERSGLGFAGKNGFIINEDLGTWTYLGEMLVSIPFKPDDPVIDSCGDCNICVDRCPTGALVGDGQLNSQKCISFLTQTKGYLKDEYRYKIGNRLYGCDTCQQVCPRNRGINTEHDDIILEPETLKPRLVPLLKMSNKQFKENYGHLAGAWRGKKPIQRNAIIALAHFNEESAIPELKDVALTDPRPMIRGTAHWAIGQILGEEARPFVMSHYEHEIEEVQQEMIKGLETRRP

SEQ ID NO: 81300 - protein, 375 aa, Staphylococcus succinus
  misc_feature (1)..(375): tr|A0A2T4Q7L0|A0A2T4Q7L0_9STAP tRNA epoxyqueuosine(34) reductase QueG OS=Staphylococcus succinus OX=61015 GN=q ueG PE=4 SV=1
MDLKQLKQDVIDYAHSIGIDSIGFTTADPFDELKQKLVDYHEKGYASGFEESDIGLRTEPKLTLPTARSIIAIAVGYPNRLKGAPKSVRGDRRGMFARASWGQDYHSIMRKRLDKLAEYLQSRVEGVEIQSMVDTGVLSDRAVAERAGIGFIGRNGFVINPDFGTWTYLGEMLVSIPFAPDDPLMDSCGECTICVDRCPTGALVGDGQLNSQKCISFLTQTKGYLKDEYRYKIGNRLYGCDTCQQVCPKNKGINTQHDDIILEPDILKPRLVPLLKMSNKEFKNTYGHLAGAWRGKKPIQRNAIIALAHFKEEAAIPELQDVALNDPRPMIRGTAYWAIGQIQGDVARPFIEQHYENELEEVQEEMLKGLETRRE

SEQ ID NO: 81301 - protein, 375 aa, Staphylococcus vitulinus
  misc_feature (1)..(375): tr|A0A2T4PSG7|A0A2T4PSG7_9STAP tRNA epoxyqueuosine(34) reductase QueG OS=Staphylococcus vitulinus OX=71237 GN= queG PE=4 SV=1
MNLDQLKQEVIEYAHSIGIDSIGFTTADPFDELKQKLEDYHSKGYASGFEESDIELRTVPKLSLPSARSIIAIAVGYPNKLKGAPKSVKGDRRGMFARASWGQDYHTIMRNRLDKLSLFLQEKVPDVEVKSMVDTGVLSDRSVAERAGLGFEGKNGFIINEELGTWSYLGEMLVSIPFKPDDPVIDSCGDCNICVDRCPTGALVGNGQLNSQKCISFLTQTKGYLKDEYRYKIGNRLYGCDTCQQVCPRNRGINTEHDDIILEPEVLKPRLVPLLKMSNKEFKNTYGHLAGAWRGKKPIQRNAIISLAHFNEESAIPDLKDVALTDPRPMIRGTAFWAIGQIQGEEARPFIMSHYEREIEEVQEEMIKGLEIRRK

SEQ ID NO: 81302 - protein, 377 aa, Staphylococcus warneri; identical to SEQ ID NO: 81298
  misc_feature (1)..(377): tr|A0A2V3ZCF3|A0A2V3ZCF3_STAWA tRNA epoxyqueuosine(34) reductase QueG OS=Staphylococcus warneri OX=1292 GN=que G PE=4 SV=1

SEQ ID NO: 81303 - protein, 376 aa, Staphylococcus warneri
  misc_feature (1)..(376): tr|A0A364UN97|A0A364UN97_STAWA tRNA epoxyqueuosine(34) reductase QueG OS=Staphylococcus warneri OX=1292 GN=que G PE=4 SV=1
MDVKQLKKDIIEYAHTIGIDSIGFTTADPFDELKQKLEDYHSKGYASGFEESDIALRTEPKLSLPTARSIIAIAVGYPNKLKGAPKSVRGDRRGMFARASWGQDYHTIMRKRLDLLGTYIQSKVPDVEIKSMVDTGVLSDRAVAERAGLGFAGRNGFIINPDLGTWTYLGEMLVSIPFEPDDPILDSCGDCTICVDRCPTGALVGNGQLNSQKCISFLTQTKGYLADEYRYKIGNRLYGCDTCQQVCPKNKGINTEHDDIILEPEILKPRLVPLLQMSNKEFKNTYGHLAGAWRGKKPIQRNAILALVHFNETGAIPDLKEVALNDPRPMIRGTAYWAIGQIEGENAREFIHTHYENEIEEVQVEMLKGLEMRREK

SEQ ID NO: 81304 - protein, 376 aa, Staphylococcus xylosus
  misc_feature (1)..(376): tr|A0A418IDZ6|A0A418IDZ6_STAXY tRNA epoxyqueuosine(34) reductase QueG OS=Staphylococcus xylosus OX=1288 GN=que G PE=4 SV=1
MDLKQLKQDVIDYAHTIGIDSIGFTTADPFDEMKQKLVDYHAKGYASGFEESDIALRTEPTLTLPTARSIIAIAVGYPNKLKGAPKSTRGDRRGMFARASWGQDYHSIMRKRLDKLADYLRDRVDGVEIQSMVDTGALSDRAVAERAGLGYVGRNGFVINPELGTWTYLGEMLVSVPFPPDDPLLDSCGDCTICVDRCPTGALVGDGQLNSQKCISFLTQTKGYLADEYRYKIGNRLYGCDTCQQVCPRNKGINTQHDDIVLEPEILKPRLVPLLKMSNKEFKNTYGHLAGAWRGKKPIQRNAIVALAHFKEESAIPELQDVALNDPRPMIRGTAYWAIGQIQGEDARNFIEQQYHNELEEVQQEMLKGLEMRREQ

SEQ ID NO: 81305 - protein, 376 aa, Staphylococcus xylosus
  misc_feature (1)..(376): tr|A0A5F0VG93|A0A5F0VG93_STAXY tRNA epoxyqueuosine(34) reductase QueG OS=Staphylococcus xylosus OX=1288 GN=que G PE=4 SV=1
MDLNQLKQDVIDYAHTIGIDSIGFTTADPFDEMKQKLVDYHAKGYASGFEESDIELRTEPTLTLPTARSIIAIAVGYPNKLKGAPKSTRGDRRGMFARASWGQDYHSIMRKRLDKLADYLRYRVEGVEIQSMVDTGALSDRAVAERAGLGYVGRNGFVINPELGTWTYLGEMLVSVPFAPDDPLLDSCGDCTICVDRCPTGALVGDGQLNSQKCISFLTQTKGYLADEYRYKIGNRLYGCDTCQQVCPRNKGINTQHDDIVLEPEILKPRLVPLLKMSNKEFKNTYGHLAGAWRGKKPIQRNAIVALAHFKEESAIPDLQDVALNDPRPMIRGTAYWAIGQIQGENARSFIEQQYQNELEEVQQEMLKGLEMRREQ

SEQ ID NO: 81306 - protein, 370 aa, Stappia indica
  misc_feature (1)..(370): tr|A0A285THG7|A0A285THG7_9RHOB Epoxyqueuosine reductase OS=Stappia indica OX=538381 GN=SAMN05421512_110153 PE= 4 SV=1
MRIAAAGAPPQTTENLARFIAAGHHGSMEWMAETAERRAAPQALWPDARRVISLALSYAPDDDPLATLAAREQATISVYARNRDYHDIIKGRLKELAQHLLAQARRMGLGEGEVKVFVDTAPVMEKPLAQQAGLGWQGKHTNLVSRRLGSWFFLAEIFTDLELPVDEAEIDHCGSCRACLDVCPTDAFPAPYRLDARRCISYLTIENKGPIPRAFRPAMGNRIYGCDDCLAACPWNKFAVEAREVRLVARDDLRAPALADLLQLDDTAFRALFSGSPIKRIGRDRFLRNVLVAAGNSGSPALGARVEPLLADDSPLVRGAAVWAASRLLSPARFAALAAAGLAGEQDEEVREEWQAALAAATEEGSAGSE

SEQ ID NO: 81307 - protein, 386 aa, Stappia sp.
  misc_feature (1)..(386): tr|A0A2E6Y0P0|A0A2E6Y0P0_9RHOB Epoxyqueuosine reductase OS=Stappia sp. OX=1870903 GN=queG PE=3 SV=1
MTPRIGERLVASLRTKAERLGFSDCRIADARGIPEAPARLERFLADGHHATMDWMEETAERRGAPRALWPDARRIVTLAFSYGPDEDPLAVLSRPDRAAISVYARHRDYHDVVKGKLKELAQHLLADARRAGHAGEVKVFVDTAPVMEKPLAEVAGLGWQGKHTNLVSRRLGSWFFLAEIFTDLPLPADEPERDHCGSCRACLDACPTDAFPAPYRLDARRCISYLTIEHKGPVPERFRVAMGNRIYGCDDCLAACPWNKFAQAAREAKLVARDDLRAPDLASLLDLDDTGFRTLFSGSPIKRIGRDRFLRNVLIAAGNSADQALREKVASLLQDESALVRGAAVWALSRLERPERFQALHAEFAPAERDPDALAEWASALNALKR

SEQ ID NO: 81308 - protein, 383 aa, Stappia sp.
  misc_feature (1)..(383): tr|A0A1H2IUJ7|A0A1H2IUJ7_9RHOB Epoxyqueuosine reductase OS=Stappia sp. ES.058 OX=1881061 GN=queG PE=3 SV=1
MSEKAAARVKTSLCKKAEELGFDACAIAEADAIPEAPGRLRRFLADGHHATMDWMAETEERRGLPRALWPQASRIITLAMTYAGEGDPLAALDEPTAASISVYARNRDYHDLVKGRLKELAQHLLAQARRQGVEGMVKVFVDTAPVMEKPLAQASGLGWQGKHTNLVSRDLGSWFFLAEIFTDLPLPVDAPETDHCGSCRACLDVCPTQAFPTAYRLDARRCISYLTIEHKGPIPHEFRAAMGNRIYGCDDCLAACPWNKFAQTAREAKLRAREDLVAPRLAELLTLDDAGFRTLFSGSPIKRIGRDRFLRNVLIAAGNSGDPALTEHIVALLGDGNALVRGAAVWALRHLVPAATFKRLADHHEQRETDGDVRAEWVAAQRQ

SEQ ID NO: 81309 - protein, 388 aa, Starkeya novella
  misc_feature (1)..(388): tr|D7A0I0|D7A0I0_STAND Epoxyqueuosine reductase OS=Star keya novella (strain ATCC 8093 / DSM 506 / CCM 1077 / I AM 12100 / NBRC 12443 / NCIB 9113) OX=639283 GN=queG PE =3 SV=1
MLRGPRFLTPEAAKAHLFALAREEGFDAMGIASADAIPHAAPRLNQWIADGAHGDMDWMPETAARRSSPGNMWPEVRSVLMLGLNYGPDEDPRAALADATRGAISVYARGDDYHELIKGKLKRIASRFVPRVGGPDAVQVKVFVDTAPLMEKPLAEAAGLGWQGRHTNLVSREKGSWLLLGAVATDLALPPDAPERDNCGSCRACLDACPTNAFPAAYRIDARRCISYLTIEHKGPIPVELRPLMGNRIYGCDDCLAACPWNKFAQVGREARLAARDENRAPALAELARLDDAAFRARFSKSPIKRTGRVRFLRNVLIAIGNSGDPALVPEAERLLTDDHPLLRGAAVWALARLLDPADFARLRDAHAGESDPEVRAEWRLARASEAA

SEQ ID NO: 81310 - protein, 376 aa, Starkeya novella
  misc_feature (1)..(376): tr|A0A2W5MLF9|A0A2W5MLF9_STANO Epoxyqueuosine reductase OS=Starkeya novella OX=921 GN=queG PE=3 SV=1
MGPAALKAEIARRAKALGFDVVAVTRPDAIPQAAGRLAQALGDGHHGAMNWLAERAEWRGDPTALWPEARSVVMLAMNYGPDEDPRALLDRPDCGAISVYARGDDYHDVIKGRLKQVAGALAAAGAPAKVFVDTAPVMEKPLAAAAGLGWQGKHTNLVSRDFGSWLFLGAIFTSAELPADEPASDACGSCRACLDACPTDAFPAPYRLDARRCVSYLTIELDGPIPVEFRKAIGNRIYGCDDCLAACPWNKFAVAGREMRLSARDDLKAPDLVSLSRLDDATFRKLFSKSPVKRIGRDRFVRNVAIALGNAGTPEAAAAARDLLDDASALVRGAAVWAVSRLAPATLGPLAAERLAAETDEDARREWERALSLEAA

SEQ ID NO: 81311 - protein, 391 aa, Starkeya sp.
  misc_feature (1)..(391): tr|A0A556PJ39|A0A556PJ39_9RHIZ Epoxyqueuosine reductase OS=Starkeya sp. 3C OX=2597768 GN=queG PE=3 SV=1
MLRGSRFLTPRSPSPEAAKALLFALARDEGFDAMGIARADAIPHAGPRLRQWIADGAHGDMDWMPETAERRAAPDGLWPEVASILMLGLNYGPDEDPRAVLAQRTRGAISVYARGDDYHELIKGKLKRIASRFVPRAGGPERVQVKVFVDTAPLMEKPLAAAAGLGWQGKHTNLVSREKGAWLFLGAIATDLALPPDAPESDHCGSCRACLDACPTDAFPAPYRIDARRCVSYLTIEHRGPIPHELRPLIGNRIYGCDDCLAACPWNKFAALGHEARLAARDENRAPALADLARLDDAAFRARFTKSPIKRTGRPRFLRNVLIAIGNSGDAALAPEAERLLADAHPLVRGAAVWALSRLLAPAAFARLRAAHDGETDPDVREEWLHAIPVS

SEQ ID NO: 81312 - protein, 363 aa, Stenotrophomonas acidaminiphila
  misc_feature (1)..(363): tr|A0A2W5LRU9|A0A2W5LRU9_9GAMM Epoxyqueuosine reductase OS=Stenotrophomonas acidaminiphila OX=128780 GN=queG P E=3 SV=1
MPSVGSATTPPDPAALAHRVRTLAREFGFQRCGIAGIELGDDERHLRDWLAEGLYGSMEWMAQHGDKRSRPQELIPGTLRVISVGLDYGRNDSDDAWDTLHDGERAYVARYALGRDYHKLMRNRLQKLAERLQQEVGAFGHRVFVDSAPVLERALARNAGLGWIGKHTCLIDKDGGSWFFLGEIYVDLPLPIDAPASAHCGTCTRCIDVCPTQAITAPYRLDARRCISYLTIEHDGAIPEELRPAIGNRIFGCDDCQLVCPWNKFAKRTDEPDFRARNELDVAALPQLFAWDEAEFLRRTEGSAIRRSGHERWLRNIAVALGNAPTTPDVLAALASRREDPSPLVREHVAWALARHRLTVGAT

SEQ ID NO: 81313 - protein, 360 aa, Stenotrophomonas acidaminiphila
  misc_feature (1)..(360): tr|A0A2L0SL07|A0A2L0SL07_9GAMM Epoxyqueuosine reductase OS=Stenotrophomonas acidaminiphila OX=128780 GN=queG P E=3 SV=1
MPGAVATADMAQLSLRIRQLAREAGFQRCGISGVDLGEDAAHLADWLGKGLYGTMEWMARHGAMRARPQELLPGTVRVISVGLDYGHKDDAAAWATLDDAERAYVARYALGRDYHKLMRNRLQKLAGRIATEIGPFGYRVFVDSAPVLERALARNAGLGWIGKHTCLIDKDGGSWFFLGEIYIDLPLPVDAPASAHCGSCTRCIDICPTAAIIAPHRLDARRCISYLTIEHEGAIPLEMRPLMGNRIYGCDDCQLVCPWNKFARRTDEPDFRARNDLDTATLPELFAWDEDEFLRRTEGSPIRRSGHERWLRNIAVALGNAAPSPAARQALLSRLDHPSELVREHVAWALRRHDPRQDPG

SEQ ID NO: 81314 - protein, 360 aa, Stenotrophomonas chelatiphaga
  misc_feature (1)..(360): tr|A0A0R0CXW6|A0A0R0CXW6_9GAMM Epoxyqueuosine reductase OS=Stenotrophomonas chelatiphaga OX=517011 GN=queG PE= 3 SV=1
MHPDSPTLPAGLDPALAVQRIRALARAHGFQRCGIAGVDLAGDEAHLADWLGQGLYGTMDWMARHGTLRARPAELLPGTVRVISLGMDYSHKDDTEAWATLADPGRAYVARYALGRDYHKLMRNRLQKLAAQISGEVAPLGFRVFVDSAPVLERALGRDAGLGWIGKHTCLIDRHGGSWFFLGEIYIDLPLPIDQPASAHCGTCTRCIDVCPTQAIIAPQRLDARRCISYLTIEHDGAIPEPMRALIGNRIYGCDDCQLVCPWNKFAKRTDEADFRARNNLDRARLDELFSWDEAEFLHRTEGSPIRRSGHERWLRNIAVALGNAPTSAQVVEALTTRCTHDSALVREHVQWALEQHGAG

SEQ ID NO: 81315 - protein, 360 aa, Stenotrophomonas daejeonensis
  misc_feature (1)..(360): tr|A0A0R0DM32|A0A0R0DM32_9GAMM 4Fe-4S ferredoxin-type d omain-containing protein (Fragment) OS=Stenotrophomonas daejeonensis OX=659018 GN=ABB34_13595 PE=3 SV=1
MPEAVSAADMAQLSLRIRQLAREAGFQRCGISDIELREDEAHLADWLGKGLYGTMEWMARHGAMRARPHELLPGTVRVISVGLDYGPKEDAEAWATLNNAERAYVARYALGRDYHKLMRNRLQKLAERVAAEVGPFGHRVFVDSAPVLERALARNAGLGWIGKHTCLIDKDGGSWFFLGEIYVDLPLPVDAPATAHCGTCTRCIEVCPTAAIIAPYRLDARRCISYLTIEHDGAIPTEMRPLMGNRIYGCDDCQLVCPWNKFARRTDEPDFRARNNLDTATLPELFAWEEDEFLRRTEGSPIRRSGHERWLRNIAVALGNAAPSPAARQALESRRGHPSELVREHVAWGLERYGGERGTG

SEQ ID NO: 81316 - protein, 361 aa, Stenotrophomonas ginsengisoli
  misc_feature (1)..(361): tr|A0A0R0D941|A0A0R0D941_9GAMM Epoxyqueuosine reductase OS=Stenotrophomonas ginsengisoli OX=336566 GN=queG PE= 3 SV=1
MHTSAPPTLDPQQLQQARQRLLALAAQAGFARCGISVPDLSTDAAHLADWLGQGLYGTMDWMARNTQLRADPVALLPGTVRVVSVGMDYGQDPQAAWDTLGDGQQAYVARYALGRDYHKLMRNRLQKLASTLAAEFGPLGFRVFVDSAPVLERALGRDAGLGWIGKHTCLIDKRGGSWFFLGEIYIDLPLPVDAPASAHCGSCTRCIDICPTAAIIAPHRLDARRCISYLTIEHEGSIEEQLRPLIGNRIYGCDDCQLVCPWNKFAKRTDEPDFRARNQLDTASLADLFAWEEEEFLRRTEGSAIRRSGHERWLRNIAVAMGNTPSPLHQQSLQRRLDHPSVVVREHVRWALDRHQASDWP

SEQ ID NO: 81317 - protein, 362 aa, Stenotrophomonas humi
  misc_feature (1)..(362): tr|A0A0R0C6V0|A0A0R0C6V0_9GAMM Epoxyqueuosine reductase OS=Stenotrophomonas humi OX=405444 GN=queG PE=3 SV=1
MSEAVSIANPAQLSLRIRQLAREAGFQRCGISGIELADDEAHLADWLGKGLYGTMEWMARHGSLRARPQELLPGTVRVLSVGMDYGHKDETEAWATLNDAERAYVARYALGRDYHKLMRNRLQKLAERIAGEIGPFGYRVFVDSAPVLERALARNAGLGWIGKHTCLIDRNGGSWFFLGEIYLDLPLPVDTPATAHCGTCTRCIDVCPTAAIIAPYRLDARRCISYLTIEHEGAIPLEMRPLMGNRIYGCDDCQLVCPWNKFAHRTDEPDFRVRNNLDTATLPELFAWKEDEFLRRTEGSPIRRSGHERWLRNIAVALGNAAPSASAHDALVQRLEHPSEVVREHVQWALQQHADVPAPGKQ

SEQ ID NO: 81318 - protein, 359 aa, Stenotrophomonas koreensis
  misc_feature (1)..(359): tr|A0A0R0BXL7|A0A0R0BXL7_9GAMM Epoxyqueuosine reductase OS=Stenotrophomonas koreensis OX=266128 GN=queG PE=3 S V=1
MSPLSPPPPPLSALQRARERVLALATAAGFSRCGISTPDLGQDAAHLADWLGKGLYGTMDWMARNTALRTDPAALLPGTVRVISVGLDYGQDPDAAWATLEDGQRAYVARYALGRDYHKLMRNRLQKLAAQLGQEFGPLGFRVFVDSAPVLERALGRDAGLGWIGKHTCLIDKRGGSWFFLGEIYIDLPLPTDTPASAHCGSCQRCIDICPTQAIIAPYRLDARRCISYLTIEHEGSIDPALRPLIGNRIYGCDDCQLVCPWNKFARRTDEPDFRTRNQLDSASLCALFAWDEEEFLRRTEGSAIRRSGHERWLRNIAVAMGNAPSPAHRAALLGRAGHPSPIVREHVAWALERHTDVS

SEQ ID NO: 81319 - protein, 356 aa, Stenotrophomonas lactitubi
  misc_feature (1)..(356): tr|A0A2M9QY09|A0A2M9QY09_9GAMM Epoxyqueuosine reductase OS=Stenotrophomonas lactitubi OX=2045214 GN=queG PE=3 SV=1
MSPVPAPLDPALAVQRIRDLARAHGFQRCGIAGIELGEDEAHLADWLGQGLYGTMDWMARHGTLRARPAELLPGTVRVISVGMDYSHKDDTEAWATLADPGRAYVARYALGRDYHKLMRNRLQKLATQINDEVAPLGYRVFVDSAPVLERALARNAGLGWIGKHTCLIDRHGGSWFFIGEIYIDIPLPIDTPASAHCGTCTRCIDVCPTQAITGPQRLDARRCISYLTIEHDGAIPVEMRPLIGNRIYGCDDCQLVCPWNKFAKRTDEADFRARNNLDTARLDQLFAWDEAEFLRRTEGSPIRRSGHERWLRNIAVALGNASTTAETLSALQTRAEDASPVVREHVQWAMGQHGLR

SEQ ID NO: 81320 - protein, 356 aa, Stenotrophomonas maltophilia
  misc_feature (1)..(356): tr|A0A4S1MK97|A0A4S1MK97_STEMA Epoxyqueuosine reductase OS=Stenotrophomonas maltophilia OX=40324 GN=queG PE=3 SV=1
MSPAPTPVDPAQAVQRIRELARAHGFQRCGIAGIELGEDEAHLADWLGQGLYGTMDWMARHGTLRARPAELLPGTVRVISVGMDYSHKDDTEAWATLADPGRAYVARYALGRDYHKLMRNRLQKLATQINDEVAPLGYRVFVDSAPVLERALARNAGLGWIGKHTCLIDRHGGSWFFIGEIYIDIPLPIDTPATAHCGTCTRCIDVCPTQAIIGPQRLDARRCISYLTIEHDGAIPEEMRPLMGNRIYGCDDCQLVCPWNKFAKRTDEADFRARNNLDAARLDQLFAWDEAEFLRRTEGSPIRRSGHERWLRNIAVALGNAPSSAEALAALRTRVDDPSPLVREHVQWALGQHTAR

SEQ ID NO: 81321 - protein, 384 aa, Stenotrophomonas maltophilia
  misc_feature (1)..(384): tr|M5D1M6|M5D1M6_STEMA Epoxyqueuosine reductase OS=Sten otrophomonas maltophilia SKK35 OX=1118156 GN=yjeS PE=3 SV=1
MRAHRARAPLWYRTEGKDRACRDFILVHMSPVPAPVDPAQAVQRIRELARAHGFQRCGIAGIELGEDEAHLADWLGQGLYGTMDWMARHGTLRARPAELLPGTVRVISVGMDYSHKDDTEAWATLADPGRAYVARYALGRDYHKLMRNRLQKLATQINDEVAPLGYRVFVDSAPVLERALARNAGLGWIGKHTCLIDRHGGSWFFIGEIYIDIPLPIDAPATAHCGTCTRCIDVCPTQAIIGPQRLDARRCISYLTIEHDGAIPEDMRPLIGNRIYGCDDCQLVCPWNKFARRTDEADFRARNQLDTARLDQLFAWDEAEFLRRTEGSPIRRSGHERWLRNIAVALGNAPASAEALAALHTRIDDRSPLVREHVQWALGQHAAR

SEQ ID NO: 81322 - protein, 359 aa, Stenotrophomonas panacihumi
  misc_feature (1)..(359): tr|A0A0R0A9D6|A0A0R0A9D6_9GAMM Epoxyqueuosine reductase OS=Stenotrophomonas panacihumi OX=676599 GN=queG PE=3 SV=1
MSAVPAPALAPAALAALATRVRVLAREAGFQRCGISGIDLGEDEAHLRDWLAEGLYGTMHWMAQHGSKRARPAELVPGTLRVLSVGMDYGRRDDEAAWATLDDGERAYVARYALGRDYHKLMRHRLQKLAERLQAEVGPFGFRVFVDSAPVLERALARNAGLGWIGKHTCLIDKQGGSWFFLGEIYLDLPLPVDTPATAHCGSCVRCIDICPTGAIVAPHRLDARRCISYLTIEHDGAIPEEFRKPMGNRIYGCDDCQLVCPWNKFAQRTDEADFRARNDLDTATLPQLFAWEEDEFLRRTEGSPIRRSGHERWLRNIAVALGNAPTTPDVLAALASRREHASALVREHVAWALAQHAQ

SEQ ID NO: 81323 - protein, 356 aa, Stenotrophomonas pavanii; identical to SEQ ID NO: 74961
  misc_feature (1)..(356): tr|A0A246L3P2|A0A246L3P2_9GAMM Epoxyqueuosine reductase OS=Stenotrophomonas pavanii OX=487698 GN=queG PE=3 SV= 1

SEQ ID NO: 81324 - protein, 362 aa, Stenotrophomonas pictorum
  misc_feature (1)..(362): tr|A0A0R0AD61|A0A0R0AD61_9GAMM Epoxyqueuosine reductase OS=Stenotrophomonas pictorum JCM 9942 OX=1236960 GN=qu eG PE=3 SV=1
MSEAAFTVNPAQLSLRIHQLAREAGFQRCGISGIALGEDEAHLADWLGKGLYGTMEWMARHGTMRARPQELLPGTVRVISVGLDYGHKDDAAAWATLDDAERAYVARYALGRDYHKLMRNRLQKLAERIAGEIGPFGYRVFVDSAPVLERALARNAGLGWIGKHTCLIDRNGGSWFFLGEIYVDLPLPVDAPASAHCGTCTRCIDVCPTAAIIAPHRLDARRCISYLTIEHEGAIPLEMRPLMGNRIYGCDDCQLVCPWNKFARRTDEPDFRARNNLDTATLPELFAWEEDEFLRRTEGSPIRRSGHERWLRNIAVALGNATPSPAAKQALEQRREHASALVREHVQWALQRHTESAGMGPP

SEQ ID NO: 81325 - protein, 362 aa, Stenotrophomonas rhizophila
  misc_feature (1)..(362): tr|A0A1B2N5S7|A0A1B2N5S7_9GAMM Epoxyqueuosine reductase OS=Stenotrophomonas rhizophila OX=216778 GN=queG PE=3 SV=1
MSAVPLPAPLDLARAAERVRALARQHGFQRCGVSGIDLADDETHLADWLGQGLYGTMDWMARHGTLRARPAELLPGTVRVISVGMDYGHKDDTEAWNTLHDGNRAYVARYALGRDYHKLMRNRLQKFADALAAEIGTFGYRVFVDSAPVLERALARNAGLGWIGKHTCLIDRQGGSWFFLGEIYIDLPLPVDAPASAHCGTCTRCIDVCPTQAIIGPQRLDARRCISYLTIEHDGAIPEDMRPLMGNRIYGCDDCQLVCPWNKFARRTDEPDFRARNALDTATLAELFAWEEDEFLRRTEGSPIRRSGHERWLRNIAVALGNAPGHPDTLAALHARAGHDSALVREHVQWALQQHARLDNGG

SEQ ID NO: 81326 - protein, 362 aa, Stenotrophomonas rhizophila
  misc_feature (1)..(362): tr|A0A023Y1Q8|A0A023Y1Q8_9GAMM Epoxyqueuosine reductase OS=Stenotrophomonas rhizophila OX=216778 GN=queG PE=3 SV=1
MSAVPLPAPVNLARATERVREIARAHGFQRCGVSGIELGEDEAHLADWLGKGLYGTMDWMARHGTMRARPAELLPGTVRVISVGMDYGHKDDAQAWDTLHDGDRAYVARYALGRDYHKLMRNRLQKFADAIAAEIGAFGYRVFVDSAPVLERALARNAGLGWIGKHTCLIDKQGGSWFFLGEIYIDLPLPVDTPATAHCGTCTRCIDVCPTQAIIGPQRLDARRCISYLTIEHAGAIPEDMRPLMGNRIYGCDDCQLVCPWNKFARRTDEPDFRARNDLDTASLAQLFAWEEDEFLRRTEGSPIRRSGHERWLRNIAVALGNAPTSAQTLAALDARRAHASPIVREHVAWALQQHAARNPGA

SEQ ID NO: 81327 - protein, 362 aa, Stenotrophomonas sp.
  misc_feature (1)..(362): tr|A0A357NM23|A0A357NM23_9GAMM Epoxyqueuosine reductase OS=Stenotrophomonas sp. OX=69392 GN=queG PE=3 SV=1
MSAVPAPVPLDPALAAHRLRALARAHGFQRCGVAGIELGEDEAHLADWLGKGLYGTMQWMARHGTLRARPAELLPGTVRVISVGMDYGHKDDAQAWDTLHDGDRAYVARYALGRDYHKLMRNRLQKFADALAAEIGPFGYRVFVDSAPVLERALARNAGLGWIGKHTCLIDRQGGSWFFLGEIYVDLPLPVDTPATAHCGTCTRCIDVCPTQAIIAPQRLDARRCISYLTIEHEGAIPEPMRPLMGNRIYGCDDCQLVCPWNKFARRTDEPDFRARNDLDTASLAQLFAWEEDEFLRRTEGSPIRRSGHERWLRNIAVALGNAPTHADTLAALHARRAHPSAIVREHVEWALQQHAGRDAAG

SEQ ID NO: 81328 - protein, 358 aa, Stenotrophomonas sp.
  misc_feature (1)..(358): tr|A0A3S7JUG6|A0A3S7JUG6_9GAMM Epoxyqueuosine reductase OS=Stenotrophomonas sp. ZAC14D2_NAIMI4_6 OX=2072406 GN =queG PE=3 SV=1
MSPAPAPAPLDPALAVQRIRDLARAHGFQRCGIAGIELGEDEAHLADWLGQGLYGTMDWMARHGTLRARPAELLPGTVRVISVGMDYSHKDDTEAWATLADPGRAYVARYALGRDYHKLMRNRLQKLATQINDEVAPLGYRVFVDSAPVLERALARNAGLGWIGKHTCLIDRHGGSWFFIGEIYIDIPLPIDAAATAHCGTCTRCIDVCPTQAITAPHRLDARRCISYLTIEHDGAIPEDMRPLIGNRIYGCDDCQLVCPWNKFAKRTDEADFRARNNLDTARLDQLFAWDEAEFLRRTEGSPIRRSGHERWLRNIAVALGNAPASAEALAALHTRANDPSPVVREHVQWALAQHGAA

SEQ ID NO: 81329 - protein, 360 aa, Stenotrophomonas terrae
  misc_feature (1)..(360): tr|A0A0R0C816|A0A0R0C816_9GAMM Epoxyqueuosine reductase OS=Stenotrophomonas terrae OX=405446 GN=queG PE=3 SV=1
MSEAVTAANPAQLSLRIRQLAREAGFQRCGVSGIELGEDEAHLADWLGKGLYGTMEWMARHGTLRARPQELLPGTLRVISVGLDYGHKDDAEAWANLNDSERAYVARYALGRDYHKLMRNRLQKLAERIGSEIGPFGYRVFVDSAPVLERALARNAGLGWIGKHTCLIDRNGGSWFFLGEIYVDLPLPVDVPATAHCGTCTRCIDVCPTAAIIAPHRLDARRCISYLTIEHEGAIPLDMRPLMGNRIYGCDDCQLVCPWNKFAQRTDEPDFRARNNLDTATLPELFAWEEDEFLRRTEGSPIRRSGHERWLRNIAVALGNAAPSPVVQQALQTRQAHPSEVVREHVQWALQRHAGDTPKQ

SEQ ID NO: 81330 - protein, 348 aa, Steroidobacter denitrificans
  misc_feature (1)..(348): tr|A0A127F7H0|A0A127F7H0_STEDE Epoxyqueuosine reductase OS=Steroidobacter denitrificans OX=465721 GN=queG PE=3 SV=1
MTELKQAIRNWGHELGFQQIGIAGIDIREDEERLMQWLQQQRHGAMGYMQRHGRMRARPQELLPGTLRVISARMDYLPPGTRAAYDILAQPALGYVSRYALGRDYHKLMRRRLARLTERIQSHSLALEQRAFVDSAPVLEKAFARNAGLGWIGKHTTLINRHAGSWFFLGEILTDLPLPADTPASAHCGSCHACIDICPTQAIVAPYELDARRCISYLTIELREAIPEEFRKAMGNRIYGCDDCQLVCPWNKFAQLSIEPDFMPRHGLDAAALTQLFAWSEAEFLTRTEGSAIRRIGHECWLRNIAVALGNAPTSPEVLAALHSRARHPSALVREHVQWAIAQHRDTP

SEQ ID NO: 81331 - protein, 339 aa, Stigmatella aurantiaca
  misc_feature (1)..(339): tr|A0A1H7SY89|A0A1H7SY89_STIAU Epoxyqueuosine reductase OS=Stigmatella aurantiaca OX=41 GN=SAMN05444354_108182 PE=4 SV=1
MSSLPAIGLRQLAEAVGFDLVGFARAEPIPAEVLCSWVEAGYAADMDWMGERAAERLDVRLLLPGAKTVVAFANNYYRDDPEAVDSPIARYARGRDYHSTLKDRMKAFRKALQETYPGIGTYGGVDSGPIMEKVWAARAGLGYVGKNGCFITERYGSWVLLATVILDREVDAYGEGPAADRCGSCRKCLMSCPSGALVGNGRVDARACLSYQTIENRAHEVPESFRVMMDNLVFGCDICQDVCPLNRKPVFAGHARFAPRAVAGLGVMELAGLTPEQYAQFIPGTALARARYDGLRRNAIYALGAARQEEARALLEKLSEEPSEPVRSAAQWALRQLAQ

SEQ ID NO: 81332 - protein, 339 aa, Stigmatella aurantiaca
  misc_feature (1)..(339): tr|E3FN75|E3FN75_STIAD Iron-sulfur cluster binding prot ein OS=Stigmatella aurantiaca (strain DW4/3-1) OX=37880 6 GN=STAUR_6606 PE=4 SV=1
MSSLPTAWLRQLAEAVGFDLVGFSRAEPIPPEALCSWVEAGYAADMDWMGERAAERLDVRLLLPGAKTVVTFANNYYRDDPEAADSPIARYARGRDYHSTLRDRMKAFRKALQESYPGIGTYGGVDSGPMMEKVWAARSGMGYVGKNGCFITERYGSWVLLATLILDAEVDAYGEGPATDRCGACRRCLLSCPTGALVGNGRVDARACLSYQTIENRSQEVPEAFRFAMDSLVFGCDICQDVCPLNRKPVFAEHPRFAPRAVAGLGVMELAGLTPEQYAQFIPGTALARARYDGLRRNAIYALGAARQEQARALLEKLCEEPSEPVRSAAQWALRQLAQ

SEQ ID NO: 81333 - protein, 339 aa, Stigmatella erecta
  misc_feature (1)..(339): tr|A0A1I0DT59|A0A1I0DT59_9DELT Epoxyqueuosine reductase OS=Stigmatella erecta OX=83460 GN=SAMN05443639_102670 PE=4 SV=1
MSSLPTTWLRQLAEAVGFDLVGFSRAEPIPAEVLCSWVEAGYAADMDWMGERAAERLDVRLLLPGAKTVVSFANNYYRDDPEAVDSPIARYARGRDYHSTLKDRMKAFRKALQEGYPGIGTYGGVDSGPLMEKVWAARAGLGYVGKNGCFITERYGSWVLLATVILDREVDAYGEGPAADRCGSCRKCIMSCPSGALVGNGRVDARACLSYQTIENRAHEVPESFRVMMDNLVFGCDICQDVCPLNRKPVFAEHARFAPRAVAGLGVMELAGLTPEQYAQFIPGTALARARYDGLRRNAIYALGASRQEQARVLLEKLSEEPSEAVRSAAQWALRQLAQ

SEQ ID NO: 81334 - protein, 372 aa, Streptococcus acidominimus
  misc_feature (1)..(372): tr|A0A239XA63|A0A239XA63_STRAI Iron-sulfur protein OS=S treptococcus acidominimus OX=1326 GN=queG PE=4 SV=1
MELKAEIKKIANEIGISKIGFTTADDFSYLEKSLRLGVEEGRTTGFEHKVIEERIKPKLSLESAKTIISIAVAYPHKLPIQPQKTQYKRGKITPNSWGTDYHHVLQEKLSQLAEAIESLTQDFEYKGMVDTGALVDTAVARRAGIGFIGKNGLVISKEFGSYMYLGELITNLEIEPDQPVDYDCGDCRRCLDACPTSCLIGDGTMNARRCLSFQTQDKGMMAMEFRKKIKTVIYGCDICQICCPYNRGIDNPLASEIDPELAQPELIPFLELSNKDFKAKFGQIAASWRGKNILQRNAIIALANGHDRTAIIKLMEIIDKNNNPIHTATAIWALGAIVKKPDEAMLDFMRSLSLKEEDSLKELELVRQKWQF

SEQ ID NO: 81335 - protein, 375 aa, Streptococcus acidominimus
  misc_feature (1)..(375): tr|A0A1Q8EFI0|A0A1Q8EFI0_STRAI 4Fe-4S ferredoxin OS=Str eptococcus acidominimus OX=1326 GN=queG PE=4 SV=1
MNLKEQIIALSQEIGISKIGFTTADDFAYLEKSLRMAVEEGRTSGFEHKNIEERIKPKLSLASAKTIISIAIAYPRRLPQKPRKTQYKRGKITPNSWGLDYHYILQDKLARLARGIEELTADFEYKGMVDTGALVDTAVARRAGIGFIGKSGLVISKEFGSYMFLGELITNLEIEPDQPVDYDCGECNRCVTTCPTSCLIGDGTMNARRCLSFQTQDKGMMDLEFRKKIKTVIYGCDICQICCPYNKGIDSPPVVDIDPELAEPELIPFLELSNGQFKEKFGMIAGSWRGKNILQRNAIIALANANDRSSIPKLLEIIDKNQNPIHVATAIWALSQLVKQPNEELIDFIEQIRHDHPDVVAEREAFLSFAKKPQM

SEQ ID NO: 81336 - protein, 374 aa, Streptococcus agalactiae
  misc_feature (1)..(374): tr|A0A4U3JHP5|A0A4U3JHP5_STRAG tRNA epoxyqueuosine(34) reductase QueG OS=Streptococcus agalactiae OX=1311 GN=q ueG PE=4 SV=1
MDIKAEIQKLAKEIGISKIGFTTADNFDYLEKSLRASVEEGRNSGFEHKVIEDRIYPERLSESAKTIISIGVAYPHKLPQQPQKTSYKRGKITPNSWGLDYHYVVGEKLDRLSKGIEELCRDFPLQQKAMVDTGALVDTAVAQRAGIGFIGKNGLVISKEYGSYMFLGELITNLEIEPDKPVDYDCGDCRRCLDACPTSCLIGDGSMNAKRCLSFQTQDKGMMDIEFRKKIKTVIYGCDICQICCPYNKGINNPLATEIDPELAQPELIPFLSLSNGQFKEKFGMIAGSWRGKNILQRNAIIALANAHDKTAVVKLIEIIDKNNNPIHTATAIWALGEIVKKPNDEILEFMSNLTLKDEDSRKELELIRHKWQF

SEQ ID NO: 81337 - protein, 374 aa, Streptococcus agalactiae
  misc_feature (1)..(374): tr|Q8E145|Q8E145_STRA5 Iron-sulfur cluster-binding prot ein, putative OS=Streptococcus agalactiae serotype V (s train ATCC BAA-611 / 2603 V/R) OX=208435 GN=SAG0517 PE= 4 SV=1
MDIKAEIQKLAKEIGISKIGFTTADNFDYLEKSLRASVEEGRNSGFEHKVIEDRIYPERLLESAKTIISIGVAYPHKLPQQPQKTSYKRGKITPNSWGLDYHYVVGEKLDRLSKGIEELCRDFPLQQKAMVDTGALVDTAVAQRAGIGFIGKNGLVISKEYGSYMFLGELITNLEIEPDKPVDYDCGDCRRCLDACPTSCLIGDGSMNAKRCLSFQTQDKGMMDIEFRKKIKTVIYGCDICQICCPYNKGINNPLATEIDPELAQPELIPFLSLSNGQFKEKFGMIAGSWRGKNILQRNAIIALANAHDKTAVVKLIEIIDKNNNPIHTATAIWALGEIVKKPNDEILEFMSNLTLKDEDSRKELELIRHKWQF

SEQ ID NO: 81338 - protein, 377 aa, Streptococcus australis
  misc_feature (1)..(377): tr|A0A4Q1ZHD5|A0A4Q1ZHD5_9STRE tRNA epoxyqueuosine(34) reductase QueG OS=Streptococcus australis OX=113107 GN= queG PE=4 SV=1
MNLKESIIELAHSIGISKIGFTTADDFSYLEKSLRLAVEEGRNSGFEHKNIEERIQPRLSLASAKTIISIAVAYPHKLKQQPQKTAYKRGKFTPNSWGLDYHYVLQDKLDRLARGIEELTADFEYKGMVDTGALVDTAVAQRAGIGFIGKNGLVISKEYGSYMFLGELITNLEIEPDQAVDYGCGDCNRCVEACPTSCLIGDGSMNARRCLSFQTQDKGMMDLEFRKKIKTVIYGCDICQICCPYNRGLDNPLVTDIDPELAHPELIPFIELSNGQFKEKFGMVAGSWRGKNILQRNAIIALANANDRSAIPKLLEIIETSQNQIHIATAIWSLGELIREVTPDLVDLLTSLKNPSPAIIEERERFFQKFQHQISHN

SEQ ID NO: 81339 - protein, 377 aa, Streptococcus australis
  misc_feature (1)..(377): tr|E7S9Q1|E7S9Q1_9STRE Putative iron-sulfur cluster-bin ding protein OS=Streptococcus australis ATCC 700641 OX= 888833 GN=HMPREF9421_0787 PE=4 SV=1
MNLKESIIELAHSIGISKIGFTTADDFSYLEKSLRLAVEEGRNSGFEHKNIEERIQPRLSLASAKTIISIAVAYPHKLKQQPQKTAYKRGKFTPNSWGLDYHYVLQDKLDRLARGIEELTADFEYKGMVDTGALVDTAVAQRAGIGFIGKNGLVISKEYGSYMFLGELITNLEIEPDQAVNYGCGDCNRCVEACPTSCLIGDGTMNARRCLSFQTQDKGMMDMEFRKKIKTVIYGCDICQICCPYNRGLDNPLATDIDPELAHPELIPFIELSNGQFKEKFGMVAGSWRGKNILQRNAIIALANANDRSAIPKLLEIIETSQNQIHIATAIWSLGELIREVTPDLVDLLTSLKNPSPAIIEERERFFQKFQHQISHN

SEQ ID NO: 81340 - protein, 371 aa, Streptococcus azizii
  misc_feature (1)..(371): tr|A0A1V2SQI1|A0A1V2SQI1_9STRE tRNA epoxyqueuosine(34) reductase QueG OS=Streptococcus azizii OX=1579424 GN=BV E84_02750 PE=4 SV=1
MNLKEQIIALSKEMGISKIGFTTADDFTYLEKSLRAAAEEGRTSGFEHKDIEERIKPRLSLASAKTIISIAVAYPRRLPEKPQKTQYKRGKITPNSWGLDYHYILQDKLERLARGIEELTVDFEYKGMVDTGALVDTAVAKRAGIGFIGKNGLVISKEFGSYMFLGELITNLEIEPDQPVDYDCGDCNRCITACPTSCLLGDGTMNARRCLSFQTQDKGMMDLEFRRKIKTVIYGCDICQICCPYNKGIDSPPVVAIDPDLAEPELIPFLELSNGQFKEKFGMIAGSWRGKNILQRNAIIALANAHDRSSIPKLLEIIDKRQNPIHMATAIWALSQLVRHPNEELIAFIENVRSDHPEVMEERAAFLSFAK

SEQ ID NO: 81341 - protein, 372 aa, Streptococcus bovimastitidis
  misc_feature (1)..(372): tr|A0A1L8MPN3|A0A1L8MPN3_9STRE tRNA epoxyqueuosine(34) reductase QueG OS=Streptococcus bovimastitidis OX=18566 38 GN=A9Q68_04035 PE=4 SV=1
MELKAEIKKIANEIGISKIGFTTADDFSYLEKSLRLGVEEGRTTGFEHKVIEERIKPKLSLESAKTIISIAVAYPHKLPIQPQKTQYKRGKITPNSWGTDYHHVLQEKLSQLAEAIESLTQDFEYKGMVDTGALVDTAVARRAGIGFIGKNGLVISKEFGSYMYLGELITNLEIEPDQPVDYDCGDCRRCLDACPTSCLIGDGTMNAKRCLSFQTQDKGMMDLEFRKKIKTVIYGCDICQIACPYNKGISNPLASEIDPELAQPELIPFLELSNKDFKAKFGQIAASWRGKNILQRNAIIALANGHDRTAIIKLMEIIDKNNNPIHTATAIWALGELIKKPDAAILDYMRGLSPKEEESQKELEMLRAKWQF

SEQ ID NO: 81342 - protein, 390 aa, Streptococcus canis
  misc_feature (1)..(390): tr|A0A2D4DR06|A0A2D4DR06_STRCB Iron-sulfur cluster-bind ing protein OS=Streptococcus canis OX=1329 GN=TANIYAMA4 _1843 PE=4 SV=1
MSSIRLEVLTYFDYDSSMNIKADIQALAKEIGISKIGFTTADDFSYLEKSLRLGVEEGRTTGFEHKVIEERIKPKLSLASAKTIISIAVAYPHKLPVPPPKTSYKRGKMTPNSWGLDYHHVLQDKLQRLAEGIEALTADFEYKGMVDTGALVDTAVARRAGIGFIGKNGLVISKEFGSYMYLGELITNLDIEPDQPVDYDCGDCRRCLDACPTSCLIGDGTMNARRCLSFQTQDKGMMALEFRKKIKTVIYGCDICQICCPYNKGINNPLASPIDPELAMPELVPFLELSNKSFKESFGMIAGSWRGKNILQRNAIIALANAHDRSAIPKLLEIIDQNNNPSHTATAMWALGELIKKPDQAMLDFMLGLSMAEEETKEELERLLTKWQRA

SEQ ID NO: 81343 - protein, 390 aa, Streptococcus canis; identical to SEQ ID NO: 81342
  misc_feature (1)..(390): tr|I7WI17|I7WI17_STRCB Iron-sulfur protein OS=Streptoco ccus canis FSL Z3-227 OX=482234 GN=SCAZ3_04030 PE=4 SV= 1

SEQ ID NO: 81344 - protein, 374 aa, Streptococcus criceti
  misc_feature (1)..(374): tr|G5JT95|G5JT95_STRCG 4Fe-4S ferredoxin-type domain-co ntaining protein OS=Streptococcus criceti HS-6 OX=87344 9 GN=STRCR_1063 PE=4 SV=1
MDIKANIQTLAKELGISKIGFTTADDFAYLEKSLRASVDEGRNSGFEHKNIEERIDPKLSLASAKTIISIAVAYPRQLPVQPPKTQYKRGKITPNSWGLDYHHVLNDKLTRLAKGIEELCADFPLEHKAMVDTGALVDTAVAQRAGIGFIGKNGLVISKEYGSYMFLGELITNLEIEPDSPVDYGCGDCRRCLDACPTSCLLGNGSMDAKRCLSFQTQDKGMMAMEFRKKIKTVIYGCDICQICCPYNKGIQNPLATPIDPELAWPELLPFLDLSNSDFKKKFGEIAGSWRGKNILQRNAIIALANAHDRNALVKLMEIIDKNNNPIHTATAIWALGEIVKKPDQAIKDYMKALNPRDQAAKEEWRLVCIKWQI

SEQ ID NO: 81345 - protein, 374 aa, Streptococcus cristatus
  misc_feature (1)..(374): tr|A0A0F2CM16|A0A0F2CM16_STRCR (Fe-S)-binding protein O S=Streptococcus cristatus OX=45634 GN=TW70_00862 PE=4 S V=1
MNIKEEIIKLSKDIGISKIGFTTADDFDYLEKSLRLAVEEGRNSGFEHKNIEERIKPKLSLASAKTIISIAVAYPHKLKQQPQKTAYKRGKFTPNSWGLDYHYVLQDKLDRLAKGIEELTADFEYKGMVDTGALVDTAVARRAGIGFIGKNGLVISKEFGSYMFLGELITNLDIEPDQPVDYDCGDCNRCVTACPTSCLIGDGTMNAKRCLSFQTQDKGIMDLEFRKKIKTVIYGCDICQICCPYNKGLDNPLATEIDPDLAHPELLPFLELSNGQFKEKFGHIAGSWRGKNILQRNAIIALANANDRSAIPKLLEIIDKGQNPIHIATAIWALSQLVREANPEMIEMILAVKNPTEAIKEEQEQFLKKFHLTN

SEQ ID NO: 81346 - protein, 374 aa, Streptococcus cristatus
  misc_feature (1)..(374): tr|E8JV84|E8JV84_STRCR Putative iron-sulfur cluster-bin ding protein OS=Streptococcus cristatus ATCC 51100 OX=8 89201 GN=HMPREF9422_1114 PE=4 SV=1
MNIKEEIIKLSKEIGISKIGFTTADDFDYLEKSLRLAVEEGRNSGFEHKNIEERIKPKLSLASAKTIISIAVAYPHKLKQQPQKTAYKRGKFTPNSWGLDYHYVLQDKLDRLAKGIEELTADFEYKGMVDTGALVDTAVARRAGIGFIGKNGLVISKEFGSYMFLGELITNLDIEPDQPVDYDCGDCNRCVTACPTSCLIGDGTMNAKRCLSFQTQDKGIMDLEFRKKIKTVIYGCDICQICCPYNKGLDNPLATEIDPELAHPELLPFLELSNGQFKEKFGHIAGSWRGKNILQRNAIIALANANDRSAIPKLLELIDKGQNPIHIATAIWALSQLVREANPEMIEMILAVKNPTEAIKEEQEQFLKKFHLTN

SEQ ID NO: 81347 - protein, 375 aa, Streptococcus cuniculi
  misc_feature (1)..(375): tr|A0A4Y9JD88|A0A4Y9JD88_9STRE tRNA epoxyqueuosine(34) reductase QueG OS=Streptococcus cuniculi OX=1432788 GN= queG PE=4 SV=1
MNLKEQIIALSKDIGISKIGFTTADDFSYLEKSLRAAVEEGRASGFEHKNIEERIEPKLSLASAKTIISIAVAYPRRLPQKPQKTQYKRGKMTPNSWGLDYHYILQDKLERLAHGIGELTADFEYKGMVDTGAMVDTAVARRAGIGFIGKNGLVISKEFGSYMFLGELMTNLEIDPDQPVDYDCGDCNRCVTACPTSCLLGDGTMNARCCLSFQTQDKGMMDLEFRKKIKTVIYGCDICQICCPYNKGIDNPPVVDIDPDLAEPELVPFLELSNGQFKEKFGMIAGSWRGKNILQRNAIITLANANDRSSIPKLLEMIDKKQNPIHVATAIWALSQLVKQPNEEMVAFIENVQSEHPDVVTEREAFLSFAKELQI

SEQ ID NO: 81348 - protein, 375 aa, Streptococcus cuniculi
  misc_feature (1)..(375): tr|A0A1Q8E868|A0A1Q8E868_9STRE tRNA epoxyqueuosine(34) reductase QueG OS=Streptococcus cuniculi OX=1432788 GN= BU202_05885 PE=4 SV=1
MNLKEQIIALSKDIGISKIGFTTADDFAYLEKSLRAAVEEGRTSGFEHKNIEERIKPRLSLASAKTIISIAVAYPRRLPQKPQKTQYKRGKITPNSWGLDYHYILQDKLERLARGIEELTADFEYKGMVDTGALVDTAVARRAGIGFIGKNGLVISKEFGSYMFLGELITNLEIEPDQPVDYDCGDCNRCVTACPTSCLLGDGTMNARRCLSFQTQDKGMMDLEFRKKIKTVIYGCDICQICCPYNKGIDSPPVVDIDPDLAEPELIPFLELSNGQFKEKFGMIAGSWRGKNILQRNAIIALANANDRSSIPKLLEIIDKKQNPIHMATAIWALSQLVKQPNEEMVAFIENVQSEHPDVVAEREAFLSFAKELQI

SEQ ID NO: 81349 - protein, 405 aa, Streptococcus downei
  misc_feature (1)..(405): tr|A0A380JDK6|A0A380JDK6_STRDO Iron-sulfur cluster-bind ing protein OS=Streptococcus downei MFe28 OX=764290 GN= queG PE=4 SV=1
MEFRSFYFLTFPTYLLNLSLESWPFLHYDRPMDIKADIQKLAKEIGISKIGFTTADDFAYLEKSLRASVEEGRNSGFEHKNIEERIDPKLSLASAKTIISIAVAYPRQLPTQPPKTQYKRGKITPNSWGLDYHHVLNDKLNRLAKGIEELCADFPLEHKGMVDTGALVDTAVAQRAGIGFIGKNGLVISREYGSYMFLGELITNLEIEPDSPVDYGCGDCRRCLDACPTSCLLGNGSMDAKRCLSFQTQDKGMMAMEFRKKIKTVIYGCDICQICCPYNKGIQNPLATPIDPDLAWPELLPFLDLSNSDFKKKFGQIAGSWRGKNILQRNAIIALANAHDRNAVVKLMEIIDKNNNPIHTATAIWALGEIVKKPDQAIKDYMRDLAPQEEAAKQEWQLVCDKWQI

SEQ ID NO: 81350 - protein, 390 aa, Streptococcus dysgalactiae
  misc_feature (1)..(390): tr|A0A2Z6G5H3|A0A2Z6G5H3_STRDY Epoxyqueuosine reductase OS=Streptococcus dysgalactiae OX=1334 GN=queG PE=4 SV= 1
MSSFRLEVLTYFDYDSSMNIKADIQALAKEIGISKIGFTTADDFSYLEKSLRLGVEEGRTTGFEHKVIEERIKPKLSLASAKTIISIAVAYPHKLPVQPPKTSYKRGKITPNSWGLDYHHVLQDKLQRLAEGIEALTADFEYKGMVDTGALVDTAVARRAGIGFIGKNGLVISKEFGSYMYLGELITNLDIEPDQPVDYDCGDCRRCLDACPTSCLIGDGTMNARRCLSFQTQDKGMMALEFRKKIKTVIYGCDICQICCPYNKGIDNPLASPIDPELAMPELVPFLELSNKSFKKTFGMIAGSWRGKNILQRNAIIALANAHDRSAIPKLLEIIDQNNNPIHTATAIWALGELIKKPNPDMLAFMQDLSLEHEESKEELERLLTKWQKA

SEQ ID NO: 81351 - protein, 390 aa, Streptococcus dysgalactiae
  misc_feature (1)..(390): tr|M4YW55|M4YW55_STREQ Iron-sulfur cluster-binding prot ein OS=Streptococcus dysgalactiae subsp. equisimilis RE 378 OX=617121 GN=GGS_0638 PE=4 SV=1
MSSFRLEVLTYFDYDSSMNIKADIQALAKEIGISKIGFTTADDFSYLEKSLRLGVEEGRTTGFEHKVIEERIKPKLSLTSAKTIISIAVAYPHKLPVQPPKTSYKRGKITPNSWGLDYHHVLQDKLQRLAEGIEALTADFEYKGMVDTGALVDTAVARRAGIGFIGKNGLVISKEFGSYMYLGELITNLDIEPDQPVDYDCGDCRRCLDACPTSCLIGDGTMNARRCLSFQTQDKGMMALEFRKKIKTVIYGCDICQICCPYNKGIDNPLASPIDPELAMPELVPFLELSNQSFKKTFGMIAGSWRGKNILQRNAIIALANAHDRSAIPKLLEIIDQNNNPIHTATAIWALGELIKKPNPDMLAFMKDLALEHEESKEELERLLTKWQKA

SEQ ID NO: 81352 - protein, 372 aa, Streptococcus equinus
  misc_feature (1)..(372): tr|A0A1V0GKA8|A0A1V0GKA8_STREI tRNA epoxyqueuosine(34) reductase QueG OS=Streptococcus equinus OX=1335 GN=queG PE=4 SV=1
MDIKLEIQKMAKEIGISKIGFTTADDFAYLEKSLRLGVEEGRTTGFEHKNIEERIYPKLTLESAKTIISIAVAYPHKLPQQPQKTEYKRGKITPNSWGLDYHYVLQDKLKRLAEGIEKLTENFEYKGMVDTGALVDTAVAKRAGIGFIGKNGLVISKEYGSYMYLGELITNLEIEPDQEVDYGCGDCRRCLDACPTSCLIGDGTMNARRCLSFQTQDKGMMDMEFRKKIKTVIYGCDICQISCPYNRGIDNPLASDIDPELAMPELLPFLELTNKSFKEKFGLIAGSWRGKNILQRNAIIALANLHDRNAIVKLMEIIDKNNNPIHTATAIWALGEIVKKPDEAMLDYMRNLSPKDEDAQAEWELVCAKWQI

SEQ ID NO: 81353 - protein, 374 aa, Streptococcus ferus
  misc_feature (1)..(374): tr|A0A2X3VH59|A0A2X3VH59_9STRE 4Fe-4S ferredoxin OS=Str eptococcus ferus OX=1345 GN=queG PE=4 SV=1
MDIKGDIKKLAAEIGISKIGFTTADDFAYLEKTLRASLEEGRSSGFEHQVIEERLKPKLSLASAKTIISIAVAYPHKLPVKPPKTAYRRGKITPNSWGLDYHHVLQDKLKQLAEGIEKLCQDFPLEHKAMVDTGALVDTAVARRAGIGFIGKNGLVISKEFGSYMYLGELITNLEIEPDRPVDYDCGDCRRCLDACPTSCLMGDGSMNARRCLSFQTQDKGMMDLEFRKKIKTVIYGCDICQICCPYNKGLNNPLASQIDPELAEPELLPFLDLSNRQFKEKFGLIAASWRGKNILQRNAIIALANANDRTAVAKLLEIIDKGQNPIHAATALWSLGELVKQPTEDLVRFIEGIDSQDDNVLTEKRNLLNKWQF

SEQ ID NO: 81354 - protein, 372 aa, Streptococcus henryi
  misc_feature (1)..(372): tr|A0A1G6BML0|A0A1G6BML0_9STRE Epoxyqueuosine reductase OS=Streptococcus henryi OX=439219 GN=SAMN02910293_0110 0 PE=4 SV=1
MDIKAEIQQLAKEIGISKIGFTTADDFSYLEKSLRLGVEEGRTTGFEHKVIEERIHPKLSLESAKTIISIAVAYPHKLPVKAPKTNYKRGKITPNSWGLDYHHVLQDKLNRLAQGIEKLTENFEYKGMVDTGALVDTAVARRAGIGFIGKNGLVISKEFGSYMFLGELITNLDIEPDQPVDYDCGDCRRCLDACPTSCLIGDGTMNARRCLSFQTQDKGMMDMEFRKKIKTVIYGCDICQISCPYNKGINNPLATDIDPELAEPELIPFLELSNKSFKEQFGMIAGSWRGKNILQRNAIIALANSHDRSAVVKLMEIIDKNNNPIHTATAIWALGEIVKKPEETMLDFMRSLNPKEEESQKELALVRAKWQI

SEQ ID NO: 81355 - protein, 313 aa, Streptococcus ictaluri
  misc_feature (1)..(313): tr|G5K0B5|G5K0B5_9STRE Putative iron-sulfur cluster-bin ding protein OS=Streptococcus ictaluri 707-05 OX=764299 GN=STRIC_0035 PE=4 SV=1
MDIKEEIKALAREIGISKIGFTTADDFSYLEKSLRLGVEEGRTTGFEHQNIEERVKPKLSLSSAKTIISIAVAYPHQLPVQPQKTSFKRGKITPNSWGLDYHYVLKDKLDRLAQCIEQLTENFEYKGMVDTGALVDTAVAKRAGIGFIGKNGLVISKEFGSYMYLGELITNLEIEADKPVDYDCGDCRRCLDACPTSCLFGDGTMNARRCLSFQTQDKGMMDLEFRKKIKTVIYGCDICQICCPYNKGINNPLASEIDPDLAMPELIPFLELTNKSFKEKFGMIAGSWRGKIFCNAMPSLPWLMVMPELPWLN

SEQ ID NO: 81356 - protein, 372 aa, Streptococcus iniae
  misc_feature (1)..(372): tr|A0A1J0MZL8|A0A1J0MZL8_STRIN tRNA epoxyqueuosine(34) reductase QueG OS=Streptococcus iniae OX=1346 GN=queG P E=4 SV=1
MEIKAEIIKLAKEIGISKIGFTTADDFSYLEKSLRLGVEEGRTSGFEHKNIEERVKPKLSLASAKTIISIAVAYPHKLPVPPPKTAYKRGKITPNSWGTDYHHVLQDKLSQLAQGIEALTKDFEYKGMVDTGALVDTAVARRAGIGFIGKNGLVISKEFGSYMYLGELITNLDITPDQPVTYDCGDCRRCLDACPTSCLIGDGTMNAKECLSFQTQDKGMMDLKFRKKIKTVIYGCDICQICCPYNKGLSNPLASDIDPELAMPELIPFLELSNKDFKEKFGYIAASWRGKNILQRNAIIALANGHDKSAIIKLMQIIDKNNNPIHTATAIWALGQVIKTPEEPMIAFIRSIKPSDKDSQKELELLLAKWQL

SEQ ID NO: 81357 - protein, 374 aa, Streptococcus macacae
  misc_feature (1)..(374): tr|G5JYQ9|G5JYQ9_9STRE Putative iron-sulfur cluster-bin ding protein OS=Streptococcus macacae NCTC 11558 OX=764 298 GN=STRMA_0323 PE=4 SV=1
MDIKREIKALAKSIGISKIGFTTADDFAYLEKSLRASVEEGRSSGFEHKNIEERIKPKLSLKSAKTIISIAVAYPHKLPSKPPKTQYRRGKITPNSWGLDYHYVLKDKLQRLAQGIEELCQDFSLEHKAMVDTGALVDTAVAQRAGLGFIGKNGLLISKEFGSYMYLGELITNLEIEPDQPVDYDCGDCNRCLEACPTSCLIGDGTMNARRCLSFQTQDKGMMELEFRKKIKTVIYGCDICQICCPYNKGIHNPLASEIDPELAEPELIPFLDLSNSQFKKRFGKIAGSWRGKNILQRNAIIALANAHDRTAIVKLLEIIEKEQNAIHAATAIWALGEIVKKPTEGLYDFILSINSDNKDIMKERDDLLNRWQF

SEQ ID NO: 81358 - protein, 373 aa, Streptococcus merionis
  misc_feature (1)..(373): tr|A0A239SSY8|A0A239SSY8_9STRE (Fe-S)-binding protein O S=Streptococcus merionis OX=400065 GN=queG PE=4 SV=1
MELKEKIIELSREIGISKIGFTTADDFAYLEKSLQASVEEGRNSGFEHKNIEERIKPRLSLASAKTIISIAVAYPHKLPIKPPKSHYKRGKFTPNSWGLDYHHVLQEKLDKLARGIETLTADFEFKGMVDTGALVDTAVARRAGIGFIGKNGLVISKEFGSYMFLGELVTNLEIEPDSPVDYDCGDCTRCLQACPTSCLIGDSTMNAKRCLSFQTQDKGMMDLEFRKKIKTVIYGCDICQICCPYNKGIDNPLATEIDPELAHPELLPFLKLSNGQFKEKFGHVAGSWRGKNILQRNAIIALANANDRSDIPKILEIIDRGQNDIHVATAIWALGELAKNPNPAMIEMVASIKSEHEGILKEQRAFLAKYDQV

SEQ ID NO: 81359 - protein, 373 aa, Streptococcus minor
  misc_feature (1)..(373): tr|A0A3P1VCK4|A0A3P1VCK4_9STRE tRNA epoxyqueuosine(34) reductase QueG OS=Streptococcus minor OX=229549 GN=queG PE=4 SV=1
MNLKEKIIQLSQEIGISKIGFTTADDFAYLEKSLRAGVEEGRTTGFEHKNIEERINPKLSLASARTIISIAVAYPRRLPQQPQKTGFRRGKITPNSWGLDYHYILQDKLERLARGIEDLTADFEYKGMVDTGALVDTAVARRAGIGFIGKNGLVISKEYGSYMFLGELITNLELEPDSPVDYDCGDCNRCVEACPTSCLLGDSTMDARRCLSFQTQDKGMMELEFRKKIKTVIYGCDICQICCPYNKGIDSPPVVDIDPDLAQPELIPFLELSNGQFKEKFGQIAGSWRGKNILQRNAIIALANAHDRSAIPKLLEIIDKGQNPIHAATAIWALGELVKEPTEEMISFIEGIQTDHPDVIVEQAAFVKLAKGL

SEQ ID NO: 81360 - protein, 373 aa, Streptococcus mutans
  misc_feature (1)..(373): tr|A0A2J9QGU1|A0A2J9QGU1_STRMG tRNA epoxyqueuosine(34) reductase QueG OS=Streptococcus mutans OX=1309 GN=queG PE=4 SV=1
MIKEAIKQLAQDIGISKIGFTTADDFDYLEKSLRASVEEGRSSGFEHKNIEERIKPRLSLASAKTIISIAIAYPHKLPVKPPKTQYKRGKITPNSWGLDYHYVLEEKLQRLAQGIESLCQDFPLEHKIMVDTGALVDTAVAQRSGIGFIGKNGLVISKEFGSYMYLGELITNLEIEPDSPVDYDCGDCHRCLDACPTSCLLGDGSMNAKRCLSFQTQDKGMMNLEFRKKIKTVIYGCDICQICCPYNKGIHNPLASEIDPELAEPELLPFLELSNSQFKKKFGMIAGSWRGKNILQRNAIIALANGHDKSALVKLMEIIDKNNNPIHTATAIWALGEIVKKPTQELYDFILSIHSDNDAIIKERTALLNRWQF

SEQ ID NO: 81361 - protein, 373 aa, Streptococcus mutans; identical to SEQ ID NO: 81360
  misc_feature (1)..(373): tr|A0A0E2ENX7|A0A0E2ENX7_STRMG Iron-sulfur cluster-bind ing protein OS=Streptococcus mutans SM6 OX=857119 GN=SM U82_05507 PE=4 SV=1

SEQ ID NO: 81362 - protein, 173 aa, Streptococcus oralis
  misc_feature (1)..(173): tr|A0A139PHI5|A0A139PHI5_STROR Iron-sulfur cluster-bind ing protein OS=Streptococcus oralis OX=1303 GN=SORDD21_ 01899 PE=4 SV=1
MNARRCLSFQTQDKGMMDLEFRKKIKTVIYGCDICQICCPYNRGLDNPLATDIDPELAHPELIPFIELSNGQFKEKFGMVAGSWRGKNILQRNAIIALANANDRSAIPKLLEIIETSQNQIHIATAIWSLGELIREVTPDLVDLLTSLKNPTPAIIEERERFFQKFQYQNSHN

SEQ ID NO: 81363 - protein, 374 aa, Streptococcus pantholopis
  misc_feature (1)..(374): tr|A0A172Q6B3|A0A172Q6B3_9STRE Epoxyqueuosine reductase OS=Streptococcus pantholopis OX=1811193 GN=A0O21_02845 PE=4 SV=1
MDIKGEIKKLAADIGISKIGFAKADNFAYLEKSLRLAVEEKRNSGFEHKVIEDRLDPKRSLASAKTIIAIAVAYPHKLPSKPPKTQYRRGKISPNSWGTDYHHVLQEKLNQLAAGIEALCADFPLEHKAMVDTGALVDTAVARRAGIGFIGKNGLVISKEFGSYMYLGELITNLDLEPDQPVDYGCGDCRRCLDACPTSCLLGDGTMNARRCLSFQTQDKGMMDLEFRKKIKTVIYGCDICQICCPYNKGIMNPPASAIDPDLAMPELQPFLDLSNKSFKEKFGQLAAAWRGKNILQRNAIIALANIHDKSALVKLMEIIDKNNNPIHTATAIWAIGEIVREPDAALLDFLHQLNLKEADSQKELALVFAKWQK

SEQ ID NO: 81364 - protein, 379 aa, Streptococcus parasanguinis
  misc_feature (1)..(379): tr|A0A414K490|A0A414K490_STRPA tRNA epoxyqueuosine(34) reductase QueG OS=Streptococcus parasanguinis OX=1318 G N=queG PE=4 SV=1
MTLKENIIQLAHSIGISKIGFTTADDFDYLEKSLRLAVEEGRNSGFEHKNIEERIHPKLSLSSAKTIISIAVAYPHKLKQQPQKTAYKRGKFTPNSWGLDYHYVLQDKLNRLAAGIEEMTQDFEYKGMVDTGALVDTAVAQRAGIGFIGKNGLVISKEYGSYMFLGELITNLEIEPDQPVDYGCGDCRRCLDACPTSCLIGDGSMNARRCLSFQTQDKGMMDLEFRKKIKTVIYGCDICQISCPYNKGLDNPLATEIDPDLAHPELIPFIELSNGQFKEKFGHIAGSWRGKNILQRNAIIALANANDRSAIPKLLNIIETSQNQIHIATAIWSLGQLLREVTPDLVELLRNIKHPTDAIIEERTAFFEKFGIQADSQLH

SEQ ID NO: 81365 - protein, 382 aa, Streptococcus parasanguinis
  misc_feature (1)..(382): tr|F9M421|F9M421_STRPA Putative iron-sulfur cluster-bin ding protein OS=Streptococcus parasanguinis SK236 OX=10 35185 GN=HMPREF9962_0926 PE=4 SV=1
MKGMTLKENIIQLAHSIGISKIGFTTADDFDYLEKSLRLAVEEGRNSGFEHKNIEERIHPKLSLSSAKTIISIAVAYPHKLKQQPQKTAYKRGKFTPNSWGLDYHYVLQDKLNRLAAGIEEMTQDFEYKGMVDTGALVDTAVAQRAGIGFIGKNGLVISKEYGSYMFLGELITNLEIEPDQPVDYGCGDCRRCLDACPTSCLIGDGSMNARRCLSFQTQDKGMMDLEFRKKIKTVIYGCDICQISCPYNKGLDNPLATEIDPDLAHPELIPFIELSNGQFKEKFGHIAGSWRGKNILQRNAIIALANANDRSAIPKLLNIIETSQNQIHIATAIWSLGQLLREVTPDLVELLRNIKHPTDAIIEERTAFFEKFGIQADSQLH

SEQ ID NO: 81366 - protein, 375 aa, Streptococcus parasuis
  misc_feature (1)..(375): tr|A0A4Q8L069|A0A4Q8L069_9STRE tRNA epoxyqueuosine(34) reductase QueG OS=Streptococcus parasuis OX=1501662 GN= queG PE=4 SV=1
MNIKEEIIKLSQEIGISKIGFTTADDFDYLEKSLRSSQEEGRSSGFEHKNIEERIRPKLSLESAKTIISIAVAYPRHLPVKPQKTQYKRGKITPNSWGLDYHYILQDKMERLARGIEKLTDGLEYKAMVDTGALVDTAVARRAGIGFIGKNGLVISKEFGSYMFLGELVTNLDIEPDQPVDYDCGDCNRCVVACPTSCLLGDTTMNARRCLSFQTQDKGMMDLEFRKKIKTVIYGCDICQICCPYNKGISSPPVVEIDPDLAEPELIPFLDLSNGQFKEKFGMIAGSWRGKNILQRNAIIALANSNDRSAIPKLLEIIDKKQNPIHMATAIWALGQLVKQPNEEMIAFIAGISSDNDDVLAEQAAFLNMVKDLQM

SEQ ID NO: 81367 - protein, 372 aa, Streptococcus parauberis
  misc_feature (1)..(372): tr|A0A1S1ZPI7|A0A1S1ZPI7_9STRE tRNA epoxyqueuosine(34) reductase QueG OS=Streptococcus parauberis OX=1348 GN=B I362_07245 PE=4 SV=1
MEIKVAIQQLAQEIGISKIGFTSADDFAYLEKSLRLSVQEGRNSGFEHKNIEERIRPKLSLESAKTIISIAVAYPHKLPIAPQKTEYKRGKITPNSWGIDYHHVLADKLEKLAQGIEALTADFEYKGMVDTGALVDTAVAKRAGIGFIGKNGLVISKEFGSYMYLGELITNLEIEPDQEVDYGCGDCTRCLDACPTSCLIGDGTMDAKRCLSFQTQDKGMMDLEFRKKIKTVIYGCDICQISCPYNKGISNPLASDIDPDLALPELIPFLELSNKGFKEKFGQIAASWRGKNILQRNAIIALANGHDRTAIVKLMEIIDKNNNPIHTATAIWALGEIVKKPDSAMIDFMATIAITDEQVKKEFELVRAKWQF

SEQ ID NO: 81368 - protein, 372 aa, Streptococcus parauberis
  misc_feature (1)..(372): tr|F1YXW9|F1YXW9_9STRE Putative iron-sulfur cluster-bin ding protein OS=Streptococcus parauberis NCFD 2020 OX=8 73447 GN=SPB_0166 PE=4 SV=1
MEIKVAIQQLAQEIGISKIGFTSADDFAYLEKSLRLSIEEGRNSGFEHKNIEERIRPKLSLESAKTIISIAVAYPHKLPIAPQKTEYKRGKITPNSWGIDYHHVLADKLEKLAQGIEALTADFEYKGMVDTGALVDTAVAKRAGIGFIGKNGLVISKEFGSYMYLGELITNLEIEPDQEVDYGCGDCTRCLDACPTSCLIGDGTMDAKRCLSFQTQDKGMMDLEFRKKIKTVIYGCDICQISCPYNKGISNPLASDIDPDLALPELIPFLELSNKGFKEKFGQIAASWRGKNILQRNAIIALANGHDRTAIVKLMEIIDKNNNPIHTATAIWALGEIVKKPDSVMIDFMATIAITDEQVKKEFELVRAKWQF

SEQ ID NO: 81369 - protein, 372 aa, Streptococcus penaeicida
  misc_feature (1)..(372): tr|A0A2N8LDM4|A0A2N8LDM4_9STRE Epoxyqueuosine reductase OS=Streptococcus penaeicida OX=1765960 GN=AT575_02050 PE=4 SV=1
MELKAEIKKLAKEIGISKIGFTTADDFSYLEKSLRLGLEEGRTTGFEHKVIEERIKPKLSLASAKTIISIAVAYPHKLPIQPQKTQYKRGKITPNSWGTDYHHVLQEKLSQLAEAIEKLTEDFEYKGMVDTGALVDTAVARRAGIGFIGKNGLVISKEFGSYMYLGELITNLDIEPDQPVDYGCGDCRRCLDACPTSCLIGDGTMNAKRCLSFQTQDKGMMDLEFRKKIKTVIYGCDICQIACPYNKGISNPLASEINPDLAQPELIPFLELSNKDFKSKFGQIAASWRGKNILQRNAIIALANGHDRTAIIKLMEIIDKNNNPIHTATAIWALGELIKKPDDIMLDYMRGLSPKEEESQKELEMLRAKWQF

SEQ ID NO: 81370 - protein, 376 aa, Streptococcus pharyngis
  misc_feature (1)..(376): tr|A0A5C5SGL7|A0A5C5SGL7_9STRE tRNA epoxyqueuosine(34) reductase QueG OS=Streptococcus pharyngis OX=1562651 GN =queG PE=4 SV=1
MSIKEDIQQLAKEIGISKIGFTTADDFAYLEKSLRLAYENGTNSGFEHKNIEERIDPKLSLASAKTIISIAVAYPNKLPIPPQKSDYKRGKFTPNSWGIDYHHVLQDKLNRLARGIEELCADFPLEHKAMVDTGALVDTAVARRAGIGFIGKNGLVISKEYGSYMYLGELITNLEIEPDQPVDYDCGDCRRCLDACPTSCLNGDGTMNAKRCLSFQTQDKGMMDLEFRKKIKTVIYGCDICQICCPYNKGINNPLASEIDPELAHPELLPFLELSNKTFKEKFGMIAGAWRGKNILQRNAIIALANAHDRSAIIKLLEIIEKKQNPIHVATAIWALGEIVRQPSEDLIELIRDLSSDHEDILTEKERLLKKWQVLA

SEQ ID NO: 81371 - protein, 372 aa, Streptococcus pluranimalium
  misc_feature (1)..(372): tr|A0A345VL56|A0A345VL56_9STRE Epoxyqueuosine reductase OS=Streptococcus pluranimalium OX=82348 GN=queG PE=4 S V=1
MDIKVEIQKLAKEIGISKIGFTTADDFGYLEKTLRAGVEEGRTTGFEHKVIEERIKPKLSLESAKTIISIAVAYPNKLPVKPPKTQYKRGKITPNSWGLDYHYVLQDKLNRLAKGIEELTEDFEYKGMVDTGALVDTAVAKRAGIGFIGKNGLVISKEFGSYMYLGELITNLEIEPDQEVDYGCGDCTRCLEACPTSCLIGDGTMNARRCLSFQTQDKGMMDMEFRKKIKTVIYGCDICQICCPYNRGIDNPLASEIDPELAHPELIPFLELTNKSFKEQFGMIAGSWRGKNILQRNAIIALANAHDRSAVVKLVEIIDKNNNPIHTATAIWALGEIIKKPDEAMLDFMRSLSLKEEDSLKELELVRQKWQF

SEQ ID NO: 81372 - protein, 372 aa, Streptococcus pluranimalium
  misc_feature (1)..(372): tr|A0A2L0D4W8|A0A2L0D4W8_9STRE tRNA epoxyqueuosine(34) reductase QueG OS=Streptococcus pluranimalium OX=82348 GN=queG PE=4 SV=1
MDIKVEIQKLAKEIGISKIGFTTADDFGYLEKTLRAGVEEGRTTGFEHKVIEERIKPKLSLESAKTIISIAVAYPNKLPVKPPKTQYKRGKITPNSWGLDYHYVLQDKLNRLAKGIEELTENFEYKGMVDTGALVDTAVAKRAGIGFIGKNGLVISKEFGSYMYLGELITNLEIEPDQEVDYGCGDCTRCLEACPTSCLIGDGTMNARRCLSFQTQDKGMMDMEFRKKIKTVIYGCDICQICCPYNRGIDNPLASEIDPELAHPELIPFLELTNKSFKEQFGMIAGSWRGKNILQRNAIIALANAHDRSAVVKLVEIIDKNNNPIHTATAIWALGEIIKKPDEAMLDFMRSLSLKEEDSLKELELVRQKWQF

SEQ ID NO: 81373 - protein, 379 aa, Streptococcus pneumoniae; identical to SEQ ID NO: 80927
  misc_feature (1)..(379): tr|A0A4U9M4C8|A0A4U9M4C8_STREE Epoxyqueuosine reductase OS=Streptococcus pneumoniae OX=1313 GN=queG PE=3 SV=1

SEQ ID NO: 81374 - protein, 373 aa, Streptococcus pneumoniae; identical to SEQ ID NO: 81258
  misc_feature (1)..(373): tr|A0A111BU32|A0A111BU32_STREE Epoxyqueuosine reductase OS=Streptococcus pneumoniae OX=1313 GN=queG PE=3 SV=1

SEQ ID NO: 81375 - protein, 372 aa, Streptococcus porcinus
  misc_feature (1)..(372): tr|A0A4U9XIU7|A0A4U9XIU7_STRPO Iron-sulfur protein OS=S treptococcus porcinus OX=1340 GN=queG_1 PE=4 SV=1
MELKAEIIKLAKEIGISKIGFTTADDFSYLEKSLKLALEEDRTSGFEHKVIEERIKPKLSLASAKTIISIAVAYPHKLPVRAQKTQYKRGKITPNSWGLDYHYVLQDKLQRLAAGIEVLTQDFEYKGMVDTGALVDTAVARRAGIGFIGKNGLVISKEFGSYMYLGELITNLDIEPDQPVDYDCGDCRRCLDACPTSCLIGDGTMNAKRCLSFQTQDKGMMALEFRKKIKTVIYGCDICQICCPYNKGLNNPLASKIDPDLAEPELIPFLELSNKEFKAKFGHIAASWRGKNILQRNVIIALANGHDRSAIVKLMEIIDKQNNPIHVATAIWALGELIKKPNQEMIAYMQSLSPKDLDSQKELDSLRAKWQF

SEQ ID NO: 81376 - protein, 372 aa, Streptococcus porcinus
  misc_feature (1)..(372): tr|A0A4U9XXY7|A0A4U9XXY7_STRPO Iron-sulfur protein OS=S treptococcus porcinus OX=1340 GN=queG PE=4 SV=1
MELKAEIIKLAKEIGISKIGFTTADDFSYLEKSLKLALEEDRTSGFEHKVIEKRIKPKLSLASARTIISIAVAYPHKLPVRAQKTQYKRGKITPNSWGLDYHYVLQDKLQRLAAGIEALTQDFEYKGMVDTGALVDTAVARRAGIGFIGKNGLVISKEFGSYMYLGELITNLDIEPDQPVDYDCGDCRRCLDACPTSCLIGDGTMNAKRCLSFQTQDKGMMALEFRKKIKTVIYGCDICQICCPYNKGLNNPLASKIDPDLAEPELIPFLELSNKEFKAKFGHIAASWRGKNILQRNVIIALANGHDRSAIVKLMEIIDKQNNPIHVATAIWTLGELIKKPNQEMIAYMQSLSPKDLDSQKELESLRTKWQF

SEQ ID NO: 81377 - protein, 268 aa, Streptococcus pseudoporcinus
  misc_feature (1)..(268): tr|G5K6J5|G5K6J5_9STRE 4Fe-4S ferredoxin-type domain-co ntaining protein OS=Streptococcus pseudoporcinus LQ 940 -04 OX=875093 GN=STRPS_0082 PE=4 SV=1
MQDKLQRLAAGIEALTQDFEYKGMVDTGALVDTAVARRAGIGFIGKNGLVISKEFGSYMYLGELITNLDIEPDQPVDYDCGDCRRCLDACPTSCLIGDGTMNAKRCLSFQTQDKGMMALEFRKKIKTVIYGCDICQICCPYNKGLNNPLASKIDPDLAEPELIPFLELSNKEFKAKFGHIAASWRGKNILQRNVIIALANGHDRSAIVKLMEIIDKQHNPIHVATAIWALGELIKKPNQEMIAYMQSLSPKDLDSQKELESLRTKWQF

SEQ ID NO: 81378 - protein, 374 aa, Streptococcus pyogenes
  misc_feature (1)..(374): tr|A0A4U9BWZ6|A0A4U9BWZ6_STRPY Iron-sulfur cluster-bind ing protein OS=Streptococcus pyogenes OX=1314 GN=queG P E=4 SV=1
MTIKAEIKALAKEIGISKIGFTTADNFDYLEKSLRASVEEGRNSGFEHKVIEDRISPERLLESAKTIISIGVAYPHKLPQQPQKTPYKRGKITPSSWGLDYHYVVGEKLDRLSKGIEELCRDFPLQQKAMVDTGALVDTAVAQRAGIGFIGKNGLVISKEYGSYMFLGELITNLEIEPDKPVDYDCGDCRRCLDACPTSCLIGDGSMNAKRCLSFQTQDKGMMDIEFRKKIKTVIYGCDICQICCPYNKGINNPPATEIDPELAQPELIPFLSLSNGKFKEKFGMIAGSWRGKNILQRNAIIALANAHDKTAVVKLIEIIDKNNNPIHTATAIWALGEIVKKPNDEILAFMSHLTLKDEDSRKELELIRHKWQF

SEQ ID NO: 81379 - protein, 374 aa, Streptococcus pyogenes
  misc_feature (1)..(374): tr|A0A0E1EPC5|A0A0E1EPC5_STRPY Epoxyqueuosine reductase OS=Streptococcus pyogenes STAB902 OX=1437007 GN=STAB90 2_07565 PE=4 SV=1
MTIKAEIKALAKEIGISKIGFTTADNFDYLEKSLRASVEEGRNSGFEHKVIEDRISPERLLESAKTIISIGVAYPHKLPQQPQKTPYKRGKITPSSWGLDYHYVVGEKLDRLSKGIEELCRDFPLQQKAMVDTGALVDTAVAQRAGIGFIGKNGLVISKEYGSYMFLGELITNLEIEPDKPVDYDCGDCRRCLDACPTSCLIGDGSMNAKRCLSFQTQDKGMMDIEFRKKIKTVIYGCDICQICCPYNKGINNSPATEIDPELAQPELIPFLSLSNGQFKEKFGMIAGSWRGKNILQRNAIIALANAHDKTAVVKLIEIIDKNNNPIHTATAIWALGEIVKKPNDEILAFMSHLTLKDEDSQKELELIRHKWQV

SEQ ID NO: 81380 - protein, 372 aa, Streptococcus ratti
  misc_feature (1)..(372): tr|A0A5J6NM96|A0A5J6NM96_STRRT tRNA epoxyqueuosine(34) reductase QueG OS=Streptococcus ratti OX=1341 GN=queG P E=4 SV=1
MNIKEEIQRLAREIGISKIGFTTADDFAYLEKSLRASVEEGRSSGFEHKNIEERIKPKLSLASAKTIISIAVAYPHKLPVKPPKTQYRRGRITPNSWGLDYHYVLQDKLKQLADGIERLTENFEYKGMVDTGALVDTAVARRAGIGFIGKNGLVISKEFGSYMYLGELITNLEIEPDSPVDYDCGDCRRCLDACPTSCLLGDGTMNAKRCLSFQTQDKGMMDLEFRKKIKTVIYGCDICQICCPYNKGLDNPLASAIDPELAEPELIPFLNLSNSQFKKTFGMIAGSWRGKNILQRNAIIALANAHDKNAVVKLLEIIDSSQNPIHAATAIWALGEIVKKPTEELRNFILSIDSDNDAIIKEREAVINRWQF

SEQ ID NO: 81381 - protein, 372 aa, Streptococcus ratti; identical to SEQ ID NO: 81380
  misc_feature (1)..(372): tr|J3JNY9|J3JNY9_STRRT (Fe-S)-binding protein OS=Strept ococcus ratti FA-1 = DSM 20564 OX=699248 GN=D822_00175 PE=4 SV=1

SEQ ID NO: 81382 - protein, 377 aa, Streptococcus rubneri
  misc_feature (1)..(377): tr|A0A4Z1DWS0|A0A4Z1DWS0_9STRE tRNA epoxyqueuosine(34) reductase QueG OS=Streptococcus rubneri OX=1234680 GN=q ueG PE=4 SV=1
MNLKESIIELAHSIGISKIGFTTADDFSYLEKSLRLAVEEGRNSGFEHKNIEERIQPRLSLASAKTIISIAVAYPHKLKQQPQKTAYKRGKFTPNSWGLDYHYVLQDKLDRLARGIEELTADFEYKGMVDTGALVDTAVAQRAGIGFIGKNGLVISKEYGSYMFLGELITNLEIEPDQAVDYGCGDCNRCVEACPTSCLIGDGTMNARRCLSFQTQDKGMMDLEFRKKIKTVIYGCDICQICCPYNRGLDNPLATDIDPELAHPELIPFIELSNGQFKEKFGMVAGSWRGKNILQRNAIIALANANDRSAIPKLLEIIETSQNQIHIATAIWSLGELIREVTPDLVDLLTSLKKPSPAIIEERERFFQKFQHQISHN

SEQ ID NO: 81383 - protein, 399 aa, Streptococcus salivarius
  misc_feature (1)..(399): tr|A0A2I1Z8I0|A0A2I1Z8I0_STRSL tRNA epoxyqueuosine(34) reductase QueG OS=Streptococcus salivarius OX=1304 GN=q ueG PE=4 SV=1
MIPFLNHSPSWHFSAIIKRMNIKEEIINLAKEIGISKIGFTTADDFDYLEKSLRLAVEEGRNSGFEHKNIEERIKPKLSLASAKTIISIAVAYPHKLKQQPQKTAYKRGKFTPNSWGLDYHYVLQDKLDRLAKGIEELTADFEYKGMVDTGALVDTAVAQRAGIGFIGKNGLVISKEFGSYMFLGELITNLDIEPDQPVDYGCGDCNRCVTACPTSCLIGDGSMNAKRCLSFQTQDKGVMDLEFRKKIKTVIYGCDICQICCPYNKGLDNPLATEIDPDLSHPELLPFLELSNGQFKEKFGHVAGSWRGKNILQRNAIIALANANDRSAIPKMLEIIDKEQNPIHVVTAIWALSQLVREVHPEMIELVMGIKNPTPQIQEEQGRFLEKFGLEEKLVLEN

SEQ ID NO: 81384 - protein, 372 aa, Streptococcus salivarius
  misc_feature (1)..(372): tr|C2LSB0|C2LSB0_STRSL Putative iron-sulfur cluster-bin ding protein OS=Streptococcus salivarius SK126 OX=59632 2 GN=STRSA0001_1824 PE=4 SV=1
MDIKLEIQKMAKEIGISKIGFTTADDFAYLEKSLRLGVEEGRTTGFEHKNIEERIYPKLTLESAKTIISIAVAYPHKLPQQPPKTEFKRGKITPNSWGLDYHYVLQDKLKRLAEGIEKLTENFEYKGMVDTGALVDTAVAKRAGIGFIGKNGLVISKEYGSYMYLGELITNLEIEPDQEVDYGCGDCRRCLDACPTSCLIGDGTMNARRCLSFQTQDKGMMDMEFRKKIKTVIYGCDICQISCPYNRGIDNPLASEIDPELAMPELLPFLELTNKSFKEKFGMIAGSWRGKNILQRNAIIALANLHDRNAIVKLMEIIDKNNNPIHTATAIWALGEIVKKPDEAMLDYMRELSPKDEESQAEWELVCAKWQI

SEQ ID NO: 81385 - protein, 399 aa, Streptococcus sanguinis
  misc_feature (1)..(399): tr|A0A3P1S9R3|A0A3P1S9R3_STRSA tRNA epoxyqueuosine(34) reductase QueG OS=Streptococcus sanguinis OX=1305 GN=qu eG PE=4 SV=1
MIPFLNHSPSWHFSAIIIRMNIKEEIINLAKKIGISKIGFTTADDFDYLEKSLRLAVEEGRNSGFEHKNIEERIKPKLSLASAKTIISIAVAYPHKLKQQPQKTAYKRGKFTPNSWGLDYHYVLQDKLDRLAKGIEELTADFEYKGMVDTGALVDTAVAQRAGIGFIGKNGLVISKEFGSYMFLGELITNLDIEPDQPVDYGCGDCNRCVTACPTSCLIGDGSMNAKRCLSFQTQDKGVMDLEFRKKIKTVIYGCDICQICCPYNKGLGNPLATEIDPDLSHPELLPFLELSNGQFKEKFGHVAGSWRGKNILQRNAIIALANANDRSAIPKMLEIIDKGQNPIHVATAIWALSQLVREVHPEMIELVMNVKNPTPQIQEEQGRFLEKFGLEEKLVIEN

SEQ ID NO: 81386 - protein, 380 aa, Streptococcus sanguinis
  misc_feature (1)..(380): tr|E8KR99|E8KR99_STRSA Putative iron-sulfur cluster-bin ding protein OS=Streptococcus sanguinis VMC66 OX=888825 GN=HMPREF9398_1906 PE=4 SV=1
MNIKEEIINLAKEIGISKIGFTTADDFDYLEKSLRLAVEEGRNSGFEHKNIEERIKPKLSLASAKTIISIAVAYPHKLKQQPQKTAYKRGKFTPNSWGLDYHYVLQDKLDRLAKGIEELTADFEYKGMVDTGALVDTAVAQRAGIGFIGKNGLVISKEFGSYMFLGELITNLDIEPDQPVDYGCGDCNRCVTACPTSCLIGDGSMNAKRCLSFQTQDKGVMDLEFRKKIKTVIYGCDICQICCPYNKGLDNPLATEIDPDLSHPELLPFLELSNGQFKEKFGHVAGSWRGKNILQRNAIMALANANDRSAIPKLLEIIDKGQNPIHVATAIWALCQLVREVHPEMIELVMNVKNPTPQIQEEQGRFLEKFGLKEKLMIEN

SEQ ID NO: 81387 - protein, 374 aa, Streptococcus sobrinus
  misc_feature (1)..(374): tr|U2KGL7|U2KGL7_9STRE Putative iron-sulfur cluster-bin ding protein OS=Streptococcus sobrinus W1703 OX=1227275 GN=HMPREF1557_01961 PE=4 SV=1
MDIKAEIQKLAKNLGISKIGFTTAEDFAYLERSLRASVEEGRNSGFEHKNIEERIDPKLSLASAKTIISIAVAYPRQLPTQPPKTQYKRGKITPNSWGLDYHHVLNDKLNRLARGIEELCAEFPLEHKAMVDTGALVDTAVAKRAGIGFIGKNGLVISKEYGSYMFLGELITNLEIEPDSPVDYGCGDCRRCLDACPTSCLLGNGSMDAKRCLSFQTQDKGMMAMEFRKKIKTVIYGCDICQICCPYNKGIQNPLATPIDPDLAWPELLPFLELSNSDFKKKFGEIAGSWRGKNILQRNAIIALANAHDKNAIVKLMEIIDRNNNPIHTATAIWALGEIVKKPDQAIKDYMQDLDPQEDAARQEWQLVCDKWQI

SEQ ID NO: 81388 - protein, 41 aa, Streptococcus sp.
  misc_feature (1)..(41): tr|A0A496JU37|A0A496JU37_STRSP tRNA epoxyqueuosine(34) reductase QueG (Fragment) OS=Streptococcus sp. OX=1306 GN=D8H99_66725 PE=4 SV=1
MNIKEEIIKLSKDIGISKIGFTTADDFDYLEKSLRLAVEEG

SEQ ID NO: 81389 - protein, 374 aa, Streptococcus sp.
  misc_feature (1)..(374): tr|A0A346NDD6|A0A346NDD6_9STRE tRNA epoxyqueuosine(34) reductase QueG OS=Streptococcus sp. Z15 OX=2173853 GN=q ueG PE=4 SV=1
MDIKEEIKELAADIGISKIGFTKADDFAYLEKSLRLAVAEKRNSGFEHKIIEDRLDPKRSLASAKTIIAIAVAYPHKLSIKPPKTQYRRGKITPNSWGVDYHQVLQDKLKRLAEGIEQLCADFSFEHKAMVDTGALVDTAVARRAGIGFIGKNGLVISKEFGSYMYLGELITNLDIEPDQPVDYDCGDCRRCLDACPTSCLIGDGSMNARRCLSFQTQDKGMMALEFRKKIKTVIYGCDICQICCPYNKGIDNPPASAIDPELAMPELLPFLELTNKSFKEQFGLLAAAWRGKNILQRNAIIALANIHDKSALVKLMEIIDKNNNPVHTATAIWAIGEIVRKPDAALLDFLHHLNLKEEDSQKELAAVLAKWQN

SEQ ID NO: 81390 - protein, 378 aa, Streptococcus suis
  misc_feature (1)..(378): tr|A0A0Z8H4X1|A0A0Z8H4X1_STRSU 4Fe-4S ferredoxin OS=Str eptococcus suis OX=1307 GN=queG PE=4 SV=1
MNVMNIKEEIIKLSQEIGISKIGFTTADDFAYLEKSLRASQEEGRSSGFEHKNIEERIRPKLSLESAKTIISIAVAYPRHLPVKPQKTQYKRGKITPSSWGLDYHYILQDKMERLARGIEKLTDGLEYKAMVDTGALVDTAVARRAGIGFIGKNGLVISKEFGSYMFLGELVTNLDIEPDQPVDYDCGDCNRCVAACPTSCLLGDTTMNARRCLSFQTQDKGMMDLEFRKKIKTVIYGCDICQICCPYNKGISSPPVVEIDPELAEPELIPFLDLSNGQFKEKFGLIAGSWRGKNILQRNAIIALANSNDRSAIPKLLEIIDKKQNPVHMATAIWALGQLVKQPNDEMVSFIAGISSDNDDVIAEQTAFLNMVKDLQM

SEQ ID NO: 81391 - protein, 375 aa, Streptococcus suis
  misc_feature (1)..(375): tr|U5UE40|U5UE40_STRSU 4Fe-4S ferredoxin-type domain-co ntaining protein OS=Streptococcus suis T15 OX=1340847 G N=T15_0537 PE=4 SV=1
MNIKEEIIKLSQEIGISKIGFTTADDFAYLEKSLRASQEEGRSSGFEHKNIEERIRPKLSLESAKTIISIAVAYPRHLPVKPQKTQYKRGKITPSSWGLDYHYILQDKMERLARGIEKLTDGLEYKAMVDTGALVDTAVARRAGIGFIGKNGLVISKEFGSYMFLGELVTNLEIEPDQPVDYDCGDCNRCVAACPTSCLLGDTTMNARRCLSFQTQDKGMMDLEFRKKIKTVIYGCDICQICCPYNKGISSPPVVEIDPELAEPELIPFLDLSNGQFKEKFGLIAGSWRGKNILQRNAIIALANSNDRSAIPKLLEIIDKKQNPVHMATAIWALGQLVKQPNDEMVDFIASIKSDNADVLAEQTAFLNMVNSLQM

SEQ ID NO: 81392 - protein, 372 aa, Streptococcus thermophilus
  misc_feature (1)..(372): tr|A0A0R4I997|A0A0R4I997_STRTR Epoxyqueuosine reductase OS=Streptococcus thermophilus OX=1308 GN=MNA02_1104 PE =1 SV=1
MNIKLEIQKMAKEIGISKIGFTTADDFDYLEKSLRLGVEEGRTTGFEHKNIEERIYPKLSLESAKTIISIAVAYPHKLPQQPQKTEFKRGKITPNSWGLDYHYVLQDKLKRLAKGIEKLTENFEYKGMVDTGALVDTAVAKRAGIGFIGKNGLVISKEYGSYMYLGELITNLEIEPDQEVDYGCGDCRRCLDACPTSCLIGDGTMNARRCLSFQTQDKGMMDMEFRKKIKTVIYGCDICQISCPYNRGIDNPLASDIDPDLAMPELLPFLELTNKSFKETFGMIAGSWRGKNILQRNAIIALANLHDRNAIVKLMEIIDKNNNPIHTATAIWALGEIVKKPDEGMLDYMRGLSPKDEHSQAEWELVCAKWQI

SEQ ID NO: 81393 - protein, 372 aa, Streptococcus thermophilus
  misc_feature (1)..(372): tr|A0A0E2RH03|A0A0E2RH03_STRTR Iron-sulfur cluster-bind ing protein OS=Streptococcus thermophilus TH1477 OX=143 6725 GN=Y022_05720 PE=4 SV=1
MNIKLEIQKMAKEIGISKIGFTTADDFDYLEKSLRLGVEEGRTTGFEHKNIEERIYPKLSLESAKTIISIAVAYPHKLPQQPQKTEFKRGKITPNSWGLDYHYVLQDKLKRLAKGIEKLTENFEYKGMVDTGALVDTAVAKRAGIGFIGKNGLVISKEYGSYMYLGELITNLEIEPDQEVDYGCGDCRRCLDACPTSCLIGDGTMNARRCLSFQTQDKGMMDMEFRKKIKTVIYGCDICQISCPYNRGIDNPLASDIDPELAMPELLPFLELTNKSFKETFGMIAGSWRGKNILQRNAIIALANLHDRNAIVKLMEIIDKNNNPIHTATAIWALGEIVKKPDEAMLDYMRGLSPKDEHSQAEWELVCAKWQI

SEQ ID NO: 81394 - protein, 374 aa, Streptococcus troglodytae
  misc_feature (1)..(374): tr|A0A1L7LIH6|A0A1L7LIH6_9STRE 4Fe-4S ferredoxin OS=Str eptococcus troglodytae OX=1111760 GN=SRT_07360 PE=4 SV= 1
MMIKEAIKQLAQDIGISKIGFTTADDFDYLEKSLRASVEEGRSSGFEHKNIEERIKPRLSLASAKTIISIAVAYPHKLPVKPPKTQYKRGKITPNSWGLDYHYVLEEKLQRLAQGIESLCQDFPLEHKIMVDTGALVDTAVAQRSGIGFIGKNGLVISKEFGSYMYLGELITNLEIEPDSPVDYDCGDCHRCLDACPTSCLLGDGSMNAKRCLSFQTQDKGMMDLEFRKKIKTVIYGCDICQICCPYNKGIHNPLASEIDPELAEPELLPFLELSNSQFKKKFGMIAGSWRGKNILQRNAIIALANGHDKSALVKLMEIIDKNNNPIHTATAIWALGEIVKKPTQELYDFILSIHSDNDAIIKERTALLNRWQF

SEQ ID NO: 81395 - protein, 372 aa, Streptococcus uberis
  misc_feature (1)..(372): tr|A0A380MFE1|A0A380MFE1_STRUB Iron-sulfur protein OS=S treptococcus uberis OX=1349 GN=queG PE=4 SV=1
MDIKAEIITLAHEIGISKIGFTTADDFSYLEKSLRLAVEEGRNSGFEHKVIEERIQPKLSLSSAKTIISIAVAYPHKLPISPQKTAFKRGKITPNSWGNDYHNVLQEKMQQLAEGIETLTQDFEYKGMVDTGALVDTAVARRAGIGFIGKNGLVISKEFGSYMYLGELITNLEIEPDQPVDYDCGDCRRCLDACPTSCLIGDGTMNAKRCLSFQTQDKGMMDLEFRKKIKTVIYGCDICQICCPYNKGISNPLASAIDPDLAMPELIPFLELSNKSFKEKFGHIAAAWRGKNILQRNAIIALANGHDRTAIVKLMEIIDKNNNPIHTATAIWALGEIVKKPDQAMLDFVLSIKPKEDESQKELELLLAKWQL

SEQ ID NO: 81396 - protein, 372 aa, Streptococcus uberis
  misc_feature (1)..(372): tr|B9DRN5|B9DRN5_STRU0 Putative iron-sulphur protein OS =Streptococcus uberis (strain ATCC BAA-854 / 0140J) OX= 218495 GN=SUB0620 PE=4 SV=1
MDIKAEIIRLAHEIGISKIGFTTADDFSYLEKSLRLAVEEGRNSGFEHKVIEERIQPKLSLSSAKTIISIAVAYPHKLPISPQKTAFKRGKITPNSWGNDYHHVLQEKMQQLAEGIEILTQDFEYKGMVDTGALVDTAVARRAGIGFIGKNGLVISKEFGSYMYLGELITNLEIEPDQPVDYDCGDCRRCLDACPTSCLIGDGTMNAKRCLSFQTQDKGMMDLEFRKKIKTVIYGCDICQICCPYNKGISNPLASAIDPDLAMPELIPFLELSNKSFKEKFGHIAAAWRGKNILQRNAIIALANGHDRTAIVKLMEIIDKNNNPIHTATAIWALGEIVKKPDQAMLDFVLSIKPKEDESQKELELLLAKWQL

SEQ ID NO: 81397 - protein, 372 aa, Streptococcus urinalis
  misc_feature (1)..(372): tr|G5KHF9|G5KHF9_9STRE Putative iron-sulfur cluster-bin ding protein OS=Streptococcus urinalis 2285-97 OX=76429 1 GN=STRUR_1473 PE=4 SV=1
MDIKAEIQELAKSIGISKIGFTTADDFDYLEKSLRLGVEEGRNSGFEHKIIEERIKPKLSLDSAKTIISIAVAYPHKLPVQPPETQFKRGKITPNSWGLDYHYVLQEKLDKLAKGIEKLTENFEYKGMVDTGALVDTAVARRAGIGFIGKNGLVISKEFGSYMFLGELITNLEIEPDQPVDYDCGDCRRCLDACPTSCLIGDGTMNAKRCLSFQTQDKGMMDLEFRKKIKTVIYGCDICQICCPYNKGISNPLATEIDPELAQPELIPFLQLSNKGFKEKFGKIAGSWRGKNILQRNAIIALANAHDKNAVVYLLEIIDKNNNPIHTATAIWAIGEIVKKPEQDLIDFMTNLSFENNNCQNELNELVTKWQF

SEQ ID NO: 81398 - protein, 373 aa, Streptococcus varani
  misc_feature (1)..(373): tr|A0A0E4CSQ4|A0A0E4CSQ4_9STRE (Fe-S)-binding protein O S=Streptococcus varani OX=1608583 GN=BN1356_01247 PE=4 SV=1
MNLKEKIIQVSQEIGISKIGFTTADDFAYLEKSLRAGVEEGRTTGFEHKNIEERIDPKFSLASAKTIISIAIAYPRRLPQKPQKTQYRRGKITPNSWGLDYHYIVQDKLERLARAIEELTADFEYKGMVDTGALVDTAVARRAGIGFIGKNGLVISKEFGSYMFLGELVTNLVIEADSPVDYDCGDCNRCVTACPTSCLLGDSTMDARRCLSFQTQDKGMMDLEFRKKMKTVIYGCDVCQICCPYNKGIDSPPVVAIDPDLAQPELLPFLELSNGQFKEKFGMIAGSWRGKNILQRNAIIALANAHDRSAIPKLLEIIDKMQNPIHAATAIWALGQLIKEPDEGMVSFVQEIKSDHPEVLAEQAAFLKIAKGL

SEQ ID NO: 81399 - protein, 372 aa, Streptococcus vestibularis
  misc_feature (1)..(372): tr|A0A3E4X990|A0A3E4X990_STRVE tRNA epoxyqueuosine(34) reductase QueG OS=Streptococcus vestibularis OX=1343 GN =queG PE=4 SV=1
MDIKLEIQKMAKEIGISKIGFTTADDFAYLEKSLRLGVEEGRTTGFEHKNIEERIYPKLTLESAKTIISIAVAYPHKLPQQPQKTEFKRGKITPNSWGLDYHYVLQDKLKRLAEGIEKLTENFEYKGMVDTGALVDTAVAQRAGIGFIGKNGLVISKEYGSYMYLGELITNLEIEPDQEVDYGCGDCRRCLDACPTSCLIGDGTMNARRCLSFQTQDKGMMDMEFRKKIKTVIYGCDICQISCPYNRGIDNPLASDIDPELAMPELLPFLELTNKSFKEKFGMIAGSWRGKNILQRNAIIALANLHDRNAIVKLMEIIDKNNNPIHTATAIWALGEIVKKPDEAMLDYMRELSPKDEESQAEWELVCAKWQI

SEQ ID NO: 81400 - protein, 372 aa, Streptococcus vestibularis
  misc_feature (1)..(372): tr|E3CP28|E3CP28_STRVE Putative iron-sulfur cluster-bin ding protein OS=Streptococcus vestibularis F0396 OX=904 306 GN=HMPREF9192_1643 PE=4 SV=1
MDIKLEIQKMAKEIGISKIGFTTADDFAYLEKSLRLGVEEGRTTGFEHKNIEERIYPKLTLESAKTIISIAVAYPHKLPQQPPKTEYKRGKITPNSWGLDYHYVLQDKLKRLAEGIEKLTENFEYKGMVDTGALVDTAVAKRAGIGFIGKNGLVISKEYGSYMYLGELITNLEIEPDQEVDYGCGDCRRCLDACPTSCLIGDGTMNARRCLSFQTQDKGMMDMEFRKKIKTVIYGCDICQISCPYNRGIDNPLASDIDPELAMPELLPFLELTNKSFKEKFGMIAGSWRGKNILQRNAIIALANLHDRNAIVKLMEIIDKNNNPIHTATAIWALGEIVKKPDEAMLDYMSNLSLKDEDAQAEWELVCAKWQI

SEQ ID NO: 81401 - protein, 377 aa, Streptococcus viridans
  misc_feature (1)..(377): tr|A0A3S4LB53|A0A3S4LB53_9STRE Iron-sulfur cluster-bind ing protein OS=Streptococcus viridans OX=78535 GN=queG PE=4 SV=1
MNLKESIIELAHSIGISKIGFTTADDFSYLEKSLRLAVEEGRNSGFEHKNIEERIQPRLSLASAKTIISIAVAYPHKLKQQPQKTAYKRGKFTPNSWGLDYHYVLQDKLDRLARGIEELTADFEYKGMVDTGALVDTAVAQRAGIGFIGKNGLVISKEYGSYMFLGELITNLEIEPDQAVDYGCGDCNRCVEACPTSCLIGDGTMNARRCLSFQTQDKGMMDMEFRKKIKTVIYGCDICQICCPYNRGLDNPLATDIDPELAHPELIPFIELSNGQFKEKFGMVAGSWRGKNILQRNAIIALANANDRSAIPKLLEIIETSQNQIHIATAIWSLGELIREVTPDLVDLLTSLKNPSPAIIEERERFFQKFQHQISHN

SEQ ID NO: 81402 - protein, 380 aa, Streptohalobacillus salinus
  misc_feature (1)..(380): tr|A0A2V3WK32|A0A2V3WK32_9BACI Epoxyqueuosine reductase OS=Streptohalobacillus salinus OX=621096 GN=DES38_1011 09 PE=4 SV=1
MANEQLKEKIIDYAHQIGIDKIGFTAADPFSEMKARLKMQQADNYQSGFEKGSNAERTEPKLHVSDAESIIAIAVAYPSRMKARPVNKKGERRGNFCRASWGMDYHTVLNDKLNQLNRFIENLVPGFRSRIMVDTGELSDRAVAERAGIGFSGKNCAIITPEFGSYVYLGEMITNVPFTSDVPVDDGCGDCTKCLDACPTGALVAPGRLNAKNCIAFLTQTKDFLPDEYRDKLGNQLYGFDTCQLVCPKNKGVDFHLHDAFEPEPDKVKPELLPLLSISNREFKETFGHMAGSWRGKKPLQRNAILALAHYREERAVEELDRLMRTDPRPVIRGTAAFAIGKIGRRDSYRLIQQARLSETDEAVIAEMEKGLAFELVYQN

SEQ ID NO: 81403 - protein, 364 aa, Streptomyces acidiscabies
  misc_feature (1)..(364): tr|A0A100J1N1|A0A100J1N1_9ACTN Epoxyqueuosine reductase OS=Streptomyces acidiscabies OX=42234 GN=queG_1 PE=4 S V=1
MAAVPRTEPTEPRLPAKLASHPSVQALLARREAGDVATPPKVIDAAWLKELCLASGADDAAAVSLDHPDLAGEREHVLGALPGTRTLIAMVFRMNRDNCRSPARSVANQEFHQTDEQANHAARAVTRALQDAGHRALNPSAAFPQEMDRFPGRIWVVAHKTVAVAAGLGVMGLHRNVIHPKFGNFVLLATVLVDAEVGEYGQELDYNPCIDCKLCVAACPVGAIDKGGAFDALACATHNYREFMSGFTDWVQTVADSEDAADYRSRVTDSESASMWQSLSSPPGYKSGYCLAVCPGGEDVLGPYLDDRKNFMDTVLRPLQDKTETLYVLPGSHAQDYARRRFPHKPVKEVTGGWQPPGKRPASP

SEQ ID NO: 81404 - protein, 449 aa, Streptomyces acidiscabies
  misc_feature (1)..(449): tr|A0A100J1K0|A0A100J1K0_9ACTN Epoxyqueuosine reductase OS=Streptomyces acidiscabies OX=42234 GN=queG_2 PE=4 S V=1
MAGKNRLGDHPTVVKVRQRNDHGVTRPVGPLDAVRLRQLCLDAGADDVGFVEIDRPDIADQRADLEAALPGVRTLISFVTRMNRENIRTPARSVANLEFHHTGDHTNEVGRHVVGDLEAMGVRAINPAMGFPMEMDKFPRKTWVVGHKPVAVAAGLGKMGIHRNVIHPQFGNFILLGTILVDSEVSEYDRPIDYNPCLECKLCVTACPTGAIASDGHFNFSACYTHNYREFMGGFGDWAEQVAESRTADDYRSRVSDSESASMWQSLSFGANYKAAYCMSVCPAGEDVIGPWLENRKSHLTQVVRPLVDKEETVYVVPGSDAEQHVAKQFPNKRTKHVAMSLRANSIDGLVEGMPLIFQREQAKDMSTTYHFTFTGAESRQITVTIHDRELGITDGHHGDADLKVTADTAIWLRFLTKPTVLAWALVRRQIKLQGSPRLLREFGRCFPS

SEQ ID NO: 81405 - protein, 369 aa, Streptomyces griseorubiginosus
  misc_feature (1)..(369): tr|A0A385ZNK3|A0A385ZNK3_9ACTN Epoxyqueuosine reductase OS=Streptomyces griseorubiginosus OX=67304 GN=queG PE= 4 SV=1
MTAARDAEGQPTTPAPRLPAKLAAHPSVKAVLARRRTGDEARPRAVIDAAWLRELCLAAGADDAAAVSLDHPDLAGEREHAQAALPGTRTLIAMAVRMNRDNCRSPARSVANQEFHQTDEQANHAARSVTQALQDAGYRALNPSVGFPQEMDRFPRERIWVVAHKTVAVAAGLGVMGLHRNVIHPKFGSFVLLVTVLVDAEVSEYGQPLDYNPCIDCKLCVAACPVGAIAKDGAFDALACTTHNYREFMSGFTDWAQTVADSEDAADYRSRVTDSESASMWQSLSSPPGYKSGYCLAVCPAGEDVLGPYLDDRKSFMDTVLRPLQDKKETLYVLPGSHAQEYARRRFPHKPVKEVTGGWHPPPKRPAAS

SEQ ID NO: 81406 - protein, 445 aa, Streptomyces shenzhenensis
  misc_feature (1)..(445): tr|A0A3M0I677|A0A3M0I677_9ACTN Uncharacterized protein OS=Streptomyces shenzhenensis OX=943815 GN=CTZ28_21880 PE=4 SV=1
MAPRFNRNALQLRLLRWGHEFGELLYPIAKKTLPYRPKMWWIPRLPIWAHRRRTPHTRPWTTPVPSPAEALRTGPGIELLPERQQAAFDEAPLHDFIRLHPEMRGQNSPTGHMWISLLSTSPRVQGAARKRAKSNREPGATAAAKPVTPEELTRAMKLEAARLGLSGVGVTAYDIKWNYAEYHGMGVGETIVVGIIEQNFDSTQMSPSLRAEKAALSAYSGLEDRMRLLAEWIRAQGYDARPEGFVGESMVIPYAVAAGLGQLGLNGQLLTPHAGSRCRIHVMSTNAPFVHDQPVDYGLEGVCNECQICVRRCPAGAIPANRKESRGVVKAKLNTKRCLPVMGKTAGCSVCMKVCPVQRFGLPAVLEEFDRSGRILGKDTDDLEGFDWPLDGKHYGPGDRPRLPLEVFETPGFDFDPNRKEPIGWVKPEGKPDETDGGRVEALGY

SEQ ID NO: 81407 - protein, 373 aa, Streptomyces sp.
  misc_feature (1)..(373): tr|A0A1H5NRL6|A0A1H5NRL6_9ACTN Epoxyqueuosine reductase QueG (Queuosine biosynthesis) OS=Streptomyces sp. 3213 .3 OX=1855348 GN=SAMN05216489_09792 PE=4 SV=1
MTAGRDAEGQSVDLRLPAKLAAHPSVKAVLARRAAGEAASPPPVIDAAWLRELCLAAGADDAAAVSLDHPDLAGEREYAQSALPGTRTLIAMAVRMNRDNCRSPSRSVANQEFHQTDEQANHAARSVARALQDAGYRALNPSVGFPQEMDRFPRERIWVVAHKTVAVAAGLGVMGLHRNVIHPKFGSFVLLVTVLVDAEVSEYGQALDYNPCIDCKLCVAACPVGAIAKDGSFDGLACTTHNYREFMSGFTDWAQTVADSEDAADYRSRVTDSESASMWQSLSSPPGYKSGYCLAVCPAGEDVLGPYLDDRKSFMDTVLRPLQDKKETLYVLPGSHAQEYAQRRFPHKPVKEVTGGWQPPAKRSASPEREQRT

SEQ ID NO: 81408 - protein, 376 aa, Streptomyces sp.
  misc_feature (1)..(376): tr|A0A3N5APY0|A0A3N5APY0_9ACTN Epoxyqueuosine reductase QueG OS=Streptomyces sp. TLI_185 OX=2485151 GN=EDD92_5 425 PE=4 SV=1
MTAARNAEGQRTTPPPRLPAKLAAHPSVQAVLARRRTGDAVSPPAVIDAAWLRELCLAAGADDASAVSLDHPDLAGEREHVQSALPGTRTLIAMAVRMNRDNCRSPARSVANQEFHRTDEQANHAARTVTRALQDAGYRALNPSVGFPQEMDRFPKERIWVVAHKTVAVAAGLGVMGLHRNVIHPRFGSFVLLVTVLVDAEVSEYGRELDYNPCIDCKLCVAACPVGAIAKDGAFDALACTTHNYREFMSGFTDWAQTVADSEDAADYRSRVSDSESASIWQSLSSPPGYKSGYCLAVCPAGEDVLGPYLDDRKTFMDTVLRPLQDKKENLYVLPGSHAQEYARRRFPHKPVKEVTGGWQPPAKRSAPSDRETRTS

SEQ ID NO: 81409 - protein, 248 aa, Subdoligranulum sp.
  misc_feature (1)..(248): tr|R7K888|R7K888_9FIRM Uncharacterized protein OS=Subdo ligranulum sp. CAG:314 OX=1262970 GN=BN603_00709 PE=4 S V=1
MRLHGIKHYALLPIEGGALIMYFAPYSPYDYSEFPDCLKIDSYYITSNKVYFENLQLLQSLKAKGLDAKRYRRTDIKQLLDKYRLADYGMNGLCFVKEYGSFFFVATAFVEGAETEFFSSIPTVSHPLCTRCELCVAACPQDALVPDGFIKNKCLRQIQEEYADTPENNAALKRNGRLLGCNICQLVCPLNSHIKPVPPPQELVELCNKDSILETVENEQTLQRLIPLIGKNYARKSFLLPLARAFFK

SEQ ID NO: 81410 - protein, 308 aa, Subsaximicrobium wynnwilliamsii
  misc_feature (1)..(308): tr|A0A5C6ZFQ4|A0A5C6ZFQ4_9FLAO Epoxyqueuosine reductase OS=Subsaximicrobium wynnwilliamsii OX=291179 GN=queG P E=3 SV=1
MKDSKSKYSQFIKAEAKRLGFLSCGISKAEFLEEEAPRLERWLKNNAHGEMQYMENHFDKRLDPTKLVEGSKSVVSLLLNYFPEDTQTENTFKVSKYAYGTDYHFVIKDKLKTLLQSIQTEIGEVGGRAFVDSAPVLDKAWAAKSGLGWIGKHSNLLTQQVGSFYFIAELIIDLELEYDHAVTDHCGTCTKCIDACPTQAITEPYVVDGSKCISYFTIELKENIPTEFKGQFEDWMFGCDICQDVCPWNRFSKAHSEPLFNPHPDLLSMTKKDWEEITKDTFNKVFQKSAVKRTKFEGLKRNVEFLRK

SEQ ID NO: 81411 - protein, 347 aa, Sulfitobacter brevis
  misc_feature (1)..(347): tr|A0A1I1YH24|A0A1I1YH24_9RHOB Epoxyqueuosine reductase OS=Sulfitobacter brevis OX=74348 GN=queG PE=3 SV=1
MTNKSTDLKDRLVQQALAEGFVACRLCRPWDVPEVPPRLSAFLEAGYHGQMAWMEERQAWRENPAALWPEARTVIMLAESYAPDHNPLDVLGSPEKAAMSVYAQGRDYHDVVKKRLKRLARWLIAQEACEVKVFVDTAPVPEKALAQAAGLGWQGKHTNLLSRDFGNWAFIGSVFTTLELETDPAGIDHCGSCTACQDICPTNAFPQPYQLDARRCISYLTIEHAGPVPLELRAKMGNRIYGCDDCLAICPWNKFAVAASDIRYRRPDPQAPDLADLAGLDDAGFRARFSGSAVKRIGRDRFVRNVLYAIGNSGTAGLLPVAAGLLEDADAAVADAARWAVAQLTNG

SEQ ID NO: 81412 - protein, 348 aa, Sulfitobacter delicatus
  misc_feature (1)..(348): tr|A0A1G7XG65|A0A1G7XG65_9RHOB Epoxyqueuosine reductase OS=Sulfitobacter delicatus OX=218672 GN=queG PE=3 SV=1
MTVDSEDLKARVVARALEEGFVACRICRPADVPEVPERLSRFVEAGFHGQMGWMEERMHWRGNPAVLWPEARSVIMLAESYTPEHDPRAVLEQPEKGAISVYAQGRDYHDIVKKRLKRLARWLMEEARAQEPEVKVFVDTAPVPEKALAQAAGLGWQGKHTNLLSRKFGNWAFLGSVFTTLDLATDAREVDHCGSCRACLDACPTDAFPAPYQLDARRCISYLTIEHKGPVDLELREKLGNRIYGCDDCLAACPWNKFAVAASDMRYHGPAVQPADLAELATLDDTAFRARFSGSPIKRIGRDRFVRNVLYAIGNSGLAELRPVAQSLAEDADATVADAARWAAERLG

SEQ ID NO: 81413 - protein, 377 aa, Sulfitobacter donghicola; identical to SEQ ID NO: 81298
  misc_feature (1)..(377): tr|A0A410XZS7|A0A410XZS7_9RHOB tRNA epoxyqueuosine(34) reductase QueG OS=Sulfitobacter donghicola OX=421000 GN =queG PE=4 SV=1

SEQ ID NO: 81414 - protein, 338 aa, Sulfitobacter donghicola
  misc_feature (1)..(338): tr|A0A073IK76|A0A073IK76_9RHOB 4Fe-4S ferredoxin OS=Sul fitobacter donghicola DSW-25 = KCTC 12864 = JCM 14565 O X=1300350 GN=DSW25_02090 PE=4 SV=1
MKARLVAKALEEGFVACRICKPTAVPEVPARLDAFLAAGYHGQMGWMEERVTWRADPSALWPEARSVIMLAESYAPEHDPLEILERPDLGAVSVYAKGRDYHDIVKKRLKRLARWLIEQEECQVKVFVDTAPVPEKALAQAAGLGWQGKHTNIVSRDWGNWAFLGSVFTTLELEPDAPEVDRCGSCTACQEVCPTDAFPAPYQLDGRRCISYLTIEYKGPIDEEMRPALGNRIYGCDDCLAACPWNKFAVAASDMRYHGSAGGTLAELAVLDDPTFRTRFSGSPIKRIGRDRFTRNVLYAIGNSGDVSLRAVAQSLCEDEDATVADAARWAVAQLAHL

SEQ ID NO: 81415 - protein, 346 aa, Sulfitobacter dubius
  misc_feature (1)..(346): tr|A0A1I2W3V9|A0A1I2W3V9_9RHOB Epoxyqueuosine reductase OS=Sulfitobacter dubius OX=218673 GN=queG PE=3 SV=1
MDSEDLKVRLVARAFEEGFVACRICRPADVPEVPERLARFVEAGYHGQMGWMEDRMHWRGNPAALWPEARSVIMLAESYTPEHDPRAVLEHPDKGAISVYAQGRDYHDIVKKRLKRLARWLMEEARAAEPEVKVFVDTAPVPEKALAQAAGLGWQGKHTNLLSRKFGNWAFLGSVFTTLDLAPDAQEVDHCGSCRACLDVCPTDAFPGPYQLDARRCISYLTIEHKGPVDLELREKLGNRIYGCDDCLAACPWNKFAVTASDMRYHGPAVQPADLAELAALDDTAFRARYSGSPIKRIGRDRFVRNVLYAIGNSGLAPLRSAAQSLTEDADPTVADAARWAVERLA

SEQ ID NO: 81416 - protein, 342 aa, Sulfitobacter geojensis
  misc_feature (1)..(342): tr|A0A196PZJ2|A0A196PZJ2_9RHOB tRNA epoxyqueuosine(34) reductase QueG OS=Sulfitobacter geojensis OX=1342299 GN =A8B74_09975 PE=4 SV=1
MDLKARLVEQALAEGFVACRICRPWDVPEVPARLEAFVQAGFHGQMAWMEDRMAWRGNPAALWPEAKSVIMLAESYAPEHDPLAVLEHPEKAAISVYAQGRDYHDIVKKRLKRLARWLIEQEPCEVKVFVDTAPVPEKALAQASGLGWQGKHTNVVSRDWGNWAFLGSVFTTLDLEADKAEVDHCGSCTACQDICPTDAFPAPYQLDGRRCISYLTIEHKGPVALELRGKLGNRIYGCDDCLAACPWNKFAVQASDMRYHGALRDAADLAELAGLDDAAFRARFSGSPVKRIGRDRFVRNVLYAIGNSGLARLAGTARGLVDDPDPAVADAARWAVGRLAEA

SEQ ID NO: 81417 - protein, 340 aa, Sulfitobacter guttiformis
  misc_feature (1)..(340): tr|A0A420DRR4|A0A420DRR4_9RHOB Epoxyqueuosine reductase OS=Sulfitobacter guttiformis OX=74349 GN=C8N30_1513 PE =4 SV=1
MGLKQRLITEALEAGFVACRVCRPDAVPQVPAQLDAFLEAGYHGQMGWMEERVAWRGNPSVLWPQAKSVIMLAESYAPEFDPLAVLERPELGAISVYAQGRDYHDVVKKRLKRIARWLIAQETCEVKVFVDTAPVPEKALAQAAGLGWQGKHTNVVSRDWGNWAFIGSVFTTLELEPDAAEIDHCGSCVACQDVCPTQAFPAPYQLDARRCISYLTIEHKGPVSDELRTKMGNRIYGCDDCLAVCPWNKFAVAASDIRYHGGAGGTLAELVVLDDADFRLRFSGSPIKRIGRDRFVRNVLYAIGNSGDVTLRGSAQALCDDADEAVADAARWAVARLASL

SEQ ID NO: 81418 - protein, 348 aa, Sulfitobacter indolifex
  misc_feature (1)..(348): tr|A9DZW0|A9DZW0_9RHOB Epoxyqueuosine reductase OS=Sulf itobacter indolifex HEL-45 OX=391624 GN=queG PE=3 SV=1
MTGDSDDLKARVVARALEEGFVACRICRPADVPEVPERLARFVEAGYHGQMGWMEDRMHWRGNPAALWPEARSVIMLAESYTPEHDPRAVLEHPEKGAISVYAQGRDYHDIVKKRLKRLARWLMEEARAAAPEVKVFVDTAPVPEKALAQAAGLGWQGKHTNLLSRKFGNWAFLGSVFTTLDLAPDAPEVDHCGSCRACLDVCPTDAFPGPYQLDARRCISYLTIEHKGPIDLELREKMGNRIYGCDDCLAACPWNKFAVTASDMRYHGPAVQPADLAELAALDDSAFRARYSGSPIKRIGRDRFVRNVLYAIGNSGLAPLRDVAQSLTEDADPTVAEAARWAAERLA

SEQ ID NO: 81419 - protein, 352 aa, Sulfitobacter litoralis
  misc_feature (1)..(352): tr|A0A1H0HUN8|A0A1H0HUN8_9RHOB Epoxyqueuosine reductase OS=Sulfitobacter litoralis OX=335975 GN=SAMN04488512_1 01348 PE=4 SV=1
MSVTPAVDTDALRGRLVAQALDEGFVSCRICRPDAVPEVPERLQAFVEAGYHGQMSWMADRMAWRGNPAALWPEARSVIMLAESYTPEYDPTEVLNHPDKAGVSVYAQGRDYHDIVKKRLKRVARWLVAQEPCEVKVFVDTAPVPEKALGQAAGLGWQGKHTNLLSRDWGNWAFLGAIFTTLDFTPDTAEVDHCGSCRSCLTACPTNAFPAPYQLDARRCISYLTIEHNGPVDLELRSKMGNRIYGCDDCLAACPWNKFAVAASDLRYHGGVGAPDLAELATLDDAAFRLRFSGSPIKRIGRNRFMRNVLYAIGNSGQARLVPVAQGLLDDPDATVVDAAQWAVARLGENHG

SEQ ID NO: 81420 - protein, 342 aa, Sulfitobacter marinus
  misc_feature (1)..(342): tr|A0A1I6V360|A0A1I6V360_9RHOB Epoxyqueuosine reductase OS=Sulfitobacter marinus OX=394264 GN=SAMN04488040_305 8 PE=4 SV=1
MDDLKDRLVSQALAEGFVACKICRPWDVPEVPARLAAFVEAGYHGQMSWMADRMAWRGNPADLWPEARSVIMLAESYAPEHDPRAVLAHSDKAAISVYAHGRDYHDIVKKRLKRLARWLIEQETCEVKVFVDTAPVPEKALGQAAGLGWQGKHTNLLSRDWGNWAFLGAIFTTLELPVDGAEVDHCGSCRSCLDACPTDAFPAPYRLDARRCISYLTIEHKGPVDLELRSKMGSRIYGCDDCLAACPWNKFAVAASDMRYHGGVGAPDLAELAALDDTAFRARFSGSPIKRIGRNRFIRNVLYAIGNSGKPTLSDTAQSLVQDPDATVAEAARWAVARLAAK

SEQ ID NO: 81421 - protein, 342 aa, Sulfitobacter mediterraneus
  misc_feature (1)..(342): tr|A0A061SQ41|A0A061SQ41_9RHOB Epoxyqueuosine reductase OS=Sulfitobacter mediterraneus OX=83219 GN=PM02_05730 PE=4 SV=1
MDLKARLVDQALTEGFVSCRLCKPWDVPEVPDRLAAFVAAGYHGQMGWMEERMHWRGNPAALWPEAKTVIMLAESYAPEQDPLTVLEHPEKAAISVYAQGRDYHDVVKKRLKRLARWLIEQEPCEVKVFVDTAPVPEKALAQASGLGWQGKHTNVLSRGWGNWGFLGSVFTTLDLPADKPETDHCGSCRACQDVCPTDAFVAPYQLDPRRCISYLTIEHSGPVDLELREKMGNRIYGCDDCLAICPWNKFAAPVSDDRYHGAHVEAADLSELAALDDAAFRLRFSGSPIKRIGRDRFVRNVLYAIGNSGLPALRPAVAALCEDTDPTVAEAARWAMARLSDG

SEQ ID NO: 81422 - protein, 342 aa, Sulfitobacter mediterraneus
  misc_feature (1)..(342): tr|A0A2T6CJU9|A0A2T6CJU9_9RHOB Epoxyqueuosine reductase OS=Sulfitobacter mediterraneus OX=83219 GN=C8N31_10141 7 PE=4 SV=1
MDLKARLVDQALTEGFVSCRLCKPWDVPEVPDRLAAFVADGYHGQMGWMEERMHWRGNPAALWPEAKTVIMLAESYAPEQDPLTVLEHPEKAAISVYAQGRDYHDVVKKRLKRLARWLIEQEPCEVKVFVDTAPVPEKALAQASGLGWQGKHTNVLSRDWGNWGFLGSVFTTLDLPADKPEIDHCGSCRACQDICPTDAFVAPYQLDPRRCISYLTIEHSGPVDLELREKMGNRIYGCDDCLAICPWNKFAAPVSDDRYHGSHVEAADLAELVALDDAAFRLRFSGSPVKRIGRDRFVRNVLYAIGNSGLPALRPAAAPLCEDTDATVAEAARWAMARLSDG

SEQ ID NO: 81423 - protein, 352 aa, Sulfitobacter pontiacus
  misc_feature (1)..(352): tr|A0A1H2Z4H3|A0A1H2Z4H3_9RHOB Epoxyqueuosine reductase OS=Sulfitobacter pontiacus OX=60137 GN=SAMN04488041_10 4496 PE=4 SV=1
MSVTSAADTDALRGRLVAQALDEGFVSCRICRPDAVPDVPERLQAFVDAGYHGQMAWMADRMAWRGNPAALWPEARSVIMLAESYTPEYDPTEVLNHPEKAGVSVYAQGRDYHDIVKKRLKRVARWLVAQEPCEVKVFVDTAPVPEKALGQAAGLGWQGKHTNLLSRDWGNWAFLGAIFTTLDFTPDTAEVDHCGSCRSCLRACPTNAFPAPYQLDARRCISYLTIEHNGPVDLELRSKMGNRIYGCDDCLAACPWNKFAVAASDLRYHGGVGAPDLAELATLDDAAFRLRFSGSPIKRIGRNRFIRNVLYAIGNSGQARLTPVAQGLLDDPDATVADAAQWAVARLCENQD

SEQ ID NO: 81424 - protein, 342 aa, Sulfitobacter pseudonitzschiae
  misc_feature (1)..(342): tr|A0A221K4A4|A0A221K4A4_9RHOB Epoxyqueuosine reductase OS=Sulfitobacter pseudonitzschiae OX=1402135 GN=queG P E=4 SV=1
MDLKQQVIARALEEGFVMARVCRPDSVPEAAPRLEAFVAAGYHGQMGWMEDRMHWRGNPAALWPEARSVIMLAESYAPEYDPMSLLEARERGVISSYAQGRDYHDIVKKRLKRLGRWLIETSGGEIKVFVDTAPVPEKALGQAAGLGWQGKHTSLLSRDWGNWAFLGSVFTTLKLEPDTPEVGHCGSCTACLDVCPTDAFPGPYQMDARRCISYLTIEHKGPVDLELRAKMGNRIYGCDDCLAVCPWNKFAVAASDMRYHGGVGAPPLAELVALDDAAFRLRFSGSPVKRIGRDRFVRNVLYAIGNSGVADLLPAAQALCEDADATVADAARWAVARLKGTA

SEQ ID NO: 81425 - protein, 342 aa, Sulfitobacter pseudonitzschiae
  misc_feature (1)..(342): tr|A0A073J543|A0A073J543_9RHOB Epoxyqueuosine reductase OS=Sulfitobacter pseudonitzschiae OX=1402135 GN=SUH3_0 9085 PE=4 SV=1
MDLKQQVITRALEEGFVMARVCRPDAVPQAAARLEAFVQAGYHGQMGWMAERMHWRGNPAALWPEARSVIMLAESYAPEYDPLPLLRERERGVISAYAQGRDYHDIVKKRLKRLGRWLIETAGGEIKVFVDTAPVPEKALGQAAGLGWQGKHTNLLSREWGNWAFLGSVFTTLEFEPDAPEVGHCGSCTACLDICPTDAFPAPYQLDARRCISYLTIEHAGPVDEDLRALMGNRIYGCDDCLAVCPWNKFAVAASDLRYHGGVGAPPLAELAALDDAAFRARFSGSPIKRIGRDRFVRNVLYAIGNSGVAALVPVAQGFCEDADATVADAARWAVARLKGTA

SEQ ID NO: 81426 - protein, 348 aa, Sulfitobacter sp.
  misc_feature (1)..(348): tr|A0A2E6X1P6|A0A2E6X1P6_9RHOB tRNA epoxyqueuosine(34) reductase QueG OS=Sulfitobacter sp. OX=1903071 GN=queG PE=4 SV=1
  misc_feature (148)..(148): Xaa can be any naturally occurring amino acid
  misc_feature (154)..(154): Xaa can be any naturally occurring amino acid
  misc_feature (183)..(183): Xaa can be any naturally occurring amino acid
  misc_feature (193)..(193): Xaa can be any naturally occurring amino acid
  misc_feature (203)..(203): Xaa can be any naturally occurring amino acid
  misc_feature (220)..(220): Xaa can be any naturally occurring amino acid
  misc_feature (242)..(242): Xaa can be any naturally occurring amino acid
  misc_feature (257)..(257): Xaa can be any naturally occurring amino acid
  misc_feature (270)..(270): Xaa can be any naturally occurring amino acid
MTVDSEDLKVRLVARAFEEGFVACRICRPADVPEVPERLARFVEAGYHGQMGWMEDRMHWRGNPAALWPEARSVIMLAESYTPEHDPRAVLEHPDKGAISVYAQGRDYHDIVKKRLKRLARWLMEEARAAEPEVKVFVDTAPVPEKAXAQAAGXGWQGKHTNLLSRKFGNWAFLGSVFTTLDXAPDAQEVDHXGSCRACLDVXPTDAFPGPYQLDARRCXSYLTIEHKGPVDLELREKLGNXIYGCDDCLAACPWNXFAVTASDMRYHGXAVQPADLAELAALDDTAFRARYSGSPIKRIGRDRFVRNVLYAIGNSGLAPLRSAAQSLTEDADPTVADAARWAVERLA

SEQ ID NO: 81427 - protein, 344 aa, Sulfitobacter sp.
  misc_feature (1)..(344): tr|A0A525PQJ6|A0A525PQJ6_9RHOB tRNA epoxyqueuosine(34) reductase QueG OS=Sulfitobacter sp. SK025 OX=1389011 GN =queG PE=4 SV=1
MDTAGLKDRLVSQASIEGFVSCRVCRPWDVPDVPARLAAFVDAGYHGQMEWMADRMAWRGDPAVLWPEAKSVIMLAESYTPLYDPTSVLDETENAAVSVYAQGRDYHDIVKKRLKRLARWLIEQQPCEVKVFVDTAPVPEKALGQAAGLGWQGKHTNLVSRDWGNWAFLGAIFTTLDLDVDGAEKDHCGSCRSCLAACPTDAFPAPYRLDARRCISYLTIEHSGPVDPELRSKLGNRIYGCDDCLAACPWNKFAVQASDMHYHGGVGSPPLAELATLDDAAFRARFSGSPIKRIGRNRFIRNVLYAIGNSGQADLVPTAQGLVGDPDPTIVEAAQWAIEQLAGK

SEQ ID NO: 81428 - protein, 357 aa, Sulfuricaulis limicola
  misc_feature (1)..(357): tr|A0A1B4XGM5|A0A1B4XGM5_9GAMM Epoxyqueuosine reductase OS=Sulfuricaulis limicola OX=1620215 GN=queG PE=3 SV=1
MRTARNNNIDLARLATDIKAWGRELGFQQIGIADTDLGAAETRLLNWLKLERHGEMHYMESHGTRRSRPQELQPGTLRVISARLDYLPGQAADSEAVMRDPQRGFVSRYALGRDYHKVLRSRLQKLAERIEARVGPFQYRAFSDSAPVLEKALAEKAGLGWIGKHTNLIDKQAGSWFFLGELYTDLPLPVDTPAENHCGTCHACIDICPTRAIVAPYELDARRCISYLTIELRGSIPGELRPLIGNRIYGCDDCQLVCPWNRFARPGAEPDFAPRHGLDAPELVRLFSWTEDEFLKYTEGSAIRRIGYECWLRNIAVALGNASTSETVVNALKARQEHASELVKEHVSWALERHYEQ

SEQ ID NO: 81429 - protein, 362 aa, Sulfuricella denitrificans
  misc_feature (1)..(362): tr|S6B5A1|S6B5A1_SULDS Epoxyqueuosine reductase OS=Sulf uricella denitrificans (strain DSM 22764 / NBRC 105220 / skB26) OX=1163617 GN=queG PE=3 SV=1
MHVDTLTDYSHLDLRQIAENIKAWGMELGFQAIGIAGNDLGQAEARLLEWLAQGCHGEMDYMANHGVKRSRPQELVPGTLRVITARMAYFPPQARDSIAVMDDSSKAFISRYALGRDYHKLIRARLQKLAEKIQSEIGPFQFRAFTDSAPVMEVELASKSGLGWRGKHSLLLSRSSGSWFFLGEIYTDLPLPIDEPEQNHCGTCTRCMTSCPTDAIVAPYQVDAQRCISYLTIELKGSIPEELRPLIGNRVYGCDDCQLACPWNKFGQLTREPDFAVRHGLDDAKLTALFRWSEEEFDARLAGSPIRRIGHERWLRNIAVGLGNALPSDDVIAALQSRLDHPSVLVREHVVWALERQISRRE

SEQ ID NO: 81430 - protein, 359 aa, Sulfuricella sp.
  misc_feature (1)..(359): tr|A0A0E9MH49|A0A0E9MH49_9PROT Epoxyqueuosine reductase OS=Sulfuricella sp. T08 OX=1632857 GN=queG PE=3 SV=1
MHVDALTDYSQLDLRQLADNIKAWGMEFGFQAIGIAGNDLGQAETRLLEWLAQGCHGEMDYMANHGVKRSRPQELVPGTLRVITARMAYFPPQAHDSMAVMEDSSKAYISRYALGRDYHKLIRARLQKLAEKIQSEIGPFQFRAFTDSAPVMEVELASKSGLGWRGKHSLLLSRSAGSWFFLGEIYTDLPLPIDEPEQNHCGTCTSCMTSCPTDAIVAPYQVDARRCISYLTIELKGSIPEELRPLIGNRVYGCDDCQLACPWNKFGQLTREPDFAVRHGLDDTSLIELFLWNEKEFDSRLAGSPIRRIGHERWLRNLAVGLGNARPVVEITAALKQRLNHPSELVREHVSWALNRQAL

SEQ ID NO: 81431 - protein, 359 aa, Sulfuriferula multivorans
  misc_feature (1)..(359): tr|A0A401JAB4|A0A401JAB4_9PROT Epoxyqueuosine reductase OS=Sulfuriferula multivorans OX=1559896 GN=queG PE=3 S V=1
MDHGELDLAKLVRAIKAWGQELGFGAVGITDCALDNTEAELLAWLDKGYHGEMDYMAKHGVKRARPAELIPGTVRVISARMNYLPPQAAESWAVMDDGDLAFISRYALGRDYHKVLRTRLQQLTTRIGAAVGAFSYRVFTDSAPVMEVALAANAGLGWRGKHTLLLDRDAGSWFFLGEIYTDLPLPVDNPVSAHCGNCQACIDICPTQAIVAPYELDARRCISYLTIEHAGSIPVALRPLMGNRIYGCDDCQLVCPWNRFAQTSELADFAVRNGLDSAALAALFAWSEHDFDARLQGSAIRRIGHERWLRNIAVALGNAPTSDAAMQALHSRADHPSALVREHVQWALSQHRNVQIHAD

SEQ ID NO: 81432 - protein, 363 aa, Sulfuriferula plumbiphila
  misc_feature (1)..(363): tr|A0A512L7I9|A0A512L7I9_9PROT Epoxyqueuosine reductase OS=Sulfuriferula plumbiphila OX=171865 GN=queG PE=3 SV =1
MDHGELDLAGLVWDIKAWGRELGFGAVGITDCALDNTEAELLAWLDKGYHGEMDYMAKHGVKRARPAELVPGTLRIISARMNYLPPQAAESWTVMGDGDLAFISRYALGRDYHKVLRTRLQQLATRIEAAVGAFSYRVFTDSAPVMEVALAANAGLGWRGKHTLLLDRDAGSWFFLGEIYTDLPLPVDSPASAHCGSCQACLDICPTRAIVAPYELDARRCISYLTIEHPGSIPVVLRPLMGNRIYGCDDCQLVCPWNRFARTSELADFSVRNGLDGAALAALFAWSEHDFDTRLQGSAIRRIGYERWLRNIAVALGNAPTSDAAVDALHSRAGHPSALVREHVQWALSRHIEAAKLERHGQD

SEQ ID NO: 81433 - protein, 356 aa, Sulfuriferula sp.
  misc_feature (1)..(356): tr|A0A1Y0G9L1|A0A1Y0G9L1_9PROT Epoxyqueuosine reductase OS=Sulfuriferula sp. AH1 OX=1985873 GN=queG PE=3 SV=1
MDHDQLDLVVLAQQIKVWGAELGFHGVGITDCDLGAAETELLAWLSQGYHGEMDYMAKHGTKRTRPAELIPGTVRVISVRMDYLPPNTRDSWEVMSEPQSAYISRYALGRDYHKVMRTQLQRLAERINQAVGAFNYRVFTDSAPVMEVALASKAGLGWRGKHTLLLNREAGSWFFLGEIYTDLPLPIDQPVSAHCGDCHACIDICPTQAILAPNELDARRCISYLTIEHSGAIPVELRPLMGNRIYGCDDCQLICPWNRFAKTSSSADFSVRNGLDGPQLVDLLAWSEDEFNQRLQGSAIRRIGHERWLRNIAVALGNAPASPEIVAALNRHADHPSVIVREHVQWALSQHQHSVD

SEQ ID NO: 81434 - protein, 362 aa, Sulfurifustis variabilis
  misc_feature (1)..(362): tr|A0A1B4V3N1|A0A1B4V3N1_9GAMM Epoxyqueuosine reductase OS=Sulfurifustis variabilis OX=1675686 GN=queG PE=3 SV =1
METANDAGTRRIGPDPGELARMIKGWGRELGFQHIGITDTDLTEAEAHLLDWLGRGWHGEMAWMGAHGTRRSRPDELVPGTLRVISARLDYLPAAAPARSVLEDPVAAFVSRYALGRDYHRVLRARLQKLAERIEARVGGFRYRVFTDSAPVLEKAIAEKAGLGWIGKHTNLINREAGSWFFLGEIYTDLPLPIDEPAANHCGTCRACLDVCPTRAIVAPYRLDARRCISYLTIELRGSIPEELRPLIGNRIFGCDDCQLVCPWNRFGRITGESDFAPRHGLDARRLVDLFAWTEDEFLKRTEGSAIRRTGYEGWLRNIAVALGNARATEDVVAALRSRSHHPSELVREHVQWALARLGQGA

SEQ ID NO: 81435 - protein, 350 aa, Sulfurirhabdus autotrophica
  misc_feature (1)..(350): tr|A0A4R3Y5D6|A0A4R3Y5D6_9PROT Epoxyqueuosine reductase OS=Sulfurirhabdus autotrophica OX=1706046 GN=queG PE=3 SV=1
MDFDQLAADIKSWGKALGFQTIGISDVNLDAAEKGLMNWLAKGFHGDMDYMAKHGTKRSRPAEILPGTSRIITARLNYRPPAARDSWETLHDGNAAFISRYALGRDYHKVMRKRLQQLTEKIQAETGAAHFRVFTDSAPVMEVALAQKSGIGWRGKHTLLLTRDHGSWFFLGEIFTDLPLPVDPPIVDHCGTCQSCIDICPTQAIVAPYQVDARRCISYLTIELHGSIPIELRPLIGNRVYGCDDCQLTCPWNKFAQTTGESDFHVRHGLDNITLIQAFGWTEQLFHKNMAGSAIHRIGYERWLRNIAVGLGNAPTSGAVIAALESRLAYPSQLVQEHVKWALTQHQVST

SEQ ID NO: 81436 - protein, 366 aa, Sulfurisoma sediminicola
  misc_feature (1)..(366): tr|A0A497XAL8|A0A497XAL8_9PROT Epoxyqueuosine reductase OS=Sulfurisoma sediminicola OX=1381557 GN=queG PE=3 SV =1
MHDWTRLARSIKDWGRELGFDAIGITGTDLGEAERELNDWLAADCHGEMDYMATHGTKRSRPAELVPGTRAVIAARMNYRPPVAPAASAEVAAISRYALGRDYHKLLRARLQKLADRIVAEVGEFGYRVFTDSAPVMEVALAAKAGLGWRGKHTLLLSRQAGSWFFLGEIYVDLPLPPDAPATDHCGTCRACLDACPTDAFLAPYRLDARRCISYLTIELKGAIPEPLRPLLGNRIYGCDDCQDVCPWNREAPMTREPDFLPRHALDTATLIELFAWDEAEFNEKLAGSAIRRIGHERWLRNIAIALGNAPSLPELIAALEARREDSSALVREHVAWALNQHPHPPAPLPEKGGDGCSRTASAPVR

SEQ ID NO: 81437 - protein, 360 aa, Sulfuritalea hydrogenivorans
  misc_feature (1)..(360): tr|W0SFX6|W0SFX6_9PROT Epoxyqueuosine reductase OS=Sulf uritalea hydrogenivorans sk43H OX=1223802 GN=queG PE=3 SV=1
MVGMHGDEKNSTALKDGIRRWGRELGFDAIGFSGTRVDGAAEALDAWLVAGFHGEMDYMAAHVTPAGNKRALPTELVPGTRSIITARINYRPASADSQEALADGERAFVSRYALGRDYHKLLRARLQKLADRITDEIGEFAYRVFTDSAPVMEVGLAQNSGLGWRGKHTLLLDREAGSYFFLGEIFTDLPLAPDTPVTDHCGNCTACIDACPTQAIVAPYQVDARLCISYLTIELKGSIPEALRPLLGNRIYGCDDCQLACPWNRFAPLARETDFTPRHDLDRATLVELFAWDENDFNERLAGSPIRRIGFERWLRNIAVALGNAPPSEAVLGALRSRADHPLPLVREHVAWALARHATD

SEQ ID NO: 81438 - protein, 353 aa, Sulfuritortus calidifontis
  misc_feature (1)..(353): tr|A0A4V2UR38|A0A4V2UR38_9PROT Epoxyqueuosine reductase OS=Sulfuritortus calidifontis OX=1914471 GN=queG PE=3 SV=1
MSSHSSDSLKAAIRGWGRELGFGAVGFAGIEQPAAEARLLDWLAKGYHGDMDYMARHGTKRARPAELVPGTRSVISVRLDYLPASHAAETILARPERAYISRYALGRDYHKVLRNRLQKLAERIEAEVGPFGYRVFTDSAPVLEVELAAQASLGWRGKHTLLIDRRAGSWFFLGEIYCDLELAPDPPEANHCGSCQACLDICPTRAIVAPYEVDARRCISYLTIELAGSIPTELRPLMGNRIYGCDDCLLACPWNRFAQPTRESDFAPRNGLDTATLIELFAWSGTEFEARLAGSPIRRIGFDRWLRNLAVALGNAPASPAAQAALAARRDHASALVREHVEWALARQAAGAK

SEQ ID NO: 81439 - protein, 384 aa, Sulfurivirga caldicuralii
  misc_feature (1)..(384): tr|A0A1N6F304|A0A1N6F304_9GAMM Epoxyqueuosine reductase OS=Sulfurivirga caldicuralii OX=364032 GN=queG PE=3 SV =1
MNDTARLKESIRAEAQRLGFADCGVTHTDLSAYEASYFNWLGQHFHGEMEYMARHGLKRTRPNLLVPGTQSIISVRMNYYDCDSENPLAQLQRGDHAYISRYALGRDYHKLIRNRLKNLVAFIEKAVGPFNYRIFTDSAPVLERPIAREAGLGFIGKNSLVIHPRAGSWFFLGEIYTDLQLPPDPCFEKQGCGPCTACLDACPTGAIVADGVVDARRCISYLTIEHPGAIPEDLRPLIGNRIYGCDDCQLVCPWNRFAEPNRETDFKPRHALDRATLLELWQWSETDFLERFAGSPIRRIGFERWQRNLAVALGNAPASDAVVAALGAKKPQISSKMVLEHVHWALAQQREKRHRKKVGDPPLLVGRKAYLPRRCKEKLVKREE

SEQ ID NO: 81440 - protein, 338 aa, Sulfurospirillum sp.
  misc_feature (1)..(338): tr|A0A290HM36|A0A290HM36_9PROT Epoxyqueuosine reductase OS=Sulfurospirillum sp. JPD-1 OX=220622 GN=SJPD1_0663 PE=4 SV=1
MQTIAQAIQDKAYELGYEKCGIIPLSMMHEFEGKLEERTRSVPSSSGFYERQKRLIDPTKTYPWAKSIVVVAERYGQYKLPSTLAGHIGRPYLYDARINEKTEEFQRGLLLDAYLKSLGFQTATERKFGLVGLRWAAMKAGLGIIRRNNFFYTDSGSWVTLYAWLIDEEMTLVETNTLPSCPEKCQRCITACPTKSLSAPYTMNPMRCISFLTTFGGRDLPHEPLAKSFGACIYGCDICQEVCPMNHKKLSDEKEFPELLALAPFLTPERIMEMDEDFYREHIQPKFFYLSPDDLWKWKVNVLCFMQNNYQESFRPYILEARSASHEKVREMANSIIF

SEQ ID NO: 81441 - protein, 312 aa, Sulfurovum sp.
  misc_feature (1)..(312): tr|A0A0C2ZPW1|A0A0C2ZPW1_9PROT Epoxyqueuosine reductase OS=Sulfurovum sp. FS06-10 OX=1539064 GN=queG PE=3 SV=1
MSSNFKLPTSNYSKIIKAESKRLGFFSCGISKAGFLEEEAPRLENWLNKNMNGQMSYMENHFDKRLNPTLLVDDAKSVISLLLNYYPSELQNRDSYQISKYAYGQDYHLVIKEKLKELLHFIQTEIGEVSGRAFVDSAPVLDKAWAAKSGLGWVGKNSNLITQKVGSFYFIAELIIDLELDYDTPTTDHCGSCTACLDACPTDAIVAPYVVDGSKCISYFTIELKDNLPQELKSKFDDWMFGCDICQDVCPWNRFSKPHSEPLLKANAAVLNFSKSDWEEITEDTFQKVFKNSAVKRTKYDGLKRNINFLKQ

SEQ ID NO: 81442 - protein, 331 aa, Sunxiuqinia dokdonensis
  misc_feature (1)..(331): tr|A0A0L8V8G8|A0A0L8V8G8_9BACT Epoxyqueuosine reductase OS=Sunxiuqinia dokdonensis OX=1409788 GN=queG PE=3 SV= 1
MNTRQKPGIFIFGKIGQNMEQQEQAAKIKEKAFELGFLDCGISKADFLSEEKSRLERWLNQELHGEMAYMARNVEMRLDPRLIFEGAKSVISVLLNYYPTEKQLADDAPVLSKYAYGKDYHFVLKDKLNELLKFIQNEIEPCNGRPFVDSAPVLDKAWAAKAGLGWVGKHTNLISVEHGSFFFIGELIVDLELPADNKTVRDHCGTCTRCIDACPTQAIVAPQVVDAQRCISYQTIELKGELDQSLQGKFEDRVFGCDICQDVCPWNLKSEPHREPDFEPHPKLMALTRNEWMEMDKPLFNELFRKSAVKRTKFEGLKRNLEFIDSASNSD

SEQ ID NO: 81443 - protein, 308 aa, Sunxiuqinia elliptica
  misc_feature (1)..(308): tr|A0A4R6H5F5|A0A4R6H5F5_9BACT Epoxyqueuosine reductase OS=Sunxiuqinia elliptica OX=655355 GN=queG PE=3 SV=1
MTRTKSEKIKAKALELGFLSCGISEADFLSDEKDALQKWLQQGMHGEMSYMEHNQEMRLDPRLIFEGARSVISVLLNYYPKKEQQDAEAPVLSKYAYGKDYHFVLKEKLNLLLKYIQEEIAPCNGRPFVDSAPVLDKAWAAKAGLGWIGKHSNLISVEHGSFFFIGELIVDLPLKPDQKTVRDHCGTCTRCIDACPTQAIVAPGIVDARRCISYQTIELRGELDDKLKDQFKNRVFGCDICQDVCPWNLKSEPHQEPDFEPHPQLLELTRKEWMDIDHALFNELFRKSAVKRTKYDGLKRNLRFLDDQ

SEQ ID NO: 81444 - protein, 308 aa, Sunxiuqinia elliptica
  misc_feature (1)..(308): tr|A0A1I2KH89|A0A1I2KH89_9BACT Epoxyqueuosine reductase OS=Sunxiuqinia elliptica OX=655355 GN=queG PE=3 SV=1
MTRTKSEKIKAKALELGFLSCGISEADFLSDEKDALQKWLQQGMHGEMSYMERNQEMRLDPRLIFEGARSVISVLLNYYPKKEQQDAEAPVLSKYAYGKDYHFVLKEKLNLLLKYIQEEIAPCNGRPFVDSAPVLDKAWAAKAGLGWIGKHSNLISVEHGSFFFIGELIVDLPLEPDQKTVRDHCGTCTRCIDACPTQAIVAPGVVDARRCISYQTIELRGELDDKLKDQFKNRVFGCDICQDVCPWNLKSEPHQEPDFEPHPQLLELTRKEWMEMDHALFNELFRKSAVKRTKYDGLKRNLRFLDDQ

SEQ ID NO: 81445 - protein, 379 aa, Superficieibacter electus
  misc_feature (1)..(379): tr|A0A2P5GID4|A0A2P5GID4_9ENTR Epoxyqueuosine reductase OS=Superficieibacter electus OX=2022662 GN=queG PE=3 S V=1
MSQPLDLNQLAQNIKQWGTELGFQQVGIADTDLSASEPKLQAWLDKQYHGEMEWMARHGMMRARPHELLPGTLRVISVRMNYLPANAAFARTLKNPSLGYVSRYALGRDYHKLLRNRLKKLGEKIQQQCASLNFRPFVDSAPLLERPLAEKAGLGWTGKHSLILSRDAGSFFFLGELLIDLPLPVDSPVEEGCGRCVACMTICPTGAIVEPYTVDARRCISYLTIELEGAIPEEFRPLMGNRIYGCDDCQLICPWNRYSQLTEEDDFSPRKSLHAPELIELFAWSEAWFLKVTEGSAIRRIGHLRWLRNIAVALGNAPWDEANIAALETRRGEHPLLDEHIAWAIAQQIEKRNACVVEVQLPKKQRLVRVIEKGLPRDA

SEQ ID NO: 81446 - protein, 361 aa, Sutterellaceae bacterium
  misc_feature (1)..(361): tr|A0A2E2R1S6|A0A2E2R1S6_9BURK Epoxyqueuosine reductase OS=Sutterellaceae bacterium OX=2026794 GN=queG PE=3 SV =1
MQAHQEQENWALLQRVAKAQGLGCMGVSDTHLQACEPHLQAWLNQGMHGEMAYMERHGLKRLNTDTLFPGAIRIVSLRVPYVPETTLNQPDAATFTEKTLSEIEARDTPYVSLYARGRDYHKVIRQRLKRFADAVNSEVAGFGFRVAVDSAPTAEVEIARKAGLGWRGKHTLLIHPDEGSLFFLGEVFTNMPLPLSGEFGKNHCGTCNSCMTACPTQAIVKPYQVDARLCISYLTIEHDSEIPLELRPLVGTRIYGCDDCQLACPWNKFAKPAQYADFNPRAEFEKPDWFDMMRWTEDEFLKRTEGSAIRRIGYKRFRRNLAVAAGNSVGVMGIREALLGMRKTADAFLMEHIDWALSRLD

SEQ ID NO: 81447 - protein, 361 aa, Sutterellaceae bacterium
  misc_feature (1)..(361): tr|A0A2D6RUL6|A0A2D6RUL6_9BURK Epoxyqueuosine reductase OS=Sutterellaceae bacterium OX=2026794 GN=queG PE=3 SV =1
MQAHQEQENWALLQRVAKTQGLGCMGVSDTHLQACEPHLQTWLNQGMHGEMAYMERHGLNRLNADTLFPGAIRIVSLRVPYVPETTLNQPDATTFTEKTLMEIEAHNKPYVSLYARGRDYHKVIRQRLKRFADAVNSEVGGFGFRVAVDSAPTAEVEIARKAGLGWRGKHTLLIHPEEGSLFFLGEVFTNMPLPLSGEFGKNHCGTCTSCITACPTRAIVKPYQVDARLCISYLTIEHDSEIPLELRPLVGTRIYGCDDCQLACPWNKFAKPAQYADFNPRAEFEKPDWFAMMRWTEQEFLRITEGSAIRRIGYKRFRRNLAVAAGNSVGVVGMREALLEMRSSADAFLMEHIDWALSRLD

SEQ ID NO: 81448 - protein, 351 aa, Swaminathania salitolerans
  misc_feature (1)..(351): tr|A0A511BS68|A0A511BS68_9PROT Epoxyqueuosine reductase OS=Swaminathania salitolerans OX=182838 GN=queG PE=3 S V=1
MSKSIEDRIADHARHLGFDAIGFCDASLPEEARTRLRQFVEDGRHGTMGWMEQRIEQRGDPRALWPDVRSVISLGLSYAPEADPAETLDRPDTGTISVYARHRDYHDVLKGMLKHLAQFVVRQDVGGEGTQVKVFVDTAPVLEKPLAEQARLGWQGKHTNLVSRDHGSWLLLGEIYTTLALTPSPPRAGSCGSCTRCLTACPTDAFPRPYALDARRCIAYLTIEHDGPIPVEFRKAMGNRIYGCDDCLNACPWNRFAATSRHMKLQPRPDLMAPELDDLARLDDAGFRSFFSGSPIKRIGRNRFVRNVLVALGNSGDATKLPLIASLMADENETVAEAAVWAWTQLAEPDR

SEQ ID NO: 81449 - protein, 351 aa, Swingsia samuiensis
  misc_feature (1)..(351): tr|A0A4Y6UMF5|A0A4Y6UMF5_9PROT Epoxyqueuosine reductase OS=Swingsia samuiensis OX=1293412 GN=queG PE=3 SV=1
MPSPSSHERSLEESITLHAQHLGFDAVGFCKADLPKEIEHGLRAFVAQEYHGTMSWMETRIEQRSHPQALWPEVKSVISLALSYAPAEEPDQTLKNPSCGNISVYARNRDYHDVIKGMLKQLAQFVVKQGGEQTQVKVFVDTAPVSERALAEQAHLGWQGKHTCLVSRHHGSWLLLGEIYTTLELTPSSPQGGKCGSCSRCLTACPTNAFIGPYRMDARRCISYLTIEHKGPIPHEFRTQIGNRIYGCDDCIMACPWNRFAQTASHLKLRARSDLIEPPLAELAQLNDQEFRKMFSGSPVKRIGRNRFIRNVLIAIGNSKDITLIPSAQRHLTDPDADIRETAQWALEQLS

SEQ ID NO: 81450 - protein, 387 aa, Symbiobacterium thermophilum
  misc_feature (1)..(387): tr|Q67MF6|Q67MF6_SYMTH Uncharacterized protein OS=Symbi obacterium thermophilum (strain T / IAM 14863) OX=29245 9 GN=STH2152 PE=4 SV=1
MPDLQRLKAEMKDRAREIGIDLVGVAPAEPFLRERQILEERIARGRGPNPYEHPVVEERVYPERLLPGVKAIIACGIAYYHPDAPRPPEDRVALRGWLSRYCRGRDYHQILKDRILALAAWLERRAPGHRHVAYVDTGPPLDRAVAERAGIGKFGKHTNLITREYGTWVFLGELLTTLPLPPDEPQPPACGACTLCIDACPTGALSEWRLEWDRCLSHITQMKGIIPAEYREVMGNRLFGCDDCQDVCPYNRRARPSRHPEFAPSPDLDGGEPDLLRLMAMTKGDFRRWFEPTAAGWRGKTTIQRNALIALGNSGDPAALPALTAALESESAILRAHAAWALGRLGRLAPDARDAARSALARRATCETDPAVRLELGAALESLGGGE

SEQ ID NO: 81451 - protein, 316 aa, Synechococcales bacterium
  misc_feature (1)..(316): tr|A0A354B0A5|A0A354B0A5_9CYAN Epoxyqueuosine reductase OS=Synechococcales bacterium UBA10510 OX=2055795 GN=qu eG PE=3 SV=1
MAEATSLEALASGLKRQAHSLGFDPVGIAAVAAGERMRLRSAALERWLQAGHQADMGWMADPRRRQIEALLPGCRSLLAVGLSYYVRAERQPGTLAVARYGWGRDYHRLIEGRLRRLGRWLEEQWPTARWRACVDSAPLMDKAWAEEAGLGWIGKHGNLIHRQRGSWLLLGHLLTSLELPPDRAASPLCGSCNRCIPACPTGAIVEPFVVDSRRCIAFHTIENRDPELPAAIAAGMGPWVAGCDICQEACPWNQQPLASSEDPDLQPRPWLLELRAEQAQLWSDAEWDERLRASALRRIKPWMWRRNLRAARPDPA

SEQ ID NO: 81452 - protein, 312 aa, Synechococcales bacterium
  misc_feature (1)..(312): tr|A0A3D0PBM8|A0A3D0PBM8_9CYAN tRNA epoxyqueuosine(34) reductase QueG (Fragment) OS=Synechococcales bacterium UBA8647 OX=2055797 GN=queG PE=4 SV=1
MVSSDTGECFSGATVRVPADLADALKQQALEQGFALAGIAAVPSGERIAMRTAALQRWLAAGHQADMAWMQDPRRQAIELLLPGVQSVLAVALNYYVDQQQTPASPKIARYGWGRDYHRVMDQRLRRLGRWLEEQQPSCRWRACVDSAPLMDKAWAEEAGLGWIGKNGNLISPSHGSWLLLGHLLTTASLPADQPARSLCGHCQRCLPACPTAAITEPFVVDSRRCIAFHTIENRDEQVPLPLHGWVAGCDVCQEVCPWNQHHAQSSADPAVQPREWILSSTANEMASWSDDTWSERLQASALRRIKPWMWR

SEQ ID NO: 81453 - protein, 317 aa, Synechococcus elongatus
  misc_feature (1)..(317): tr|Q31QV7|Q31QV7_SYNE7 Epoxyqueuosine reductase OS=Syne chococcus elongatus (strain PCC 7942) OX=1140 GN=queG P E=3 SV=1
MVATLAEQIKAEAIALGFDKVGIASVDPPDTEALAALDRWLAQGYQAEMDWMASDRRRDVRNLLPNAQSVICVALNYYSGDHPDPSPEVGKIARYAWGRDYHRVVEKRLKALARWLQTQQPDCECRWYVDSGPIADKVWAQRAGLGWIAKNSNVISREFGSWIFLGELVTTLALPADRPHTAHCGSCSRCLEACPTQAIVEPYVVDANRCIAYHTIENRAADLPAAIAQNLQGWVAGCDICQEVCPWNQRFAQITTLPDLQPRSELLAPALAELATLSEEAWDQQFQGSALRRIKPAMWRRNSRANLRQQSEGNRLS

SEQ ID NO: 81454 - protein, 317 aa, Synechococcus elongatus
  misc_feature (1)..(317): tr|A0A3G6WWW5|A0A3G6WWW5_SYNEL Epoxyqueuosine reductase OS=Synechococcus elongatus PCC 11801 OX=2219813 GN=que G PE=3 SV=1
MTPTLAEQIKAEAIALGFDKVGIASVDPPDTAALAALDRWLEKGYQAEMGWMASDRRRDVRNLLPSAQSVICVALNYYTGDHPESTPDVGKIARYAWGRDYHRVLEKRLKALARWLQTQQPGCECRWYVDSGPIADKVWAQRAGLGWIAKNSNVISREFGSWIFLGELVTDLALPADRPHTAHCGTCSRCLDACPTQAIVEPYVVDANRCIAYHTIENRATELPEAIAQNLHGWVAGCDICQEVCPWNQRFAQQTTLPELQPRPELLAPDLAKLAILSEEAWDQQFQGSALRRIKPAMWQRNSRANLAQQPEGNPLS

SEQ ID NO: 81455 - protein, 302 aa, Synechococcus lacustris
  misc_feature (1)..(302): tr|A0A2P7EH25|A0A2P7EH25_9SYNE tRNA epoxyqueuosine(34) reductase QueG OS=Synechococcus lacustris OX=2116544 GN =queG PE=4 SV=1
MPVNLADQLKQQALAQGFAVAGVASTSAGGRMPLRTAALERWLAAGYQADMAWMNNPKRLAVQQLLPGVRSLLAVGLNYYVDQQQGVGVARIARYGWGRDYHRLIEQRLKRLGRWLELQQPDSRWRVCVDTAPLLDKAWAEEAGIGWIGKNGNLISQSHGSWLLLGHLLTTCELTPDAPAIPLCGSCNDCLPACPTGAIAEPFVVDSRRCIAFHSIENRDDTLPLPLHGWVAGCDLCQEVCPWNKHHAKASTDPELQPRNWILQSKPQELKEWDDNQWDEALRSSALRRIKPQMWRRNLGCL

SEQ ID NO: 81456 - protein, 320 aa, Synechococcus lividus
  misc_feature (1)..(320): tr|A0A2D2Q4M3|A0A2D2Q4M3_SYNLI Epoxyqueuosine reductase OS=Synechococcus lividus PCC 6715 OX=1917166 GN=queG P E=3 SV=1
MICAATIKDYAYGLGVHRVGIVDLRTYCDDHPSGTAALRRWLAQGYHADMAWMSAPHRQNLQAVLPGAQSVIAVALNYFPGASPPQGDRPGKIARYAWGRDYHKVLGKRLKALGQWLKEQVPDVSYRWYVDTGPVQDKVWAQQAGIGWIGKHSNVISRQYGSWIALGELITTLALEGDRPHLNHCGTCTRCLEACPTGAIVEPYVVDANYCIAYHTIENRQPELPPAIVPKLEGWVAGCDICQEVCPWNQRFAQPTDIEDFAARSPLLDTSLEQLATLSDADWDHLTRGSALRRIKPAQWRRNAQALLANAQRETPSHPY

SEQ ID NO: 81457 - protein, 317 aa, Synechococcus sp.
  misc_feature (1)..(317): tr|A0A0H3K806|A0A0H3K806_SYNP6 Epoxyqueuosine reductase OS=Synechococcus sp. (strain ATCC 27144 / PCC 6301 / S AUG 1402/1) OX=269084 GN=queG PE=3 SV=1
MVATLAEQIKAEAIALGFDKVEIASVDPPDTEALAALDRWLAQGYQAEMDWMASDRRRDVRNLLPNAQSVICVALNYYSGDHPDPSPEVGKIARYAWGRDYHRVVEKRLKALARWLQTQQPDCECRWYVDSGPIADKVWAQRAGLGWIAKNSNVISREFGSWIFLGELVTTLALPADRPHTAHCGSCSRCLEACPTQAIVEPYVVDANRCIAYHTIENRAADLPAAIAQNLQGWVAGCDICQEVCPWNQRFAQITTLPDLQPRSELLAPALAELATLSEEAWDQQFQGSALRRIKPAMWRRNSRANLRQQSEGNRLS

SEQ ID NO: 81458 - protein, 322 aa, Synechococcus sp.
  misc_feature (1)..(322): tr|A0A316JPG5|A0A316JPG5_9SYNE Epoxyqueuosine reductase OS=Synechococcus sp. XM-24 OX=1979185 GN=queG PE=3 SV= 1
MGKRRGDQPKPQPLPAGELASALKAQALELGFNLVGIASARGSERIRLRNAALQRWLSAGHHGEMAWMQDPRRQAIEALLPGVRSVVAVGLNYYVDDQPAPGSLKVARYGWGRDYHRVIDGRLRALGRWLESNQPQSQWRACVDSTPLLDKAWAEEAGLGWIGKHSNLINRDWGSWLLIGHLLTDLELPDDEPATPNCGACRACLDACPTQAITEPFVVDARRCIAFHTIENRADQLPADIASNLNGWVAGCDICQDVCPWNQQALVSSTDPDLQPRPWWLDLQGADALGWSDGAWDEKLRASALRRIKPSMWRRNIAAALG

SEQ ID NO: 81459 - protein, 310 aa, Synechocystis sp.
  misc_feature (1)..(310): tr|A0A068MYU0|A0A068MYU0_SYNY4 Epoxyqueuosine reductase OS=Synechocystis sp. (strain PCC 6714) OX=1147 GN=queG PE=3 SV=1
MSQTPLEEHIKAQALAIGFHRVGIASVSGTESDLAVQRLENWLALGYNADMAWMANPKRQDIRELLPSAQSVIAVALNYYTSHRRSGDPVHGKISRYAWGRDYHRVLTKKLKALNFWLEQQVPDLLSRYYVDTGPIQDKAWAERAGLGWVGKNGNLISRDYGSWLFLGEIVTNLPLAGDRPHGHHCGTCTRCLEACPTQAIVKPFVVDSNKCIAYHTIENRAETLPTAIANNLQGWVAGCDICQDVCPWNERFAQVTDVEDFHPYPGNLNPDLQALAQINEMDWQKQFTASALRRIKPAMLRRNARANLQ
